United States Patent Application Publication US 2015/0052636 A1 - sequence listing, part 9

SEQ ID NO: 28449 - DNA, 815 bp, Medicago truncatula
  Intron number 1 from transcript Medtr1g025470.3 (locus Med tr1g025470) derived from phytozome v7.0 (chr-ID MtChr1; po s 6311150 to 6311964)
attttgatcaacaattggtaagtttgttttttcttcttctttcatttcatgctgtaaataaaaatggattttttttttttgacaaaagatgaaacccttttgaaagtgatgaaatttgggtgtttgttgcatgcatttcatttcatgttcatacatttattttttaattattttaacctacccacataatttttttgggaactttctatttttttttttcaagctgttgtcaattttttgtaagaaactttggtctttggataacctgttgcactgctggcacgttttttgataaggtttgagctttgtataatctgttaaaaaaattaatttttttaccttttataaaaatgtgtgtttttaaatgatgttgtagggtttgtgtaataagatgttgatctgcattgtgtttgtttttgtaacacttttaattttagattgaattgttaaagatgaactatgcatttacattttaggttattttcatgcatgtgtcattataaggtcatgtttgtgatttgttatgtggttgatcttgggttgttactatgttatgacaactatgtaagtcatatacttgatattatgaatggctgtttttctataggatcgttatgatctttgtaatgccagtgtcaacatgtcaatattcgtgctgttttcagtgtttgtgtgtgtctcttcataggttatgattgactttcaggcatacagtctactaagatggaaattctgcagctcaagctcattatactttattctgaaatagaagtttacattttgtttgcaggctcttcccaaaacattttcaaaca

SEQ ID NO: 28450 - DNA, 961 bp, Medicago truncatula
  Intron number 2 from transcript Medtr1g111710.1 (locus Med tr1g111710) derived from phytozome v7.0 (chr-ID MtChr1; po s 23871878 to 23872838)
aacacagctctgtattttaccaggtaggagttttttctttgtatggactgagatctcaaattgtccttgaacggttcttattcacacacaaaagcttttacttggtcatatatgtatttatttgtatttccacatttactctcaatcattattgtatattttcctcttgattagtgatttgacataaatattctctcgtcttagacgttaaaaaacacttgttgattatgatatattctaagtaaatgaaaatgaacttaagatatcatatacctttgctggacaaatgtaaatgaagttatattctatatgccttatgtatataggaaacgagatgataatgtttgtatcatgcttccctattatttttattttttgtatgatttcttttaatcattcagtactgcaatatgctcaaaagttaatatttgtattatgactcggttatttcatttaagtgatgagttagctgtgattcctgttgcctcccattttaaattataccaatgctgttttcttctatctaacttatgaagcaataactcataagtattagcttgcaaactcagagaaaagggaaattatatttttgaatattctctattctgaattccgaattctgaatatgtagattcatatcacaagaaattatacaactaccaaccttcactcacttaaacgctaacatacaccctctgtatctgactttaaaaataggtactacaaacagtgcttatttggcacttcaagaactaattctttagtgtttacgaggcactttcatgctctttagagcagctaacccaagctaaaactaaagctagtatacattactcatacaacgagtcatgtcatgattatttatccatggtcgtaatgcgcgtcagcttcagcttcaaatttttccggacatcctaaattttcttgctgtgtatgatttcttgctaggaaatttccattg

SEQ ID NO: 28451 - DNA, 541 bp, Medicago truncatula
  Intron number 1 from transcript Medtr1g133020.1 (locus Med tr1g133020) derived from phytozome v7.0 (chr-ID MtChr1; po s 29858764 to 29859304 reverse strand)
tcaatgtaatgctcctctttttctcttcttgattctatcgatttaactctcttcaatttcgacgagttctgttagattttactgtttctatggtgaagtgttttcttgcgatttttagtgctatggatgaaatttaatgtgcaattgctctatcgcatgctgaaattcggttgaattttgatgagagaaagtttctctgtcagtgtagtcttttgattacagattttccacggttcttgagtttgattaactaaaaaaattatatgaaattcgacttggatctgaatcagttcgatttttttgtttattgttttgaactgatttttgtgtaaattgaattgacctagaaagttatgtagaaagatattctggcattttatctgttcattattatagcttcactcctatcgctttgttttgcacactcctagtacagttcttttattcataagttgtgtggcgcggtttatgttggttagagtttagaaagttttgatgagaattatacaacaatgtttctgtttttcgtgaatccagggcg

SEQ ID NO: 28452 - DNA, 519 bp, Medicago truncatula
  Intron number 3 from transcript Medtr1g039660.1 (locus Med tr1g039660) derived from phytozome v7.0 (chr-ID MtChr1; po s 9084444 to 9084962 reverse strand)
caaacaaggtacaaaacaatgtctctcaccttccttagtataaagctttaatatttattattctttattagagtgttttcagatcattgttttgtttaaaattttattcattagaatgtcatgatacatttgatgcatgatgctttatgcattcaagctaggcatgcttacatgacttttgtggttaaaaatcaaagcctatgagctagcttcatgcacaaatttggaaaatctgcaactttatactcccattttgttattatagctttcttatatatgtattgatgttagaatagttactgaaaatgtcctttttaaatcttcttatgatgatattttcatgaaactttttagtatctaatatgagttcatttatagtttgtgttacttcaaatcaaaaaacattgttaatgctatttggaacatgtactaaccaaacttaccaatctaatttccttaatatgtgttggtttatatttgacagataggactacttccgtacataaaaaacaatctttt

SEQ ID NO: 28453 - DNA, 470 bp, Medicago truncatula
  Intron number 1 from transcript Medtr3g140450.1 (locus Med tr3g140450) derived from phytozome v7.0 (chr-ID MtChr3; po s 36336972 to 36337441 reverse strand)
ctatcaatacagttcccccttcgtcttcgagccaggtagtttttagaatctgttgttttgtttatcctaattattatcattactattttgtagcattagaaatttcaagtagtttgatttggtaattagggtctgtttggattgacttatttgagtttatcctctgatataagctcctgtgacactgtttgggagaacttatgaaaacagcttatgaatcagcttatttccgtaagctcttcacgatagcttatgaaaaccacttatagattatatgaaaatagcttgatttcattttatgttgcgttatagaaatagcttattcataagtggctgaacgcttatgctataagctgtttatcttaacaggcctcagggtgtgtgtgtgtgtactagttttatggttgtttgggaaatagctgttttttcttttcctgaatgtttggattttatattgcagggggctgtcc

SEQ ID NO: 28454 - DNA, 791 bp, Medicago truncatula
  Intron number 2 from transcript Medtr1g024360.1 (locus Med tr1g024360) derived from phytozome v7.0 (chr-ID MtChr1; po s 5774419 to 5775209)
taccgttgatctcaagaaaggagaagtcaccaaaggttaatttcaattcaatttgattcaattttatcatgaattatctaaagttgcattgttctgattacggctgtagtttctttaaggttgaaattgcaattttgattacaattatctatgattgcaattgtagttactgatgcattggctgtaattaactatagtttttcattatattaaggattgttaattaatcacaatttagacctatggatgagcaatgtgtgcatgaatgaattaggttggtaaagatagggatttggattgtgtgcagttcagatagtctgattttgatttatttaaaatctgaataaagaggttgaaatctggactgtccaatcttaatcagaagattgttgtctacaaacctggtgatttccatatcttctgtgattagattctttcgatttatttaggttatagattgttgtctacgtagctggagtggagactaatcagcaactgttataattttgctttgaattatgagatgcttgcttgctacaatcttttttctacaattatacttggtgtatgtttggttctgccgtgataaagaattgatttttgagtgaattgattatgactaaaagcgagtcgaaggtaaaatcatttgtgtttggatacgttcatgtagaattaattttggcccctctaaaagtggaccaaaacatgccatcaacttggttaattttaatgattgctttctcctacaatgccatccttaatgtattatttgggtgtgtatgtaggggcat

SEQ ID NO: 28455 - DNA, 727 bp, Medicago truncatula
  Intron number 2 from transcript Medtr2g104770.1 (locus Med tr2g104770) derived from phytozome v7.0 (chr-ID MtChr2; po s 24806561 to 24807287)
acgactatccaacacttattttacccaaaaacaatgtaatattttatttatctgctaatatactttgttgaatgcgttttctgtatttgaacaatcgtctaattttttttcctgtttttaactccttgtcgtaattatgatttgattgttattaactttgtgtctttgtcagtcaaaacaaacttaatttagttttgccggtgggtgatgtaaatgcaaatttacttatagcctcagccacttaatcataacattggccgataaatatcgcttttttcaccgtgtacaacttagcttttcgtcatcgacatacatttcagtagatcatagttcaattgttagttgaagactgtctatagccatctgctttcattttttgcacttatttggccatataattcctttactagtgttctgctagaaaggtgaatttgcactaggtgtatctgtaacaacaattccctttcttctttgttgttacagattttgcatcgactgtgacgttaaaaaatatatttggtttaggtgaaatctacattgtttgttaagatctcgagtatatttttgttatgtgttttacatttcagttttggcctaaagctagggccataatagtttacctataaatgtactcttacttttctgtatcttgaattattatattttcaataatgcaatcaccctttgttacctttaagataatagttattcaaagaaccaggtgaaa

SEQ ID NO: 28456 - DNA, 329 bp, Medicago truncatula
  Intron number 2 from transcript Medtr2g113830.1 (locus Med tr2g113830) derived from phytozome v7.0 (chr-ID MtChr2; po s 26760754 to 26761082 reverse strand)
atcttctccaatacattgctggtaggtaatgccaaatttattttcatattctctccttttagtgttatatactttgttattatcattaatcgataggtaaatatctctttattggcaaaggggattatgagaagcttcttcatcaatggaatggaaaccctatatgttttcaacgatgtttgtttctttgcaagttttaatatttatttttctgccacaatcttaaattggccaccatgttaacaaccgcttgtttcatggtatttcgtgttgcttaatgttgatttattttttagtttagttattggtactttgatatgcatttagga

SEQ ID NO: 28457 - DNA, 707 bp, Medicago truncatula
  Intron number 2 from transcript Medtr2g080630.1 (locus Med tr2g080630) derived from phytozome v7.0 (chr-ID MtChr2; po s 18631211 to 18631917)
tggtcttcgagttacttctatcaagattggtatttttcttatttatcttctttggatttgactctcacagcctctatatatacacttgtatgtacatatatacatggttttaaattgcggttacgttgtgtattgtggtaaaatgcagcagatgcggttgtgatgtcatggcagagacctcaaaatcttttatgttgctgttgcaattgtggctgcgggccgcagtataaaaccatgtatatgtgcatataaatcacatagatacacatatctgtgtaatacatgtacttatgtatatgtatgtatctatgaaattgccatttaaatggatgaataaccatcacttggctatgcgaggtttcatttgattggaactctcgaacaaaaagggggtttttctttgtttgatataaaattggattagtttgttcttattgagctggagtatttttctctgatgttttcttttctgattttgaggtatctttatcctctttctgtatgttcctatcaccttaatatattttttcttttatttaaggtaaaaatagcagttccaattttgtgctcagtatttcccttccattctataagaaagcaaaatgttatctttctattttatcattttatataataatataaagtacctattttttttaattttgtttaaatttatttatcatttgtagatccctacctgaacactg

SEQ ID NO: 28458 - DNA, 673 bp, Medicago truncatula
  Intron number 1 from transcript Medtr1g013440.1 (locus Med tr1g013440) derived from phytozome v7.0 (chr-ID MtChr1; po s 2470859 to 2471531)
cgttacatcatctccccaagcaaccgttattataggtaagatttattcaactgtcaataacaactcatttttcttatttcaaaatatcatattttcttctctctctcttctttttttttttttttttttttttgtaaaattaattgctttaagaaacatgaatttatgtcatgaatgaatgtactagagatggcgtttaaggatcaatatgtatattatggtcaatgttttttaaaacccatcagcatgcatgtttgtattagcggtgagtttgataaaagtcacggccgcgattttgataaaatgtatactttgcagttttaacaaaatcacggtgccataattttttcgaactcaccggccatcattttttgaaatattcgcaaaccacattatacgcatgttggattgacggtgagttttgtgaaatcacggtgacaccttgattttgccaaaatcatggtggcgcagattcgctataaataaattcaaacatgcattggggctataattacagctgcatcagttgtatttgaccgctattttctataattccaaagttgtgacatgatttcaatgcaactgtaaccgtaatttaaaatctaggtcaatatgaatgatgatatatggaatgtacaatgataatgatatgtaataattgatattgcagaca

SEQ ID NO: 28459 - DNA, 788 bp, Medicago truncatula
  Intron number 1 from transcript Medtr3g119750.1 (locus Med tr3g119750) derived from phytozome v7.0 (chr-ID MtChr3; po s 29958709 to 29959496)
cgggaaattctgctggaaccgtcacggcctattatgtatgttatcttctatttaaataataaaatgatatatagaggaacatggttttaaattgtgttccgcaaacgcaattgcaacctgaatataaaagattttgagatttacgtagcaacattgcaaatgcgaatgcaattccgatggaattccattttttcaccatacaaagattcatggtataaccgcaactacaatttaaaatcatgcatatgagtgcttctaatatggaaattttagaagagagttcatttaaaagtgaacacttgagataattggtacaagaggttattgcaaatggttataaaaggaatgaaacttgttataggaaatcaaaccttgaggtgcaccattaccaagaccatattagaagccctacataaatgattaaatatattttcttaaatctaattctaaccatatattttgatgttttatcatgcttggttaagttttttgaaaagtctaaagcctagattttagagaaagcaaaaaaaacggaggatattttttttcttctacattttttgtatgattgtatcatatcattttcttaatctattgttgaactactcattattgggccaccatgtagataacaaaatttatgccttaaatgttaattcttaggtatgatttgatttgtatatatacattattatttatatttatgtatttatggatgaagatgttgtgttgaggcaaagttattgatatgtatattcatgtgcagctaagctctgtaggagcacaac

SEQ ID NO: 28460 - DNA, 591 bp, Medicago truncatula
  Intron number 1 from transcript Medtr3g030760.1 (locus Med tr3g030760) derived from phytozome v7.0 (chr-ID MtChr3; po s 8412438 to 8413028 reverse strand)
ctctaactacattccttcatctcctattctctctggtaatcaaaaccttcttctttcttaattctcttcattttttttgctacaatttgatataatttttttgaatttttcatgtgggttttttgtgttgtgtgaaattacggtaacccttttttgtgaccattgtcagtgacccttttgagtgtttgttgaaattatgtagctacttttttttgtttgaagtgtgaatttttaattttttgtttggattttaagtaaccatgaattgttttgattctgattgtggataaaactgattaaaaatttaatctttttggtaatttaaggttaagtgtgaacttgtatttgtatttgtattggtttcatatttaattatttgatgatgatgatgttatttgttccatggttttgttgaattcatgtttaggtttatggtggtttatggagtttgaagttgattatatatattattgtttattcatttattttgatttttgtgagacgggtttcgattatttttaattattgtgaaatatttgtaccggttattatgtaggttacgtttcctctaaaaaaaaaaagatttttttt

SEQ ID NO: 28461 - DNA, 388 bp, Medicago truncatula
  Intron number 1 from transcript Medtr4g012580.1 (locus Med tr4g012580) derived from phytozome v7.0 (chr-ID MtChr4; po s 2158969 to 2159356 reverse strand)
aacgtgtgatgtgctttttcttaagggataaatgtatgatatattgtcattgtagtctttaaatgtgtcaaaattataaacacatctgcaaatatatatttttcttccacatatatttcttttattagtcatttaggtcgtcgaatccttaaattgttttttcgttgttacataaaactataacaaaaaagacactagagatgtgtttgcaattttaatacatctaaagactattgtaaccacgtttctcatattcaaaaatcaaaataattgtttgtttttattgtggatgtcgaatatgagaaactcttcctttatttaactcatgttagattatttgacatttttttaagaactgcaagtatcagactcctgaggtcgttgtaat

SEQ ID NO: 28462 - DNA, 664 bp, Medicago truncatula
  Intron number 2 from transcript Medtr3g083680.1 (locus Med tr3g083680) derived from phytozome v7.0 (chr-ID MtChr3; po s 19720532 to 19721195 reverse strand)
tttcccgccctgacaaaattagtgctgccgaggtttgttcatgtctaataatgttcatgattttttgtttttatgtaagccatgaatttgagtgatgaatttgaatatatttaactatcaaaatatattgttttgcacttccatcatcttgcgaggtttataacaagactatattaataacttactggggaagtagttggtagcttctttagaatctgtcacagtaatgaaaaagagttgctagttttgattgattctcatgaactgaaaattggtgttatgcggtggaggacttgttcttctgagcttaaaatgttttagaaactcacaattttcagataaattattgtaattgtgagtagaattaggtggactttttttttttttttttggagtaatatgtggacttgttcttgtaagcttaagatgttcgatgttgaatgaaaataatgtcagtgctgctaaaataaggaaatattagattgcttggacgtaactttatgcgcttaaatttaagttgcaactttttttgtcaaggccatttaaaagattgctgtgagatgatgaaagacaggaaccaaaccttttagaaatttgtctgcattaatgatttatttcataattgttggtgctgcagatatctgctatttgtcaagaagcagga

SEQ ID NO: 28463 - DNA, 568 bp, Medicago truncatula
  Intron number 2 from transcript Medtr2g045380.1 (locus Med tr2g045380) derived from phytozome v7.0 (chr-ID MtChr2; po s 12527322 to 12527889)
tttggatttcaaggatgtattttccatgtttatggacgagtagtttgtattattgattgtacgaacgtgcattgttgtataaaatattcattcgaagaatttatgttgtaaattttaatgtatctagtactaaagataatgcacatactaaactttctagatacgtttagtttagtgtgggcgttacaaaaattcaatttctatgtcaagatttatgttgttttattatttgagttttttgcgtttcaaaaatccttaattgattcatccttagtacaaaaaaccaaaatttttatctaagactatatttaaacgtcataaacatacttgtaaaaaattcaactcctagattgtgtttttggattatgcatatgtgaaactgtatgcattattaacattttagatttatcaataacaaaacaaggcaaaagtgtttgatagatcagttggtggagttagcttgttgttataatatgtattttggttcgtttctaatgtttgccataatatatttgttttcttccaattttcagtttacatcaacacgtggcggcctgacattggcctt

SEQ ID NO: 28464 - DNA, 435 bp, Medicago truncatula
  Intron number 1 from transcript Medtr2g117180.1 (locus Med tr2g117180) derived from phytozome v7.0 (chr-ID MtChr2; po s 27485068 to 27485502)
ggactaaacaaaagagccttgcagaaatttttcaggtgccttgcttctttcgcagtattttgcatttgtttccttttccctggattttatgtcacttttgttttcagtttgatcttttcttccactgtaaaatcttttgaccacatgaaatgttttgaaacctacaagaccactaacaaactgaataaatttaattgatttggctgtgtttgcacttcccaagaatcctatattttggcacacttgtaaacatcacagttttaataaagcttatgtgcatatgtcgataatggtactgcagctcttatgtgactattgttgaattcatatctttaagcctcacatctgttcagcttaatctttatttctctttcagtttgatctttccagaccctttttcttctagcgatcatctataacaagtgattgtgcagg

SEQ ID NO: 28465 - DNA, 602 bp, Medicago truncatula
  Intron number 1 from transcript Medtr2g118390.1 (locus Med tr2g118390) derived from phytozome v7.0 (chr-ID MtChr2; po s 28175135 to 28175736 reverse strand)
ccaagtaattcattaccaccttaattttctcttgttttttttaatcatgtcataaaattaatcatgtttcaactgagtgaatttttgtgatagatatgatattcaatattcatacatgagaaactaataggtcatccaaggtatgttgtcttaacttttaatctacttcacaattaattctaaaatatgttaatttcaagtagcatgtatgagttagtaggaattgggagcttatttttaaagtagcttatgtggatgaatgaaagataaaatagtctaattattctcatacaagttataaactgttttcataagttattctggagagcttatgaaaataagctgaagttgaagacaacttatacacatatcataaactcaaataaggtaatccacacatgccttcaaagagtctcacaaatgctaatactagtagataaactcaaataaatcggtccaaagatgctcttagacaattgtttatctgatgaattttgtattaactttcctataactgttacttattatgttcatttctccttttgtttcacctgtatgtacaaacaggacaagacagctttcatattttgcgttgaagatag

SEQ ID NO: 28466 - DNA, 856 bp, Medicago truncatula
  Intron number 1 from transcript Medtr3g098410.1 (locus Med tr3g098410) derived from phytozome v7.0 (chr-ID MtChr3; po s 23819070 to 23819925 reverse strand)
aaggaatttctgagtaagtgtaatcaatccctttactttactttagcatacaagctcgtttgtgtattttactttttttaatttttttttgttatgcttctttgctgtaatagtaataatttagtatatgtcacatgctggtagggaaattccatatttgaatcatgaatgagagtgggataggattagactgagtttaatgcttaggtagttggggaatttatgactgggaagactagttcatttcaagaatattgctaggtgttttttttttggatatgaaaacaaaataggaaacactttgctgttgctatctctttcaatatgctgggctggaatgaagattttctttaaaagcaggatgcgagaaatattctcatttctgctttactaacatttattctctcgaataatcattttcaaaattaaagtgaattggctagttgaatctgacagtcaatgcatgttgcactaattactcaaaaatcactagtttgtatcctgtaacagattttttttttttgggtagaagggggcgaggtttctcagacatagcagtatgtaggataacattgtcaactcttttcatgattttgccttttaatgtagtttactttttgactacaataggatcacaagggttttcgaactctccaagtgggcgggagctttatagctccaagttgacccacccctatttgcatttgagtttctttttcttttggatttttttgtatgaagctcaagatcaaagcttttctcagtgtgatgattgtactgattatttagtcgcctattttatgctataagtgataactactaccttgttattcatatcttctgaataactgcagtg

SEQ ID NO: 28467 - DNA, 676 bp, Medicago truncatula
  Intron number 1 from transcript Medtr2g010570.1 (locus Med tr2g010570) derived from phytozome v7.0 (chr-ID MtChr2; po s 2597457 to 2598132)
tccacacccacctactgctctagtcgtctttcttggtttggttccctttcatctgctatgaaacctctattttatcgaccttttaatttttttccttttcttcatttagatatctttccatttagggggaaaaggattgattgttgttgttgatgtagatatcttgccctctgaatatatagcttcaattttgagtttttattttttaaatttgagttgtcataacttaaatatgtgtaatataaattttaagtgtagcagtcatatcattatctgctatccggctagagcagttttggttttgccttacacacgttgcaatttgggattcataactataggctatatataagtaggatggagagaaaaaggaaagaaagaattacgaaaacttctctcatttggttaactggacagttgagaagaaaaacaaaattattgtgcaaagactattatgttcttttaaagtaatggcaagggcttaactgggtcaatttgtcatttcaaacacaatgtaattgaagcaccccatgtcgaatatgagacttcttttcttgaatatttgtgacattaaaataaccatgatcgtatatatgctgacctcatagtttatctatattaatggaactgaatttcttttggtgctttctaccagcaaatcgagctgtcgaagtaa

SEQ ID NO: 28468 - DNA, 623 bp, Medicago truncatula
  Intron number 4 from transcript Medtr2g085380.1 (locus Med tr2g085380) derived from phytozome v7.0 (chr-ID MtChr2; po s 19217215 to 19217837)
gattttcagtatcctgtaagtttcctgagctggtttatgttttttttgtcatgaataattgtgttattatgggttcagtctttctatgtggttgacttattgcatatctggtcaattcagtctatgaatgtgatgcttgtataaatacatgaatctgataattttcattgcattaggcaagtctttagaatcatattccatcatttcatgttgttgggagaaacatgcatgtgtctcaaagaatcatattctttagacatatatcttaagaaagggttgaatagaaaataaaacagtattgatgatgtataatgttttttgagcacattttgaattctaagttctaacacagatttgggattgctaattttggcttaaaaataacatgttaataaaagtcttcattcatattgcatcacacatgaaaatggttttactattttaaaatactatttacctgacatcatctctgatgtcctgtaacattcaaggaaaaaatgtggctagtaaatatgatttcgtgaaataataagaattcattatacaaacatatacttgatctttcatatgttctacaacgtatatatgtaaatatctaaatttttgttggttttatttaggtc

SEQ ID NO: 28469 - DNA, 968 bp, Medicago truncatula
  Intron number 4 from transcript Medtr2g046720.1 (locus Med tr2g046720) derived from phytozome v7.0 (chr-ID MtChr2; po s 13127974 to 13128941)
gctcgcctcgcgagcagaccaactcgccgtggcgagtaacccagatcaaaactggattttcaaattgttgttataagatgttttggggatggtttagtgtgcctaaacgattttaatgatgactggagcaagttttaagttaaaaagatgaatagagagcttagaattgaggtttgagtgagaaaaatgtcaaaactcctgagagcacctatttttcactcgcctcgagttcgccttgaactcgccatggcgagtaaccagttttgtgaactcgccatagcgagcagatgtgctcgcgaggcgagctacccagtttttgagtgctgagattgcttgcatgaatggtagtgattgatgttgttgttttgagcagagttgtattaaattgtgcattattctggattgttggactgctgtttgttgatgttgctgatggctgtgatgtatgatttaattattgaaaccatacatgttgtatagtggagtcatatggagtatgtatgcatggtcaagttgtatgtagatatacacaagtaggtccattgcatatgcataaacagcggagaggactcatgtcctagagcactagttgttcacagcggtgagggtttcggtcctgatgaatgctttaaccattcaaaagcggtgagggcttcggtgtcctgtctggtaccacatgcatatctgcatttattgaggagtctagtgatgtcgtcatgtcatgcatgagtcttcattgttgggtgtggttattatattgatgagttgttgatgttgtttgatgagtatatatttatacatacacattatgataaaatgatttgatgttatagggtgttagattcagttgatgattttatcatctatattttattgttgtgaatctcaccccttctgcttgaaaatgttgcccttcctatgggtaacttgcaggtgatcctgagtagtcggtggtggctcaagagtcg

SEQ ID NO: 28470 - DNA, 1023 bp, Medicago truncatula
  Intron number 5 from transcript Medtr2g046720.1 (locus Med tr2g046720) derived from phytozome v7.0 (chr-ID MtChr2; po s 13128932 to 13129954)
tcaagagtcgtatctagggctttgatacgtgggatgtgaattattatatattttattgttgattttccttcctatgtatcaatttctggaacttgatgatgtggccccttgttgattgtttaggcttaatgccaagatattattatggagaatttaatcgttgttgttgttatttgaaatgcaaacattccgctgcatgatttttgaagttatgaaagatgttgaattaaatagttttattttctatttaaagaattttttgaaacgtagtgtagcatgtccgtatgtggaattactctgatgttgaattatttgttatttaattacttttgggtaacggggtgttacaatttcgatgtccggtttacggaaaaccgttggaacgagttttcaactaccaaataaccggcggccaaatgacctttaaaaggccgttgaaaatttgaatttttcgaagataatgttttttattcttttagtgaataataaataaaaatacaataagagattaaactttcaactaatttatgtcaaacttgtgactaaacaataatattcttataaaatcaaataggtaatattttcctttggatttcatttgtatacatggatgttgtacctctagaaaaaaatggatcttgtaaagcttttgtacacttatattgaatcatatcattttatgataccactttttaaggttgatttccaaaaatatttatttgacctcatttgattgatctagtgtaaaaaagttacacagtcagtacataaaaattaatctctatttcttttttacataatcaaatacctaacatgaaaatagctaggttgacaggttgtgacccttatagtaataacagttaataattaactaattataaaaatgtatcaagaagctagatgacaataaaattttctaataatagaagagaatgtaacgaattcagttaaagaattacaagctttttccatgaaattttaagaaaaggaaataaaacacagaatatcaagatttttgaggca

SEQ ID NO: 28471 - DNA, 542 bp, Medicago truncatula
  Intron number 6 from transcript Medtr2g046720.1 (locus Med tr2g046720) derived from phytozome v7.0 (chr-ID MtChr2; po s 13130180 to 13130721)
ccttaaatcaacctcaattcgttgctgagcttcttgtaagtgcatggttttcttttcctttttttttatttataatgcacattaacatatgtagaatgcgagcttggacgtgataatcaggttgttatcttatgataagaaggtcgcgtgctcaaatcttgaaaacaatatctttgtttgtaaaagaagaaaaaatgttacgtatttgaataattcatatatagtttgtgtctttgtttttgagagccatttggtcttcgttgtttggtattcgaaagccggttccggtggcctttcccctaaaaacctttgaaaacctccgagggaccgtggctgccggaacctagtgccgaggctgccaaacaattataatggtcgtcggaaaagtttaaaaatacataaaattgtatataacgggaatacataattatgtattaattataattttgaattcctatatacattgagaaatttttccttctaaatgcaagttcttttttttttcaggctgctttcgtgataaatatatatattcccctaaa

SEQ ID NO: 28472 - DNA, 830 bp, Medicago truncatula
  Intron number 1 from transcript Medtr1g099650.1 (locus Med tr1g099650) derived from phytozome v7.0 (chr-ID MtChr1; po s 20450350 to 20451179)
tcttaagaagaaaaggaacctaccaggaaatccaggtaattcactttttattcataaacaaccatctttagttaagttgactcgttttctttaatttttcaccttttttttgcatattgattcttgtatttcttcccttgcttttattagttttgcaagattttatttattgaaatatgataatgaaatcaaagtttgaaccgtacataattattgttattcatggcttgcacataccaattcaaaacatcatattatatgacaataattatggtatatatttcatttgttgtatttcttcaatcctctcattggttaattctaaaaatagaaaaaatagtgatgcatagtttgctactaaaatatgttccaaatgatctttgtttcaaaaaattatatctcacaaaaaggccaatatcaggtaaaaaaaatagacaatggcaagcttaattaattaagtgcatttaattaagacatttctataggctccatgaaattaaaggataagccttgatctggtaaaaaaaagaagcatgcttaattattcctttaagtgaagacaaagatctatatagtggggatatgtttaattaagtcagaatatatataattgatatagctaaaataaatgatgaattattggtgtgtgtaagtaagtagctaggagaagaagaaactcaattattgtcttgccaataattgttgtacactgttgacttttgttgactcctattttttcttttttctttgtttcacacatagtacatattaacgtgtttaatatgtttggcacagatccaagtgctgaagtgatagcactatcaccaaca

SEQ ID NO: 28473 - DNA, 693 bp, Medicago truncatula
  Intron number 1 from transcript Medtr2g130270.1 (locus Med tr2g130270) derived from phytozome v7.0 (chr-ID MtChr2; po s 31746823 to 31747515 reverse strand)
tctttccgtctccaccacaagaatcacattcacaagtaagttcatccaattctccttcaaactctttcatttgatttattatatttatcgctaaattaatctcaattcttcgttttctgcgatttttcatttcctttagttttaactctgagaaatatgtatttgagtacttgctttcaaatgggtatgtgtaagttcttaactttttaggtttcatttcaatttctgcactgtatttttattgtcactgttacttgatcaaacagcgtattattcgaatttcatgatagagaatggaacctgcgactttgagccatgaaatttcatgaaaacgattcgtttttagtaatctgttttattttgtacgcaaaatttaaagaaaattgaaattattaggtgaacttgaaattttatatgttgctgttaggttagaaaatgaaattgagaaatcaacaaaaatgccactgaaattgtaaattttagtcacacagattaatttttttttttttttggtagataaacgaaatatcaaagccattataaactcacacaaggtaccggggttcggtcatggcatccggcctaacaatttggagataactcttttttctttgtttcattctttgaattagaaaatgatttagctgttttctgtttgcaggttaacataatatttagtgttgtggtggcacc

SEQ ID NO: 28474 - DNA, 643 bp, Medicago truncatula
  Intron number 1 from transcript Medtr3g077080.1 (locus Med tr3g077080) derived from phytozome v7.0 (chr-ID MtChr3; po s 18104190 to 18104832 reverse strand)
aaccttgcaaaaaaaaatgttttatttttttatttatttttatgttttgagtatgtgttgtttagattgttgaatttttataacatttttttctattttgagatcaaaatttgaaatggtagtaatggattttaattggaaaaatggcttggttttcttgtatttgattttatttcaagtatacccaatttctattttgcattaaaaatacttccattttgagaaaaacctagtggtagtgtgtagaatgtttttctctataaaaggatgtttctgtgtcttgttatgttgtcacttgcctatatactaggttcatagactagggtttattttggttgaagatcataactttttgttttacacggtttgttgaattgaaaatctttttctagttgtttgtattttttggtcaatttttatatttggtgtttggattcaccgtgagtttgactaaatcactgtgacaccgtgattttgttgaagcttcgaagtgtaatttttgtcaaaaccacagtggcatatggtgattctgtcaaactcgctgtcaatccagacacgttgttgtgtaatttctctaagattattttctcatctgtctcacttgtgtttgtttttgggaccatgtgcagtaacaagaaaaagt

SEQ ID NO: 28475 - DNA, 414 bp, Medicago truncatula
  Intron number 2 from transcript Medtr1g083360.3 (locus Med tr1g083360) derived from phytozome v7.0 (chr-ID MtChr1; po s 16361559 to 16361972)
ttgatagagcttttccaaagccaatactttcagtggtgagttcattacaattttgtgtcatattcttcttgtgctttcatttcaatcatgtttcatgtctttttcaagtttcaaaactattaattatttccaatatgttgaaatttaatccatgtcatctcttctttgcaacagtagttttttttatgactatgttttttttgctaaaggaaaatgctaacacatcgttcaacttattaatttttgtgttgtcattgctcttactttgaatgtttgagcataatatacaatataaaatctataatatataaattggtaaatagaaaactataatatataatattacgacgttaattactatgtttatttatataatatactattgtgcatgacgaagtgcagataaggagagta

SEQ ID NO: 28476 - DNA, 650 bp, Medicago truncatula
  Intron number 3 from transcript Medtr1g083360.3 (locus Med tr1g083360) derived from phytozome v7.0 (chr-ID MtChr1; po s 16362019 to 16362668)
ctatattctttgcttggttactcggtccctccgaggtaatatgctgttaacatatttgatacagttgattttgacatgtttaaatatttttgagttgaactgatttggttatagaactgatacatgaaccttaaaatgatttagggtatgttagaattcatacatatttagatatttttaacttttttttttcttcaaacctttcgttctattcctctccaaactcgcaaacaaaatcttaaaacatttgttagcaagacaaaattagctaataatttgtttgtggtgattaatccggtgactatatgcctttcaatgttgaccttttttactcaataaagttaaaggacctaccatattccaagagagccctgtcccaattttttactaaagaaaagagattcatttcaaggaatagaaatttctttgttatatttatgaggcaatttattttctgtaaactttaaaatactaattgattcaatacaatgtttttatatttatttcgctacaagtgttctaaaacacatgttaacttttttgttttactttttaatctttcattattgatgaatctaaaacataaatctcattaattaattttactatgcaaaggtaagagagtcagagatcaacggaagaagagaaaa

SEQ ID NO: 28477 - DNA, 956 bp, Medicago truncatula
  Intron number 2 from transcript Medtr2g125790.2 (locus Med tr2g125790) derived from phytozome v7.0 (chr-ID MtChr2; po s 30377256 to 30378211 reverse strand)
tagttctcttgcagttaaagttttaaaacaatgtaagtaaatgataattttcatgcttcatccttgctacctgagaaattatatcctctgaatctgaactagttttttcatggtagagctgttacattttcatgtattctgaaattttgtgcttatgtgatttgaaagtgtagactcagagtggaggagatagtgttacttacatttctacaaacattatggtgattaatttgttgaatgtagctgatgggtttattgactagatggggagaattagaaataacgacgttagatagagttgggggtaacccctatagtagaaaagatggtagaaactagacataggtggtttcggcatgtagagagaagacttgtggattctgtaataaggagtatagatgagatggaggggagtcagatcactagaggtaggggtagacctagaaaaactatatgagaaactattaagaaggatctagagataaatgagttggagaaaaacatggtttttgatagaacactatggcgttgtttaattcatgtagccgaccccacttagtgggataaggcttggttgttgttgttgttcttgttgttgtagctgatgtcatggtagctactgtgtttctgtaatttcatgttttggtttaattatgttgaatggataaaaatgtcacccttgccttttgattttatcctcttcaacggaaaaggaaactaaaacaattttaaagggttagtacataggtggctggcctgcaatttaattataatgatctatatcataacctgcgcgaacttatataggatgcggcctttaagtttcaaatgtgttcttccaattgtttaatttacttatagcctacagaaatttactgtgaatatgacttagctttactggatgatgaatggacgattttatatgttgcaatttttcatatttgttgcttttgcag

SEQ ID NO: 28478 - DNA, 713 bp, Medicago truncatula
  Intron number 1 from transcript Medtr1g020790.1 (locus Med tr1g020790) derived from phytozome v7.0 (chr-ID MtChr1; po s 4668706 to 4669418)
acaaagattcatcaacttgttttcaaattcctcaggtatattataattagtttggatcctaagagatagttttttttttcttttctattttcttgttgtcgttgctctctatactccaatactggttctattacttgttgtcgttgttgtctatagtagttttattacttgttgcactgaccttctttctattttctagttgtcgttgctatcaatttgattattttttctgttttgttcttttttattggctgcaccgttgtggtatttacttgttttatttttctttctgtttacttgagaaataagctcagtaggttccatgattttctttgtttggaatgcttatcagaaagagtgttagtgttatattaatgtaatgtagaagatctctacacttgtttttagtacttgatagtattccatctatttatagtcgacaaagaggaataagaatgtaggtactataatagggagtgacttcataattgccaataattaccatctgacacaggtatgggaccacttcagcctgaagaggagccagtttatgtagttagttttttagaattaataatagaaatattacttagtaactctctgttttcttcttttttgggaccatttttgttggctgcagagttgtgttcattttaggaatccacactctttgtttattctttgtttgactttttattgttaattctaggaat

SEQ ID NO: 28479 - DNA, 404 bp, Medicago truncatula
  Intron number 3 from transcript Medtr3g105220.2 (locus Med tr3g105220) derived from phytozome v7.0 (chr-ID MtChr3; po s 26273755 to 26274158)
cattagtaggtatgcgcatgttctttcccataaactaagaatttattcagaattgaaattttttggactacatctaaagagtgtggcagttagtccggggtaacatataaccactaactacaaatgccagtttatatgtgaagttggctagtttacttctcacaaatgttttaagagcttatatcgtgtttgaaattttattttgattctgaagcttaaatgaaagttctaattccatgtaacatcatgcacgtgactggaagtcttcaaagatttttttagtgaaaacctggtttcccccactttattgttaaccattcgttcattttattttcctgatctgacaaagcgcaatcattattgttgcagagtgggagaaaacattgcagttaattggtgtattt

SEQ ID NO: 28480 - DNA, 212 bp, Medicago truncatula; identical to SEQ ID NO: 28315
  Intron number 1 from transcript Medtr1g042360.1 (locus Med tr1g042360) derived from phytozome v7.0 (chr-ID MtChr1; po s 9670120 to 9670331 reverse strand)

SEQ ID NO: 28481 - DNA, 545 bp, Medicago truncatula
  Intron number 1 from transcript Medtr1g098780.1 (locus Med tr1g098780) derived from phytozome v7.0 (chr-ID MtChr1; po s 20025598 to 20026142 reverse strand)
attcaaaggtaacattaacagtaactaactaactaactaacttcattcttcatactatactatgtttctgttggattagatttattgttttttgtttcatacaaatttaaggaaccgtacgatgtttatttctttcctttttcgcccttgatttttttgttcttttgttagtctttttctttggttgtttggttggtatgataaaataatcgactttgtttttgtaatttcttattaataaaataataatcactgttgtttatagatttcattagtgtaataaatagttttgggcttttcattttttaatatttttatggattgatgtctgatttaatagtttttttatgttggttggttcattttcctgtttctatcttagactttgtcaatgtttagggtttggttttcttaatttctctaaattaatgggtttggtttaaactttcattttggatataaaaatgacaccttttgtagctagtttctgattgtaacagattttttgttaatttgaataaataaatagataaaatttgatgcag

SEQ ID NO: 28482 - DNA, 981 bp, Medicago truncatula
  Intron number 1 from transcript Medtr2g018430.1 (locus Med tr2g018430) derived from phytozome v7.0 (chr-ID MtChr2; po s 4856094 to 4857074)
ttgcatcacagacagaccgtggagattgtaagttgttactaagttcaattcaacttttgtcatgttttctgtgtttggagattgatatattcatcacatttattgtttatatcttatcatatctcaacaataaagaaaggaaatattgtgcttttccagcccctgtacttcttagtatagtagtcggacgatatctaggatggagaagtgtctcatatgatctacgggggaccaaagttgatgatacttttattcctcctcgtgacagagaaggtgatccaattaatgttttaatcggcgccagttcagcaaaaaacaagaaaaataaatattagcgcctcaaaactcaactcagtttatgttcattttctacggataaagtccgtgtctcaatcttaagacgtggaggaccttcaacttctacttataaaacgtggaggcgttgattgtcatcggaattttgagcgattttctagcatcagtccatcatagatcacatgagacactcttgcaccctaagtttgggaagtctttgtggattgaagatatattctgccattaaaattcaaaaatagaactttgtttgctagcaaagttttagaagttaatttatttatatcattgactatgtacagacctatagtttttatactagaatcttctatgttgctaataatgttcattaggaaatgcttaggggtgagagaaatggattgttagtttgtttattgtgtttcgcgcagcacttcattaggcggtttgacatggctgaattaatcattaaaaagttaaaagcaggttttactaaaatagatgaacatcatctcttgtaataggttttgtttttgttacttacatatttattttcttgaaatatcatcatgaatcgagagtttagtctctttatgacaaaaaaagtttcctaatagaagttgttattctgcagttactgctctttcttctctcacacaatcctggaac

SEQ ID NO: 28483 - DNA, 668 bp, Medicago truncatula
  Intron number 1 from transcript Medtr3g005660.1 (locus Med tr3g005660) derived from phytozome v7.0 (chr-ID MtChr3; po s 376833 to 377500)
agtagcgtttctggtaattttcgttttttcttcttcttcttcttttttttcttaattttctatgaatattattagggtaaacaatcattgtgtctctgtgtcgctttttgtttgtaatgttattgattaaattgacgaacaacacatttgaaggaccaaagtgactaactaaagcgacacgtgtctgcaatttcgatacattcagtgactataatgacaccacattacacattcagatatcaaaatggttgtgctgcatgtaccttaaaatcgctattatgacaatttgtgagtgaaatcattgagtctattgatcacgggaagagatttggaataaggatagaaattagggtttattgtttaaggttaattttttgtaacccttgtatctcttagtaatataaactcattgatattgaattggagagacctctcttcttgagacgtaggtcattgttgggtcgaactcgataaataaatatcgatgcgttttttcttcttctcctttatctatttttattatcggtgtttgtttgattaatttagtttgattgctgctaattttgctctacacatcaaagtattggtgtgagttttaatcgaattcacagcaggttgtttacttatattattattgacaagctgactctattaatttttaaggaaac

SEQ ID NO: 28484 - DNA, 943 bp, Medicago truncatula
  Intron number 1 from transcript Medtr3g147390.1 (locus Med tr3g147390) derived from phytozome v7.0 (chr-ID MtChr3; po s 38133285 to 38134227 reverse strand)
gaagaggcgatttcatcatctctacttcagtttatgtatgttttaattcttccattgattatgctatttgtgaactcaattatgagtagctaaatctcttagagattaggtctgagatgattccttgtaaccctaattgatccatggtgctgtgaaactctatttattattaatgacaatctagtttttattcaattcaattgttattaatgttttttatatcctggtcaaatataaacatgatttagtgagaatgaatgactactgaccctagctttcgacttagacctaattgaattgttctaataaacatggttagtctaggaaaggataaccgtttgttactgatattaggttaacgtgctttaaaccttcgagaattattagaccacctatggaattaggggctgtagtttgagaagagggtcctaactcaagggattgattagagctattttgttaactatcgtggaactagaaaatcattaatacgaataggtgcagtataccagttaggggaacatagatgattcgaaagacctgatctcatctctctcattgtcttttccaaaactatcttattttctgttatttactttttatgcacaccaacctactgcctcgggcactaaaagaaatttacacatgctagatattaatgttattgctaaattgagattaacatagtcctcgtggatacgaacttaattttattacttcgatgcatttttagtacacttgccaaacctctatcaagtttttggcgccgctgccgaggactgttaaatcatttcaatttggtaatttcgtttttatttaggatttctatcatttatatttttgcatatataaaaaaattgaaaaaaaataatttatgatttgatctcttcatgtttatctcattgtactttgctgctaaaaagtttatccaagttttgcagct

SEQ ID NO: 28485 - DNA, 759 bp, Medicago truncatula
  Intron number 1 from transcript Medtr3g167090.1 (locus Med tr3g167090) derived from phytozome v7.0 (chr-ID MtChr3; po s 43920528 to 43921286 reverse strand)
tagaggaagtcacacacaacattggcaaacaagaggtaatgctttgtgttgtttgatctgtatctatttcacaattaccaactcccattatattgaattaattaattaatattcacagtcatttcgatgtcgttttttacaagcaaaagagaatatattaaatctcggtgggcataacttagttgatagaaacaatgcataacaacatgttagggttggggtttgaacttcgaatttaccacttattcaccttaaagggtgagactctagccacttggctaatcgacaaaaataaagagaatattttcaatagataagcactagtacttcaatccaatagaagaaaaagcaatactaagggcatgttttgattagcttttagttgaactatctaaaggcataagcacctataaggatgtttggtaaatgttatgaaagcagcttatgacaaatctataagaatgttttccatacaactattactttgatatgttctaatggattaatttgagagagtatacaaagtatgagagagtataagcatgtttgagtcaattaaaaaaaatctcatctaagttcaaggtgtgttacaccaccaccatgtcagagtaaagtcactacgatggattccttctttaatagatctattttcaatcaataatataatttattcttctttgttgtattgttatgcttactatttgtgttttaacatattctatagatattgaacctcctcaagcataccttaacctctca

SEQ ID NO: 28486 - DNA, 951 bp, Medicago truncatula
  Intron number 1 from transcript Medtr3g144540.1 (locus Med tr3g144540) derived from phytozome v7.0 (chr-ID MtChr3; po s 37497678 to 37498628)
aacgccgcgtcgtttagttccttcacacatcacaggtttgtttctccgattcgtgaagttttttcatgaattcgtttatgattttgtatatcatatgctagactttttgtgaatttgggatttgtatggtttcttaattcttagggatcgtggatctgtgttttggattgtgttactttttggtcaagttattaattcagctttgataattggtattgtaacttcgtgattttggtttaatttgaagttcaaatctgcaattgtttgttttgacttgatggatctgatgagaattgtgctattctggtttcattttgctgattatcgcgttttattcattggatttttatttgattgtagttaattgcagtttagtttatacatcgttaacttcaatgttagtttttgagatgttttgaccaaaaaaagtgaagaattctctgttaagaaatttgcaaacacttccaggcccctcttttgttaataatttaatttaatgtacctatttgaccaaccaaaaaagacatttcagaactaatttgactatgtaaaaaaggtttgaagaccaacatgactaataaatgagacgcttgtggatgtgtttgcaattttgatacatttagggaccatagtgacaggacctcgcacattcaaacagttttttactcatttcttgttgtgttcatttgttcacaatgttcttgtatatatatatgtttggatataaattgatgcagtctaattgtttatggtacctttttttacatccgtttacaatcaagacaaaaatctctgttgttttagatccttgttttttccaaaaaaataaaaataaaattgcttgtggagtgggttggggattttgcttttatagaaatatgcgagcttcttttgatgatttattttttccatacaggtaaagccgtgcgcttttgaacttgtggtgcagac

SEQ ID NO: 28487 - DNA, 763 bp, Medicago truncatula
  Intron number 1 from transcript Medtr2g088100.1 (locus Med tr2g088100) derived from phytozome v7.0 (chr-ID MtChr2; po s 19850867 to 19851629)
gcaaagaaacctcgtttcccttaatcttcaggtaaagtaaatttgtgttgctttcatttagcaatgtcgtacatggttgttatgatttttcttttttgaatttattatgttcgatgattttacttctatatcatgaattactatgcaattcggattgcaattgattgctctgtgcgttgcatatattgcaatcttttttagtcagaactaattaggcaaaagttcttttgtattaagatatttattttattttatgaatacatagtttgtgattttttgaaatgagggcataatttatacttctaagaatttgtgatactgtgtttaattaaaatacacaaacaaacattttctatcaaagataggctatatttctccactcctgcgcaaaaaataaattgatcattgactgaatcaatttcacataaattcctgcaacatataaagacaatgataatgacgagatcaggaggggtgacgagtcggtcacataaaaaaaaataggtatattaatatacgcaagaaatgttcattttactattcaattatttgttaatcattaactaaattaactatacaattaatattttagattcacccataaacattgcttgaagacactaaaatcatgaaggataaaccaagaaatatgtctcaagcacaaaagttgaaagaagtcactaataagggtgaacatagcaatattcatatcacaaaacaaaaacaagatattgcaaaaacctaactctacaaagtgtcgtcc

SEQ ID NO: 28488 - DNA, 870 bp, Medicago truncatula
  Intron number 2 from transcript Medtr3g144790.1 (locus Med tr3g144790) derived from phytozome v7.0 (chr-ID MtChr3; po s 37637197 to 37638066)
agaacaaaaaaactgaggagaccaacatctcaaaggtaagatttatgcccactttgttattctctctctttttttttggtagattgttaatcctaattttgttttaggtacgattttttttttacaaagttttaggttctattctaagcagctcgatgatgctaaaataatcgtggatttaattggcttatatacatgatatagcatgaatatttcacttgtcgcgtgagttcacggggacaattcctcacactctttaatagaaatcactcaaatcaaaaaaaaaaatcatttcttttccaccttcaagtgtgaggaattttttctttagattctttgataatccaggtgtgtgtgtgtgtgaattattctataattttttggataacgacacgagaccttgaaaataaagtctcacgataatccttaagaattattcatgtcaaatattactaattcattttttttagcaagggcgtggtttggttgaatcatcatagcttatatatgataatctttaccaaggcaacaccataaaattttaatttttacacttacacgtgcattggatgattagagcaatcacaattcacaatctatttcattggtaggatagggcataaaacatgataatcggtgggattataagattttaaaaatatttattggaattgaagtgttttttttagataatgaatttagaagtattacatatataacttattatttattctatttaatgtgaatcatattcattccctccatttataaaatactcattactttgtgtggtgcctaaaatattttttttaattgaatttctctctctttacagaaaaggaggaacctcctgaaatacttcagttgttg

SEQ ID NO: 28489 - DNA, 986 bp, Medicago truncatula
  Intron number 1 from transcript Medtr2g122060.1 (locus Med tr2g122060) derived from phytozome v7.0 (chr-ID MtChr2; po s 29127259 to 29128244 reverse strand)
gcaatcaaactgcttctgaagttttatcagaagaagtatttttttttttaagagaaaaagaaaacacaattcaaccccccccccccccccttcttgtgtttttcaccttcagatttatacgaaaactttacatttttttattttgatcacatgtattattttttgtgaattgtgacttttatgattatatagtattgaagagtaattaatatttttttttaagtatattacatgcatacaaattttagtataaatattttgttagcgtatcttagttgtatcgtagtctaattttaaaaatttcgcgtattcgcatatctgtatcgtatccgtattcgtatccgaacttcatttcaatacttacctataaatctgaatttcattgatgtgagatttaaagttgcagaattcacaatatagtaatattagtcgataaaaataccaaagtatagtaaaaattaataaatacttactccgtttcaaaatgagtgtcattttagcaaaaaaaattgtttcaaaatgaatgtcaccttatattttcaatacaactttaatttttcttccaactttacctttaataaatactctaatttttctctcacataattttcaatacaactttaaacttatctttttcttataaagtaagggtggtttaataaaattgttatgtctaatgattatttcatttgatttcataatttatgtgtcaaaatcttaaacgacactcattatgaaacggaggaaataattatttcgaccataaaatgtaaaaaaaattgtaataattaaaacatgtaaattgttggaaagaaaagcaacaaaagtagttctcctttgagctgtgaagagcagacttcatttcagagttgtctttttttcatattcttaacttatttataaaaataaaaaagaaactttttgtcagttttataagtaaattagaagtagacaacacaaataccaacactaatcgaacggcaaga

SEQ ID NO: 28490 - DNA, 897 bp, Medicago truncatula
  Intron number 2 from transcript Medtr3g147960.2 (locus Med tr3g147960) derived from phytozome v7.0 (chr-ID MtChr3; po s 38450010 to 38450906 reverse strand)
gtgtttctacgtattctgtctttggggtatgtttctttcttaactcttcaaattttgcttttttaaattctaatttcatgggttgtaatctttgtagcacagaaagcatgctcggtgtctagagtgtctgttaccaacacagacacacatgattacattcaattaatatatttttactagcgtcgagttgttgtctgatgtctgtgtggtgtttcataggttgtgacttatgattgatcatcaaatatttatgtgactgggaggcatcaaaagtcaatgtgtgtttttttgtcttattttacttattattttggtgtggcatgatgattaagaaaagtaaatgattgggtgaaaagcaacttaactatgttgtgcatgtttggattgactgtgaatttggtgaaatgacgatagcaccgtgatattgttgaaactccaaagtgaagtttttttgtcaaagtggcacattgtgattctgccaaactcattgccagtccaaataagcccattattgagttacgggcgatctttttttttggttgactttgcaaaagcgaacactttggagcttcaaccaaatcaccccggctctatcaaacccactgtgatacaataaatagtttagcaaattgaatctacatggaggaacatatcgcggacttatttgtgcagtggcaagtaccttctggccccaccccactctctcctagcaatggttttgttttgtgatagctttctgtttgtgtgtatatgaaagcatcgtgtggcctttttatacaacgaatgcatatgttatgacttagtaatactgtatttttctttacttggtttctgtttttttccatgttgcatttgcattttctgatgcagaaaatttacagctatttgacggacaca

SEQ ID NO: 28491 - DNA, 778 bp, Medicago truncatula
  Intron number 2 from transcript Medtr1g102810.1 (locus Med tr1g102810) derived from phytozome v7.0 (chr-ID MtChr1; po s 21192586 to 21193363)
cttcttccggtgatctttgttatcttggtggtgaggttagtgcttgatttcattatccttatcaatgcacttatgccgtatttagcatgtggattagtataaataaatcatactcctttctctgacatagaatgagagtcattgatttaggctatctttggcaatgccaattttgtgcttatagttggttgtttataagctgatatgatcgtaaccagtttggattgatttatttttgagctaatgaaaaacagtttatgcaaatgaataagcttttatgtatattcataagcttgtcaaggtagtttatgaaaaaacaacttatgaagatacaactttcgttagtaagaacttatgaattaacataaaagtttatttatttgcataagctatttttcgtaagctcaaaaataagtcaatccaaacaggcctagatctgtttcctcacgagcctgtagcaattttttattgacttaattttttttgaaaggctacttcaagtagtgtttgagcttataagttaccatttttcctacaaactttacccttattatcttaattaaaaatattaaaatattaatcagctagttcaaccgttaattttaccaaacctacaaatttcaatttgctagttcatttgctatcagcaagcttatccactattttttactaaacagagtcttagaaattcagaataatcactttttgtttctatcaaattgctaatgtgggtgattggttttctttttttggggggatggggcacagtggaggagag

SEQ ID NO: 28492 - DNA, 397 bp, Medicago truncatula
  Intron number 1 from transcript Medtr3g106500.1 (locus Med tr3g106500) derived from phytozome v7.0 (chr-ID MtChr3; po s 26818928 to 26819324 reverse strand)
aatcaagaagaaaacatgtaagaagcaaatgctgtgaagtttcttcttatgaatatgcagaaacaatacgaaatttccttttaatcaattatgttttgttggtaatcaaaggtcgcttgctaagcgaaaattaaaaccttcatagtgcaaaacaattctaataacttttgaagtgcaaactaggtcagtaggcatgttgtagaggtgtttgttgatttaattatatttgttttcacatggaaaaaaggtatctaattcaatgatcaagatcaacatagctgtttgtgggtttaattatatttgtttgaagtttttttttttatatctaattcaatatttagttttcttagtttgtttttcagagtatcatttgcgctcacttgcactcaactgtcaa

SEQ ID NO: 28493 - DNA, 1015 bp, Medicago truncatula
  Intron number 1 from transcript Medtr3g073880.1 (locus Med tr3g073880) derived from phytozome v7.0 (chr-ID MtChr3; po s 17225526 to 17226540)
ataatagtgtcaaggctgtgatcttggtaagcatattaatatctttaactccaaaatgtaaattattatataatggaaagaaaaaaaaaacatatgttacaccacttaattactttattcacatgaactagtttatgtacttaattaattttttcaaatggaattgttagaagtatcaaaagtaaattttcaatgcttgatatataatattcatagcataataatatttccaattaatttttggggttataattgttactgaataataaagttctttacaatttgggtatatcatgttaatgttagagttagcatacacagacactctttagtttagatgtgttcacacgtgacaatggtatacaaatgcatgtacatattgaacaactttgaaaagtgttttattttaaaaatgcattgttctatgtccgatattcgtataatatatattgggcaactctgacaagtgttgttttcttcttttttcaaataatttaatttgtttccactataaacacttctcaaacacaacatagactcatctatgataatacttgacacatgttctcattggaaattgtttgaagtatcaaaaacaatttctatgtttgatatataatattcttagcataatacgagtgaaatttcaaatggagttagagtagtattagttataccttttttttttaaaggtagaattagtttatacctatcaagcataaatgcagacacaattgagattagatgtgtctctatgtcggatgcaaatgcatgtccaatatttatcgaataatacatattggataactttgaaaagtatttttttttccgtttaattaaaatgatttaatttctttccacacgctttagaatcttctcaaacaccaaatagactcatcaatgataataatagacacatgttctcatttttttccgtataaaaattagcgataaaacacagtaatttgtaatataatagtattgtacttaactaaatctcttgattttgaaggat

SEQ ID NO: 28494 - DNA, 614 bp, Medicago truncatula
  Intron number 1 from transcript Medtr2g121930.1 (locus Med tr2g121930) derived from phytozome v7.0 (chr-ID MtChr2; po s 29042968 to 29043581)
cgtgggttcgacgaaaagggttggagatttcctttgtaagtttgttttttttttataatgttttggattttgtgttgtcttgtctgtttggaattctgtggattttagttaatttaagactctgtttagctaaacaacttgttgtgcagcttatgacataatcacttacggataagctatttctataacacaagataaaataaagtcaaatagtttttgtataatcaacaagctgttttcattaggtatcttgaagagcttatggaaataagctaaaaacagcttattaatatggcagtggctatttttcataagttttcccgaacattgtcacaagtgcttatgctagtagataagttcaaataagccaatccaaacaatcccttactatttggggcttttagggttgattgaaattttgatggactaatctttgaggagtttgcaagtacttattaactgactagtgaatcattgtaaaatagttgagtaaactagttcgactcggacttgattataacactatgcctccgttgtatgctcttttgatgtggtgtttctcaagtgttatactttgttgttctctttaaatatcaggtctggcccttttggag

SEQ ID NO: 28495 - DNA, 649 bp, Medicago truncatula
  Intron number 1 from transcript Medtr3g114850.1 (locus Med tr3g114850) derived from phytozome v7.0 (chr-ID MtChr3; po s 29166462 to 29167110)
agcttattaggaaggttgaaggaaggattttggaggtttaaaaatcttcttcaatttcatctttatataatatacttttataaaatttaattaaaaatattatatatataagctataacattgttttcttattatctacagtaatatttttttttttaaatattcaaggagatttctctctttccctctcctttcgtctaaagtactcccattcactctcataaaaactctctttaggtcagttataaaattattatcgagttaacaaatgaacctgtaacttatatggttaaaataacttatttaatcaatagtctcaactacaatttcagctgttcatgcgcaattgcaagtttcgcagctgacattcgacaatattatttcaaccgcactagttaggcccactcatgaagtataccggcaacatggtgataatgattcactggttttcaacgtagatggtagcgctttaactaacctaggtaaaacatgatatggtggattggttaggaattttgagggaaaattgcaatttgcctttgtgattaagattaagctttgctgagaggttcgttatatgaaactgatttgtttttcttactctcttcatgcagtgcatttagtgtcaaaggaagtgagatatttccat

SEQ ID NO: 28496 - DNA, 692 bp, Medicago truncatula
  Intron number 3 from transcript Medtr3g148300.1 (locus Med tr3g148300) derived from phytozome v7.0 (chr-ID MtChr3; po s 38591071 to 38591762)
gagagcagacaaaaaagcagcaagacctttgtgaggtttgagaacctccctttttccttttcaatttcttttgacacttagatttggaattccaacatgatattctaactgaaaatgatactttgtgtgacttttgttgtgtttaattccatcatttttctacgggtgatttttttgtttttagtttaatataggatgtttgacatatcacattaatgaagatggatgacaaagtttgtccataaactgcttgacaaacaaagtaatgaacgctaataatttgttctatatgttccgctaatagcatactgaactttggttgtaatactccgtgtttcatgacaaacaaagtgtgacaacaattaaagtatgggatctcttataatattaatactccgtgtatcatagtgtcccatatctaaaaagtatttgatatgtttcatgatttatgaattttgaccaatttaatggtccattatgatcgaaagggatagtctactttatatgatcttacgtagtgctgctacttactggcgtgttatatggtttgtgtatttcactgcatgctttaatttagatttgtgtgtacacctgaaagagctgaaccagttggcctccttttccaatctgggctattttattttattaccttttattccatattatataatgatcattctttcaggtttgag

SEQ ID NO: 28497 - DNA, 859 bp, Medicago truncatula
  Intron number 1 from transcript Medtr4g021700.1 (locus Med tr4g021700) derived from phytozome v7.0 (chr-ID MtChr4; po s 4226571 to 4227429)
tcggtgactatatatgttagtactctctctttctctctcattttcagtaactactatctttatttttacatctaaacattgcgtttaatttttggggtcttaaacctcatgctattgggattttgggtactggtcatttgaacttgggtttccccaaacaaacttgggttcttttaaacaatttgtttttaaccgaaatttattattacgaatcatgaaatcatagagaagaagatcaaaatgatcagcaagaaaacattaaagcaaacataagaatattcatgaaagagatacttatagagattcatgtagaatgaatataaattgataaaagaatgaaaaattagtacaatggtaaagtttatttatagagtgacaatggaatattaatttaataaattaatggtcgctcagacccattaatttgtgatctaggatggactccccattcgttgctagtttaatttaccaagttatgaatgctagtttgattcaaactattcgtatgtcaccatgtcttgtcccatccatggtacttataactttaatatttcttcaccttcataattactgagcgtgtacccatcacacccattattttttatcctctataaatagttaaattttacttcatcatttttacaccacttcattttcactctttcattttgtcttagctttgttcatattgaaatttcgttagatttgataactaaattggtgattcactcaattatgtttttcattattgcttactgcttagtaatattaatttttccctttaagtaatcatttgattctgtctcttattgttttgtttttgttttaatagcatttaggtaccaaaagaaccagtaca

SEQ ID NO: 28498 - DNA, 666 bp, Medicago truncatula
  Intron number 4 from transcript Medtr3g124290.1 (locus Med tr3g124290) derived from phytozome v7.0 (chr-ID MtChr3; po s 31460397 to 31461062)
ttttaattttacacctcttttattagcaagcttaggtggtttgagcatgttgcgagaaaacttgtagattctgtagtaaggaaagcggatcagattgacaatagaggcaaagcaagacatagaaaaactataagttaaactattaagaaagatctagagattaatgagttggataaatatatgatagaacattatggtgtagctgaccgcacttagtgcaataaggcttggttgttgttgttgttggcaaggcatatagaaagtttgttaataattggactcttcataccgtgctctctgtagtttctcactgttagtagttttatcagctaggattgacttatttgagtctatatgctcacataagtacttgtgagagtatttgagagaccttatagaaacaacttatgatatgtctataagctgttttcaccttatttccacaacttctccaggatagcttatgaaaacagcttacaactaatatgaaaacagtttgactttatttcaatttttataataagttatacataagcacttatatgataaacacttcacacttctgctataagcactcaatcaatatggttgtcaaaacagaacttaggcggggcttacagtaattggtttgttatttcagtgaaacaaggaacccttttgtggaat

SEQ ID NO: 28499 - DNA, 1030 bp, Medicago truncatula
  Intron number 1 from transcript Medtr1g037270.1 (locus Med tr1g037270) derived from phytozome v7.0 (chr-ID MtChr1; po s 8728602 to 8729631)
tcttttgtagaacttccaagcttgacaccaaaagggtacctctctttcctcttcttcttctctttcctttttttgttattttgttagttgcttgttttcgaaggtgaatgatgatcttaattcagctcaagatgaatatttagcatcatgaacttagctttagtcttttttttcgtatgtaaacttagctttcagtcttagatgaaatatattttgactttaggttgacttgtaaggtaagggatgcatgagttgtatatagattatataaatttagtcactacttaggctacatcactatttaatatgagacttatcaatatatactccctcaatctcaagacttgtgactcgagtggtttaataataggtggccaattgatctaagatagattctgataccattttagaattcgagtttgaggctaactagacaaagttggaggtgtggcttgagtgtttgacattatcatacattgtttcttttaggtttttaataggaaatacctatctatgccgccattaaatttagagaaatgaatttatgtttttttgtgtaaactgatatccctagcacacaactgcgtaatccctcgagccttgtgggatcaagatggatgacaaattgtcaccaagagtttcaacgctgttgcatgcccaaattagggtttgaacttagagaaacgaatttcggacatcagaattttgatgtcaaatattatgtctttttactcgtgtacttttaaaattgtgcaaattgtagaagataaaaagtgagagataaagttcactacctacagttttttatgaagtgtttgcattttgttgttcaaagaacaccattgttaaatttaaacttaatataaccattaccatttattagtatagcaagaagcaagtttctcctctgtagggtctacatcttctggtctatatatgaaagagtatggtttcttattcttaagcttatagttttttgggttgtggattttcagggtttgaaaggtaaatttggagtgtttgctgtgtt

SEQ ID NO: 28500 - DNA, 859 bp, Medicago truncatula
  Intron number 1 from transcript Medtr3g043460.1 (locus Med tr3g043460) derived from phytozome v7.0 (chr-ID MtChr3; po s 11796214 to 11797072 reverse strand)
atagactagggttgcctaattttaggttatccaatgtctaggaggttttggttcatgtccccctccttcttgtttttcctctccttttctttatatatcacagtttgagatagcagcactttgctgctcctcctttttggttaaaaaaaaatatgtaaggtcttgggttcgaacctcgaatacaaatatatatatacaagtcactaatggttgagataaggcaacggttaaaaagcatatatatttacaagtacaaatagattagacaatgatttatttcttttaatggttgagataaggcaacggttaaaaagcattgctggtgtacaaagacaaggaacatagaacaatttattatccttttttgcttacatacaatttattatctaacgcaacgtcgtttcatttgagaactttttaaaaaacaacctataacctatttttgaaagttttaaatcaatctatcctagtttgaaaaagaaaaaaaaatgccctacttaggaagaggtagttggagcatgctaattgagcactaaattgggagaagtggacatgaacttggcaaatgaaatagtgtctaccaaccaaaaatatttattttcttcacgtaatttgatttttctaacattcaaaatcgatttctgattataaaaataaaagaatatccgttttaaatgttgcatatttttatttgaacatccaaacatctaataattaacacaaccgactaaaaagggatttaaaacaaaaatattaaaaatttgatttgttacatgtgttcactttacatacatgttcacaccctgccctactttgaaatcatagtattttggagtatttttgcaggttgaaattctat

SEQ ID NO: 28501 - DNA, 487 bp, Medicago truncatula
  Intron number 1 from transcript Medtr3g122690.1 (locus Med tr3g122690) derived from phytozome v7.0 (chr-ID MtChr3; po s 30578073 to 30578559)
aggtattttgttgcatgcttctattccttacgtatttgatttatgatttatgatgaataagttaataactgaattttatgaggtgttttgatgaggcctatgtgccaagacaatttatgatgttgaatttaatccgctgcaaagtttagaattattatgttgtgatttcgaaatgataaattgttatttatttcgtttatgattttatgaagtgtgacattccgtttgcgatgatttactctgattattttaaagaaatttttatgttgggaaaaatggggtgttacatttacaacctatactaccatttccacctataaatactcatccatacttccctaattcctgacatcatatcactttctccccctcctctctctctctctctctctctccctctatttctcttctttctttctttttcaatattctctttggggacaaaggtgatcaaacttcttcgggggtaagatagtgagaagccgac

SEQ ID NO: 28502 - DNA, 817 bp, Medicago truncatula
  Intron number 4 from transcript Medtr3g144680.1 (locus Med tr3g144680) derived from phytozome v7.0 (chr-ID MtChr3; po s 37578823 to 37579639 reverse strand)
cgtatcctgagcagtgtttcaggtatgtaacaaattatgctttggagtgaacttactatagagctaaatgcatctgacttgtcttgtaaatatgtaaatacaactcagatggtaaagggtgcagggatatgtgtttgagtttcgccgcaaaattctttagaacaaaaaaagaaaacgcacccgacccatccttataacatattttggtttgcagtctgaacccagttgaaagtattggttaaagattcacaacagtccattgtcttcttagaaagtgaaaaaatgttgagactggagcagtatcacgcacctgagtcatatagttctttatagtttcaattggagattgtatggttcttgtgtagctgttaagagctaatcgaagaggctatttcctcaacttcaccagatatatgtaaattatttctaattatcatactcattaggagttgtattaggtttttttttgacaaagggagttgtattagttgtacctgggctttatgaacatgcagatataattattcaaatctacatgagttgagaaagtcggagaaaatttggtttctccatcgagttctctctgtggatccctttaattgagtggagaagcatacatatctttctattgtgtgctcatgctatcaattatgtttctccatagcactaaaacacattcttttgttttcaaataagtcatgtctttcgttttctctgctgcgctctctttcctccctgtttttatcttccatcctattttctcggcttaaggagctgcagcattcttttctaattattcctttgtgcagatactcac

SEQ ID NO: 28503 - DNA, 873 bp, Medicago truncatula
  Intron number 1 from transcript Medtr2g033140.1 (locus Med tr2g033140) derived from phytozome v7.0 (chr-ID MtChr2; po s 8976645 to 8977517 reverse strand)
actaaagggggtgctgatatcaggttttttttttaatcttggctcagatttagttttgatctgattagttaactttgaaaccctgattttaatgttgattcagtataatgaagaatgttttatttgtcctgtttatttttttaccaaggagtagttatagttactatgtttaagtattagttacttactttatttgttcattcttgagtttttaatttttgttttagttggtggttaaaaaaataagcataatttttgataaattattaattacgctgacgacagtgacactgagatatatctaattagtatagtatgatgatgactatgaccattgagcagatttgttttactctaaagttgttgatgttagcatttagtgactgtttgctaagttcttttgtggtagatttagagattgtttgaatattgtaaagaacttaggatgaatcattctgaagaatatattgggatcaaaagttgtattcaatcaagacttcaagagtgttttgtgttattataatacttttgatcttttggttcttagttgcaagtttgaattgattatagttgtcgccaatgattcagatcagaatatttgtctaccttgcgatataaagttataaacttacctgataatcatggtaaagtttgatatttattggattttgatccaacagaaaactatagtagacagtagcagaagttatcattattggtttctctccgtaacacagatgaatattttcttctactaaacacattttgtagtttgtgtgatctcgctagattcttttaaaatgtacagaacttatatattgtcttcaggcctcttacattttaacttgtattacaggtatattgctgtaggaa

SEQ ID NO: 28504 - DNA, 722 bp, Medicago truncatula
  Intron number 2 from transcript Medtr2g008050.1 (locus Med tr2g008050) derived from phytozome v7.0 (chr-ID MtChr2; po s 1368820 to 1369541 reverse strand)
cacggtatgaacactcggtagtatgcattattaaatataaaatattttgattaacactcttatatttgtaactttttcttgcactgaagcctgaaggtagtcatgtgatttttctttcaagaggacattaacatttatgttagtatctaattagtttaattaagggaaaataaaattaacccctcctaagagtttaaaaaatgcagtaacctctctcaactaaccatctggttaagttaagaaaacacccgtcaaaatagcaatctgtagatatatagccaattaagtctgaaaacattaattcaaattatttaacgatggatacaaatagttttgcggtgagagtgtgttcctcttcaaattttttttttttatttacactagaaagctagtataacatatctcttcctatttttgttttctttttctttttcttgctattcattcccaattttatcttctttaaactccggtaatcaatatcaattttcactcaaaaaagaaaatcaaatttaaggtccctttaaacccctttttccaaacataaaatcaaaattaaaactgaattgacttgtagttaatcatgctcatcaactaagtatgtttttgatatgttttagtatttttttttttgtgtgtaaattggcttgtacgcttcaaatgcaaggtgaagctttgttttagactcatggaaatttagagcatattgtgcttggtttgtt

SEQ ID NO: 28505 - DNA, 346 bp, Medicago truncatula
  Intron number 1 from transcript Medtr2g073780.1 (locus Med tr2g073780) derived from phytozome v7.0 (chr-ID MtChr2; po s 16713603 to 16713948 reverse strand)
tcaactccattgagcttattcttcttgacatagatgtgagttaaacttatagctttaaaaatcaaaactttgtgtttttcttaattttttgggtgaagaaactgtttttaggtgtgtttttatttctatgtatgtttgtacatgcggttgttattttatcctcgtgtctttgtttatttgtttgcatatgtgaactgctttatatccatatgtttgtgtgtactgtttcgtgattttgctgagaatggttgtgtgtgtgtctttatgtggaataaagttatgattttccattatttattgaaatattttatatttttttctccctttttttagggcaataagatcc

SEQ ID NO: 28506 - DNA, 645 bp, Medicago truncatula
  Intron number 1 from transcript Medtr1g086450.1 (locus Med tr1g086450) derived from phytozome v7.0 (chr-ID MtChr1; po s 17114830 to 17115474)
ttcgcaagaataagcgctataaacacgcgctcgaggttcgttctctccacgcgcgttttcgcattttcatctatgcattgcatacaactaatattttcttcatatagcgaggtcttgattattaattcgaatttgattcattatgctgtgaaaattgtttattagaatgaaattgattctgtataattaagtttacttaaaaatgaatcgtactatggtggtttatgtttgaacacgtagaagtgagttgaacaataaatttcagtgtaaaaatcacttttaatcaaaagctcgaaatcctagcttcaagttagaatcaattttgtaggaaaatcaattctacttgagagcaaccaaacatgtcaaaatcaattttacacgtccagaattaactttgactgctccaaacgtggaatcaaacatagcctaagtgcatgttttgattcacttttggaagagtcgagtcaaaagtgattctaaagacttaaaattgattatgggaaaattagagccaaatacacactaagaattggatctaatttttaaaaataatgcttatgggaaaattagaaattgtcatgtacttttggatggagtgatttgattggagtttttaatgttgttattgcaaatgcaggtgtgtga

SEQ ID NO: 28507 - DNA, 621 bp, Medicago truncatula
  Intron number 1 from transcript Medtr3g067400.1 (locus Med tr3g067400) derived from phytozome v7.0 (chr-ID MtChr3; po s 15456906 to 15457526)
gaaatttttattggtaaaggtaccgaaattgaacatgaagcttttcttgctacttggttatcaatttttgtttttcctcataagaatttggtgaaaaattatctgtttcctgttgctgttaatcttgctagagggaatcctattgctttggcaccggctgttttggctaacatttataaagatttaagtttgtttaagaaaaaaatagttgatttgtcaaaatattctgttggtggtgatagatttcctttagaacttactcttcaatcacccttttatttggttcaaatatgggtgtgggagaggttcaaaaatatgcaaccactgccacaaaccatgttgataaaccatggagacccttttttgtttaggtggcatgatgttcaggccttggaaattgacaatgttaggatggcattagactcggctaaggatgactttctttggcgtccatatgttcgatattctgataagtgtgagctgttttatccgaatgatggaattttggtaccatttaagatggatttggatacaaaaattctctcatttgttatatgtttgagagtttctgagcttgttggttttgagtccatagagcaatatcttccacatagagttgct

SEQ ID NO: 28508 - DNA, 799 bp, Medicago truncatula
  Intron number 1 from transcript Medtr1g132770.1 (locus Med tr1g132770) derived from phytozome v7.0 (chr-ID MtChr1; po s 29728613 to 29729411)
tgctaccaagaacttccaacttggtgacactattagtaagtcctttctccaattgcatgttttatttgttcaattgtgttgctttttctgaagatggaaaggtcctttcaaggaagaagacaaccaaaattaacattattttacaattctatggtacctcttttctaacactgtccaatttggtatagaaaaactcacattcctcctttccatgttttttgcttcaagtatactccactattgcattgtctttcatggcatggcatagcatttctcaagactaattatgtaatttgcacacctatacaactttttgttttgatatggtttgtattcttatcagattaagccttttttttttttaaaaaaatatcagttttattatatatttttgtcttagccgtctaatatcttggataaatagatcttgtaatctcgagctcgatcgaaaggtaagtaatatctgataaaattttttttagttaagatccgaattcggattctctcggataaatcaatttcatgatgataattataaactaccatgacccaccactttcacttgcattacctttttgttctgtggtgctttgcacacaaagaaacaaaacaacatgcaatgactttgtcgggtggtcctaaatcatcaagagcatggtttttacttaattatgattattattattattattattattattaactcaaattttttttagatgaatgttaactcaaattgacaagtgcattaatttgtactactatatttcagtatttgaatatagtgcaaaattccaca

SEQ ID NO: 28509 - DNA, 453 bp, Medicago truncatula
  Intron number 1 from transcript Medtr2g080740.1 (locus Med tr2g080740) derived from phytozome v7.0 (chr-ID MtChr2; po s 18713281 to 18713733 reverse strand)
aaccgcctctcttcttcacattaacattaggtaaggtaagcaactctattctcctctttccttctccaattttgatatttgttatgtgttgaagaaatgtttaatccccaattttgcatctcattctcatgaaaattgcttattggctatgcataattgggaaatttacttatggttagagacttaagagtttagaatattgcttatggttgcgttatctagacactattgtggtttctttgtacaattttccttacaaagtcactattctatcaaaccggccccgatgttgaccggtttgatataagaccagttgtttttaaagtctttctgaaccggtcacaactttagttttcggtccaatcggtcgatccggttcagttttgttaacaccaccagctctaatacaaaaaccctagtgttaggtgcaaggaagaagaacaagagtttgca

SEQ ID NO: 28510 - DNA, 1036 bp, Medicago truncatula
  Intron number 2 from transcript Medtr2g014950.4 (locus Med tr2g014950) derived from phytozome v7.0 (chr-ID MtChr2; po s 3971225 to 3972260)
attttgggactgcaattcaaggttgtgagtttgtctttcatgttgccactccttatctacatcaaactgattctcaggttaatatccaaatattgattattagtcttttctttacgcatggcaatggggcgatgtggggacgggttttgccttccccatccccatcccctactctcatatacttaccccttaccctatccatagctaacggggatgagaaattgaatctcatccccatccccaatgggttatggtattcccgctccatccccgttctgcagtgaatcaattttttgataattgataaaaaaagagtttttttaaacttcaaaggtaatattgtaatgcattatccaacaatttgcgttcattttaacatttatttaccgaataattcagtttctcctttaactatcaataaaagtttgtatatcatgacaattatcaaaccaaataacatagcatatcattatcaaccccctcaacaaaaacaaaaatatgacatttctacattcgggtagggtttggatatgggttcggggtgggtacatatatctccgttacccgtcccgtacccgtattttgaaatcggtaaaaacccaaatccatacccgatcaaattgaggaaaatccgtcaaattgaggttggcttggacgggtattcatgggcacgagttttttttccatgcctacttttccttccttttggttatgtacttgaaatatttagccaattttatggctgcttaattaacttcttctaattgacactttagataaaagaatcatcaattttgctactgaaattgtagtaattgatatttttctctctacaatcaatgaacttttgaaataatcatgaatttgaaaatttctgttacattaattatatgaagacaattacaaatttaaattgactaattcaaaagagctaatatatgtggtcaaacttttctaattttgtacattatttataaatttcgttgatgttggtagcacagtttaggagcatagaggaagcagcaatagccggcgt

SEQ ID NO: 28511 - DNA, 1001 bp, Medicago truncatula
  Intron number 2 from transcript Medtr2g091530.1 (locus Med tr2g091530) derived from phytozome v7.0 (chr-ID MtChr2; po s 20646892 to 20647892 reverse strand)
gaggttcttatctagtgttgcttttttatatgtgtatctcttctttatatgtagatctttttgccattaaaaaaataaagttttttcattgattagtttttgagactgtcaaattgattaaagattgattgaacaatagtttatctttcttttcttaatttgacataatgttaattcaaattgtgtcaatctatttaatagtaaaaagtgatttttctcgaatcaatggaaaattcttcatagaaagttgacaataatgcgatttatttacaagtctcatatgactctattcaaactctcttgtagagtccttttaggccgttagaataacatgataatgtaacctcaagggacagagttcaaaatgaaataatttccttcctcaattttaaatattaaaatatgcttgtaatttctctttgacataccattgataaagaaaataataatttctctttttcttacaattaaaatcaactatgtttagcatagtcgtttactaaagtgacatgatattttggaagaataaagtttggtggacacccctaataggcctatatacattttaagagagaaagagataaaaaagagttaagtgatatatgatagattcatgatgtgacatgatgagagacaaagaaataaaacgaggtgttgaatgaatgtttgagaaatttgatgatctaaatattattgttgaatttggaaaggagaaacacgttacacatatttagaggagaaatgttatgttgacaacattttcggtctccaacattttttaatcggttgtttctcttcataatcacaacaataatgataaatgatgtatttttatgttatcaaataattgttgattttttagatgttcaaataacacaattcggttgtacatatgttcatttggtaagggtagtcctagctctggctcatatttttgaggtgtgataagtgtctttttgggtacaaaggtgtggtcttttttatttttgtattaggtttga

SEQ ID NO: 28512 - DNA, 654 bp, Medicago truncatula
  Intron number 1 from transcript Medtr2g118110.1 (locus Med tr2g118110) derived from phytozome v7.0 (chr-ID MtChr2; po s 27954229 to 27954882)
attctgctcagtctcggagtactgaggttgttatacccttttcacctttttttgtttttctatttgattaattgtttagctggtaatgttgcttgtaaagtttgaatttttattcatattcaacttagaaaaactgtatttgagtgagttttggtctgaaatgaatatattgaagtatatactttactgatcatgattatggtttattggaatttgttgatattgtattgagatgggtgttttactgcatgtttggtatcacagttgattttgtcagaatcacgggcttgtcgtgattccgaaaaacttaccttgataccaaactaggtattaagtggcaaaaggatgatttttttattcattgaaattgagaagacctaagggtttggtctagcggtaaaaagactagccttggacttggaatttctgggtttaagctcgctagtgtcctttagagggaggtcaatgtgaatccttttgttagtactgtttgaggtttaagttcttcattgtcttggactggggtaccatcccctcgccgtaactttatttcatcaacaaaagtaattaatgatcatattgcgactgtctcatttttggatcattattttgatttcagataaattttgccatattgaaagaatcagatatccg

SEQ ID NO: 28513 - DNA, 558 bp, Medicago truncatula
  Intron number 6 from transcript Medtr4g018060.3 (locus Med tr4g018060) derived from phytozome v7.0 (chr-ID MtChr4; po s 3297134 to 3297691)
ctggcatccctgttattataactaggtattcaacattttgtaatgtgtttcatttaaatagaaaagtgctttttatgaagaatgaaggtagctattttcaaaataaaatgcacatttctatcatgctatagtcatagtgcatgtaactctggggaaaaaggaaaaaagaaaaatgattttttttttccacttgcaactatggatttaatttatatacaccgtttgcgtaaatactttttacactgttagtcaatcatagatcataaaaactgtttgactttaatcttaattacttctaaagtcatacatatgcgtggttgtgatttgttgacagtgtaaaactttttacagtggcatatttcaaatttaaactcttcaactattggtatttgctaaaagtatctattagtcggagattagtttaagtaatgaaagagggttctgatatttgccatgatcaatattataatttgcatgtagtatatgatttcaggtatagatttgggttttacattttactgactttgaatattgtatttatactctgttttagtggct

SEQ ID NO: 28514 - DNA, 829 bp, Medicago truncatula
  Intron number 1 from transcript Medtr1g037530.1 (locus Med tr1g037530) derived from phytozome v7.0 (chr-ID MtChr1; po s 8832741 to 8833569 reverse strand)
gtttgtacagaaggaaggtgacaccaaaatgaagggaaagttgattatctagtaaacagaatattgcatcgaatttaaaattttattttcccttcattagatcttacaaatgatcatgaatcaatgatatcgattttatattttgtcgcacgtaaactttctagtcaaattgattctaataacgagtaaagcaagtgtatagatatatctactcatccaaacaaacaaaatttctctcatgaccgatattagccaaatcgaatggagcctcaaagagaatgggattcagagagtagctagggtttcttaattttgtgatgtgttttttcagcaccctagtgtgttttatttatagactcaagcatgcgcatcatattttatggtgtattttgtttcatctaaatacacaatttcttactgtgtatcgggtttctctaatttgataatttaaatgataagtcatacttgtaaaaaaaaaaaaaaaaaaggcctaatacttcttgttgattctcttgtgtatcactaaaatttggtggaaatgtcatgctctagccaaacacgtcatggccataacatgtgtccaaaaattctgataaaatgtctacttgttgggatgcatttgattgatgacttgtttgaccttttcaaccaaaggtgattaactaaatataattgctagaaaggaacccaagttttcttcctcactaaacaaaagaataatatatgatttagcgatcaagtttattaaacaataaacatattcggctataacttcaattttttgatattatgatcatatcatataagttcacaggttcctttgtgcttc

SEQ ID NO: 28515 - DNA, 968 bp, Medicago truncatula
  Intron number 2 from transcript Medtr1g035090.1 (locus Med tr1g035090) derived from phytozome v7.0 (chr-ID MtChr1; po s 8518791 to 8519758)
aacttggtcagggaggctttggacctgtctacaaggtaaattaatttttttttaatggcaaaatgttagtaattagtagttagattataaatactataaatcaatcaagctgtttttagtaaaaatttagttcaatattgtatgaatgtgagaaaaaggtttgaaattttgacacatgttagtaaaatctcatgcaagtttacacaaatgtaaaaaaaaggacaaaaatagagatgtgaaattgtggcaagtatctttagactaagatttttaagagtttatagctagataaataggtagaagatttgtaaaaaaaaaaaaaaaaaaaaaaaaaaagtggatagaatataaggttggttttattgttgatccatatttcaaaatcacatgaatttctaacgatgatctacaacgtccttggaggtagaaatttatggtacttatcgtctttatagttgaagcagtgtcctgattgacgtcaatttgacaaaaggaaggaaaaacgaatatgagttgagttttgattttgagagatgcacatgggttttcccttgtttttgtcgaactgtaacaattcgtcatctcattcgcgactctatgaggacgaagaagactgtgaacttctacttttgaaagacaacgtctctcgtccaagtaccagtccattgtagatcatctattagtgttagtcgtagaatttacaagaagatcggtatttgattttcatgtcctgctgtttggaaaggcggcaaccatactacatagggttcaattggctcaaacaagcttttgaattgtgattaattaaagaaaattgtgaataagaaaccaccaaattaaaccttaatgctagtctgctagagctgcaatcataattgcagacattgatttgaaacttttgatccgtaattaaaacaattgtggcaattttggtttttatttgtctttttggttgaagggtaaattga

SEQ ID NO: 28516 - DNA, 423 bp, Medicago truncatula
  Intron number 1 from transcript Medtr2g110930.1 (locus Med tr2g110930) derived from phytozome v7.0 (chr-ID MtChr2; po s 26192435 to 26192857 reverse strand)
taccatccattgttgcacttcacctcttgtgcagtgtagtgttctttttatatgaaatgttgatttatactttctattattcttctagactttttcccttaacattagactgccgaaaccgtggagaataaattaattttgttgggaaagattatactataatgtctttacagaataacaaaaatgttattttctccaataaattaacttttgtttggaaagaatatgctataatgtctttctgtgctactctatgcattgcccttttgaattatattctccaatacccaatgggcagaccaaggtaagacaatcacaaattcacaatcatataatccacttagctaaacaattttactaattaatgtccatattaaacacaaattcacaacattttgttttttctccaaatttcttaggatt

SEQ ID NO: 28517 - DNA, 914 bp, Medicago truncatula
  Intron number 3 from transcript Medtr1g124660.1 (locus Med tr1g124660) derived from phytozome v7.0 (chr-ID MtChr1; po s 27223755 to 27224668)
atttggagagactcaagaagatccggtcagttgttacttcattgtttatttcattatggtttttgtggtgattatgtcattgattgcctgtgtaaactagatagatgattctcactaagttggtcttcatatttttctaaatcttgagtgtaggtttaatttaacattttaaaactactatgtaggaatatcaaaattgagatttagaagtagtaagatgatgggactaataaccattgctttgatggttggtgcttgatgctttagcttcctcgatagtgtttgaataacagaacgagaattcactattggagaatctaaagctcatgcactaccactgatgcaccaccaccgcattgctttgcttttgtgtgatgctttagctttctcaatagtgtttgaaaatagaacagtgggaagagttatcagtttacttgaataatcaaatggttcccataagctaaaacacgggcaatagaattgggccaaaaagtagctggctcttatccaatgacttgtatttggttttctcttggctagatagtctcacgttgtcttcctcgcattttttacaatgtatgatattcatattgatatagggactaatgtgtagtgagatgaagtaacacaataaaattttagactgtttggataaacagtttaattaagcacttatggcataagaaataaacatacaagtgcttatatgtcagctgtttttataataagatgaaaacaatttatggacatggcttaaactgattttactaaaattctgtattcaataatataatggatgtatgttgagaaattgggcattggctggttaaaattttgattgtcgtaacgcttaaaactaacatcctttctattgtgcaggaatcaccggggtttgaggcactactggggccttc

SEQ ID NO: 28518 - DNA, 705 bp, Medicago truncatula
  Intron number 1 from transcript Medtr1g129260.1 (locus Med tr1g129260) derived from phytozome v7.0 (chr-ID MtChr1; po s 28817512 to 28818216)
agggagaatccattgcttggtccttcttccttaacgtaagagattcaaatcaatttttattttttttattttttgttattttattctttgcttgtgtttttattaattagtttggttttcgggggtttgaagttgattttggcattgctattattgatgatcaaacttgttttttttttttttgaaagagatgatcaaacttgtttgatcatccctttcatgcttagtgtatattatcctgaacctttataattgtgttatgaggagtaatcaaactacactgatgcaatattacacaaatgttacatcgttcaatattgttttagccaattcatattttccaaatttgtccttggactataagtatatatcatcgatataaatttttacataaatctaaaatcatctcatagtttattgagacctcccaagatttagggtttatgcgcttctaaaaaaagccgaacaaatattatcaaagcttatcgaaaattgatttgttggtctgagtttattttagattgaattgaatgacatgctttgatttcagcatttctattgcaatttgtgttatttattgaatttgtgtgaaggggaaactttcatttctttgcatgtaaccgtttaattaactaatagcctattatgtttttgaagaaaatatattgatttgaaatgtttggtggatttttaagattaatcaag

SEQ ID NO: 28519 - DNA, 807 bp, Medicago truncatula
  Intron number 1 from transcript Medtr2g111600.1 (locus Med tr2g111600) derived from phytozome v7.0 (chr-ID MtChr2; po s 26542658 to 26543464)
aaggccattgctgaacagaggactgctagttcaaggttattcttaattccttttatttttagttttggaatgatcggtaggcctatgttcggtttaggttcagtcatgttttggaatgatgcgtatgcatatttttgttttcataattcctttttccctctctctctctctctctctctctctcgtacatgaagttttatactgttgatgggtcgagcctagggtgtatgacactagagggcatagctgtagatattgacacttaaattgatgctaggacacgtcacttttttctttttaactgatttctgtttatgttatcattttatgaactctgatttctgttatcattttttgaactcagtggcaatgatatctaaacgatctccaagtcatacataacaatttaaatttattgtgagttctttgtttttcacaaatttgggtaagccttctataaaaggagtttatcttaaactaagcaagtaaaggtgcatacactgtgtaccattaatttgatttaataggcatcatgatcgtgactcaccaaagggttgataatacccttactttctctcttcagtgtagctttgcccccaaatatttctagttaccacatggcaattgtcttcctaatttttccatgtacatgttatctttttgcacatagaggcaagggtatttaaacgacctctgaattgtatgcataaacttaacaattgaaatattcatggtctgtcatcttatgtttgaaatatttctggttttgcagtccagaacacccatcatttcgagcacgtgcacggt

SEQ ID NO: 28520 - DNA, 550 bp, Medicago truncatula
  Intron number 1 from transcript Medtr1g008320.1 (locus Med tr1g008320) derived from phytozome v7.0 (chr-ID MtChr1; po s 666746 to 667295)
gcaaacccaaacgaacaggtctatagctctttttctttctcaaaattttctgcatggtgaattatagcacatacactcctaaaataagatgtgtgtcggtgtcgaacacacgcgcaccggtatctacgtatataaattttctcaatagcaccatgaattccttaaattcttcttgattttaaatatgcaccctctggatttggaattcttttcctttatgagtcacttaattatgttaataaattttggaaagcgtacacacttaccgtgttttgtttttgagtatctctcctactaatgcctcttgcacgttttagaattaggttaaacaatttgctgcaaatattttgtgagagaagatagaaattgagggaactgccctttgaaattggaagactaatacctttgaggctatgcaacttatggcttttccctccagcgcaatattttctttaacagcttaaatacatgttgtttacaagataatattgtgcaagttcatctatacactcaactcaatcctggtttccttttaaaccacagggacatt

SEQ ID NO: 28521 - DNA, 522 bp, Medicago truncatula
  Intron number 2 from transcript Medtr1g132450.1 (locus Med tr1g132450) derived from phytozome v7.0 (chr-ID MtChr1; po s 29562446 to 29562967)
aatctatacaatctccaaatctgcgcccctgattcgtacgtaacataacgctctctttcattttattcttcactttcattttcatcaaccctacgtcagtgattatgctaagccattatggttactctcaccctattttacgagaatcagttaattaagtgtatgtttatgtttggttccgcttttaaatagaccaaaattgattccggatatgtacaattatttttttttagtagaattgattttgcctccagaattgattgattctatttgaagttaggatttttattctagaattgaattttacactcatttatagtttaactcacttttacatgaatgtatccaaattccaaacaccaatcactttacctccaactcactattagtcagaatcaatttactcaaaatcaattctagcaacactcgtgatttgtactgttatttatttaattgtgttagttaacaatttcaaaattggataatttccagtgagaaatcagctgtgagtcacagtattac

SEQ ID NO: 28522 - DNA, 1001 bp, Medicago truncatula
  Intron number 1 from transcript Medtr1g137690.1 (locus Med tr1g137690) derived from phytozome v7.0 (chr-ID MtChr1; po s 30555065 to 30556065 reverse strand)
gctaccttcgctgttgttgaattctttgccaattggttagtctttttaatttttgaattattttcctatatatgttgaattctcttatgggttctgtaaaaagttcattttttgtgaaaggaattatatatatatttgatggaagttgaaaattgaaatacccttttaatcagaaaattagatctcaagttatttattacaatcaggagagattaattcattcatcatataaatcaatccaatgctttcggacattttggttaatgggtttgatttgtacaatgaggtgttgttttcaattgataccacttaccactactttagttcaaggtagttggagctgtagccaacatttatgcaattgatgctatgaattgataagtgaagggttcaaaaagacggaaaaaaaaaagtagtgtgttatattaagagttcgcatgaatattgtctggctaagaacatgaaacagtttcaaagtcttgtttgtgacaaaaatgactgtccaaaacctgcatcaaattattgtacaccattattggtatctgatcggatgtattttatacggttatacctttgtttgctacgtgccttacattcgttcaatgttcttctgagttgacttcaaaatatgcatacatgatatgtttccgatgaagacattgctaaatataattgttttttttttttgagggaatgctaaatataattgctattatttatgtcttcaaattttcaacatctcttctcatagttagttacttagattattttaagaatgcgtttcgaatttttgaattcaaaattcctaatgaaaattattttttcaaccatctaactgaaatcaaacgtgttgcattcatctataataagtattttacaaaatcctttatgcacatacgtagatttataaaggatcaattacgagtataagaaattctcatttccctttttcctttgcttctctctcaggtgccctgcttgcaggaattataaggtattac

SEQ ID NO: 28523 - DNA, 881 bp, Medicago truncatula
  Intron number 1 from transcript Medtr3g031150.1 (locus Med tr3g031150) derived from phytozome v7.0 (chr-ID MtChr3; po s 8680978 to 8681858 reverse strand)
cataactaccaacaagttggtggtaccagaaggtacatataattcagttgttcaacaagctccacaaataaattattatgagtcagataaaaaaaaccgatggatgtaagtatgtatctcattgttaatttctttgtcatattgtgtacaactagaatacttttttttttaactaatatttaacttatctttgtaacagatatatattaacaaattaaaagagttggaagagcaaaggatttaaatcattctttggcaatttttattttttatgatggttaaaataaagtaaaaactatagccatcttttaattcttgaaattctcttagtgatttaattcttgaatgttttaattgtatatggtgctatgtataatgaattcactaattctaacaacctacattacaaattgattttcagttatgtttccttttttcctaaaattataatgtgtggtatgacttatatagatggagaagagcaaaattattggacctttctcattacttcttttatgaaattacatattggatattgtttgatgatcgtagttagcggttgttgatgacgatgaaagataaactatatatcaaaatttgataggattgtacaaaagaaacatagatattttatattaagggattaaaaaattatctacctccaatatccgattattgcaaattatcgttgtcgtccattgcgctcttcaaaaccctaaataaatttcacccaagaatcacataaattaaatttgattactttgtttgttagaagatctaaaagctaggcaaatagtaaatctataaaaatgaatactgagaaatatgctagaaaaattaaatcaggaagggtctcttaacctttattattaaaagtcgtt

SEQ ID NO: 28524 - DNA, 958 bp, Medicago truncatula
  Intron number 2 from transcript Medtr3g122970.1 (locus Med tr3g122970) derived from phytozome v7.0 (chr-ID MtChr3; po s 30728592 to 30729549 reverse strand)
ccaatctgttaactcgatttgcttcggctacattggtgtgctatcataaaagctagaacatgagatattttttaagtgatgcatgcctcaattgcagggtttatgttagttttaatagtttgtaagttgtttgtatgtgtgatccttttgtccgtgttagcataaataatatatgaaaattagatatttgttttaattttgaagtttatattggttgaaatgacgataaagcataacatgggagcttcattgcgtgtgattttgacaggttcaattgtattggagcagctcaaatacgtcaagcatctgtatcaaattcgaaatctcacttaggtatagcgtttttctcttgcctatattccctattttgtgatatcacaaaatttgaccgaattcagtcccattttcttccagattttcaggttgtctcttatccatgcattcatatcctgtaacttggttttctttttatggattttggttgagtacttatttgtgtggatttattgttcccaggcttgctaatattgttttgtgaaatgtaattttggttgctgtctgttttctatggctattgtttttcatatcctctcaaggtgagaggaaggaactatagtgccttcctcttatttggagttatcttctttttgacgacaaaaactctgatattctaaaatacaatacatttattatgtgaaactttatgcagttaatttgattttacaaaccattgttgtcagtttattgcatgctgctcccatcacataaataagggtctggaaggtcaaatacaaacctcaattgtaaatgctacatattatgcaagagcagcacattcattcaatttgagcagcatgaggttagtatcaaactcttactctttcgacatgcatatcaaatagtttgaagctttctatttatagtttgaaactcttattcttccaaaacacaagctaag

SEQ ID NO: 28525 - DNA, 474 bp, Medicago truncatula
  Intron number 1 from transcript Medtr3g148120.1 (locus Med tr3g148120) derived from phytozome v7.0 (chr-ID MtChr3; po s 38501605 to 38502078 reverse strand)
tgaagtttatttccagataaaaaaattgttcaaaagtaaatagctaacaaaaaaaattaatacaataaaaagtacatctcatttctgaactaaagtctgggaaggatcaaagcgcaatgaaaaaatgggagtgcgaaaagtcacttttatgtttctttctagtctcgctcttcttaaaaacagtttgtctatcatgagttattgggggattacttttcccacctatcaccttctcccgcaccctattttttttaggaaatttctctataactatataatgtgactctaaaaattaatttcttcatttgattactaatcattttcattgctttcacatcaagaaactctatattggcacaatctggattctacaatccaaagaattcaaatttcaattcaaaatatagaatctgagtgtcatttttacataagcatgccaattttcttaaattttatacactgtttcaaatgtag

SEQ ID NO: 28526 - DNA, 131 bp, Medicago truncatula
  Intron number 1 from transcript Medtr1g130360.1 (locus Med tr1g130360) derived from phytozome v7.0 (chr-ID MtChr1; po s 29358302 to 29358432 reverse strand)
aatccttcaatatcagttatattcaggtaataaatatataaaaacccttttttgttattattattattattattttctcgtttatgcataatattgaagatcaagagtttttgaatttgtttgttttatag

SEQ ID NO: 28527 - DNA, 194 bp, Medicago truncatula
  Intron number 1 from transcript Medtr3g097370.1 (locus Med tr3g097370) derived from phytozome v7.0 (chr-ID MtChr3; po s 23265241 to 23265434)
gaaggcttgtgcttttcttgttggtaagactaagcatgcatgttttgttaaattttggtttgattgaaactgagcttaattaatttttgaagtttttttctttgcaaaattcttaataattgtttatattattattatggggagttatatatagcatgatactaggtttttacttatatatattaattcagggt

SEQ ID NO: 28528 - DNA, 727 bp, Medicago truncatula
  Intron number 2 from transcript Medtr1g106730.1 (locus Med tr1g106730) derived from phytozome v7.0 (chr-ID MtChr1; po s 22342303 to 22343029)
cacatagcacttgcaatcttcttcgcaaagttcaggtattaaagcaattggtcacatcattgttcactgtatatttatgtttccactttctacatatcaaatgttgcaactttgagttttgctgaatgaagcgaacaatggaatgagttaggcctaatccaagattgtaagagaagcaagaaaaaattactccttactaggattttgtttatggaagttggatagttatgttcctctcctcgaacatattatgtgcatttccccataactctgctatcacaaacaaataactgccctgtatggcggatctctatgatgtaactgacggcagcaatagtgaaaaacactcccatgcatcagtccattcttcttctggcagctaatgctgtcggatgcgattcgttaaaactaaaatgtgaaacaatttgctgacaagggacataggtacagagaatatagtttctgttttttttctttatcttcgtagcttccttttcttattctctttaaactgccaaacatttgtttactcctggaatttcttgaaatttgtgattcttgttgctctgttacctccataactaagagaagtatctgttgaatcctagatagtttacgcacactgaggcggataaattttaaggacagtcttcgtgacgcctcaggttaatactaacatgttcaatttgcaggtttactttctagttaatcttgcagaatccggttc

SEQ ID NO: 28529 - DNA, 524 bp, Medicago truncatula
  Intron number 2 from transcript Medtr3g151050.1 (locus Med tr3g151050) derived from phytozome v7.0 (chr-ID MtChr3; po s 39915282 to 39915805 reverse strand)
ggcagccgtacatcatattgacagaaagggtaaaggtatgagattttgtgtcttcattgtcttgtgaatgcttcgcataagttatttgttttgttctcttcaattcatgttatcatttttaaatggcatgtacttcatgttaactctagtataaccatgtggaaaatgactgacataatttgaatccaaagatgatctatgcactcaactttattattcaactcatttttaggcgaatgtatctacacataaacaatttcacgttcagctcaatgacgttgattgaaattgactttgtctcagaattggttgtaacttaagcaagaatttgtatcttttgaatccaagagtgaattttacgctcaaatttattgttcaactcacttgtacgtaaacataaaccacttcacaatcaatccccttttaactaaaactaaaaccaatttttataaacaaaaaattacaactaaatatctactttatggtgttccattccgattttgcaggaaaaccagtgattgttg

SEQ ID NO: 28530 - DNA, 751 bp, Medicago truncatula
  Intron number 3 from transcript Medtr2g034710.1 (locus Med tr2g034710) derived from phytozome v7.0 (chr-ID MtChr2; po s 9731341 to 9732091 reverse strand)
ttattacaaacgttaacactggcaagacgttcgaggtaagtttaaggctcctcactgttctagtttgattgcattagtcttgtgcacatggtgttttgcgctgtggatctgcatctatttttgctatgttacctagttttggttttttgttacatagtttgttcatttttttattagtatatggctcaattcaagattgcattaacgatatgttttccaaactccaaatctacaatagtagttgttgtaattaaactgtgacgggaagaataaattacaaagatatacaaaattatgggatctttcaatattaatttaccctcagattgtcaatttcttagtagtccacggattcaggtctctgacacaaagtgcgattggattcaaacttttacttgctacttcctacatgcagcaatatcgactaatttttcaagaacttatcctatagaaaaatatctatttaaccatacttctaatattatcctcttgcatattgtagtcttgtcacctcattttataccttttttttttctttctaaaaatattgctacaacaatgactagtgctagttttagcttgtactagttcaaaggcatgaaacatgattgaaaacaatatttggtgttatgctctcataagaacattttcatgcctctgctttcatttattgcattttgaaatttgtgattttgtggctgaaacctttattgtctacaaatgcaggttcctcgattgtttcggaagcgta

SEQ ID NO: 28531 - DNA, 827 bp, Medicago truncatula
  Intron number 2 from transcript Medtr3g024770.1 (locus Med tr3g024770) derived from phytozome v7.0 (chr-ID MtChr3; po s 6308772 to 6309598 reverse strand)
gaggcgaaatattccatctaagtctcggctaacaggtatagcttattacttaatttctttgcatatatatgaaggctttgaatcttatttaatattgttattaacaatgacaaactaggtgaatgttaatagagtagcggtcatgggtggtttactttagcttttagatagattttacatgattatttaatgggttttgccttggaattattgaagcttggatgtatcttttaaaagtacaagtgctatatctgaagcagcatttattgtttcttgtacctgtccaattttgatagtttaaattaaacctatgactgtaatattcatgaactttaatattttttaaccttctactctatttcaccttttgatctttccactattcttatttcgcctatctgtaaatgtaaatgattctaaattgtaaatgtaactagagcaggaatacatccgttagttttttatttgctttgttttgactattttatgtagtcacctgacctgtatgaccctctttttagtgaggttgagaccttaaaggcaccatttgctaactggattagaataggacagaacataaataactaaggaggcctgaattttatacatttatacgagttattcccccgctcccattcctaatttcatgtaattttaaagttgtcttactgaaccttccaatcatttttctatctgctttgaagagctggagaattacagaaatttatacgatcttgtttattaaaattttcattggcatttttttctttctcatctgctgtatataatcattgatgttttgttatggaccaaactctttgcagagg

SEQ ID NO: 28532 - DNA, 736 bp, Medicago truncatula
  Intron number 1 from transcript Medtr3g125130.1 (locus Med tr3g125130) derived from phytozome v7.0 (chr-ID MtChr3; po s 32032565 to 32033300)
ggtcactggtggacaaggactaagctttttgatatgtgagtaacttgattctacaaattgagatgcattttttttccttctactatttagatattagattacatttttatggtcttatcttgtttcataaattagagacttgatttactactctgcatattttgtttacatgctttttttagacttaattttcatatttgggtccgggtagtgcatgctttactgtcggtttgctgatcaggcatctttatagatgataagcattgtatgaagattgatgtctcgttgtgcttttgtaagatggatgtctcattgtgcttttgtgttcaaagaatcttcaactagcgttagcttttctgcaactgatagcatcatgcaagtgataattttggacacttttgatccctgtgattttttagatgaaatgatgtatagtatgcatgaacttcagcaagatgatgttttatcagcatgactatgacgaaacatgtaaaatgtaatcattttatttcaaatagtctctgatgaaaaattggtcacttagtggctaggatgtgtattcttttgcatattcatctattataaatttttgtttgtgtgtgcacatgcattttaatagaatttccatgcaggttaggattaatatttttatgaaaattatcaaccgtttgctgctaattgctaacatgattatcagacaggggctggtattttcaggttggtagctcactgaagc

SEQ ID NO: 28533 - DNA, 888 bp, Medicago truncatula
  Intron number 1 from transcript Medtr2g129820.1 (locus Med tr2g129820) derived from phytozome v7.0 (chr-ID MtChr2; po s 31498169 to 31499056)
atcgccgttacttccgacatcaccttctccgaaaggtaccttcttcatcttctccttgttcttttttgcttaatgttattgttgaagaacgtgaatcgtaggaactgtatcatgaagagggtttcttataactattggaattggaagcgtgtgtcgttgcttgattttggaacatattttagtttatttcattttatactgtgatagtgattattacttttgtttgatttgaattgcaactgtgatggctatttctgttttcttctgcattttcggttggctttatagcttttctgggttctcttttattaatcactttaactttaattttgtgaaaaagaactaaagttttgactttgggtgttgtagcacttaagtgttgataactttcaaattcgatttattttgatgataaccattaacttgcaagtgttgctcagtttaattgtattttatctttagaaaaaataaatcatagaaaattaagtatttctctgtaacgtaatttaccctaatcaaacacttgaaatatgagaaaacagaacatgcactgacagtctaaaataattttacattgacaatcaatgagcatgttttagtctgctaaattacaagatattttgaagtagttgtatgacagggcaatattgatcggtatactgtcggtgcatgaccattaagctattgaaatattgtataccgcattggctgactggagttcggattttatttaaaaaaaaaaaaaataattggtgttttattgtttcttgattggctctgttccttatctttgttaaatttcatttataacttaataattgcttgttgaatatttgttttcaattgtatgcagctcgtatctttggagattttgcatttcagaggatt

SEQ ID NO: 28534 - DNA, 697 bp, Medicago truncatula
  Intron number 4 from transcript Medtr3g148010.2 (locus Med tr3g148010) derived from phytozome v7.0 (chr-ID MtChr3; po s 38477940 to 38478636)
acaaacctgagggtgcagaggagtttggtaatatcagtttccccttgttatgcccggtttgaattgcgtttgtcgaaaataactttagagtgtgctttaatgaagaatttagaattctaagcaatttaaattattcaattaaattactttcatttttcaatactttttatttggacggagtaataaaaaatttcattgtcatcatttttggacaacttttataaattttaattttttttgccaaatctgaaaattaaaattaggggtcagttttaattttaaaaaattttgaggggtcaaattataattgaagggtcaatttgcaattttttggaaattaattggggtcaaattgaaatttttggaaaatttgatgaccaaaatgcaaaatttgaagaattattaaattcttaacttttaggtatcatttgaaattctctaaatttaacttgaaaaaaatacttcataaatttccatcattttgaaaattcttcaaattattatccaaacaatggaattcacctcaaagtatttaagaattctctcgaaacattacattccttcaaaaacattcctgaaacctgtaaatatgcagacattgtgcaatagaaactggaacttggaagtagtagtatgtaaatatttttttgttgcagaaatttattctttgcatttaccctgtattaattctatccag

SEQ ID NO: 28535 - DNA, 666 bp, Medicago truncatula
  Intron number 1 from transcript Medtr3g137900.1 (locus Med tr3g137900) derived from phytozome v7.0 (chr-ID MtChr3; po s 35069486 to 35070151 reverse strand)
ataataaacaactcgaccacttcgtattttacttttctcaataataattacaaaatattgtgattttttttttttaaagctttttgcgtgtcaattaatggatggaaattgatttgcaaaattttctgtctctgtgggtcgtattgaatttgaaatgctttctttttctgtgcaaaacttcaattttaactcacttgtattactatccatgaatgactaaaaataagtccaaagtagaatgatgattaattattaattaaacttcattaattaaaataattaaggaagctaatggttcaattttgaccttttgagtttgttttaacatgaaattgacctattgagcttattttaagtggcatgtttatgtagggagtttgtcttttatttgatttctactttcttcttttaatcacattatttttttgtatggcatctttttagttttgattcttatttttaattttctgcaacaatatttctgtggtctatgcgagcttccatacataaatccttgccaatggagtgtaattatgttttattttatttttgtcatggaatatgattccagttactgtagacacaaattttggtcagtgctagaatttagtttctgttgtatggttacggttttgaaattttcgtcgttgatgttgcagtcgcact

SEQ ID NO: 28536 - DNA, 522 bp, Medicago truncatula
  Intron number 2 from transcript Medtr3g151240.1 (locus Med tr3g151240) derived from phytozome v7.0 (chr-ID MtChr3; po s 40057137 to 40057658)
cgttgttggcggacaagaatcgcaaattcatctatgttgaacaggcaagaatcaagactatcatctatgtagcattgacacttcacatcaaagctgtgtttggtgtccctacgacactaacacatcaagttatattcaaatatttcgtgttaacatgtcagtgttgtgtgtctgaatgtccgtgtctatttcagtgctttattgctatgcatgcaatctcaatatgcatatgcagttcataacgatatattaataatagtaatacaagaaaaattctatccgtaccaactttttatccttcattataaagtttttaaaacaatttttgtattagactcacattcatagtgctgattaattaagaagataagcaaatatggagaagaatgaggaacaaaattgaagtcataaaccctaagtcagttgtttgtgttttctttttggatcatgaatgagaagttataaatgtttattgcttgtgttacaggcattcttccagcgttggtggagagaacaaagtgg

SEQ ID NO: 28537 - DNA, 724 bp, Medicago truncatula
  Intron number 1 from transcript Medtr1g100290.1 (locus Med tr1g100290) derived from phytozome v7.0 (chr-ID MtChr1; po s 20757680 to 20758403 reverse strand)
cagacgttatcaagccgctcttcaatcccgatcaggttccttcttcttctcgaaacccctttcccccaatttctttctctctacctcaattcaattttcataaaattttacctttacatatacatactagctcagttaggctaattttcgattgtaaatgttttgatttcatctatataccaaaaattatttttaaattgaatcatcacgtcataaaattgttacttaggtccccgattttgattgaaagctgttttcacttttcagcgtatgattattaattttaattttaaggttattttatgtgtttttgttgttgctactaggaagagaaacgagaattgtatgtaatcggcaattgggatttgtgatgtatagattattgagatctttaacccgaatttaaattgtttgcctttaactaagagaagatttttataagatttgtaccactaagccaggcccttttggaataaacagcttaatctgcagcttatgctagcttacagcataaagttaaattgttttcgtttaagctataagttgttttcataacctatcttagaaaacgtatgaacatgttttaagctgtttttgtcacacaacttgtgtcagtagataataagccaatccaaacaggcttaattctttgcctcttaactccatatgtttgtttatttgtaagtatttgtggttattgatgtgagattgtgcatatgtagat

SEQ ID NO: 28538 - DNA, 307 bp, Medicago truncatula
  Intron number 2 from transcript AC235671_7.1 (locus AC2356 71_7) derived from phytozome v7.0 (chr-ID AC235671; pos 28 201 to 28507 reverse strand)
ttccccttccaggttaatttcttgaatttattgtacatggtagatttgtttattttttgttgaaattgaaagtatgaagaaactgattacaaattaatatatgctcattttatacagtggagataatgaataaagctaactaataactaatcagaactaatttttaactattttaaactgattctaaataatatcaaactatatataaccctatgtttttagttaaattaaaattttctttgtgtgtttgatttgtgtgatgatgttggcagtttgtaactcgagtatcaaaagtgattcattggat

SEQ ID NO: 28539 - DNA, 629 bp, Medicago truncatula
  Intron number 1 from transcript Medtr1g093000.1 (locus Med tr1g093000) derived from phytozome v7.0 (chr-ID MtChr1; po s 18786998 to 18787626 reverse strand)
tttgtctgtctcttctcttctatctcatttgttaggtatggtatgcagttgcttttgaatattgatatttgtgcattgcagtgatttgaatatttattaatctgattggatctgaattctttgttcaattattgtattttttgaatttgtttgattgggtttactggttttgtttgtcttgtttgtagtttaattttttttttctttttcatttgctcaattggattgatatcttttttggtcgcattttgattgttctagttttgggctgctttttattgtgttgtacatatcgtagcaggtgccatgtgtttatgttgcggaaatgtgtactgttaaatggctatatgattggtgttttgttctatcgatcattttggttattaacattctgcagaaatcttcaagtcattatatgtcctttcgcgtgtatgtatgttgtcttaaggaagtggatattgatgcatttagctagtgatcatgtagaagtggttggtggcgcatcctttacttaagtttctgcataattgacaacttcttcaagagctttgtttagtttgttatcttctttgaattgacacaattgacgtttgttgtcaatgttgtttgttcttcttcttagcgccctg

SEQ ID NO: 28540 - DNA, 389 bp, Medicago truncatula
  Intron number 1 from transcript Medtr1g084010.1 (locus Med tr1g084010) derived from phytozome v7.0 (chr-ID MtChr1; po s 16771180 to 16771568 reverse strand)
gaacagagcctctgtctgtctctgctgctttctaggtattctcttcaatccatgtttttcagctttatgcttttttgtttgttttggtttctttttcccccaaaattcatgtctgtttattcttcaatgttactgcacgcgcaggtttttcacttgtctgtttcacaacagttctcaaacttttatgggtttttgtgtttgattgcaacaacctcatcacttcctaataattgattaaaactattgttctttcactgtttgtttgcagaggagtaccatttttgtacttttttttatttgtttattaatcatttttggaggtttaaggtttaatttagattttaatgacattgtttgtgttaattaacagggttttgtgtttatacact

SEQ ID NO: 28541 - DNA, 812 bp, Medicago truncatula
  Intron number 1 from transcript Medtr3g028810.1 (locus Med tr3g028810) derived from phytozome v7.0 (chr-ID MtChr3; po s 7473108 to 7473919)
gttcgaaagagtgattttctgcttggattcaaaaggtgtggttagaccctttcatctacggtgcacgtgatgatacaaagttaggttctattttcgctagatgtagagttagtttatctgatatttgtaacaactctaatgtcgagctctctaagagggaggctaacatggttgcattgtcttggattttcacaccattgacaaaatgaataattgaaacctttatattccactttcaaccaactccgggcaaatatttccaccgcctctgttactgattcaaacactattgctttgaactctcctttgcattgttagaaatagccaaagaaaagattagacaatacaaatcatattcttcacaacaaacaattttaatgccaaccagcttgacagtaattaaataaaaatatggaaaatttaacgttagttttcagaaacatgagagctttgcattaatggaatcatccatacaaacatatgatagagattctcagatgacatagacatatagaagaattgtttctagtaagtgcttttattatccaaacacatcaaatgaagatgataataactagttaaaccttcaacattaaccgcttaatgactgatctttgataatttaaaaagttagtatactcgactttgtagatctgtttacttaatgttttttggcaagtagattatttcgtaaagttcttaagaaactgatcaaaatagaaaattgttaaacaacttcctcggcaatataatttgatcagattgatatttctgcagagctagcaagaaactacattgcggggggaagcatc

SEQ ID NO: 28542 - DNA, 999 bp, Medicago truncatula
  Intron number 2 from transcript Medtr1g059590.1 (locus Med tr1g059590) derived from phytozome v7.0 (chr-ID MtChr1; po s 11667556 to 11668554)
tttcaatcgtcataacaaggtagcttatattatttacaattttctaaagatgattttatgttctgcattttcaatttcttttaggtatgtatatggtcaaattagtaacatgcttgcttgaagattagattttgggttgtttagatttgaaatcatgattatttttgaaattttaatgtcctttcacttgatcacactcttttatttgttaaattaattaattgggtattatgttgtaaatagtcttattaatattgttttacgacgcttctactaattgtaacacattgtaattgatctagattgttcataaaaaacagaggtgttcgactattgtgagattcggttcctgtgtttgcacttgatctggctatatctcgggttgttagataagaaagtttagggtttgaacagtggtgaattgtcgcaatggagaaaatactaacatgacaatttacatactaacatatgatattcgaaacaaaaagtggtgagttggagtatggggaggttaagggttcgatatcctctcttaagagtcccaaattagatgagatagtaagagctgaaaatgggtttataagtaggaggcttccctcactatacaagccggttttaaagagttcaattaggcccaacccaaacttgaagatggtacaataacctgtccaatatccattagaccatccactatcgtcgtgtcactctctggatgttcactcttgtgcgtgaggaaggtatttagagtcccatattttatgagataaagccagcatctctcactctacaagccggttttgttgggctaatctcaacccaaattcttatatcctccggttctactaattaaggattaacatatgagtcatttgctgttcaatatatttttatttttttaaaagagaatttagtacacttgtctgaagtgcattattttgaacttaagctattgaagaatttgcagttacaggtatatatttgtggagatacctgcaaggc

SEQ ID NO: 28543 - DNA, 554 bp, Medicago truncatula
  Intron number 1 from transcript Medtr4g011840.1 (locus Med tr4g011840) derived from phytozome v7.0 (chr-ID MtChr4; po s 1829572 to 1830125 reverse strand)
tgacctaccaaggtattataaaccacatcaatgttgatgagataacactattttgaaatgtattataaagttcatttgtaatattaaaatacgagttgtagtctagtcttcatccaattgtcgagttcctttgattgtgtgattctttttttaaaagctcagaaaaatattttaaaatttgagccggatttaattatacaatttaacttgttaaaccaagaatcgatcaatttgccaattggtttgatctgcattgtacggtagtgtgatttaaactttttacttataagtttttttaatactttcttaaaattgtatttgttatcttatttaatcgtgattaaaccaattaaacaaactgcaccatataacctaaattgattttccatgaaaatatttgaaatgagaatatggagacaattattcataacatattttaattatttgaattgtatctatgaatttgatatgcttttacataattaagtttggttatataaaattttgagctttcttgaaatttatttactttttttatgttaatataaggttca

SEQ ID NO: 28544 - DNA, 678 bp, Medicago truncatula
  Intron number 2 from transcript AC235756_7.1 (locus AC2357 56_7) derived from phytozome v7.0 (chr-ID AC235756; pos 59 620 to 60297 reverse strand)
aggtaagcgctttccctatgtgttaattactgcttcataccaatttttctttctattagctttggcatgactaatacagtgaagtgaactctttccacctaacctctgaactaattgaaagaaagaaagcaatgtatattatctttatatatttctttactctaaattaacatgtctcgtcattttaatttatttaaattaagataccatgttaaaccacctttaattttgtttttccttaaaattggagagtaaacacacacacacacacgaatttcaaaattaatcaagaagacaagaaccaacctttgaaaatgtaggtctctttagaaaaaacttatgggttcgtttgtaatacatgttttgttttgtcaagatagaaatgtgtgccacgctttatgcttaaaatctaaaaagaacctgtttaaatgtatttggttggtatgccatgtactataatggaagctgtcgtttgtagagctaacaatatatgatgctttcactcagttcatctattgttttgaacatgttaactagtaaatccaatcattgtgttgttaatgaactatttaaagacactaatgtttaaataaactgtaagttagcaactattatgtgccatctgcatttgttaataatccacagacgctgacaatgtgtgccttgtgtgtcagggac

SEQ ID NO: 28545 - DNA, 427 bp, Medicago truncatula
  Intron number 1 from transcript Medtr3g166170.1 (locus Med tr3g166170) derived from phytozome v7.0 (chr-ID MtChr3; po s 43441958 to 43442384 reverse strand)
tatgtatatatataccttaatttcttgataaaatacattaagaagggttgatcttcgttagaaatatgtgtttaatagcttttttgttcttggttttccgtaaactctgtttttattagtaaatgagaaggttttgttgtgatatttgatgtttgggttggaaaaaatgtgtgttagtgattttcatagtactgggtggatcaaagagccaaaatattatgttaggaagcactcactgtttggaagattaacatttgttcgggttcttcactggatcatcatctccatgatcattaattcattaagaacataaaacataaaaataagttgagagtaggaaaaatagggatgagaaacaattattttgtttcaaatagtagaacttaagagaaaaatataaattaaatagatctaatttatagtaaac

SEQ ID NO: 28546 - DNA, 686 bp, Medicago truncatula
  Intron number 3 from transcript Medtr2g123560.1 (locus Med tr2g123560) derived from phytozome v7.0 (chr-ID MtChr2; po s 30029001 to 30029686)
tgcttgggacattgatcattggtttccttgttcaagtaattgagttttttctctcactttcaatttaatctttttagaatttacaatgtgcagaactcatcaatttagtctccaaactatataactattagaaatagtctattagagtatatgagatccttcaatttagtcccaaaatatatgaaaaagtattaagaataaagcatcactttagtctctaaagtctaaactatataaatatatataataagtagtctccaacttacttgttcaaaaaaatagcagtttccaacgtatatgaaattcgtcaatttagtcccaaaatatatgaaaatctatcaatttagtatgtaacatcttaataggagggattaaattgatggatattaagtactttagggactacttattacatttatatagtttatggattaaactgaacagtgagtcatagcttggggactaaattctaaattgatggtttattctcaaaattagttcggaaggctatcttattttgatctccatgaatgtatgtatataggtttaaaaagctttttagtaattgaagaaggttgaatttattttaattgagctacaaacgaactaggccttggtgtgattttgctcattttgggatgacaattgtaggaggaggtttgactgttttaagcaatctaaggata

SEQ ID NO: 28547 - DNA, 944 bp, Medicago truncatula
  Intron number 4 from transcript AC235665_38.2 (locus AC235 665_38) derived from phytozome v7.0 (chr-ID AC235665; pos 201812 to 202755 reverse strand)
tggcatccctgactatagaaggttctcactttttctttctagtatcaattattaggttaaccgaaaaatttatttagcaacactagaccacggagttatgctcagaattgctacctgctattcccaatattattatatttgtaggatcttataaatgttgttaatatagcattcattgaatggttcacttgttttctattttgattttgtgcacggtataagagtgtattttgctttcattgcaaattgtgatctgatatttatacagggcccacaaagttttctcagttttttcacactttgtttgatatgtaggtgaaatgatattttgaaaattggtattttgctttcattgcaaattgtgatctgatatttatacagggcccacaaagttttctcagttttttcacactttgtttgatatgtaggtgaaatgatattttgaaaattggtattttgtatttttgggatttcaacctttacatttaatagtaatgtgctccatcagtatgtatttgtggcaaagaggggggaggaggaggagatgatatagtggccgacaatttaaatacttgaaaccatacgcatgcatgaggtagctattgaagggggtcaccatctatcaaagactgtttaccagtgccatctctgatcaatagccactgtcttttagtggcctgagtcaaagagatgtacctttctcgttgtgtatgaaatttataaatgctgtcatgaaccaattatcctaaaatcttaagctctaaaagtgaagattgcatggcctttttttgtttgtatctctaacatatgctcatccttatggagtttcatattttgcgaatatggaatgaattactaaaatttattatcattgaggctggattgctaactttttattcttcttccatttcactgattgcaatttattatttatttcagcccta

SEQ ID NO: 28548 - DNA, 528 bp, Medicago truncatula
  Intron number 4 from transcript Medtr3g143650.1 (locus Med tr3g143650) derived from phytozome v7.0 (chr-ID MtChr3; po s 37112401 to 37112928 reverse strand)
tactctttttggagagtatgttgaagagctgaactctttcctatcttccggtgaatctcaaaatgttgttgtagccattatgttgacaaaagttaaattgtttcaaggtaataatttatgactagcaattgtgattgtttgtttatacgaatatatatacttgattcatatacttttgaatcttaatgataggaaaaccaaattactattctcctacatcgggattgaatattataactaaagtatacttgattcatatacttttgtatcaatcaataatattataacatttttttttcttaagttataatattattgattgatactttttattatagctttcttagtgcaatacaaattctcctatatcgggattgatccaattaccaaattcatctcgcatacctgtaaatgagtagtttctcttacttactcctaggaccactattgaggagttgaagaatgttaataaggtttttttttatttttacaggtctattttggtaaagtttgcacaccttttggtat

SEQ ID NO: 28549 - DNA, 736 bp, Medicago truncatula
  Intron number 1 from transcript Medtr3g148330.1 (locus Med tr3g148330) derived from phytozome v7.0 (chr-ID MtChr3; po s 38599370 to 38600105)
gggtctcattgtttcaaatagtgaggtatgactttttagagaggctacaaatgacatcgatcttaaaagccttcattgatgttattaatttgaaaacatattaattcattttatttgtataaattataatttcttggtaaaaatataatttgctccctgtagaatgaatatatacaacaaaaaaagaacatcaaaaccaagaaacatttgaggggattcaatctagttaattaaatcggttaaatgaggaaccgatctaaaaagtagagatcataagttatctccttatcacaagtgaacgaaaattaggactcataaatatttttagcattttaaggtgcatgtgagcaattaaatgtgcgtaaagaaaaatcttctttttatagatcgcaattgttatatttgggtccaatgagccatgtaagactcctaacttcagtattcagaaaactcaaacgagagagcaactcaaatacctaactaaattggaggtaaattcaatcaattacgaaagcaaaatagatagttgctctttaggcatctcaaaattgtttatcttgttgaaataaaaaaaaaaaaaaaaacatgttggaagctcctatccatcagatttcgcacacaaacataatgatcgagagttactacttgatcggaagtaaatttgacgtgcctaaagagcgactatatagggaatatgatgctgtaattttcctctttctttctagccaaatcaaat

SEQ ID NO: 28550 - DNA, 862 bp, Medicago truncatula; identical to SEQ ID NO: 28079
  Intron number 1 from transcript Medtr4g015950.1 (locus Med tr4g015950) derived from phytozome v7.0 (chr-ID MtChr4; po s 3055243 to 3056104 reverse strand)

SEQ ID NO: 28551 - DNA, 874 bp, Medicago truncatula
  Intron number 1 from transcript Medtr3g076600.1 (locus Med tr3g076600) derived from phytozome v7.0 (chr-ID MtChr3; po s 17733570 to 17734443 reverse strand)
cttactgttggtgagtcattctagcctataaattttttttttttttatgccaaatccatatatgtaaagaatttaatattaaataagttttacatgtgcatataattatcaccctattttgcttcttttttatttcctaaataaatataccaaaatgattcaatttgtggatgtatcgtagaaacttctgagcagatttttagcatggatcatattgcgcctactaacaatcataattatggtgattggatattatctaaagctattttgcctcattgattagaaagaaatctcataaatcaatcaacgacccaaataaggatctttttaattctactagtactttatgcggaaaaacaagaagtctccaggtcttagggttgtcatggagggataaaagggttggtggccggtgggagatgaaagagaagaaaaaggagtatgacaacaaatttaatatagctaaagtgaaacatataacttaaaaaagaaaaatatgcttgatccttttttaccataatgatggcgtccgacaataacaaccgtcaaaatttaagttaggggtacatgtaaatatttcgacattcaaatcagtatgagtgcaaaaaatgatagtttttagtatacattgcgtgtactttgcttttgtgctgaaggggtcgttttataagcttggttacagagtaacaaaccatcaatgtcgagctctattacgtgtcataaggtgttagagtaaacggatttttcacgttacacatttgtattgcacctttagatatttgtgttgttattttagaaaatggatttttcaaattacacatacaaatcattctcatcttctctttgcacttttgcagaacccaatcttccttca

SEQ ID NO: 28552 - DNA, 653 bp, Medicago truncatula
  Intron number 1 from transcript Medtr1g013160.1 (locus Med tr1g013160) derived from phytozome v7.0 (chr-ID MtChr1; po s 2296948 to 2297600 reverse strand)
aagttcttgttgaaactcaaggaaagaatcgaaaggtatgaattaatgtcttcaattgtttataactgttcgccaaagttttaaattatggttgcagtcgtagttggagtttctttatctgaaagcaaaaaaagaaaagagaaactgtgatcaagattttaaactgttgtgttgtgattcttgatattgtggagaatcgtgaacaagttcaagtgatcttgccttaatcacaattgcagaaacataacaaaccttgatgttgcagtccaaatagtattttgttcaatttctgctacgcgagagtgctatagcactgctatatgattcaacaacattttgtactaattcgcgtattgctgaacaatagcgatttcttcaaattatgctacatgaattaacacaccggcttgatgctcaagttatattgtcctcaaaactgtttatgatgcaacatacatgaagttcagtttgaaaaagatatgaatgaattggtttttataagtgatttgagagtttaaattttgaagcatgacatggaaattcggtacatttgaagttgtttttggtgataatttatggttagaattatgattgatttttgttaaactaaatgtacagagttggacttgatattccaatagttgaagtgagat

SEQ ID NO: 28553 - DNA, 657 bp, Medicago truncatula
  Intron number 1 from transcript Medtr1g140570.1 (locus Med tr1g140570) derived from phytozome v7.0 (chr-ID MtChr1; po s 31095786 to 31096442 reverse strand)
gccctgtttttcacggtagaagaattcctagtaaggttagttagtttttttcttcagtttcatattacatttcaattattattgctttgataataattcaattgaatcataaaagatatttagctctgtgaattctgatatttgaagctctgcaaattgcttaatagaaaaaattaataaagaaaagccatgttaagagaaaaaggggaaaggaaaacagaacacaaaacagagacataaaatgcttaatattatctagcaaggctaagaatgacagttgttagaagaaaacaaagaattatagtatttaagagaaaaagacggctagaatgataatatggtaataaataaaattaaaatatatgaaatgatagtgtaaacttttcagaaaatgatactggtaaaatctgtctcgataattatgtaaaaataaataaaattacagtgtcaatatatattagttaaagtgtaagaattaatttcaataacaaaattgtccagtcaaaaagggacttaaagtggtagttttgaatctgatgtcacattttctgcatacttgtttatatgtaggctatagaattctaaatccagtaatttattaaaacatagaaataaacggtgattgataactaacccttctataatgcaggaagttga

SEQ ID NO: 28554 - DNA, 580 bp, Medicago truncatula
  Intron number 5 from transcript Medtr1g099880.1 (locus Med tr1g099880) derived from phytozome v7.0 (chr-ID MtChr1; po s 20559244 to 20559823)
tcattgacgctgaagaacttctaaaagatcctgaggtatttgagttttttcgacatgcttgattcagattagatagtaaagtacgaaaacaaggtcatgttgggttcattggaatgagatgaaaatgaattcaaataggaatcagaataagacaaattatgtatttgcttatcttgtgatatgcatatgcttacctaattaatagttgttcaaatgttactaaattttatcagtaacatttttcttgatttagttacaattttcaagtgttactaaatgtcattattgtagtagtgttagttgctctctagtagtttgacccttgtttgactatgaatatgaaatcgatagttaatacttttttatgattgatcgccaaaaaaattaatgaaactctaccaaagtagttcaccgtattctttctacacgtctttgaaatcttctttaagtttaaatttatttaagtttatgttcttcttgatacattagactgacttatatgcaaatcaaaattctaattttaatcttgctttaatttgcgatcttgttaatttgcaggctactctacggggtctctgtg

SEQ ID NO: 28555 - DNA, 809 bp, Medicago truncatula
  Intron number 1 from transcript Medtr4g022360.1 (locus Med tr4g022360) derived from phytozome v7.0 (chr-ID MtChr4; po s 4540823 to 4541631)
aagaagaagagaaagaagaagatcacacctaccaagtaatatatattttcttttctttttgattcctcttgttgatctgttttagtttatcacttcttatttcattcttctcatgaacattaagattctagcataaatacatgttggaatgattgattaattaattaatttgattagcataactaagatctagcctccatgagtcatcataattaatatattaattatcaacaacaaccttaatcattacaatttgtgatatcattaccaataacatactacaacacatccccctaatttattttgttaagaaaccaaagtgagaaacacaacatgatgataaatagaacagaatggaagaggacaaatactaaagaacagtagcaaacaaggacctcctgtgctgtggatttttatgatcaaattcaaagccataatcaccattgttgtctcaagttaattaaagtttcttacaaaagattccatttcaattttaggtaccaaaatgtgccctaaatttaaaagtaaaatttcaaataaattgacatcttagctaccctaccattcaatttcaatctacattaatagcttgtggaaggccttttaagtctgagttactaaacaagtcttaatattgcattgaacttctttttttttttttgataaattaatgttgcattgaactttgtttatatcattatgtacttaatcatatgaaacatttaatcattttgatttatatactatgagtctgttattactatttggtccacagtttattgttttaagggatcacggtgtaagtatat

SEQ ID NO: 28556 - DNA, 635 bp, Medicago truncatula
  Intron number 1 from transcript Medtr2g042840.1 (locus Med tr2g042840) derived from phytozome v7.0 (chr-ID MtChr2; po s 12122430 to 12123064 reverse strand)
tgtagaagagggtggagctaaagtttttaaatcaagtgagatattgaaatttaataagtctttgtaaatcaaatttttgagttttattaaaataatcaaataagtctttgtaacttctattattttcatcaagaaaaatagacaaacaaatcatgttggacgttagtatgtataatatataaattgaaacgaatcaaccccatgttgaagatttgtatctatttccaggaatcctcttgcaaactttttggtctgacagttataaaagaaaattgtagcacaaagatggtcacacaaatatatgtccgaatatgataattgatgtacaaaaagctttatctggactcagttgagcataacatgatttgttaggacagcaagaaatggaacaaaacaaactaaagcctacctatgtgtctatatatgaggtaccaaaataggtcagagaccaaaataactagcgtgcctttagttactagggtgacaatagaccattcaaaagagacagtgtatgtttcttcagaaataatgcatttgttttgtgtgttctctgagtgatgctggtcatggaatagaccaatgaatatatattgtattcagggacaaaataccagcagcatagacataggccaacc

SEQ ID NO: 28557 - DNA, 1015 bp, Medicago truncatula
  Intron number 1 from transcript Medtr3g137540.1 (locus Med tr3g137540) derived from phytozome v7.0 (chr-ID MtChr3; po s 34900556 to 34901570 reverse strand)
gacttttggtttgtattgttgtattgtaattaaaaatcgaattgtttgttctaaaaacttaagagaaatataacatttataattcaatgcaatttcgatttatatgcctcccttattatggttcgtacatctaaagtgttatttcaatcctcataatttttgtcgggattgctatcattaattagtgtaaatttaacattagcaaaatattcatattatgttatggaaaatgctaatcagtgccttgggtattagttaaggatacaaaaaaaaaaaagaaattatagtagttattgcattgaaaattgtgtaattaatccataaaaaatagaaaaatttcctattttaataataactttattttctggtatacttaaccgatgtcaggggcaccggttagcatgacctttatgttattcaattcattttgtttctccttttactacataaatatgttcttataatgttatcaaatcgtttaccattaatttcggtaataagaagacacactctatcacttatgagtctatcttttctccattttgcttgactccatttactcttgtttaatacatagatgactgccatgtggaaaaattaaatccaagggctgtaattaaaaaaaattaatataagtattctttgatacatcaacacacttccatcttctttcatcatcaccttcactgccgcctctgcctctttcctctcgtctcctctgccaccgctacctttcctcgttcgtacaagtggtggtgctcttcactcctttcaaaataactacgaagaaatcgttcaataccatataatcaaaaaggaagaaaaataattgaacaaaaacatgtttagaagcaaactaaggattgaatttaaccccccaaatcaatgaaattaagcaatttttaaataaaacctctttaggctagagtttcgagtctccctcaattagaaaccaccgaaaaatctataactttagataaagtttctcccagttaaacttatgtaggataaagtt

SEQ ID NO: 28558 - DNA, 765 bp, Medicago truncatula
  Intron number 1 from transcript Medtr1g010520.1 (locus Med tr1g010520) derived from phytozome v7.0 (chr-ID MtChr1; po s 1767917 to 1768681)
ctggagaaaaagaagaacaagaaatcagaagaaacgtaataacttactgacagccgtcagtaatctaaagaaaataaagtttttcggtaatttatattctctctcaaacactggaaactgtttaatcaaagaaatgttgcctatgatctttgtcctttttagatgatgtaagaaggttgtggagcttaagaagcagtggattagagctacatgtgtagtttttatgttaaccagaatttagtaattttcttaacataacatattggtttcactgcttcacaaggttgaagttctagccaaaccgcagcacctgacatacgagaagccttcagaatatattagcagatacaaccaaagcctattcccactagctgtggctgtttacatgaattatgtgacattatgatgtcctgtcatggatcataagaacttatcaatcaactcatccatgtcatagtttgtgactttcaattttggtcttaattgagttcttgtgacagggtaatagttatcaattggaacaagatttatgtatctaagattttatctttttgtattcttcctacctaaaactaaattaagtctccttttgaatttgcttgtcactgctgtctctcactatttcaacatgtttactgcatctcgcatggaaattttatggcattgcatacgttaactgttaaatatcagtttgaaagaattattggccctcatttgtttgttgcttcaggacagaaactacgtgacagtaaataatcgtgttct

SEQ ID NO: 28559 - DNA, 881 bp, Medicago truncatula
  Intron number 2 from transcript Medtr1g010520.1 (locus Med tr1g010520) derived from phytozome v7.0 (chr-ID MtChr1; po s 1768675 to 1769555)
atcgtgttctctctccagaatttcgtggtcgtgtaagctttgggcttgatgttctgaatttattgttttttaggatgaaaataccagttctgtcgttgtacaatgttattaacatgcggcaaaagaagacttcagttgatgttggtcttgcttttagttgcttgaaatttttaaatcaattgatttatatccttcactctgtagtttttcccttgctatgcatatagacactctaatttcaggctacaacacatatacatattcacagatctattcctttgaattctgttaataaatgcaatttatatgatatatgattggttctgtgctgtttttacctttgtctctagttttttttctccctattgtctatacttttttaaattaaattcatactgcaatattcatttaagtcatcattgctttgggaacatttctcccgttgtcttttatttggcccataaaagaaatccataaagccagtttgaatccttgtcacctgcttcactgatttccataatggctaggaaatgacatcagaaaacatggtgaatttgcatactatgcggatttcaacaacttcatattatttatgaattgctcagaattcttatcgagcaataatccctctccctcatgaacgagccttatgtatttaattccccacaaatctcttccgcccataagatgcagggggaattagataattatattaatagatgagttcttttggtttcatattctacatgacttaactcatgataagcttgcccattttcagttaatttttgctttgtagaagtgagacgtgtgatgagttttatgccatttttgggtgatatttaggtttcagcttttctttcacatcatttttcggaggt

SEQ ID NO: 28560 - DNA, 527 bp, Medicago truncatula
  Intron number 7 from transcript Medtr2g118240.1 (locus Med tr2g118240) derived from phytozome v7.0 (chr-ID MtChr2; po s 28081592 to 28082118)
tgcttactttgcatagtccttgccaggcaagacatgttcttaataatacttgctttaatttttaacgtccatctatagtttggaaatttattgtaagtgatacttgtggttcattagtatgattactttactattttcatatatttgagtaaaacaagagaatatgattacttactaattttatttagttctgttaatacataatccagcgaatgattacttgttgttagaagaggtcagcaatgtaaaataaatattttgtacagggaacatatatatgagtctaatgatcaagaggatatataatattaagaagaaacaatagttataaatttgtggaaaaaatataaaatgttttagaggccataaataacttatcaggtggagttgtggtgcggaatgatgcaaaaggtatatcaatccttgtgattttatgcgttttaaagaaatgtagttagacacattattaatttcccttcatcgttttacaagtacttgaaaattctgtttgatcttgcaggaactag

SEQ ID NO: 28561 - DNA, 261 bp, Medicago truncatula
  Intron number 1 from transcript Medtr3g138480.1 (locus Med tr3g138480) derived from phytozome v7.0 (chr-ID MtChr3; po s 35409371 to 35409631 reverse strand)
cttcattttctattaattgctcttcctctcctcaggtattttacttatgctcttgttttttttatcattctaattcttcttgattccttgactcgttgatttgttcatagtataaatcttgattttttgttttaatggtgatcttgattttcatgcataatagaaatctaattacactgagttctttaaagttactatggttgaactaacaattttgatatttcatctcatgatgaaaacaattagtctcttcatataata

SEQ ID NO: 28562 - DNA, 974 bp, Medicago truncatula
  Intron number 1 from transcript Medtr2g015110.1 (locus Med tr2g015110) derived from phytozome v7.0 (chr-ID MtChr2; po s 4036617 to 4037590)
ctcttagcacacacaacactatccaattcaggtaattaataatcacttaattaattaatcgattaatgcaacttcttcttcttcttcttgcttttctccttccattgtgtagtgttagtgattgggtttttgaatttttaacatttcttttcttccttcttcaatcaatttatgattcgatcatcgtttcttgtttgtactgtttagttttttgtttccaaattgtggtgattcagatacccattttctttaatggtttctttatatagaagaaatgtcactaagggtttaagacttagatcctgtttggataaacaacttggttatgcttacaaataagctattcttataacaaaactgttttcatttaagctatacaagttgtttccatggtattatgacccattttggatcaacaactcattttcagcttatagcactaagtgtttgtcatgataagtgcttatgtataagttatttctatagcaaaaggtaaaataaagttaaattgtttttgtatagtttatagactgttttcacaagctatcttggagaacttatgaaaataagctaaaaacagtttatgaataatgtcataagttgtttttcgtaaatctcccaaacagtcttacgaaacttatgatagtagttaaactcaaatgcagagtttgtggaaataagttgaaaacaacttatggaaataagccaaaccagatagaaccttaagaatctcattcatttatctagcttggtacttcaatacttgaatcattccccaaatcatggctatgttaaatttgctctgtgtccctttgtttttttgactgaaaagtataatcatgtggtataagcaattgtacacaggcacattctatagctcagatcctttggatttcttgaccttattcattcacaatctatataattttgaaacattagttgattctttttatcaatttatttgacagtgttcg

SEQ ID NO: 28563 - DNA, 835 bp, Medicago truncatula
  Intron number 1 from transcript Medtr3g124040.1 (locus Med tr3g124040) derived from phytozome v7.0 (chr-ID MtChr3; po s 31341369 to 31342203 reverse strand)
aaccgacgattcattatctatatcaaacaaggaaggtaagttacattaattatagtactaagtccttttcactgtttttcttcttctttttctcactaaatttcactttttcaatcttgttgatttttcattggtcgctatgcattgcggtgtgattgcgtcattgacctgttgaccattaataattaactgtaatcatgtgattagcttaataatattgtaataattgtactccgtgcctagctccatcctcatttaaaatgattttgatattataaatgtttatctggatctatccttccttgtaaacaaaaggttacattatgttttttaatggaaaatggtaactagtgtttctgggacattctttaagatctctaaaacgtaattttttttttgaaaattaatgtaatcaatgcattcgaaattgaaatttttggcttttttaatgaaataatttcttcttttggaatgcttaaagagtgccccagagacattcgttaataaaatcatttttaattaattaattagcttgtgacagtgtagtgttgcttttaaaattggtaaacacccttattgatcattttatcattctcgaaaatatttcagtcaatcaaatatatggtatatgtaaccacattttttcagttacgtgaccactatttaaaagttgaaaaatgtgatcacacagttaaaatgtacgtgaccacagtggaaaaatagtaatgataatgctacaattatggagtagataaaaagtgaacactttttagttaatgcaaattaatcctacgtttcaggtacgaagaggacaatttaaaggtgggaaggaaga

SEQ ID NO: 28564 - DNA, 982 bp, Medicago truncatula
  Intron number 1 from transcript Medtr3g064620.1 (locus Med tr3g064620) derived from phytozome v7.0 (chr-ID MtChr3; po s 14806486 to 14807467)
gcttggtatgtgaagtcagtgacatgacataactgagtgagtgagtttggtaggaaaataaaagaatgttagctattggaaaaaacagtggaagactttgaattttgaagtcagtgatattatgaatgtttgaatcttatgttttaatatttgctttttcaaatcgccttaaagcctctacttgtgatactgctttttcaaattgacttagttgtggaaattacaatctgtcagcaagtgatgtaattttaatgaattgagagtaatacatttatttttaccataggaggtttttctttatcttttatctccagctaaactttttctttcctctttcttccaacttcacctacttgttactgtgcgccaattcgttggtttcaaggaaattataggagaatttgtaacattaatcggtacggaagtatcaattcacagttcgcagcatatcaagagaattatgtgactatgatactttcgtggcatagagatgtaatatgaagattttaatactaaatattatcaccattgatatttgatacaggcgctagattatcataaaaatgtggaaattatgtaactaagatttttcaagcatctatatattaattatcaatatgtgaatgcagacttctccattttatcttatataacaatattggccttttcacacaattaagagttgtaagaagcaaagtttgactcacggaactgatatgctgttaaaatttgcggctagaaaattaaattttggatcgacggatgggtaaaattggagccattcatgcacatttttcccatattatatttggtcgttgccaacaaaaacttgacagtggcagaagtgggtttgtgaaatgatgattcatggaactgacagctaccttggcgacgatcattatttagttgggaagaaactatctgtatataattgtgattatgttgactgttatttctttgatcaagagagaaagtgacacat

SEQ ID NO: 28565 - DNA, 360 bp, Medicago truncatula
  Intron number 3 from transcript AC235758_21.2 (locus AC235 758_21) derived from phytozome v7.0 (chr-ID AC235758; pos 125559 to 125918 reverse strand)
ctcctcaccagcaaaaccaggcaaaacttgtacatgtaagtctgaaactaaaccctgactatttattgtagagtaatcagaatcttggcacaatagttgaagtttactctgtgtggttaggatgtcacaggtttgagttatgaattcgacctttttgcaaatacgcctgcaatatatccaaaatagactcgaccctttgattttcgaccccattacggcagtttctttatagcaccaagttgccttattttaggtttatgtggtctctagtgactataatttattaagtaatgttctattgatttaatcatttgattaactcttgaaaagaaaagcttactaatttgttgactctgcagt

SEQ ID NO: 28566 - DNA, 406 bp, Medicago truncatula
  Intron number 3 from transcript Medtr3g013610.1 (locus Med tr3g013610) derived from phytozome v7.0 (chr-ID MtChr3; po s 2634532 to 2634937 reverse strand)
ttggagtggtggtgctgtttatagtgatgttggagtcgtgctaatgcggggagttatgttgttgttggcttctttcttcaacattttagtggttcacaatactgatttattgtttccacgaactgttttgtggtgacctcaggtctaagtccatcttcgtcgatgtttacttgtgctgattttgggtggttttcgtgttggtttgtggctttatttggctggttcgattttggtttgtttttaagctggtttggtttgcatgactattcaaccttttcactaacttagcaatttgtcatctcaataatggtggaccaatcgcttttgcttcgaggtaggaagttattgtctagtttcaagtttttgggcagattctctagtggttcaagagtagaggagtgcctta

SEQ ID NO: 28567 - DNA, 839 bp, Medicago truncatula
  Intron number 2 from transcript Medtr3g079840.1 (locus Med tr3g079840) derived from phytozome v7.0 (chr-ID MtChr3; po s 18635979 to 18636817 reverse strand)
agtttacattaccaactaaacaggtttattttttattttagttttttgattttgaatatattttatgactgttattgtgttataggttttacttaaattattagaaaattactaaatttaattattagtttatagtcaaagtttcaatccaatacaaaagccaattttttttccgagggcatgtttgtcttgacttatttgagcttatctattgtcataagtttggtgaagaacttgaaaaaacaggttatggcattgttcataagctgttttcaacttatttttagggccgttttaataataagcttttattattattcataagctattcaaggtagtttatgaaaaaacagcttatgaagatacaactttggtcagtgagaacttatgaattaacatacaaccttgtttatttacataagctaaaaatttagtcaatccaaactgaccctgataagttctccaaaatagcttatgaaaacagcttctagctcatagaatacaatttaactttattatcttttattatagaaataacttatacataagtgcttatcatgataagcactttggctataagatgcaaataagcagtttatatcaagattgcccgagtcgaagtcaattccgattcaagcttatcaaacaagctaaaagaaatttatattgaagaaaatcagttgtgacattgttcactgtatacttgaacattgctaatcttaactagtgtgaaatgtattgaactcggatttttacatttaatgttgtaatgtgtggtaaaaatggtcatcttttaactgttaggaacttgaggaagaggctctgcgtcccccagatct

SEQ ID NO: 28568 - DNA, 891 bp, Medicago truncatula
  Intron number 1 from transcript Medtr3g076880.1 (locus Med tr3g076880) derived from phytozome v7.0 (chr-ID MtChr3; po s 17952267 to 17953157)
gattgtaagactttattttcgattgaacttggaaaggaaatttaagcttaatgtgatttcttttctttatgttttgttgagaaatgcaattaatcaaggttatcaaaatcaaatctaccagtttgataaaaaaaaaaaaaaaaaaaaaaaaaaaaaaaaccagatgtatgttcggccccatcaaccatgaaactgccttgacagaaaacaaaggagaaaattaaaaaaaaaaaaaaaaccatgataacaacaagccaaaaccaactgtcggaccatattaattttcttcagtcaatgaataccgtactaatgcctcggacattgtgatatagtcaagcctagaacattggtgaaaaccctcgaatccttgtagaattgtaaaaaaaaccttacgatcagactcgatttacacattagagaaaccaaattcaagagctagttgaagagagctgagtatagaatgtggcacgccttcagccatgtcgatgcgggaggttgtccatgatgtccaaacacaaataaattcattaggctgcctctaaaacatattccatttccagttttctgttattgtgttgcaagatgtgaaaaacagactatgatagttatctccacgtggaaggttgtaccatcagtataaatttgaaccaaattgactacttttattttcttaattaaactggaccaaaggctaggctcaaaagaaagattatacagaaatcaaacaattggagtgaaaacttccataaaaacatttgagatgggaaagaacatttggagatggtcattgtggatgctaaagtcatattctatactttcgtgatctttactgttttttacttaagcaaatgtaatgacatgttattttatggttgtctcctacttaaggta

SEQ ID NO: 28569 - DNA, 720 bp, Medicago truncatula
  Intron number 2 from transcript Medtr3g080180.1 (locus Med tr3g080180) derived from phytozome v7.0 (chr-ID MtChr3; po s 18775824 to 18776543)
gaggaaactggttgcagatacggtgaagaagaaaggtaaatgtgagagaagaaatatggtcatttcatttccgatccaatttactcactatttctgaatttggtaaaaaacttattttgcttttgaattcccctcactgtttctggtttattgtaaattgaacatttcctataatccaattaatttatggaaaaaaaaagaagcattattttttatttatcttcaattaaaatactatgattttgatatgactatggtgatgaagagggacgtgaacaatctggaaagcaacaacaaaggattgaaattagagaagatgagaagttgaatggattgaggatagcatgtggaaagacatatgtgttaactaaaataagttttttaatctagaccatttattttgatcttgatggctgaattattttggtcttgcagtttcctctaaatgcaagacttggattttcaaatctcaacattaaaaactgacccatttcaaaactcaacgtgattcccaatttccatttttttccaaggaaattgtgtttatatagatccaaaacaaacaaacataattgaattcaaaggctttgcatcaaatgtactgctgtatcggttaccgaccgtggaagaagaaagtcttttttggaatgaccgtgaatgggttgccgaccttgaatgggtgtaggaaggtggcggcacggtggtggaaggttgcggcgg

SEQ ID NO: 28570 - DNA, 902 bp, Medicago truncatula
  Intron number 1 from transcript Medtr2g025100.1 (locus Med tr2g025100) derived from phytozome v7.0 (chr-ID MtChr2; po s 6579206 to 6580107)
tcctcaatctcatcaccccactagggttagctcaggtttgatgctaaattttgtatctttttttggtttttgtgattttgccctcttttgttgattgttgttttgtgttaaattctgttcaattttgtgtttttgtttatttatgtgacctaatttgtgtgcccatgttgtttgttggtttgatctggttcattcgaagtgttggttctgttgatttgatggtcggtgtgaatggtgataggttttggtttcactgaattctataattgaattttgatcctaataagtgcttctagtaacattgttgatgatctgctacttggtaaaatatgcatatgatatgaccaatcatatcacattgattctgaatgttttccaattttttgttgacaattctaggatgccaaacagattcagggtaagatagctgcattttcagccaagtgttcttcaatgtagtagatagctttgtaatattatcctggattattctggtgctgtcaaatagtggctacagtggttctatggcgctagagtgcagtggaaaattgaacagttcgctattgttttccaatacactatttagtacaaagtgatgtcaaatagcgtcgctatagcaatgtagcatttaggttattaggtagttgtgctgctggtagtatttaggttcattaaaactagttgaacaacattgttgtgatatatgatttaaggatgaaaacccgcatatggtcctaaggctatttgtaatgtgtaattacaccttatgtgactgcacatagtgattaggagcatcaacatcatggcatcaccttttccttctttctggtgcttcctactccaacttatctttaatttctcgtgtagataaatcaaaatcaaaaagtgtctcagattctaag

SEQ ID NO: 28571 - DNA, 464 bp, Medicago truncatula
  Intron number 1 from transcript Medtr3g139100.1 (locus Med tr3g139100) derived from phytozome v7.0 (chr-ID MtChr3; po s 35684185 to 35684648)
gccaaaggggtaattgttaaataatattagtagtttatttcatgaatttagtgtacatgttcgtcttaactgcaaacactggtgttcttgtaagtgtgatcagcatcatgaagtgtctacattcaatgtcacattgctcttctatagatagcaggacttgcgataaggtagataatttccattcaagagaatcaagacaaaaatgatactagtaagagactactagcatttctttttgagagaaagagagtaaagagagtctgtttttgtcatagtttagtcgtattgtatatcatctcacttgtcttacatcaacagagttattgtaatcttatccttggcgtactagattttgtggatttccctcttacattgattgagaggcttttcactgtaaatttgcgatgtaattttagtctatcattttgcttctctgcttaatgtgtatttgaaattttaagagg

SEQ ID NO: 28572 - DNA, 1013 bp, Medicago truncatula
  Intron number 1 from transcript Medtr4g022720.1 (locus Med tr4g022720) derived from phytozome v7.0 (chr-ID MtChr4; po s 4725830 to 4726842)
gaaaggtaatacttcataatgatattcttataaatttgagaaggaaaatgaaggacatttttggaaagaaaataggctacaccaaattaaagtattgtctttattaataggtatagatttatgaagtgaaaagagaaacacgaattcaatcatcccgtcagattccatccttctttctattcaagtttctcatgtttcatctttttccgttgttgttctgtcaagattgtgcatcagttctttcttagtagtttttgagtttgaatgagaggcatcagtaaaaaaaataagataggtggttatcgatgaaattactataatgcactggtttacaaattaaatttgagaaggaaaatgaaggacatttttgaaaagaaaataggctacaccaaactaaagtattgcctttattaataggtatagatttatgaagtgaaaagagaaacaaaaattcaatcatcctgtcagattccatccttctttctattcaagtttctcatgtttcatctttttccgttgttgttctgtcaagattgtgcagcagttatttcttagtagtttttgagtttgaatgagaggcattagtaaaaaaataagataggtggttatcgatgaaattactataatgcactggtttacaaattaaatttgagaaggaaaatgaaggacattttttaaaagaaaatagactacaccaaaccaaaatattacctttattaataggtatagataataaaaaatgattaaataaaacaaaacaaaacaaaaagttctgacaaaaacaaaacaaaacaaaaaattaacttttcaaatcatataaaaattatgataaacaactaacgaacaaaataaatacacttacgacctgaagcatgcatatagccacatataaatttagttcttcgcactttgtttgcagccacaaaccatgcataacaaactttattgatagagcaacttcgctactaaattttacagtaaaacgtagtagcaaagttgctctacctacaaag

SEQ ID NO: 28573 - DNA, 842 bp, Medicago truncatula
  Intron number 1 from transcript Medtr3g086740.1 (locus Med tr3g086740) derived from phytozome v7.0 (chr-ID MtChr3; po s 20416383 to 20417224)
caggaacactcccttttgatagagctcttgaacaggtctcattcttttcttttatttctatttttcataccaattttcttcttcaccttttctcttgaaacattttgaaaatcatgtctttatagttttatgttaagagtctcacatctgatatgtgatagcctgaaaatgtatttataactggaggcaatcatcatttcacaagtcaggttttgtggagttgtgttagacccaattataatttctaagactttctttttcttctcccttgtttccaattttcatattttctttaactgtgtttttttggttgttttatttactctataattgaagaaaactttcctgtgcaatgtgcataaactatttaatgtgagtccagaattttgaaggtaacacttgggctaggaatcacggcatgccgtgtccgagaccgacatatatagttagactgaattgtttgattttctcgaattctaaatggtgtcagtgtccgtatcagtgattcatagcactcgggtctagttcaaaatttagtgttttttagtcttttgttttactaaggatattttgttcatgacaatgacatagattgattttgtattaacatagttcattgatcagtatttgatttttcaacgctagacattatagactaattcatctagtgctagtgatatttgattgttgcattctcattatgaaagttatgctttcagtctttattatgaaattgccaatgtgactaaatgtttgtttacattacctcatagcgaatctgaaaaattggtttgttttgctgttcaggcaattgtatctataaagaaaggtgcatatttact

SEQ ID NO: 28574 - DNA, 376 bp, Medicago truncatula
  Intron number 1 from transcript Medtr3g013090.3 (locus Med tr3g013090) derived from phytozome v7.0 (chr-ID MtChr3; po s 2368242 to 2368617)
cacaagaattcgaggctgagagagaccagattaaggtattttctactaaagtttttttctctcctttaaacaagtgaggtagtagtagtagacacactccaactcatacttttatattcattaattgacgtaacaacacattattagttacatgtgtaaaataattttataccattagcatattgcaattaaactcttatagtatatattccattataagatttcatttagttagatttttcttcttcgagattgtaacactcaaaagaagtgatctaaaatgatgtatgtagtaatataatgaataagaacaaagcatagttcgtaattaattaatgttttggtttacatgacatgtttgttttacaggtcaagt

SEQ ID NO: 28575 - DNA, 475 bp, Medicago truncatula
  Intron number 3 from transcript Medtr1g146770.1 (locus Med tr1g146770) derived from phytozome v7.0 (chr-ID MtChr1; po s 32553562 to 32554036)
gggattctggtttgtatttaattttttaagttctattattgtgtttatcaatggattttttacaaaccaaattaccaaactattaatcctccgagttgaattcaccttttgggaaagtttttattgttcacacatacaaacatatgtgtgtatacatacatacatacatacatataagtctatacatacaaacacaaaagaagaggcacgtgattattttaatagagcatttaaatctcagccattagttttttatctcaaggctgaaaatcattcctaccattcgcattaaaatatcattctcacttgatatgattgccacctatatatatatatatatatatatatatatatctgtgtgtgtgtgtgtgatatttaattttaaattggttccttttactttgaagtttgaactcatcttatgtattgacttcttatagaaagagactgaaacacctgagcttgaaagaggtgc

SEQ ID NO: 28576 - DNA, 680 bp, Medicago truncatula
  Intron number 2 from transcript Medtr2g034400.1 (locus Med tr2g034400) derived from phytozome v7.0 (chr-ID MtChr2; po s 9603930 to 9604609)
agcaatctgatattgatcgcatccttgctcatcatgtaatttttttatccttcacttgtttaattactcttttaattattatttttaaaaaaatatttttcaaaaagaaaaaggaaacagttgttcaaactttaatgtttctttcaagtacctaaattgagtaactgataaagggtgtgagaaattttcaaactttgaatgaaaatattaatggtgtgttttatatttcctaaaaggtagttaatccgttttttctttatttcttttaaattatggagtggggtgttaatgattttgtgtaataattgtaatttaagtttttttttaacatgtggagaaaacttaaatagggtactattcttttccgttttttttttttttttgaggaaatattcttttccgttttgattaccataaaaataaataaattatatttggtggttgaaaatatatactaattttttataaaaggatagtttgagaaatactatgtttttttaattatacatttagaaaaattaattgtgattaattattatttttaatatagtgagtttcgatattttcgctaatatttttatggaaagattttttctgatagtaattgacaatagtcagaaaatattacctgtactatttatgtgtaattaatattttttgtttttttgtgtttaaacaga

SEQ ID NO: 28577 - DNA, 506 bp, Medicago truncatula
  Intron number 1 from transcript Medtr1g076480.1 (locus Med tr1g076480) derived from phytozome v7.0 (chr-ID MtChr1; po s 15253248 to 15253753 reverse strand)
ggttcagtttttcattgttcaccgtacacatctcttagcctcatatgaatatcattcatttttctaacgagaaagtatattaaagataagtgcagagggggtgccaagctcaaatataactggaaaatgggaccaacaaaaagggcgattaaaagaatccacctctaagggcatacgaagagaaacaaattcatggtcgaacaaaatagagaccaaaaattcaacctcatcaaatataaagtagattgaaatgtaaatttttaaaaataagtactcacttcggtcttattattaaaaaattaggttaacgaaagttgatatatctgactcaaaattcagatcagatacatcaattcttgttgattaaaatttttcttatgaggatcgagagagtaattagatagtccatttatatttttacacttcttcctattttgatgtggatgagctttgattgcatcagttttgtatcaattgcgttaattaagtgaagtcatctgaataag

SEQ ID NO: 28578 - DNA, 710 bp, Medicago truncatula
  Intron number 1 from transcript Medtr4g012740.1 (locus Med tr4g012740) derived from phytozome v7.0 (chr-ID MtChr4; po s 2301902 to 2302611 reverse strand)
aattctccggtggttaagggttagacgaggggtttgggattcgccggtgtttgagaaattagcctgctattgttgttgaggatcaatttttttttgaaaaccgtcatcactgagataatggattcttgttgttgttgattagcattgttattatcatctgcaacggcgactgaacctattggaggaagaatgagaaaaattagatattacatgtcataccttcaacatttcagcaaaagtcctaaatctcatttaaatgaaatattaatttcttttatcatattgtactttgtaatcaaaattacttgtttcactcaaaattcaatatcttatattttttatttataataaagatcaatacaataatacataatcaaaataatttaatgtaagttttattttctctatttcatttctactcttctctgaatctagtatggaactgtaaagtgaattgctcattttaaaacaaagaagtaaataatatgggataaaaggaggatgctattttgattaacaccttcggatctcaaatataaccaaaagtctttcaaagaaaattgatgtattttgttaaaaattttgtcaatatttgtttctgtttgaagcaaaattactattagttatttgtacatgtaaattaatgttctatctatctcatcttaattctgacagaaaaaaccagcattcaattccaacaaaagaaaact

SEQ ID NO: 28579 - DNA, 792 bp, Medicago truncatula
  Intron number 1 from transcript Medtr2g050070.1 (locus Med tr2g050070) derived from phytozome v7.0 (chr-ID MtChr2; po s 13805464 to 13806255)
ccgtgattcttgctgttcaggtggcttttctttatatactaatgtcattgttaaggtttttcgtgtttttgttgttttaggatttgtttccgagtttaattgatatgcattgtcagtgtaaagaagttttacatatgcatacgatcatggttattaaatcgagattcaaattgtgattcggaagacattctttttccccgaattgtgaattgaatgtgattaggaatcgaaagatacatttccgatattatgtcacttttaagtaaaaaaacaaatgagataacaaatttataaattgatatattgtatatgaaccttaaaataattcaatattgaagtcatatatcaaataaggaaagaaaagcggtttgttatacgaaattaacaaaacgtagtggttgactacattaggtttaggtagtgattcattagaatgagtcggaattgaagacgtgattcatgttctagtagaaggagtcggaatttaagatactaataagcatgtaatccaatcacatctcaccaactagataattctagagatgttttaggaactaatgtaataaagtgatataatgattgggtttatgtgtaaatatttttatattgacagtgcatatatctattaaatcctttgttttgttgcaagggaaaaaagtgaataaaaccattaattcagatttattgaatttcattttgtgggttgttatttatttgcataaataagatagttgattagattttgaaacttttgcttatgccgtgtttgttctctttttgatgattgatagg

SEQ ID NO: 28580 - DNA, 581 bp, Medicago truncatula
  Intron number 1 from transcript Medtr1g031950.3 (locus Med tr1g031950) derived from phytozome v7.0 (chr-ID MtChr1; po s 7865803 to 7866383)
tttcattccaacttacaaaaagaaaccattactgatattccaagcaacatgaggcatgattatgtgaaaattgacacatccttttcctctataaagtaatattatctgctcttcattcttcttgtaatgtcttaaatatggatttatcagactttacctaactgttgccttttctcttatcatgctcctcagtatccaatatccatccatccttggcctttgattaattatttaacttgaacttgatcttggtgcaagccggttacaagttcaagatagggataaaggtttgaattttattacatttaatttgatgatcattatgttgtatttcctattgttccttagtttacatttttccccccctgataatttaatatcccctcttcatccttgcctatggtatcatgtcggctaagactcattaatagaaaacaaatatattatcttctcattttcaatctctattagtcttattttacttcttgctcaagtaatctttttgaaaaacaaaaatgattgtttaacacttttatttctgtttatatatcacactctgctaattataaaatcgcagacca

SEQ ID NO: 28581 - DNA, 640 bp, Medicago truncatula
  Intron number 1 from transcript Medtr4g022140.1 (locus Med tr4g022140) derived from phytozome v7.0 (chr-ID MtChr4; po s 4412002 to 4412641)
gaagacgaagccggatctccaccgacagacggacggtatgaatgaaagtgagagtgtgataggtttttattgttagggttgcggcaacgctaaacactatcactacttcatgggccaataacagaatgggtatggatttgtgaatttgctcattacccaaacagtatcgcttattcgtaaagtaaatgtcaaaatgcttctgcgcagtgtttttttttttacctatgttgagttacgctacatgacttaacatgcgctagtgaattttttttacctaagttaagtcacgtagcgtgacttaacttgcgctagtttattctgagcgtgagttaactcacgctagttggccggtacataactgaagaacaaacatttttttagtctgtggtcagtttttcaacattcaattcacacgtttttaacactattttacacgttttttgaccacattaatggtgtttacaaactatactaccattcccacctataaatacccctccatacttccctaattcctcacaccatatcactttctccccctcatcactctctccctctatttctcttctttctttctttttcaatattctctttgaggtcaaaagtgatcaaacttcttcggggtaaaatagtgagtacc

SEQ ID NO: 28582 - DNA, 985 bp, Medicago truncatula
  Intron number 2 from transcript Medtr2g121850.1 (locus Med tr2g121850) derived from phytozome v7.0 (chr-ID MtChr2; po s 29009791 to 29010775 reverse strand)
caaagatcctcaagcagcacgaaaaagagttacaagtatggtttttcgcttctttttatttttttatttttcatttttttatgttcattctcttcaatgtatgagatttcttcatgctctgcaattatttttatgctttgtttaatgtactctttggtttgagtaaaaagttttctataagcatttttcagtttttattttcaattgcaaaaatgttatctttttttactttattttcaattgaaaaattagtgttatgtattcaaaccaagcatcattaaagtgctgaaactacaaacattatgatccttgtgaattgtgttctagaaaattctgaatctctcaagctgatgtgaaattgggttgccatagtgaattggtgagcgttagtccgtgccttgatgaccgttagattcagatcaaatagttcacaaaatatgtggattttgttctctttttttttaatccaaattaccgagcctgaaattcggtccgatcttgatccaacgctcaacaatgtgttaactgtgtacccctactgtagggactcttatcctttaaaacacaacactcctctctgacggttatgcacttcaactgtttaagatatttttgtgtttttaattcaatcatgccaaaatcaaacatgaattctatttttttacatttgcatattggcacactaatgccaaattttaagtgctcattatgccaattttttatgtaaaagttattctgtcatatggcataccacttaacttaagcctttgaagcataactcaatgcatcaattattgttgtaattgtaacaaacacaatcaagaagacttggaaaaaaaactgaaaaaagtgactcctgcatatcttatttttatttctttccgagttatcttgttctattgtttttcatccttttatggatccatgatatcattccttattttgtatagggaactgttgttcttgtttttcaaccagcagaaga

SEQ ID NO: 28583 - DNA, 815 bp, Medicago truncatula
  Intron number 1 from transcript Medtr3g144090.1 (locus Med tr3g144090) derived from phytozome v7.0 (chr-ID MtChr3; po s 37279377 to 37280191 reverse strand)
aagtggtccgacttcatagaattctggaatctattgtgagtgatagagatcccatttttgttagtaatttctggcagaaactctttaaacaacaaggtacatatttaaagctaagcactgcatacccttctcgttagtaatttccttcggaagttattaagaagttacttggccagaagaagttatcttctgagagagcaaactactctgatacatttgcagactgtaattcattttgttaatcaatgaaaatcgcaagtttacttgcaaaagcctcatctctataatgctgatctctatcattatccaatatatatttctttaatattgtgggtatcgcacacacttgatgggttacggcgtctctgagtttgcagcactctacattatccaacctttttgcttggacgtcaagtactcaagttgtttttttacaggattttttttttctttttttaaggaaggaatgaaaaaaccttgattgtacaaattacccgaaaaaataatttatcgtaatttaatttatggttttacattagtaaatgagtgtccttgtaggcttaactcaattgataaggacaatgcataatatatgcaggtcctgagttcgaactccggacaccacaaaaaaaactttagcaaatgagaaattattttctcccatatttcccgtgtgctctatgagaacttaaaaatactctttgattttcggattttagaattagtagcatgtaatagataaaggatgggaaagaggaaaaaaaatatgaaattgtattttgtcacaagaggtgttccaaagcttcttatattcg

SEQ ID NO: 28584 - DNA, 646 bp, Medicago truncatula
  Intron number 2 from transcript Medtr1g046930.1 (locus Med tr1g046930) derived from phytozome v7.0 (chr-ID MtChr1; po s 11120405 to 11121050)
tctttcagggtaattaactaaatgtccattatgctttatatttatcatccatgtcttgtaaatacacagtaatctcagctaataggttactgctgtctttcacttctatagaaatttgtagccataggaaatatttctatcattaagcttgaaactttcctcttttttttttttgtttttttaagatccaccatctgtatattagaacatttcatatcatgacctgcatgttctctgcaatttttcatcttttctatgtgaaaagcttatgttatggttgatgcatttgggtgtttatgtatagaacatagaaaacaactgaaaaacagggctgaaatagatgtaactgtacatatgtgaatgtcgatgtatttgcataacatgttccgatgaatgtaattgtgcaactttttgtttgttgacattttttaaattattatggagaaggcaagaggtagtagataatgaaaacgatggtatcaaattttatcactgtttcacctacaatcgctttctctcaaaatttgatagataacactgttaattatttgtgtttcctttttttgagaacaaattacgtcttattagattcttcctctaatatattttagctcgggcagtttaaacagaagctgtctgtgcttga

SEQ ID NO: 28585 - DNA, 946 bp, Medicago truncatula
  Intron number 2 from transcript Medtr1g010580.1 (locus Med tr1g010580) derived from phytozome v7.0 (chr-ID MtChr1; po s 1803565 to 1804510)
caacacggttggaaactgttggttgcagcacaatctaatcagattaatgaacgaacatttgttctctttcttgcattcagttttatgcctagttaacataaaggaagttatttggtttcaattcaaatttattcaactggctcttaattcattttggatccatgttatttatggagaatgttgtttggtttcaattcagatttcatccgcaaattctcgtgttcgatcatgaaatgaaggaaaaagtcatacacaatccatatagaagtcatgtatttgggttcaccgcatggatcttctcaatttatttttctatactaggggtttggattctatttgagtaaatacctctctaattttagtttctaacagtatgttctgtgttcacttctttttttctatttttgatataaaattttcactagatttgattatgttatttagtttaatataaaattgtgtcttataaaaactataaacaatgtctggaattcttataaataaagttatttttagtgacataacttaaagttgactatttagttacgttcaacgtttaagaaacataaaaattgtcacattgaagttttatttgaggaggggattatctttaaatcagctttgaacttttcaactattctaaccaatgttatgggggggagtaagagtaaaattgacaaaatacaaatttaaataatcaatacaacatttgagtaagagcaaaattcatctacaaaaccacacctgaaaatgaagcgagagtagctgcttataagtgaagtcacgtgatacattgaagaatggaggataagaatcctctaacttgaggctgggaattcaccctactttctatctatttcgtctcttatgtactctctaatatcttccttgcatgtatatttcttcactttctattctccttaagacctaaagttacagaaaggta

SEQ ID NO: 28586 - DNA, 633 bp, Medicago truncatula
  Intron number 1 from transcript Medtr2g091450.1 (locus Med tr2g091450) derived from phytozome v7.0 (chr-ID MtChr2; po s 20615416 to 20616048)
tcacgaagattacgtaagtgcttcgagttataccctcacaatactcctaatggcaattactccttcatttttaattataagattattttaaaaaaataattttatcttaaatatatgatcatctactaacaaatttatatatgaatttattattcgtttttaaaatataccatttattaagaatattaagatgtcttgaaatataaaaagtttaattataagatttttctttttaaagttttatcttagatatatgattcatttttgagaggttaggtatatgatcatctactaacaaatttatagatgaatgtgttgtttgtttttcaaataaaccatttattaagaatattaacataccttgaaatataaaaggttaaattgtacttttcgccatattttttatcaattgtgcgattttgcactccatcctttcccccctttctggtttgaaggcccccatatgatgatctgtttgattttgatgacgtgtattcatttaatttttgtcatatgtgtaaatgataattttaaaaaacaaaaaatgaattttggaaattaaaaaatggattttcccctttcttgtcttgttgtctagcagcaccaggtcacccatctcaagttggttccaaa

SEQ ID NO: 28587 - DNA, 982 bp, Medicago truncatula
  Intron number 3 from transcript Medtr2g037520.1 (locus Med tr2g037520) derived from phytozome v7.0 (chr-ID MtChr2; po s 10299351 to 10300332)
ttaaaattactagttgattgtatcaaaaaacaattataaaatgatgaactttacttttttaaacaagcaatgttaatattatgttgagaatgaggtttgaagcctcaatctcattatcacttcactcattatcactcatctctttaactatcctaccacaaccaccaaatcactcttacatctcttacaatttgcattctatacttctatttgtttccttttattcctaaacctacatgcctaataccaaaatttgagttcaaaataattttgattttcattaatttatgttcaactaatattgaattgatatgaactacaaatactaagattttttttttttttttttttttttttgcataagaaactgatatttcttccaaaccttgaaaacaaaatgagaatccttacactaaattatatgcatcctcctgttaggaacatcatgcatacagtacatgatcattttctacccttgtcattttaataggtagtaggtctaccacgtgtaggtgattgatggtaagtgtaacaaaagttaggcaccctgaacatatatggttaaaaatacaacaaacttcccctaattaattttactgtcaaataaaacatgataccgacatatatttcagctacaacttttacttatgcaaaaatgtaaaaatcaatcactcaaaataatcaaaatttatttaaagagataaccataagaaaacactaaaatttcgaagcacaaaactccttaaaaatcgttcatatctccttaaaattttatttaattttttttattaagtaatataatgactgaagcttattttttaagattttttatacactctgatcacatatcaaactcttaataacatcattaatgaaaataagtatattaattaatttatgtcacactatgttggttctatctagggacaaacttaattaattattttgaagcaattattattcttcaaagtttgaggtggga

SEQ ID NO: 28588 - DNA, 759 bp, Medicago truncatula
  Intron number 3 from transcript Medtr1g031040.1 (locus Med tr1g031040) derived from phytozome v7.0 (chr-ID MtChr1; po s 7446436 to 7447194 reverse strand)
gtgcttctgttccaaggaagctacgttcaggtgaatatgattttctaattcaaaatcaatgctttttattattattattagtttctttatatttttccataggaactctatgagtgttatgattaatttcttcacttgaagcaatctttgaagctttaactttttctttgtcatgattgttacacacttgattctgtctctttttctttgtttgtcaattattattgcaagatattatatgttttcagaaatatatagtgtagcagcctttaattaactaaagggccatttttttaatgcaaacattttggataataaagtttacttaaggtttcatatcatttgaaaaattcatatttagcagttaatttcattcaataagctgttcatgtttttgttagtatgttataggtgtgaaatattcactaacttcacgaataatttttgttcgcggataatgttattttctatttacatggctcgaacctgaaatcttatttgtttatgtttatttgcaatgtcaatatttgttttctatatgtaattataaaattttaaactgtatgggagaagaaggactataagttacgaacacaattaagttgttatgattacttacaaaagtgcttttgtcgataagcttttataaagctcacatgtcttgttctttaatctaatctattatcatgattttttgttattctgcttgcttaaagaagtatgaactttatttttacttttccttttgaaattacagcc

SEQ ID NO: 28589 - DNA, 743 bp, Medicago truncatula
  Intron number 3 from transcript Medtr3g148200.2 (locus Med tr3g148200) derived from phytozome v7.0 (chr-ID MtChr3; po s 38535733 to 38536475)
gaggtaaggacttaggcttgtttggttaaattgtaaaaattcctcgagtagaatgtaattagatgaattatgtctgaaaattcaattttgaagtcaagttatacatttttagagatgtaacctttagttatcatcaaatgattttggtaattttgaatctattttcaatgaattatttctgaaaattcaaattttgaagtgaagtaatacatatgtacaaaagcaatccgtagtttccttcaaatgattttcagtttttttttgcaaatcatttttcccttcaaaattaactcttggtaattgtggaatgcaagccaaacatgcacccctccaaagtcactctatccatgacgaggtttaccttaattttgtagagactattgatgtttctgctaaatattttttctttctttcttttcttcggtgacttgacatcttttcctttttaagtaggcattaagtaggcagaatgcttgacatgtcttttattatgcaatgtgttatacaaattgtctttgatctataatctaagtcgtgcttgagttgtcaaagatgaaaatgtaaatttgacgaatattcaatgtttatagtttcttttgtggttataaaactttgtttagcatttaattgtctaccaaatgattagcttatagttacttttgtagttataaaactttgtttagcatttaattgtctaccaaatgattagcttactcttaattgttgtccttagagctgctggg

SEQ ID NO: 28590 - DNA, 934 bp, Medicago truncatula
  Intron number 1 from transcript Medtr1g117950.1 (locus Med tr1g117950) derived from phytozome v7.0 (chr-ID MtChr1; po s 25466026 to 25466959)
ctttatctgcagaaattgaaccactgcccacccaagtaattttcatagtttgctctatcggcggtaatgagatgacagttatactgtctatatgtctggttatcaatgagagtgattgttttgcgctttcctttcagaattgttcttcacaccccgtttgagaaatgctaaacaggaaaataactgcaatattagtataatgcatatttacatggataagatgtatgcgaatatagttacatataatttataaaataaaggtagcgtaactgattttaagctaaagaaaatgtaacatgacttctaatttatcatcctcttatcttcctataaagtctagataaatgcatgcatgtacattatatgcaccccattgaccaattaacattgttgaaacaaatggaaattaagcatcacttccgcatgtgcatatatagccggtaccatttgacattgatgtcttcgaaaatttggtgcaactcataatacaatccaaactgattatgattgaatttagttgtttttgaaatagtgatgcaatatgtttcctaacacaaattatgcacatgaaataaagaatagtgcaatatgtatttttaatttgtgcgtaaaaaaactacaaaacatgtttgtgcataaaaaaaagcagacattgactaagtttataaattcagcaattagcctaacatgtgacagtttcgaaaaatcattgtacgaagtacgttgagaagaagtcgaactctgacttaagttttaactgaagtttgactctgagtttgagaagtgttaaaatcatgacaacaattcaagaaacatggtcaaaaaacaatcaaatcggattgtgaaataataagttactctaacactgtattgtgaaatcataatgcaaacttactaagtcttaaacttctcaacaaccagatgatgtaggttg

SEQ ID NO: 28591 - DNA, 704 bp, Medicago truncatula
  Intron number 4 from transcript Medtr4g022520.1 (locus Med tr4g022520) derived from phytozome v7.0 (chr-ID MtChr4; po s 4632795 to 4633498 reverse strand)
gaagcggtaagtttctttttcctttgtaatgattgtaatgtaagagtgaattttttgtgcattatagaaatgctggtaagatgcatgggatagttggatcatcttatcgcttatgcctcttcaaatttaaccatatcaattcagcgatccatcttaatgcactctttattggaaccctttaggtttatgacacaagtgtaacagaatttttgttagaatgttcaatctatctgattgttttctttttcctagctagacactggttgtgtataaattatgttttgtgcaattatcacatgttgtgcaattatttgttgccttatcacggtggaattgtatgctgagaagtgagatctaatgagatacgatacaagtttaagaactatacattatgaaaaaatgtgaaatttagttcaacttctaaatgaattctatataatttatggtctattgttgctcaactcatgagataaatgaggtgttgcttttttactaatactatttattaggagtataatatatcctggactatattttcttttttatttgctgaaactgtttcttgctggtactttgtgaataaaagggttgatgtttagcaataatactatcatcgtttggggttgattttcccttttgataatggattttcttcaaatcacttcataggaagtggaggagaaaaagaagcagaaggaagaaga

SEQ ID NO: 28592 - DNA, 462 bp, Medicago truncatula
  Intron number 1 from transcript Medtr3g067170.1 (locus Med tr3g067170) derived from phytozome v7.0 (chr-ID MtChr3; po s 15360966 to 15361427 reverse strand)
gattctgaggtttttatttttcacttaccattttacattcaaattatgatgttttttttaaaactgttgtttttgaataagctaaatgttattagtttttattttataagctatcaaaaattaagttttgttttatgtttagtgctaatatttgttgagatatagttaaggattatgaggttcttctttttaattttacattttcactaattttgaaccttataagtaatgatttggttttacttatgttgttgatatataacattgtcactctaaaaatgtgtgttatatattttgtgcttatattataaagatgatgattaaagttaaagaattagtaatttttataatgaatcagaaagctattgtattatgaagaatgatgaatgttagattatggttttaactatatcttgaaaactaattctaaatttttgaactttatataggggagtaggattc

SEQ ID NO: 28593 - DNA, 594 bp, Medicago truncatula
  Intron number 1 from transcript Medtr2g110740.1 (locus Med tr2g110740) derived from phytozome v7.0 (chr-ID MtChr2; po s 26120522 to 26121115 reverse strand)
cagccgttgattccactattcaacaagctctcaatgttccattctactccctctttatttttcttcatgtctttattttcttatagccaagttgtttaatgatgcaaaattttaaatcttttggcttgaaaaaatgttaactaatgaagataatgataacccttttgatattacgagataaattctcttccgggtgtgtaggattcaaaaatggaaatgttaggcctcgtttaatttatgaacacgttttttattttcattttctaaaatatgtgttgattttaactgttaataagaagatatacaactttttgtcaaaaaaagaagaagatatacaactttaaagtgaaaaattgtgatggaaaagaagattaaatgcaagctagagatgatgtgtttatagaaataatgaaaacaaatttttgacattttcattgtttccgaaagatgcacacaattgttcacatataagtgtctattatctttctattggcaaataaaattaacacaaattttattgaaatttaattgaaatttaattgaaattgtttcaatgtagaaatctgaggctgcttccaaggagaccaacagggc

SEQ ID NO: 28594 - DNA, 691 bp, Medicago truncatula
  Intron number 1 from transcript Medtr1g025850.1 (locus Med tr1g025850) derived from phytozome v7.0 (chr-ID MtChr1; po s 6478554 to 6479244 reverse strand)
gaagctcacctaatctacgagaactcgaaatattggtgagtacttatttaaacttgatttgagtttgcttgctgatttgtggttgcatatactgtttttgttatatatgacaagttattagagaagaactacatacggtgaagggcttgcatactgaaaaaatgggaagggcttttattttcttttaaaatttatcattatatagattcatagttaatagcggatagcggcgaatgctatagcgggatagcgcatagcgctatgaccactatttcataaaaaaaaaacaacaaaaataaggaaacagagagagcagaatagagttttataagaacaaaacagaggattgtttgtaaaatctacaaacagaaacagtgagagcagaatggagtttggaatcaataataacaaagaaaactagaacaaaaaagtaacaggacaacagagttttgagattgttaaacaaaaaaataacaggataacagagcaaacacgacaaagtagaggaagatttacagcagaggtgaagaagttttacagaacagcagaaaagcagaggacaatttacagaaatacccttgtttttattttttgaaccaaggacaattttgtattttctctaaaatgaaatagcggttcaaaccgcaaaaccgctacgaagcgttgcgccactatctcacaccgcaacgct

SEQ ID NO: 28595 - DNA, 584 bp, Medicago truncatula
  Intron number 1 from transcript Medtr2g113870.1 (locus Med tr2g113870) derived from phytozome v7.0 (chr-ID MtChr2; po s 26779290 to 26779873)
cagcctgaatcacgccaaagaattgtcaacaaaatgtaagctctagttttagtagtactgtatgactgatttgatgagtttttgactattaattcatatcagaagaacaattaaatataaattgttgattgatctgctatctttgtaaacgtgtggtctgtttgggtagagaatgctaccttgttgatttgaacaagaacttggggttttctgcgtactgtttcagagttgtgtatttggctctcgtgtgacgttcttctcattttgtttgcggttttatggaaaatggatgtttagcggaaaattatagtgcttttattaggattgaattttcctcatgttacaaagattttttttttaaggagaagattatccaaaatgataccaagaaaaattatagtttctgtaatccattctactatctgtttatttttttattttctatgagaacatgtctagatgatttcaattaggtcttcttacatgtgagtcatattccatcatttgaggattgtctaatgaatataacatatcaataattcatattatttaataattgaaccattgtttttcaattttggagt

SEQ ID NO: 28596 - DNA, 999 bp, Medicago truncatula
  Intron number 1 from transcript Medtr3g016650.1 (locus Med tr3g016650) derived from phytozome v7.0 (chr-ID MtChr3; po s 3291298 to 3292296)
catcaggtatgatcgattatactcttaattttcgaatttaaatttaagctatgtaacacttttaattttagacaaattttagtctatagtgctaattaagtttgatttataatcccattttagtttaactgattgggctgtgtttatatcttttagtttgtcttaaaaatttaaacttccgaatgttttggatctttgacttcatttcaatattttgttaaagtaaatttgaatttctcttctttttttttttaaatatttttttttttttttttggattattgatgttagagtttatagattttgtgatctgaagttttgttacttctttggttgaagatctgatggatttacttgatcatttaattcaatctacgaagcactaaaactggcaccgaacacaacactgacgacacgaagaatctagtaataatttgagaaaattgaagtggttgactgtaaaatacatgtctgtctcggtgtcttgtcagagtcgaacaccgaacatgtctttgatatgaatcttatttgttattactttgtttactggtaatagtttgagacaatcgaagtgattgaatgtaactaactacatgtctcgatgtcttgtctgtgtcagatagtgaacatgttttcgatctaaagtgttggtgctacatagcatttaattgatgagatttgttttcttagttgcatgttgcttcttggtataactttatttgctttactgctaataatttgagaaaatcaaagtgattaaatgtaactacatgtgccagtgtcttctctatgtcggatattgaacatgtcttcaatctatagtgatggtgctacatagcatttaattgatgagttttgttttttatttgcttgttgcttcttgttattactttatttaccttattattaccagcagtttgttcctatactaaaataagatttgcccttttttccatgtgaatagtcaagttggacccttggcaagcctgaagggtttcg

SEQ ID NO: 28597 - DNA, 662 bp, Medicago truncatula
  Intron number 5 from transcript AC235665_38.1 (locus AC235 665_38) derived from phytozome v7.0 (chr-ID AC235665; pos 201144 to 201805 reverse strand)
cttatagttctggtttcagaccaataacccaccaggtgagctaaagccacggtcaaccaaacttgcttctttctattgttgggtgatggttcccaaatacagtgggaaaatatcaccaacaaaatgaattgatagttaatgataggaaaacatagatctctcgcatttagataccatgctacaattggtttctttaatggcgtaaaatttctgaaatattatggtccaatgaaaaatatctgcaatatataatagtatctttgatcaagattttttgaaagtgaataaaagttgctgtttgggttaattgaatacgatatttgcatcttgacaaaggaaagtcaagcaagaaaacatagggaaataaaattctcttcatctacaaaaacagaaaaaacttcaaatataataagtgatttagaatttggcattagcacatttatattgaagatttatagcaatgcggtgaaggagggaaaaactcaactggtgattcatgccaaacatagtcatgaaaactaaggaattcaaggattgactacataatctcaattctcaaaattattttttcaattccatcttattatttgagtttaagctctgctttcttttgacattatttaaaaggagtttcttcgttcaacccgagccaggaggagata

SEQ ID NO: 28598 - DNA, 547 bp, Medicago truncatula
  Intron number 2 from transcript Medtr2g049410.1 (locus Med tr2g049410) derived from phytozome v7.0 (chr-ID MtChr2; po s 13501819 to 13502365 reverse strand)
ggaactctccaatctccaattatatttatcttcaggtcatacatagtttctgatactagtaattagccaagtccttttcttttgatttattttttgatttgttatttttctcaaatatttttcttttaagcaaagtgaaatatattaaataaaaaagaagtagaaaaatttgggggacatgactgtgactcatcaacgacataatcaacctttaaaagggaattataacttggttaacattgataaatataaatataatcagacgaatttaaatccgttacgtgaatccaaatgcgcaacagaaaaatacatttcattctgtaaaaatgatgtgtagaagaaagcgaggggcattatatcaaactagagataagcgtatttaaaccatattttatttttaatcaatcgtaaataaaccgtcaaccatgaaagataggttcatggcgaccaacagtccctgcaacataatacaatatagctttctctcgaatcaattcaatctacgtttacttggtttctaattgtgccaacagaagaaggtttgaag

SEQ ID NO: 28599 - DNA, 1043 bp, Medicago truncatula
  Intron number 1 from transcript Medtr1g046810.1 (locus Med tr1g046810) derived from phytozome v7.0 (chr-ID MtChr1; po s 11054654 to 11055696 reverse strand)
ggtcgtataccaaaggtatgtactgtactgtgtaatgtgtgaacacttgacactgaccacacatttttgctttttgcttttttgacttcactttcttgaaaaattcaagactttttcattttacttttagatgatgtttattatattaagttctaattttagaggagacaaaattgattctaaaagagtagtagtagaatttaatttaatatgtttggttgttttagagtataattgattttgtctaagaattgattttatatgaagataaaaattacagcttattttataattgatttttacacttaaattaattattcaactcactttttagttaaacataaatcattttattttcaagtcaatgttagctacaattaattcattcaaaatcaatttttatcggcttaagaacaaacataacagaaaaatggcaaatgataattaaattgctcaagtaatcaaaatgtagttgatcactctgattcacattgagtgtatgattcacattgagtgtatgtttggttttatttttggatgataaataattaattttaaaggtgtaaaattgatttttgatatgtttgattgctctcgagtagaattgattttgtctacaaacttaattgaaattggaagctagaatttttagattttggctaaggacattgtctaagaaatcaaaatatagaaattttagaaaaatctgtatttatgactttgacttgtatttaacttatcttttgaaggttccttaaacaatatccttaaaacacttaaaacacttgttaacatgacataatttatctaaatataaatcactttattttcaacgtttttttggttagaatcaggctaaatttactaattgaatttaaatttttctagttttactcatataaccagtggaatattaattaagcttgattgtaatgtgatctaaaagagtagaataaaattcatcgtgtctttatttaatctgattattggtttccaatgttgataaagggacgcttgcccttgaaaccataaccatcgggcgc

SEQ ID NO: 28600 - DNA, 663 bp, Medicago truncatula
  Intron number 2 from transcript Medtr2g056750.2 (locus Med tr2g056750) derived from phytozome v7.0 (chr-ID MtChr2; po s 15595191 to 15595853 reverse strand)
cacgggtttgtaagtagttcctctaaaaagaataggtataattttattttttttaagaaaaaatcaatgacccatgtgttttgttttgtcttgcttttcatttggactggttttgtttgctggattcaatggtccgcatcttggtataagacattggtaagactttcattggcggaatgatattttctttgttgaagaatgggtggattgatattataaatacttatattttattttattgtagaaaaaaaaaacatatattttaatatcaaaaaaataaaaataaaaatattaatatatttgtcatgggaatacgtgttctataatatagtagtaaaaaaatacaccttccgctcactaatataagcaaaaatctaattttttagatacattcagttaatgatgtatgtggtctttattatatgttatatacatcattaattgaatatatttaaaaaatatatttttgcttatattagtgaccggaggatctactacaattttataatttcaatgcaacctaagacaaaatccaaatccaactgcattaaattgaaaagataaaaatccaaatccaatggcatattcgattttgacaattatgacacatgtgaccttgctagatgagccttcctcacataaacctcttattcatttcattca

SEQ ID NO: 28601 - DNA, 896 bp, Medicago truncatula
  Intron number 2 from transcript AC235748_3.2 (locus AC2357 48_3) derived from phytozome v7.0 (chr-ID AC235748; pos 12 594 to 13489 reverse strand)
tcctgtctcagcttgaaacatgtaattgctaactcttgtgtgcataaatatcaatgttttattccggtacatgtttaattgctgcactagaattgattgggttgtctttttagtgtgtactttgatagagctattgataagcataatttcaaatagaattgatttcataaaaggactaaacttaaatacaatgcttatagtactgttgttacgttaatctcacaagactgctattttcttctcaagtgatagttttttagcactctttcaaatttgttgcttacagttttactatctttcagtaaaaaaacagcagtaacagggcttatagcacattacctaagttttatcttttgtgaaatttatgtggttagaatttagtttctaagggaagtcgtttatgtttggatcacttaactttgaaagcgagtttgatataaaagtagtgttaattttctaatccaacatagatgctacttttaatcacttctaagctaaaataaattttgtttgagagaaaccaaacatgtattttcactaacatcacagttgataggaagttaaaccaattctgatacaatccatcgataaaccaaacacacttatttaatgttaaaaggccgggtaattcttaagtcacacactactgtgagctattattttgcaacggtatttggaaatatgcaaaagttgtagctgtttcccagatgctttccaagaatgtaagttttacttatgtgaaaaacatagggaaggttttctgtttgttctttctgtttgtttggttgtaatgcctggtaatttgtaactggaccgtgcttctaaactctttgacgtgggccatttgtttttatattctttttcagggatattcttcgacacctacggggagtact

SEQ ID NO: 28602 - DNA, 803 bp, Medicago truncatula
  Intron number 2 from transcript Medtr1g090290.1 (locus Med tr1g090290) derived from phytozome v7.0 (chr-ID MtChr1; po s 18242930 to 18243732 reverse strand)
tgtgcaagcatatacttcctgttataggtaattgctctatgtcctttgatttgttattgttgtaagacgaggatagtgaaaggaaaacttgtttatttgacatgttttattttgtgaggggaatatagaatggcccgtttgaataatcaaatgtatattaaacaatactatagctaccataaattgaatctaatattccaaatcaattcaagtagcattgaagcctgtaacctaaatagccactatctgcagcttaaaagacctttgtatctttatcgagcctacttctttaccttactcctccttttattcgacacattctagcatgtttattgcaaggtaactccgatgattgtatggcatgttttaatgtataaatttgtttctttaattatactgtggaactgtttatgcaatatcactgcatttgtggcgtctgcgctttttaccccttagcaatatgtgaacattttgtagactgtttttaacctgtctcttggttattcaagtttctaaatcattttaattttaaggaaatatttcattaagaggaaaaggaatagaagacaggaggatcttggacccatctctatcaaaaacatacacaaacatatcttttaatctgtaaaagtagttgattacaatctaaactctacaacttaaatatgtaaaacatgatagattgcaaatcattttgttacaatttgatgcctggtctgtctcaaatgtgccataatatgactacttgtatcattgttgactgatctggtgttattcttatggcagataagtttggagctgct

SEQ ID NO: 28603 - DNA, 749 bp, Medicago truncatula
  Intron number 1 from transcript Medtr1g090290.1 (locus Med tr1g090290) derived from phytozome v7.0 (chr-ID MtChr1; po s 18243855 to 18244603 reverse strand)
atcgctgttcttcattcttcaactttgtttcacatgtaagcctttctcaattcttcaattctaattctttacttaatggatcaatgtttctaacattcaaaagtcctcaaattttcgataattacttcatggccatgcaattcaactcatttgcatttcattatgggcacaaaactagagttcaattatgtaagggtgatgatcagctataagctttatgtaaaatggagactattcattgacttaattttaagattttcatgcactgttaggatattttaagataaaatggcttcttctgtatctatccttttagtactgtacatgctatttacctttcatcattcctgccttttatgaaagatctgtgtttttattatccattttatattacgaaatttattatctagtcaaaaagaaaggaatatatcttatatatgtgtagggtgataggttgattttgggcctgtttggataaacagcttattcgcagcttaaagcacaagtgtttatcatgatatgcgctttataatcttgattaagctatttttatggcaaaggatataatgacgctaaattctttttgtatatgctctaagttgtttttataagctagattgaagagcttatgaaaatacgtttgaaaaagcttatgaaaattgacaaaacttatgtcagtcaacaggcacaaataagccaatcgaaacagcccttggtctgttaaattttacttgtttgtttattgagtt

SEQ ID NO: 28604 - DNA, 548 bp, Medicago truncatula
  Intron number 1 from transcript Medtr1g076690.1 (locus Med tr1g076690) derived from phytozome v7.0 (chr-ID MtChr1; po s 15374113 to 15374660 reverse strand)
aaaggtgactccacttttttttacccattggcagactctgtagaagttaaaaatttggattgattttgagacagtcgtttgatttaaagattaaaataacaccagtttagtttggattgctccactgaaaatttgacccagttattccgcattcagagtcacggactgtattctctgaggggttgatggaaaattctgttcacttattctgcattgcaattatgcttctgatatctggctggcggtgttccaatggctaggtgttgtccttataacccccaatataaccaggtccggcagttgtaaaagattaaggagaggtctgaagttgatttggaaggcaagaaacgaccgtctatttaatagtcgtgtgctgttggcgatataagtagttgacgaaataaaagtgttggtgtggtgttggtacttaggaaggatgacaaaaaccccgtgtctcttctcttgtacgagtggtcttggaatcctgttaattgttttgctcaatgattgcagagatttagggcgtcagctagcagaggcgttaatag

SEQ ID NO: 28605 - DNA, 704 bp, Medicago truncatula
  Intron number 1 from transcript Medtr3g151740.1 (locus Med tr3g151740) derived from phytozome v7.0 (chr-ID MtChr3; po s 40304399 to 40305102)
tcatctccaacctcttccataaagcacagcctgtacacactcttccattctatcatcgatctttcttcaattactctatttaattcagatttcgattcattcagttaggttttatatattaagtgtaccagctttgttattcactgttaattctgttgatgatactaataataagacgttaattatacttttaggttacttaattgttttaaattttcatgttacttataggttataatcttttattcaacaagatttccatatttatgatactagttttgttcacggaagtatcaaataaacatgtataacagtgaaaataaataggttttaaattacgatcatgctattgaagagaattatagttaagtgaagttgacgtggttttgattgtggagcagtcctagaaacaaaaaaaattggtgtatgtcgtgactttgacagaatcatggtgagcggagccgccgtaattttgcaaaagttaccctttatcacagttctggttctttttttttttaaaccatgattgcataaatgtgtgattattaggtacctgaagttttttttttttaggaaaaggatagagagaaagtaactggtctgtgttctgcagttggttcaaaccacaataactgtccttgtttgggttgtttcttgttttctaacctagttgggttgtttttgaatgacgttttattcaggat

SEQ ID NO: 28606 - DNA, 554 bp, Medicago truncatula
  Intron number 1 from transcript Medtr2g042570.1 (locus Med tr2g042570) derived from phytozome v7.0 (chr-ID MtChr2; po s 11941508 to 11942061)
actacattgcactttttctaaaggttgtggagttggtttgagtctattactcaccttccaatttctactgactttttatcttctgttttatctttgttatacattttagacaggccggagttatcaactcagatttattttatctattatcatggacattgtttgggtaatttggctatgttagaactgattgacgtttcataacaaccttatttcttgtaaaagtgctctgcatttgattatgattatccatgtacatttgaataccctagtctaatactaattaagtataatcgtgtacaatagtctaatttcaagtccttttatgtagcagaccaaatttgtcatagttaaaagttaaaaccataaaccttgagccttaaatttatgttcttcggtcaagatttatgttgtgggataacatgaaatgcaatggaaggaaatatgaatgatggagactgtgtccctaattttcaactaagaatgtgaggtttcttatgaaaaataaattgctttttgttagataaaaatttaaattcaaagaggcacgcctt

SEQ ID NO: 28607 - DNA, 479 bp, Medicago truncatula
  Intron number 2 from transcript Medtr1g065520.1 (locus Med tr1g065520) derived from phytozome v7.0 (chr-ID MtChr1; po s 13042747 to 13043225 reverse strand)
tagtcgttcctgaacctgcggcaatcaccatacctgtaagttaccaaaagatttgatggttttattcctatactgtattattattgtttttctcgtttggttttagttgattctttatgatattgatattgttgtctttccggtaaaaaattagattttatcttctttctaacttctgtccatcccaaaggatatactttttggtgtaactaaaaacagtgctagggtttccttaaaaagaaaaacagtgctagggtttccttcaaaaataaaacagtgctagggtttccttcaaaaataaaacagtgctagggtttctttggaaaattgtcacataagctttgattgatttgatcgtaaacgaaatcaatttcctgtttaaatgatttgaattcaagtactttttttaagggaattatctaaccacttaacattctttgtcattctggatttgtagggtaagagaaaatatataattt

SEQ ID NO: 28608 - DNA, 845 bp, Medicago truncatula
  Intron number 2 from transcript Medtr3g087470.1 (locus Med tr3g087470) derived from phytozome v7.0 (chr-ID MtChr3; po s 20840041 to 20840885 reverse strand)
acaaaaaaattctcatcacttggataaaggtatattttatttgttgttttttactttcttttgtttatttgtgattgcattctattagacatctacttacaaaattgtagaaggtgcataggagaaatcgtaggagaaaggaaaaaaagatctaaactgaccatgtgtacaatattttagttatgtgtgaaattttattgttgagtaatcccttattcttaaagcttattacagtttgcaatccttaaatataatattttccctttgttagttatgcattaattactctaaggctaaccttcagtttgtgactctaaattatttctctcccatttgcctctcattttaaatttcgaatttaaaaaaaaaaaaaatcaacactttacttatcaacttagttaattgttgttgtttaccatgtaaaaataaccctttaggcttcttaacattttcaataccaatacatgcaactttgaaatactaactgcaattaatgatgttcattaggttatcacattgaaaatattaaaccatccaatcagcctaattagctattccctacgcatatacacacacttccccatcttcaacataattggatataaatatacatgcaaaacatacgtaccagatccatctcctacaaatattcttgcaatcctgtttctattttcgaatccgcaatggttggttgaaactctgttgtcatatcattgtttgactagtcgttatggtgaatattgtttcctttttacaacaactttgatgttattaactgatataattcttttggttgtgttgatgtgttaggtcctttggttaccaatcccgtatctgaccttgac

SEQ ID NO: 28609 - DNA, 300 bp, Medicago truncatula
  Intron number 1 from transcript Medtr3g138480.2 (locus Med tr3g138480) derived from phytozome v7.0 (chr-ID MtChr3; po s 35409332 to 35409631 reverse strand)
cttcattttctattaattgctcttcctctcctcaggtattttacttatgctcttgttttttttatcattctaattcttcttgattccttgactcgttgatttgttcatagtataaatcttgattttttgttttaatggtgatcttgattttcatgcataatagaaatctaattacactgagttctttaaagttactatggttgaactaacaattttgatatttcatctcatgatgaaaacaattagtctcttcatataataatgcttaccctgttttgttttttcatacagaagatagca

SEQ ID NO: 28610 - DNA, 665 bp, Medicago truncatula
  Intron number 1 from transcript Medtr1g114500.1 (locus Med tr1g114500) derived from phytozome v7.0 (chr-ID MtChr1; po s 24483684 to 24484348 reverse strand)
caacaggcttactgtcacttttgttttgagtaagtacatgttattagaaaatattcatttttatatggattcaattcatatgcactgacaatttaaagaattttacactgacagtctatcacaatcgttggattgctataaatatttgactttaatcatatcttctttataaattacacaaaaggtgatttatgattggatatttacctttctagaagaatgttgcaaatttccaaagagtagaaggcgtatctgatgtctgatatgatatgacagagatgcatgtgattacattcaattaattattttttacaaattattatcggttttgacttgccagagttagtttcgtgttgagtgttcgtgtatgtgtcggtgcttcgttgagggattgcaaggtgtcttgtattacatgttctctttcttgattgcattcattcccaatggaagattatcaaagcaccaaataatggttgagtggcaatagctaccacagaatataacctatcatttgattttgggattgaccatggaaagtcatgccctttttgtttcctttataaaaaaaaatctcaattttcttaggccctaaaagggcaacccagtgcactgaaactcccgcatatgaagggttcgggaaggggtcccatcatttggtgtattgt

SEQ ID NO: 28611 - DNA, 437 bp, Medicago truncatula
  Intron number 2 from transcript Medtr3g122260.1 (locus Med tr3g122260) derived from phytozome v7.0 (chr-ID MtChr3; po s 30388094 to 30388530 reverse strand)
catagagcatagtttcattagtttgccttggcgaagttggttcttggtatagcaactgaagaatagaaggtgatatttaaaaagggttaaacatgttccttataaatatgtcaacttttctttttagtctctctaaaaaatttcttcaacttttagtctcccaaaaattttcattttcacttttgatccttcctttaaattaagtatatattttgtaatttaatctgagcttctcttgttcttggatagtttactgttttgtggcaattacatggacatttttacgtttggaattttttttccctttctttttgacggaagttcggatttttttgttatcttggctttttttttttttctttctcttttgaatggctaacattatatatataaacaaaacaggtacaaagtcagaatctcaaaccaaaaacaagacc

SEQ ID NO: 28612 - DNA, 665 bp, Medicago truncatula
  Intron number 2 from transcript Medtr1g112320.1 (locus Med tr1g112320) derived from phytozome v7.0 (chr-ID MtChr1; po s 24126493 to 24127157)
gaatcattcctcacattcttcatctgtaagcactctcaattctccacaaaagttaacggattgtatctgtatcatattctttgcaacactatgattataatctttatgtaacaccaggccgaggcagacatatggttacatttaattactttcattttaatcaaattattattgatatctaattgttagttagtgtcatgactcaatgtcttaggtttgatcccccttgccaatttcggtgggctagtccattaaacggctccctcaagtagactgtgagattgaacccctcagattagtcagtctttggcccctgagttttcaaaacaaacaaaagacgtgttagtgtcatgtccatgtccttgtctttaccggtgcttcataagctataatcaaattcaagtataagaatgaattgtattttatttatttactttttttttttacgggaatggattgtatttttagtgtttcttaataagaagttcgtgagaagtttatttccataatgtagcaaattcctggtgtgctatgtcttatggtttggatcatgctaggttttcaagacttgccttgtactgcttataaattcatactgcttatcgactttattttcaactactgttgtattcttattgtatggacgttggtgtggtatttcagat

SEQ ID NO: 28613 - DNA, 782 bp, Medicago truncatula
  Intron number 1 from transcript Medtr2g038720.1 (locus Med tr2g038720) derived from phytozome v7.0 (chr-ID MtChr2; po s 10866764 to 10867545)
cattccacactttttttctcttacacttccataaggtacaatctctttcctattttcatgtatcaatgtctttttttttctttcatcctttcattttacacattttaatatcaaattctcaataaagaagataagggtgtatgtgaattgtgaatagtagagatgttaaagttagttatgtattagttatttgtgtaagaacttagttgtttaatttgctatacacttaatgtattgtaatagtgaatgtgaatttattgtcatatcccaatttaagaatgggaaatgctaactaacgcgcctgaggcaccggtgaaggaaaccgatataaaaatatcgtatatttaactttttgtccaaaaagtgcttctaggatagacgcttatcatataagtgcttatatgtaagctttttttgtaacaattttaaatatgtcaaacggtttttatatacctaaaagttgtttttcttaacttatccttgatagcttatgaagataagttgaaaacaacttatggacatgtcataatgtgtttttgtaagcactctcaaacagtcttacaagtgcttatgccaattgataagctcaaacgaatcaattcaagcagagccttatatgaacagcatgcaaccgttatgcttttttttttcctctcttcgaatctctcttattttatcttatatatttatgattatagtattactgaaactcggaattttttctctaatatgaagattttgcatcaggactcaacttccttcctctacaagggtcttctttt

SEQ ID NO: 28614 - DNA, 885 bp, Medicago truncatula
  Intron number 1 from transcript Medtr1g086400.1 (locus Med tr1g086400) derived from phytozome v7.0 (chr-ID MtChr1; po s 17085567 to 17086451 reverse strand)
acgtcacaaaccctaattgtggttttatttgggcctatacttgggctttggaaaatctttgactggactagcttattatgctgacaaatgctgaaaaacatttctctttccccctatatctcttagaatccctaaatacacacattcggttctttttaaaagaaatatacatccgattgttttttttttttatgaaggaatacacatttgattgtaatctactaggattttttttgtaaaaaaaaaatactagatgtatgtttattttggaagttatctcctatacgcgtgtttggcagaaagaaaaaaataaaacacatctggtatataactatcatgtgtataaatgggcctcaaaagaaatgttaaaaactgaattatgaaaatttaacttcataccccattaatccactcaaaacaaattatttaccaaaaatatccttttagtttaacaaatataaagattttttttttcaaaaaacacgtatcttctaaattgaccaaagatcccaaaagaaagagcaagtttttaaatttttcctaaagttttgctttttataaggtttgtttgaatatttaaattggatatttgttttcaaaactttttggtttcaaacaaaaattttggcttgaatattcaaaccaaatctttaaaatttcaaaacattttcccttgcatatcctaaaagaatggtatttgacgtttttgaattataaaatatgaattgtatttatccattttttatcatattcaactcaatttattaaaatgttataatttacagtggcatactttaaaatacacaacatgatttaaaaaatatttttaaactttttttcaaaaccctagcttcttttttctctgccctctctctacacaaaact

SEQ ID NO: 28615 - DNA, 986 bp, Medicago truncatula
  Intron number 1 from transcript Medtr3g159660.1 (locus Med tr3g159660) derived from phytozome v7.0 (chr-ID MtChr3; po s 41840893 to 41841878)
ggtctctccttccttttgtcctgctcttgttaatcgtgagttactctactcaatttgcatgcatgcttgtatctttcacatttgcacttttcatcgtttattacttatcataatccatcattaatattcgcctttattagctattgtgcatgtttcttttaatgcatgcatgtttcttaagatacactcagttgttttctgtgcagtcatcacactcacattcgagttgatccgttagatgtgataaaatgatatttacaggttcaggtttgcatcgggtaaataactattttacatgccaaaatcttttttttttataactcaatttagttctcaaatgtgtctttagttaatcaccagtctttcaatattgctcattagtcaattcaatccttcaaattacttacttactagaggaaatgtttgtaactttcatacattcaaagactatgtttttttttttttgaaaggaaagactatgttgatattggataagtttgcttaggattttttattaaaaaaaaaaaaacttacttttgtcattttaaagtgtttgtttaggatttttaaaaaatcatttttgactttaaaatgaaaaaccgttagaattagtttttcccaaaatttattttggtcaaaaacaagggagtaacacatgaactagttaaaaaaaatatttgtattaaacaaacataaataactttaaaaaaaaaacagagatttttttaacacaaaatcaaattatttttttaaagctaaagcaaacgcatccattaattgtctcacatttaaagatcaaaatagtggttgacccgaattgtatccatctgatgtatacataataaacgtgtcttcacagtgcagcagaatgtgtcacataaaagttaaaacacttagttatgcttagttatgtgatcatgtctatcatccaaaacatgaatataagttgtcactcattaatatcctttattcaattgcattgtaga

SEQ ID NO: 28616 - DNA, 941 bp, Medicago truncatula
  Intron number 3 from transcript Medtr2g091630.1 (locus Med tr2g091630) derived from phytozome v7.0 (chr-ID MtChr2; po s 20695029 to 20695969)
cttgcaggtactatcatcttttttatgtataataattatagttgtagcgacaattttgaactatgacagttagacacgaatctgacactgatacatcgacactgatgatgattttgagtaaatgccgtggtgtcgtatcggtgtcagatactgggcatgtcttaaatttgaagtgtcggtgctatataggataggtaccggacatgtcagacagagacacaatactgacactgctatggacactcataatcatgtgagaaaattaaagtgataaagtgtaattatcacatgtgtcagtgtcgtattgttgtcagacattagacatgccttcaattaggagtgttggtgctggatagatcatgaaaaatgattttgactttccattaattgtattttttttccctactgcttaatactttactgtttgatgttttgatttgatgtgatatcattagcttttgctatatctttattttttatctcataaacttggtgtgttttcttcatagttttgtggctgttgagtttatgcttgtttgtttggtttgagtgtcaagctttggggtcaggttgaaaacaaacataactgatggtgatggatgttatttttcaagcgaactgttgattgtcctttagcatctttttgtacagaaactgaagtaattggtgtttattaattctcctatatgaaaccatgacatgaaccaatttggtgtttttctgatccatcattttggtctagtcaattttgtctctatttgaaaaaatgcttatcaacaaactcaatttagatgttcagttaaaaaaaattggaaacattgttgtcaaatgagttttgagaaaaaatttcctgtcactatggagtgccttacaaacattaggaagtaggagtaacatgaaactgattctcattttttatgcagaagcacaggaagagtttg

SEQ ID NO: 28617 - DNA, 794 bp, Medicago truncatula
  Intron number 1 from transcript Medtr1g020450.1 (locus Med tr1g020450) derived from phytozome v7.0 (chr-ID MtChr1; po s 4478054 to 4478847 reverse strand)
tacaaagcctagagattggtagttattttttaaaggtaaaagcttgagcatctgaattttgaatttgactttaggagtgactcacctattgttgtctaatatgaacaacgatcatgtgtatgcaactcctgatccgtatgtattaaaaacattatattctaatttaaatcctttattgttgttctgcttcagtatttggctgcaggtgttttgccagtaaagcttcctacaccttgtattgatctaagttttctttctttaagcgtaaacttcgataacatggcggaaattttgactgctctttgtttgctccgaagctaacccaatcttctgaaattagaaatatatgtgagtactcatgtagttaagaatatgaggacaatcatgattgacatttaaggaccattatttttcccttataaaggtggtaatagtgatagactacatcaatttgagactttccatcatcaactttatctcattgttcatgtttgacagacaaaagaggtaaagcagaatgtcaacacacagacacagttgagggaggagtcaatgctaagttgcagcaaaaaaatgaaacaactaagaaatggattttcagttcactgtattatttaaatttctgaaattggttaattgattgtgacaattaacaaagctaactcttatgtaatgaacaattccaaaggtgtttaaataaacatccttatcaactatgatgttgcttaattatccttaattgtatcttgttgtgtctcctaaatagtgttacttagcctacaacaaagaggcga

SEQ ID NO: 28618 - DNA, 374 bp, Medicago truncatula
  Intron number 2 from transcript Medtr1g007520.1 (locus Med tr1g007520) derived from phytozome v7.0 (chr-ID MtChr1; po s 475627 to 476000)
ttcaagaggtattactcaaaattttattttatttttcctttgaaaacaacttatagaagtattttctagaagtcaattttttgtttctgaaatttcacaaatatgaatgtgttttgttttgaatgattttaaaaaccgacatcaaaccggccagggttcaactgccttaaactgttaaactgggactgaccgtgattgaaccgccaaaataaccgaactgtagtaaaggccaatttaacgtccagttcggtttatagaacacttcttcacactgaaagaaattagtagtgattacatgaaatatgatagttattggtgttgctgaattgacatttaaacttcaaatttccgtgtgactgtaattttcaggagct

SEQ ID NO: 28619 - DNA, 698 bp, Medicago truncatula
  Intron number 1 from transcript Medtr1g102720.1 (locus Med tr1g102720) derived from phytozome v7.0 (chr-ID MtChr1; po s 21134985 to 21135682 reverse strand)
ttaagtactttcttcttcataccttgcaattgcaggtaatttatatagccccttcaaagttacctaatccttcaattcaatcattgctttataagggtcggtttgagtttatatactaaaataagcatttgtgaccaaacaacttatgacatgtctgtatgctatttttagcttattattttaaactctccacgataacttgtaaaaacaacttgtagcttatatgaaagcggtttgaatttattttatgtatataaacacactcatatgataaaagcttatgctatatctgtttaattaagttgtttatgcaaatagaatctatgtttaaaatggttggctggtctttaattgaattgaatgcttgtgtaaatattttttacagtgtcagtgtatggtccttaaactttttcttcgatttatgttcttcaccgttatttattaatcccagctttttaagcaatagttaagttaggtggggatactggggatagatggcaaatccgatggctaaatgctagaagaaagtgtatgtactatgatgattgagtgataattcatccaaaaggagttgttatgcttagaaaagttacaattgctcaaagctttgttgtatattgatattttatattctcacctttttcccttatttaattgtgaaagagttgggagaaaactgtggactgctacagtccagg

SEQ ID NO: 28620 - DNA, 895 bp, Medicago truncatula
  Intron number 1 from transcript Medtr1g034570.1 (locus Med tr1g034570) derived from phytozome v7.0 (chr-ID MtChr1; po s 8289368 to 8290262)
atcaggtttctcttcttctccatgttttttttcttttgtttttttttcttctatcattttgattttttattgatgaaaatttaggtaagaatacggtgtcttaatctaaggtagaaaaaccttttctgaatctattttggttttggttatgtttttattttattttttaactgtcagatattaatgtagtgtgtctgtacttgttgtttgtagatatttttttggcaattaattgtttatagattttaggctctactaaagatggaaaattaagttattttttgttaatttttccataattcatttttggttggttttctatttttggatgctaatttgtctcttttaatttactgcttaagattgattgattcttctttagctgttattatatatctgaatttagcagcttaaagtagaaatcaacttcaataaatataagtaaactattaaaataaactctatcttagttattattttatttttttgttaaccctctagttcatggaaggaccctgataatccgaagttcggtcataaattatgtatcgcatgaccataaattgttccacatagaaattgaattcagattctaccgaatgtttgtcctttgatggagcttattaatctctttggtttatagttattatttttaaagcaaagtgtttttgttgtctagatttggaaaatttaggttgtgattctgtgtatgttgtaaatttaacttaaatgttccatgatttgctcaacacctatatatgctatgatatttgtagtgtactatgaattggagaggaagattatttgatagtagaataatctgtatgactatgatgttgaagggaaatcatggatttaattttttttttccagatatttgtggcttctagattga

SEQ ID NO: 28621 - DNA, 738 bp, Medicago truncatula
  Intron number 1 from transcript Medtr2g071090.1 (locus Med tr2g071090) derived from phytozome v7.0 (chr-ID MtChr2; po s 16238287 to 16239024)
tgaagattttgaaagttgataataaattgtgtgtgtgtgtcaaactttgtgtattttttataatttatctttcagaattcatgttttatccttttttgagatatgtgttttagacttttagttgacaaattattctacatatatttatttatatttattgaaagtactaagtttattttggttgatttttgcctttatttggttgattgaaagtttaaataaacatgaattatgtctctcgttttagactcttcataaattattcttataaaatattgtattttattaaaatataaaatatatatagccgtgtccgtgtcctacgtttttaaatgttgccctgatttttttggtataaattatcttgtagttgagttttctggagttatggaaaatgttaaattgataactatgaaccttgcataatcgatatttgatagtttaattgaattaatggaagagaagtgcagtgtaattgtttaaatttctcttataagtttctgctgactactatattaatagtcttggttagtttcaatttgtgcaatttaatgctttattttttcgtcaaaaaaaaaagatgctttattttttagtgttgcaaactttgaccccctccaattagctttatgtttttcatattataatgtgattaagcttcaagtatgtttgtaattgtgattcagattataatgtgtatgtttcatacctagactaatgtttgaataatgtaggtcc

SEQ ID NO: 28622 - DNA, 837 bp, Medicago truncatula
  Intron number 2 from transcript Medtr3g124450.1 (locus Med tr3g124450) derived from phytozome v7.0 (chr-ID MtChr3; po s 31541904 to 31542740)
caagaggttgattgatgttattttcatcatttacttgcttgattttaaatatggaaaatgtatgtgcttgctatgttcgtccaggataattgtttgatcctctcatctttgttgccgagatagtaaagtagcatgctttttactttttacattagatttttatcttgggtcgaactgatatttataaaactggcttataaggtgatcggtataactcttgttaagctttatctcttttccatgtggtacttgagtttttcgtaacatttatatctccatttggtcattgtaaatccaggatcaaagtattggctattggggttgtagtctataatgttgtgcgtgtttgggttgttgtagcttgtaagatttttttttggaaagaatcaattttccaattattgattttggaaatatctgttttcttcttggggttcttatctcggaggtttggttatttctaaggattattttttatttttttaccatatggggttaaaaatggagggattattcatggatcagttttgtttgtaagattgcatcaaaagttcatttttttccatgtttttactcatccccatgaaaacgattttgatttaaatgaggtgattagagtcaatactacaaccatagcccttcccactagatcgagtcagatacatgatattcatttctactcttaggacaaaattccaatagatgtgatattttagtaggggcatacagtggaagaatggttgtgtggttggatttgtgttgtactttatgcttttttcctatctatattgtgatcaagttgtgcttatgtcgctgaatttttaattggcagtgaag

SEQ ID NO: 28623 - DNA, 819 bp, Medicago truncatula
  Intron number 2 from transcript Medtr2g021860.1 (locus Med tr2g021860) derived from phytozome v7.0 (chr-ID MtChr2; po s 5693836 to 5694654 reverse strand)
tcctgtgcatccagaccttgtaggattgggctttggtttgggcttagttctttttacgtttttttgttattttcttgctatttgcgctgcctttcttgctatctgaacctgttacttgcctacattgtttataaaaattcctaaaaaattcttagttgtttcttggtatatttttggcatttttatggtgttttcttgcatgtaaaaaatattaaaatggcatgaacaaatttccatgtgtttttacacttttggtatacttcttgctatgtttttgttcttgatactttgatatgtgttatgaataaatgataccatatcttatgatgaatatgcctctggacatgtgcttctttttgctgttttgaatatgattttatggatttcttgttttacaagcaacaagtgtttgttttagagaataaagtgtcaaatttctctatgaatttggtgtgataccttgcttgcatatgtttccattaatttcatgtcatggcttgaaacaaaattgctttcaaaattgccatgatgtgatgattatgggttacaagcacctttagatatcacatcaaagtttttaggtttattgccactttattactttttctttgccatctttatgcatttccttttaattacttcctactattgtgtgctttatgattactaaccatttcatctcatgtgccatacatttcatagcattccaccactctctccactttctttagcttagcatttattttttttgcaagttttaattcatttggtaatgtaatttgttatcattggtttgtagcttggcaaaggggccataga

SEQ ID NO: 28624 - DNA, 1042 bp, Medicago truncatula
  Intron number 3 from transcript Medtr1g100070.1 (locus Med tr1g100070) derived from phytozome v7.0 (chr-ID MtChr1; po s 20657574 to 20658615)
tggcaaagaggtctctcactttactacttggataggtactcacacctcacctcacctacttttatttttctgtggttggttatgttgaaaaaagaatattactctctatagtcattttgaagattttaccagcaaattggtgtatgtttggtatcatggttagtatgtcagaatcacaatcacggtgaccaactattaaaaaatccgacgggattctaacataccttctgtgataccaaatacaagcttaatctaaattaggctatgaaagagatgcttcaatggtgtaatagtattggtttacaacacgtatttgatatcgatacattttttatacttcccaatgtatactccgaaattatctaatttttttaattcattttaaaaatatctccattcttcttaaaaatatagacacaattgtcatctttgttatatcatactaactgaagacacaaaattgtacggttcatagtagaaagaatatattctgatattggtggctgaaagatatgttactatgagtgtgtttggaatcacggtcattgctaaactatgactaaaagcttcatgttattgattattgatatgttaatatgtggggaaaagattgcaaacttgaaagaaacacaaattatttctacttgttacgatcacaagtatattttgcattttgaggcaatcacaagtacattttggtcaataagagtaatcatatattgattattgatatgtttatgtatgaaaaaaaattagcaacgtgaatgtctcttcacaaacttgttatgtacctaggccgtatggtatcttatttttttaaaatttctcgtattcctatatccaagtcatattgtactatgtatgcaggcttcttagaagttaggtgtttgcgagcgtaaattgcaatgtgccacatctgaatatattataacaaaaggagattgaaattagaaccaaatttctccaaatgaatggtttttattttataataacacttttttctatagatttgaagaaggagctgagcagtttcggttagacg

SEQ ID NO: 28625 - DNA, 958 bp, Medicago truncatula
  Intron number 1 from transcript Medtr3g144140.2 (locus Med tr3g144140) derived from phytozome v7.0 (chr-ID MtChr3; po s 37310364 to 37311321)
tctcctcttcgatccattttctctctactctcacggtatgaaacttccttttctctttatcaacttcattctttttcccgatcattatttaggtttaggtttattcttcttgcttcgttgatttgtatagatttactgtttaatacacctattgttcatgagtttttagtaatcttaactgttttatgctcagatttgtgttaatcatgtatttattttgtgttattgataatttcgattgctattacttgatctatataactgatttagtagatcgtggatactagatacctagttactgatctgtgatctggttgatgcttacggtgcatcgctgtatctgattctgatctgttacatactggatctggaatctatttcaactgatcttgtatcgtctttagattccattttttggttttacttcgaaaatgtttcggttttgttgatttgttgactggatttagggtctgatctgtgttttcatgtgtgaattgtttcgttttttattaggaaattttagtaagccgagtcatagcaaattgaagatttaattacacatttgcaatgagaaactttagtttacatcttgcacatgttttcatcaggtttattctatgacattttgaatatgttaaattttctgattcgttgcactatgtacatgctcttctgttttttttttttttttttgaaaagtcggagttatctaatctaagttcttaatgaagaaaattagacattactgtgttatttcatttctctgttttatcgctattgataattgtgattcttatatacaatgtgagctttttatggggaaccgttttatgtagaacaggatagtattttcagtgaaactaatcttttaaatttgtaactggttgaactttgtttgtggtccatttgaattgttattaacgataatcttattgtgcaaactgtagtttagcaaaag

SEQ ID NO: 28626 - DNA, 732 bp, Medicago truncatula
  Intron number 3 from transcript Medtr2g005430.1 (locus Med tr2g005430) derived from phytozome v7.0 (chr-ID MtChr2; po s 226204 to 226935)
gtggttacacaaagaatagactttccaccacagtattattatgcaattatgcttgtagcttttaatatatttccttcacgagtttacaaagaaataataagactttttattgctagaatgaataattttatttattgggtgtacaaggtttcttcctgaagataatatcatgatcctttgattatactcgatatctctagtgttaagaaaatcgtagattttattttaggaaaatgctaacaagtttccctgcggcatttgttatggaaccaaatatgttaaaactatcttcggacttgtgtaatcaacctcttaaaagtgtaaaaaaatactcttttcaatacaaaatttccttttttgtttccttaacatgggcactagttagcatgacaatttattttattactcacatgagaattgaaagtagccataggttcaaatgttagttaaaactggcttattcttttgtttcaattttgcattttgctctacttacaatgctagacttcagaatcttccaagcaaatttttcatagcaaaggaaagttagatagacatagttcattactaataaaatgtttctgtctcaacttttagaataatggaaacaacatgagtatttgatacttctctggtcgcaattgcttgcacatatccatatgaagcaacaacacttggttcttactcttttgtgttttaacatgtcaaacttttgcttttctggtgaacagt

SEQ ID NO: 28627 - DNA, 236 bp, Medicago truncatula
  Intron number 1 from transcript Medtr1g117300.1 (locus Med tr1g117300) derived from phytozome v7.0 (chr-ID MtChr1; po s 25097739 to 25097974)
ccattcagaaccctcgccaacgcctttccagtgagttttcttttctccatttcatatttcattctaacaaaatttcaacttcttaaatcttaattacgctccttttgatttaggaatacattatgtgcatgctatttgtttcggatttaatgaagctttacatttgtagactgctatgtatgtttttacataactaagttttctaatttaatttacagttttacggttggagcagg

SEQ ID NO: 28628 - DNA, 551 bp, Medicago truncatula
  Intron number 1 from transcript Medtr4g005850.1 (locus Med tr4g005850) derived from phytozome v7.0 (chr-ID MtChr4; po s 498623 to 499173 reverse strand)
ttcggtctttgaagcaaaggtaacaaaacaaaaacacagtttctctctctttcattcatgcttccgaatctgtaccctttaaagtttttaactttatttttatttattttttcgtttttttatttaaaaaaatgttttttttttttgtttttgattttttggggttgacactttaggttcatgcatcttcatcatggattaaagtttcattttttatgtgtttgatcatatgggtttgtagatagagagagaatttagagagagaaagagaaagagtcaaatgggtgttcaattttttcttagtttttgtttggccaacaaaatcacatcaattttctttttttagttatttttttacaaataaagaaggttatttttttcttcttttccttaaatgctttcttgttaagtaattttaattattatttatttattatttaacatttattatttatttatatttataacctacccatgttgcaaattttctgacttttttgaaatatatttttgcagatctagttcagtattgcagattttagtgtgttgaa

SEQ ID NO: 28629 - DNA, 385 bp, Medicago truncatula
  Intron number 3 from transcript Medtr2g132320.3 (locus Med tr2g132320) derived from phytozome v7.0 (chr-ID MtChr2; po s 31940339 to 31940723)
aagagggacctgaagaatcagtttcacaagtaggggtatgactcaatagtagtggtttaacttctattgcatttggtttttgaatattaatttgttttctttgcttcacctgaaactgtaattacatgctttattttttttcttatctatctatatctatctatatatctatatcatgttaagtttgctacaacttaaccaaaccctaatcctcttaatccatgttttccctccctaatcatccttaatccacatcattcattgataagttatgcataagtctcatttcatttgttttgtggttagcttaagtatattaagtggctaaattacagtttttttctttacaggacaattctccatctgtaaaagattacttcgcact

SEQ ID NO: 28630 - DNA, 813 bp, Medicago truncatula
  Intron number 1 from transcript Medtr2g132520.1 (locus Med tr2g132520) derived from phytozome v7.0 (chr-ID MtChr2; po s 32075160 to 32075972 reverse strand)
tgcagaagcatcttggagctctcataggccaaaaggtaccattttttttcctcccctaactttgtttgcatcatccactcatatttttcttgcaaaaaccttctgaaccccatgtgacatacatcactgatttcaatgtcctattctagtttgttgtgagttttaccatttcccattacaaacaatcttcaacttgaaagcttaaaaattctttatattatctttacaaaattttgggattctcatataataataaacaacacaccaattaacaatctactaaattttgtttactatgtccttttactatcttttagcacatgagttggttacaaatcccataaacaaaaaagcattgagtaattaacttttgttatcttgcatatgcatatgcatattttagagtactatattgctattacatgttttagttttggttttgtttttgtttttaggatcaatataagtggtagaattaagggttattttcagcttcagaaaaaagtatccacatgaagaaattctataagaaatccaacatcaattagaagagaaaaaaaagtagaaaaacaaggccacaaaaaaaaaaaggaaaaataaaagaagaaagaatcaaactctcagtggttgtcattatcaacaagcaagtgcatcaataatcacaaaacaagaacaaattttgaagcatatacattgactcaagtggcatcaaatttcacactacacaaatatcaatatgcatacgcaagaaacagaaacacaatagaactatctttacaaattcaaagacacaaaatttatacaagaggatta

SEQ ID NO: 28631 - DNA, 573 bp, Medicago truncatula
  Intron number 2 from transcript Medtr3g030790.2 (locus Med tr3g030790) derived from phytozome v7.0 (chr-ID MtChr3; po s 8433599 to 8434171 reverse strand)
ttcttccaaagttactggaaattattttcacagtatgtgataaaataggcgtaaaaatttgtttttttctttcttgctggtttgattgatttggctgttattgttgtggttctagtttgttttcatttgaatgatggattgtgaaaataatcacttttttaaacaaaataatctcttttagaagttttgaaattgatggaataggagtaaaattctgtttttttttttttttttttttttcttgtgaaaaataatcacttattatttttcactgttattatattatatgatttttaaaactaatttagagtctgtttcaaatgagaagctattttgagtagcttctctataaacacgaaaatagcttctgttattattttcactgaaagtaattttcattatggtaaacaaacacgaaacatcttctgctattactcaaaatgagaagctattttgagtagcttctctataaacacgaaaataatcacttattatttttcactgttattatataatctcttctgctaatgttgttgctaatattttcacaccttatactgattgcagttggag

SEQ ID NO: 28632 - DNA, 826 bp, Medicago truncatula
  Intron number 1 from transcript Medtr3g113690.1 (locus Med tr3g113690) derived from phytozome v7.0 (chr-ID MtChr3; po s 28610267 to 28611092 reverse strand)
tctttgtaaaattatttcatattgctaatgcatacaaaataaacttatatagtacacacattctagctcacctggtaaaaatattaaaattgttagatcagacgtcggaatcaagactcaaacctcggattctatctacccaaaaaaaaatctcataaatatattattatttttcattaaaaaaatcaagtccttttttatctttatttttagaagaagtcctttttttttatcaatttgtaaaagaagaggtcaatttttttttggtacaaacaatgaacgtgattttttgaatgaaaaaaacgactagacttttcttattgaaaaaaataagagtctacgtgtatgagcttttttatttacaaattgacaaatataaaaagacttgatttaatgtatgagtttgtttgacaaatgaaaaaaaaaaaacgaggtctttttaaaaaaaattgacaaataaaaaaagactgtatttgatgtatgagttaaaaaaaaaaaaaaaactaatacattaaatcaagtctttttctcttccattaattaaaaatagtgtacatgaaccgatattgaacctcagctttcgttcctgtgacagtgtaatcacattttttttttttttttatcaagacagtgtaatcacattttacaaaagaaatattatttcttgaatggtcatttaacaaaagaattattaaatggtataaacataaaaatttgacttttgatgtatttataataatctactacatttctgcagtaaatcaaataatgatatagcaaacactgcaaattctttcttttggtaacagagagaaggaggaactta

SEQ ID NO: 28633 - DNA, 920 bp, Medicago truncatula
  Intron number 3 from transcript Medtr1g112100.2 (locus Med tr1g112100) derived from phytozome v7.0 (chr-ID MtChr1; po s 24038861 to 24039780 reverse strand)
aaggtaagtattgacttctgtgttagctaaagcatgagtatttttaccgtttcaattatttttagccacgtttaacttaactgtttgatgcttgaaagatctgttcatgtgtggctgatgtatagtaaattttggatgtaatagactttggaagaatgaattgtatatgcttaatgttatgtaatggctgcaaaaacattacgtacttatcagcttgtcctgtgatattatttttttagctaaaattttcctgtgatatgtatttaccagatattccttgatgaaggtatgctctatgatagtgtgcgcttttcgccagaaaattatttttagatcaaaatttatttaaaatttgcagaaacactggatttttttttttaaatggtaacgcctcatcactaatatttagggaagttgtgtatgtcatttgatggtactgcatcatgattatgagcggttattatattctatcagctttttggcaaaagtgacatgtcaaagtcatgtaatgaaggcatagctttgggtttagacattggtatgcacttgctattgagtattattcatgattaaaaagtgcttttcaattgttatttagaagtgccttaagccttttatcttggctcggcacattcaattgttagaaatgttgtagtataactgctatggatcatgacattggcaggatattcttcaccatctagctctacataatatttggtattttccacgtgataatttctcagtttcattgacgatctatgtgtttctgtttcgtctcagtttatgtttttatgtttcaatatgatatagttatagcattttatagtcaaatgtttgcaaaatagatgccttaaaatttaccttacaaattctatgatgcagctcaagggaataacgggatacaacgctacattcca

SEQ ID NO: 28634 - DNA, 968 bp, Medicago truncatula
  Intron number 1 from transcript Medtr3g010150.1 (locus Med tr3g010150) derived from phytozome v7.0 (chr-ID MtChr3; po s 1662978 to 1663945 reverse strand)
catttcctgaaacatagcaaaggtactaacaatgattttatatttttctatttaaaatttaggattaaatatgtttttggtccctataaatatgtcaacttttcgttttagtccctctaaaatgttccttcaacttttagtccctataaaattttcaatcactatttttggtccctatttttaagtaaatttttgtattttttaatgaaactgtgtagaaatgtatggaatattgtaaaaatcactccaaaaaaaattagaattttttaacaaaacatgaattagatatgaattttttaccgccaaaaatataaagattcatgttttggtaaacaattctaattttttttgggagtgatccttataatattatacatttttctgaaaaattttatctaaaaatatgaattctacatatgagtttactttaaacgagggaccaaaaatgaagattgaaaattttatagagactaaaaattgaaggaaaattttagagggactaaaatgaaaagttgatatatttatagagaccaaaaacatatttaaccttaaaatttaagtattgtactgctaaaaggttattcaataactttattcaggaagaattaaatgaaagataaattattgagtgtttattttgtgacatacatagagtaatataaatatgatagggttgaaaatgggaagataaaaatgaattttaaaataagaagacacaaagagcaattataatgtgtagatgttcaagtatattcaatattttaggtatataatgttttaattttttcctaaaaaaaatgttaaaattttgtaatctccagatttacatttgattcatataataatattgaagtcatagcactatcgcttatgtacttttatatgaatatatatagtcatactaatcaaaaattttggattcgtcacttgcagaaacagaagaagggtcattttcaaattggttttct

SEQ ID NO: 28635 - DNA, 668 bp, Medicago truncatula
  Intron number 1 from transcript Medtr2g077070.1 (locus Med tr2g077070) derived from phytozome v7.0 (chr-ID MtChr2; po s 17612873 to 17613540 reverse strand)
tctttctcttcttctttacttcaacattttcttaggtgagttttgtttcatttaacttcatccttgtttttatgcataccctttatttataactttgtgttttctttattcttctcttttttccttctgaaagttgcaatctttttcatgtttggttgatgggtatgatggttttttctagacatttctttaggatgttcttattattattgtgtttgttttggtttagcttctgagcaatttagatatatatttcattcttaatcttctttgagctgtgaaaaatatcagaaactgaataattattatgataattgatgactttgacttctaaacatagcttgtgataaacgcatgatgcttatagcaagagaaattatagaataataaagtcaaaatcttagtttacaagttattttcatacttacacatttgataaatcagtttaatttgcataaattattcagattttgttatggtaatatctgagttaaaatgaatgtacgtatttttgatttgttttttttttaagggctgaaatttctgcatcatctttatcattttcaattatttgtataagatttggactttattattcttcacaacactgacacttttttatgattcaaccaggtgacattggaattgctgtttcatttgaagcaatt

SEQ ID NO: 28636 - DNA, 639 bp, Medicago truncatula
  Intron number 2 from transcript Medtr2g093230.1 (locus Med tr2g093230) derived from phytozome v7.0 (chr-ID MtChr2; po s 21574085 to 21574723)
tgcaagccaattattttgacaagaatctcaaagaggtaatcaattaattattctattgatttttatgcagtttgctctttatatttctgaaccaaatcaatgatgcttttgattggtgattctatgatttaacttttccaaaacttgggagacttttgaatggaagaacaaaataggataaaaacttaatgtcctttctgtttttagttaattaagagcttatagcataagataaaataaagtcaaactgttctcctttaagttataatctattttcataagctatcatggaaagtttatggatataagatgaaacttggacatttcataagctgtttctataagctctcacaaatagtctcacaagtacttctaaaataagctaaaataagtcttccaagtctttcctgtcggtagataagctaaaataagtcttccaagtctttgcttgtttacttattggagtactttaatgaaaagtaaaagggactaaatgcattgtgatttattgcttcttaatctctatgcccatataatttcctattttatcatatacttctggtctcttttctgtttctgatgtttcaattatcaattatgttagtctcatttgaggagaaaagccaaagaaacactcaa

SEQ ID NO: 28637 - DNA, 832 bp, Medicago truncatula
  Intron number 1 from transcript Medtr2g056370.1 (locus Med tr2g056370) derived from phytozome v7.0 (chr-ID MtChr2; po s 15418105 to 15418936)
gcgacctcatattgcggtaggtttggtcgtcgtcacaaatataaagaaacaatgaaacctagaagagagggtgaatcacaaaatgccaaaataaaataaaaatgagttaggaattcgagtttcaatttcattcttcctgcttctttttttcttcatctacacaactctaattattatagtttttgagacaataattatcggattttagccggttcggacttacagcttcttaatttccaactctctgttggtagatctttggagcttgttttttctacagagaatgttgcttcaattttccctttgtggattggatatctcttcgaaactctatgtttaagtgcttagacacttgattttcttactatgaatgttttctttgatcctcggtctttaagactttgttgtggtagtagtatttttagcttatttctcacttttttttttcttgttacattgggtttagatattaggcccacaaattatctttgttctcatttttctttctaataatactctcttttataaaaattaatcttgcaaattctaagtcggaaaggtgatacatgtttatatttaatttatttagacatccttatggttacaaaaacccatttaggttgccttttacagaaatatcttcctttcttctctgaccatctcgcagtcgccctccgcctcagcaccgtcggacatctttatcgcagtctctctcatcgccgccgcctcccttttttctctttcacagtagatctgaaaacgcagaccagtaaaaaaaacaaatcaaaatgcaaggttgttgtgtgttttatgcagtctcttgattttggtg

SEQ ID NO: 28638 - DNA, 672 bp, Medicago truncatula
  Intron number 1 from transcript Medtr1g110880.1 (locus Med tr1g110880) derived from phytozome v7.0 (chr-ID MtChr1; po s 23452993 to 23453664 reverse strand)
ttgtttcttgttcccgctttcatttcttgtgtctcatacttcttgttgtacagatatgttagtaccttaaattaagatattattacgaatatgtaagtgcttttgcacaacaagaggatgtgtaattactaattatatcatattagattggttcatattgaatgtcattaactttcttggcaccaattcaaaaataacaatttactttgtttttcatttgtttgtgtttatttttggtatcaaatgccaatattcaaatccgaaaaagaaagcaagcaaaaaatatcatttaaataataaccaaggaatggttccttatttcaattgaacttcaaataagaatccataaggagatttgacccaaaaagaaaaaagaatccacacatttttttaaattgctgatttgaatattaatatgatgtgatgtgatatttgtactacggcatacacctaaaaccttatttttcagtagttgcaacatatagtaagggtggcatttagcatgagaatggatagttgtttcccaccataggaaagtaaattttatccattagattaaagaggtgtatagattttaacatggtctatgtacattatatttttttctgtttttctttcacatttcttcaaccttcagatctgaaatttacatctactgtggagaagagttta

SEQ ID NO: 28639 - DNA, 514 bp, Medicago truncatula
  Intron number 3 from transcript Medtr3g114860.1 (locus Med tr3g114860) derived from phytozome v7.0 (chr-ID MtChr3; po s 29171395 to 29171908)
tgcaaagaatttgcgtttgtgatacaggtctctatcttttgtttatttattttcaattgtctctatggtggttaactgttgattttattgctatcattatggagtggcaagatatggaactcaatgatttgatttttaaagtatcatttttattttcgccaatctaaaattccattaagactgtcttatgtgtgtttgattttacgtttgctcatggctgccgcacgtctagacacccttttgtcgtgaaatcgagaagctagtaattgtagtttcactttaaatgagaattttttgcgtgattttgactaaatgtggaaatcctgttgcgtaaccaaacaatggccgagttatatgagttgaattgagcgatttagcaattagtatgtcaaaatggaagataggtagtgttcaaaatacaagaataacataattgcattccctagacacatatagattgatccattgccgcattctgatgctagttacttttcttttttgtataggtgaaggg

SEQ ID NO: 28640 - DNA, 1014 bp, Medicago truncatula
  Intron number 1 from transcript Medtr2g024990.1 (locus Med tr2g024990) derived from phytozome v7.0 (chr-ID MtChr2; po s 6517922 to 6518935)
ggaggtgttaattcttatcctcattcgaaggcactttatgtttatgaggataatcaggtgctgctcgagttaaagtcaaagttggttgtttacaattctacggatggtacttttaagactcttaaaattccaatgcgcccctgccataattggatgattccggaagtctaccaagagagtttgatatctgttattcttaatagttaatagtagaatctatgtagtaatatagatgctatgttacgccccatggtttatgaaaaatacatcctaactgcaactgttaagttaatttccatttgtattatgtaccttatgttttatgaagaacccatccaatggattcttcaatttcttaactgcaacctacatgctcatttccatttatgttatgtattttatgtttgttggttaccattgattgctattatatattcttcgatgaaattctcagcatgagaaagtggtgtgttaggtttgatttattcgatggttaaagtttttgtttgttctttcatcatgcatttcaatatataatgtagtggtttggttttccaagattggaataagatttatgctcagtcacttgtatgtttgttaatatgtatgccgattgccataaaaatttcattattgtgctacaaaaccgcattgttgctgggatgtctgaaccttaacctttaggttcacttgtatgcagtctcttgatttgaaagtgctcctgcggaatgtaattaatgttttgttgaagagggagatattgaggaatgtagaaattatcattaattaagagtcactaataatcattttacaactatgcctgttaaatttagaaagtcaaactcttctcgttgagctgacacatatggtaaagagttattaagtgattatatatgacagttgtgtttaagagagtttgatgatgtgatattttgatatttccgggtgatagatttaaagactcaattgttttattttaagaatgtcaaaaaggtagtgagatagaagtaggag

SEQ ID NO: 28641 - DNA, 908 bp, Medicago truncatula
  Intron number 1 from transcript Medtr2g132460.1 (locus Med tr2g132460) derived from phytozome v7.0 (chr-ID MtChr2; po s 32030810 to 32031717 reverse strand)
tggtaaatgttttttttttttttatgttgaatctagatttttttaattgttggttcaatattaatgcaccgcatatattaaatccaacaatagtttcaacataaataatacaacaaggctctgagaaactagttttttatcagttgtttgatttatgtagttgtttgatttatgtggttttatagtaagttttattagttgtttgatttatgtggttttatagtaagtttctaatatttaatcagagaaactgaacccaggttgttatgaaacattaatatatgtggttttatagtaagtttctaatatcaatattagttgtttgtaaaattactggcatcccctcacctgtctgagttatcctggtggccttttactatagaaggataaaaactaggctctttagtgaataattaacgagaattgctgttgacattacctttggttgagaaacactaataatttacctaaatgcccctcggcagttaactaccgaattatgaaaccggctgcagttaactgccgagaaaaacttcattgaaaacttctgcagttaactgccgaggaaacctcaattttttttttttgttgacaaaaaccataaatattcttttcatttttgattgatttgccttccttatttattttaattgtattactcctttgattttttttttgttatattgatcttcaacaatagtgaatattttatttccaaagaactttcacggaattttcttcttttatttcctttttacggaaatattcacaattattttaattgtattttgatcttcttctttttttgtctattttatttccaaagaactttcacggaattttcttcttttatttcctttttctttgttttaggcttaacatttaagtccttaacatttcctcggcag

SEQ ID NO: 28642 - DNA, 495 bp, Medicago truncatula
  Intron number 1 from transcript Medtr2g006170.1 (locus Med tr2g006170) derived from phytozome v7.0 (chr-ID MtChr2; po s 554100 to 554594 reverse strand)
acatttgctaagggtaagcagatcctagacgacctaactattgcaaataaggtggtggacgatgcgaaaaaaaaaaagaaaaaaaaaagaaggaaatgtttatgtttaaggtgaattttggaaaggcttatgattctattgattgtggttatcttcggttggtcatgtcaaagatgggttttccttggaagtggaggaagtgaataatgaaatgagttactacgacttttgcatcaattttggttaatggtcgtccaaccaatgagtttctgatgtgcatgggtttgcgccagggagaccaactatcgcctttcttgtttttgttagcggcggaaggtgaggcaccgtttgtgttttccaccttcaatttgctgatgatgctttgattttgggagagaaaaaaaatggggaaatattcgaacgctgaaagcaactctgatattgtttgaactcatctcaggtctcggagtagatttcagtaagatcctcccggtt

SEQ ID NO: 28643 - DNA, 727 bp, Medicago truncatula
  Intron number 1 from transcript Medtr2g010130.1 (locus Med tr2g010130) derived from phytozome v7.0 (chr-ID MtChr2; po s 2384091 to 2384817 reverse strand)
gagcgcctacctctggctacagcctacttccgacggtcatctctctctctctctctctctctctctctctctatatatatatatatatatatatatatatatatatatatctttctctctctgtctctctctactcgttacagttaaattcactcattacagttaaattctttccttaaaatgatttaacacaattgagcaaattagcttccaaaaccaattgaaggggatttatttatatttactaattttccagaattgaagttgttttacaattggtgatttcacttttttatgtatgtgttgcttgaatttctttgatactgtgtttgagttgttacataatgtattttagaggtatgcaactactatgtagcctccaaaatcattggactcctaattaagagattgtatgttggcttgttagtttgatgaagaaaaaaccctgacacacttgacagcaccttgctttcacgagcttgtaaaggttgttttagtctgatcaaattttcttattaagaccgatagaaaagttttgcaccgtaaattgatagaaaagttggacacggtttctgaatgttgcttgtacttttgtttctaattgcagggacatgggagatatttgaattgatcatcaagtgtgacgagcactgttgggaggcttatttctcaaagtaggtgttggtttttagctctggtgcgctgctgccgggactgtcggagctgt

SEQ ID NO: 28644 - DNA, 552 bp, Medicago truncatula
  Intron number 1 from transcript Medtr2g111660.2 (locus Med tr2g111660) derived from phytozome v7.0 (chr-ID MtChr2; po s 26588991 to 26589542)
gagaagatatcagacaaactgtattttcttcaattcctttcttaattcttttcttatgcttatgaaaaaaatattagttttttagtttaatattaacatatttttgaaaccccacttcaatttttggtcttgagtatgaaattagtttatattataattttcaaaattggacttgagtatgtgttttaagtaaataatactgtattttcaattacttatgcttatgaaaaaatattacttttttaagcataatattaacatatttctggaaccccacttaaatttttattgaaaagaaactgcttttggtcttggatgaaaaaatagttgatatttgataatataattttcaaaattggctttgaaaaaagttgatacttgatagtattgctttaaagtaaatgaaatctttgtttttttctttagacaaatgttagtatgttagtaaattagtggacataaaatcaatgtttttaatttttgactgagtagatttatgaacttgtggctaagagttttggtaatttgatggttgataggttcaagattgtt

SEQ ID NO: 28645 - DNA, 787 bp, Medicago truncatula
  Intron number 2 from transcript Medtr3g127530.1 (locus Med tr3g127530) derived from phytozome v7.0 (chr-ID MtChr3; po s 32360403 to 32361189 reverse strand)
caagtttctttgttcaggtacagttaactagctgatacgattctttaatatattaattaagatatataccttaaatatgtagtagtatagtatatgctatacctatgggttttaatttattgattttgttccattctgaacaaccctccaaatttgcgcatctaacattagcaaggaatttttttgtgtgacctgaattcacgaggagtataccaattgtgtgaatatgtttattgtctcaaagtatgccgtctagagaatatatcggaggaataaaaaaaatactataatagatagagactacaaccctgaaaatgcatagaaacgaattgacgcaatgtcttaaaatgatgttttgctaaaaaaaacattataaatagtaaataatacgctgtcaacaaaataaatagtgctacatgataaatcccttttatccttttaaaaaataataattaactctcttttatataaagaaatagtaaagataacaaaattgaaattgtgtaagacctaatatatacacttggcaacacgaagattgttaaggttaccattttttgtggttatttgaatttgaatttaggatttttttttttctttaaatgtgcgagtttaatttagtgttacttgtaatctatctttttttatttttttttatttttgagagcacttgtcatctatctatagaccaaaataatcgtaaatcgataattataagaaatgataatgtatgtatacaccatgcatgttagagcccgtccaacacatattgaggctcaaggaaaaa

SEQ ID NO: 28646 - DNA, 764 bp, Medicago truncatula
  Intron number 1 from transcript Medtr3g005040.1 (locus Med tr3g005040) derived from phytozome v7.0 (chr-ID MtChr3; po s 96431 to 97194)
tgcccctgataaggaagttagttcattcaattctcaaaaccattttttagttaattgtgtgcttttgttttatttgttttactttgtatgtttgtttggtagttgagaaaattatggaaaactaggtatagtatatattataactttgttcaaagcaaaacatattgtagctatcatgctttgcttataaagggtgtttgtttatattggttttggacctttgtttaatttgattataggtcaatttgaatactgtttttgttatattttcatatagctctagcatggttttaaattgcggttgcgggtagactacaaacttctttatattgtgtgaaaacacagtcaaaatcctttatattgtgactgcattcgcgattgtggactgcagtttataaccatggactgtgtagtagtagttcagaaattactgaattaggaagagaacaaatgttagcataatttatcgttaacacgtagaattatatagtcttagaaggatagtttgcattagacctattcaacgatattacagaaaaatgtagaaagtctatttgttgtcgatgtctttctatatgaaatgctgaaaacacagtagtataaatggaatttgcttcataccagtactttcacattcacataagtttcaacgtgttcccaattattgaaccattttatatacaacccgaatttctaatcaagatgaacaaaaagcaaaagaagctaattctctgttgatggtgatgtaggttgggaaggtgagt

SEQ ID NO: 28647 - DNA, 409 bp, Medicago truncatula
  Intron number 1 from transcript Medtr3g162250.1 (locus Med tr3g162250) derived from phytozome v7.0 (chr-ID MtChr3; po s 42335963 to 42336371)
tgttgctgctcctgctcaaaatcaatcccatagttatttcttcttttccccactttttcttgttatttattaccgctttatatctcatacttgtcattttctctaattattatcggtgttgtgttctattcttatatgtgcttgtgcttcataggtagttaattcactttttaagagtaaataattgcaattaagtgagtaagagccttatatactttgggatagaatttcattgcaaaatgcatagggtctccatgaatcattggttaggactgacaaatctatatcattgattttcattcctccatgaatcccccattcacactttctcagttatcaaaaatacttgtttgctttttacaacttttaatcaaattttgtttttcttcttctcatattagagtctccc

SEQ ID NO: 28648 - DNA, 668 bp, Medicago truncatula
  Intron number 1 from transcript Medtr3g097620.3 (locus Med tr3g097620) derived from phytozome v7.0 (chr-ID MtChr3; po s 23427918 to 23428585 reverse strand)
attgcccttgctccctttgcactcatttttgaaaggtgctactgcccttacttattctgttttacaattataaatagaaaaatgatgtttgaacaaccattttgtgacaacttttttttcctcatacttatatcatgctctctctctccctctccctctccctctctctcgtttttgtttttgtgccaagacctacatttctttatatattttggttgttccatagttgtcacataaaatggttgttcaaataacattcatcattttaattgtacatgtttcatttactaacatagattcatgcggttgcagttgagactcaaaatattggtggttgtttgattaagatcggacattttaaatcttaacttgactttttgaatcactcataaaacaaaattaaaatgtgcattttttaaactgtctgaaattaatcgaataataatgtgcatttttaaaaaccgttcaatcttaatccaatgatcatcaatatttcgaatgagtgaatggtgagaatcccaacaaacgacaacgagatatatttattgtttttgagaaacaaatttatctcgctttttctttaaagatatttaaaggtggaagatttaactttttcctatgtctaattaccacttttcttacaactttgcaggaaaattaggccaaag

SEQ ID NO: 28649 - DNA, 684 bp, Medicago truncatula
  Intron number 2 from transcript Medtr2g041510.2 (locus Med tr2g041510) derived from phytozome v7.0 (chr-ID MtChr2; po s 11388350 to 11389033)
aaaagaggaaaaaggacgaggaaaaagccagaagggtaattctcttatccatttatcgaaaccttcgatttgtgcttaaatttattcattgtattgttaaatgtaacttctgtgtgattttattagttgcattttggtttcaatttcttaatttttttattttgtacgtaaacctttgatttgcggggaaatttatgtatttaatttttttaaaatttggtttatatatgttttagtagaactctctgattttgttatttgaatattgatttctgtctgacaatttttattttattttacatatgtattcaaataacaaaatcaaatttggtcagttctctgaatattgatttctgtctgactataagagaaactactaagaaaaaatgtagagattaacgagttggatagagatatgatatctgattggacgttatgttgttgtttggtccatgtagccgaccccacttagtgggataagttttttttttttgacaataggcttgattgttggtttttgtgatgtaaatattgatacactagcctttgattgatggttaaatttatatatttggtttctgcatgttctggaagaattttgtgattttattctttccgtattgatttcaattcctaaaaatttaagtttgatatataatatcaatactttcctaggctgctgaa

SEQ ID NO: 28650 - DNA, 826 bp, Medicago truncatula
  Intron number 1 from transcript Medtr2g017380.1 (locus Med tr2g017380) derived from phytozome v7.0 (chr-ID MtChr2; po s 4301878 to 4302703)
aaatcttttgggaaagccaacacctggatttgcaggtgattggttaattacttaattttatatggtcatgttttttaaatttattcttcatagtagtatgattttattttgagggacatatagtagtgtgattttcttactttgcttaatagattgtgccaacatttagttagaaaagttatttgatgtttttgttggatctaatcatggctcgtaattgtcaactacgactacaatacttgtctccattttgccacaatatcaatacttgtgtagaataatgacaaccacatttagaataatgaatatgaatgtgaagtgggttttgcctcaacttttctttcataatcactttgaatcggaaataagagggagcgtacgttacttttgcaaatgtagtttgcaaaacgaattcctcgcagactatatttttttaaaaagttatgttttttatgaataaaatatgtaagtcctctttgaaactattttttttattaaataatttagtgtttagaaattcaacctctttaatgaataaacgagcaaagtccacgggaacgaaacaatttttttccaatgtcaaatattttatatatatatatatgtgtgtgtgtgtgtgtgtgtgtgtgtgtgtgtgtgtgttatttttaaattaatttcaatacttatcagcaaaaataaaaaaataaaaaacatcaataaaaacacgacttggataaatgctatatttgtttattaataaatatgatttaaatttgcttttgttccaaaatcatttgattttggtttagaccaatatagataacacaagttctttggagactaa

SEQ ID NO: 28651 - DNA, 600 bp, Medicago truncatula
  Intron number 1 from transcript Medtr3g114910.1 (locus Med tr3g114910) derived from phytozome v7.0 (chr-ID MtChr3; po s 29194008 to 29194607)
agaaaggttgttttttatatttgattttaataatatttatgcatgtgtgtgattactatgttctgtatgatatatcaattttgttcttcttggatgtattttatagaatagattgattatatgtcaagtcttcaatttaccttagaaatgatgtcctcctgagtatggattggatggaccctgaaagtttgttgttaatttggatatgatgaaggaaaagtgaggttaaaaattaaaccttttcgttgttatggagtttttaaaactgaatgggattattatgaaaaccttcaaaccaaatcctttacaaatgtttgctgaaacaaattttctcctttttagcatcgttttctttctttctttctttctttctttctttctttctttctttctttctttctttctttctttcttgttggtatttttgatcttgtgcatatgtatcagtgtaagacattttttcttcgcttttttattaattttgagacgtagtttgtatgtcaagcaaattggagttcttgctctagaaataacattctgatgctgattcatttgaacctaacagaagatacttcagttttaaatcaagttgatccggat

SEQ ID NO: 28652 - DNA, 911 bp, Medicago truncatula
  Intron number 2 from transcript Medtr3g121870.1 (locus Med tr3g121870) derived from phytozome v7.0 (chr-ID MtChr3; po s 30246731 to 30247641)
cttcgattaacatttttccaaatcaaaacaggtcagtatccgcaaatgcaatggtaatattttgacttagaatagagcctcctatgaggtttccaattacaaacagtgttgtcaattgctgaaaatagcaactcattcaaatgccactatgctatatggcagcattttatattaaatagcttatcgcaggtcaatagcaatttgttcatatttcgctatggtgtagcgctatcctgctgtaaccgctttctaacaacgctgattagaaatagaatttgtcacatgaacctgtcttagtttttgtttttttaataaatttgttttaaggattttttcctcattgtagttgattttattttatatcgtgaggaagaaatcttttggagtgattgtgtgtattatatagcttgactatataaagatttgagaaggaaaaaaaagaatggaggaacaaaagaatcagaattctaatttgaattttagtggtaaatttccaattttattccacctcgagctccaacaccatcatcattctaatgggtttttaccatttttcattgattttgaaagaaatttgcataattaaagatgaaaatatctttcaataaatataataatttcagagacatcttaattgtataaatttgaagttgttctttgacaaaacatggctttatcacttattagcaaaattttacttataatatgtcttagactctcaactactgtacttatgtactctactagagcaattataatttgtagtacctttgcaagttagttcttccttcagcagattcaattctgcattgaataactcacattcaatctgccatgaatgttaattttattacatttaatctgttaatactctatctttacacatttcccgccatggtggttgcataggt

SEQ ID NO: 28653 - DNA, 849 bp, Medicago truncatula
  Intron number 2 from transcript Medtr2g071210.1 (locus Med tr2g071210) derived from phytozome v7.0 (chr-ID MtChr2; po s 16344832 to 16345680)
gcgggatacttttgaagctttacaggatctttgtgagcttctcgatacggcaaagtttaaccaaaataaacaaattattttggatgatcaaaagcatattgagattcaaattcgagattcacgagagttgctcgatatttacttgatgtcaacttcctttgcctggcaagtttcattatatttacaccgctgtgttgaattccattcgacttgccacctggaatacattgtctaatgcatgtattcctgaacttttgttaccttcaaagaaatgcttttcgggagctgaaggggataccttgaacctccagaggtaaaacataattaattatcagttgtgttatagcagagcactacctacatagaatatttcctatgcttttgatacttttttttttaagttgaagatataaatgtcacttgtatgttgtaatagttatatacttaattgagaatatgggtgtttaaagtgtgttctaaaacatagaagcatcagctctatagtaccgtagatgctttttgtcttgtatcaaagcaaaaaattggtaaaagttattggacaaattctttaaagcgttaaaaggaaaacttcattaatcttttatgcacctttagtatctcttagttagatttagctgttgggaaagtttttaaaaatgaacttgaagagtattcaaggatggggagaataatgaagatgtgtctgacgaaacaatcttttcaaacgcttattttatagataatgttaggtggggcaattttattttccctaacatacttgtagggggcaatgcatgcgttgaatatgtaccaaacaatattgattatgttgagttccactgcaggata

SEQ ID NO: 28654 - DNA, 695 bp, Medicago truncatula
  Intron number 2 from transcript Medtr1g100490.1 (locus Med tr1g100490) derived from phytozome v7.0 (chr-ID MtChr1; po s 20889616 to 20890310 reverse strand)
gaaagtcttctgctgttgcttttcgctctggtgcagtgaagggctttcttcttgctgcaaatggcctgttattgctatctttgattcccatatcaattacctggactgtatgacagatattatccgactataaaaccagcaaaatacctaaactttaagtcataaagtggcttgaattgatagttgaagctggttttcagtcatggaaatgaagagtgttcagaaggcagctctcaaaaatgattgtagaaattcataggcaattcaagtccatccgctgtcttacagaaggaagaggctacctgtgaaaagatttgcactgacttctcacttaagtggatgattccacccagtatatctgtgctgcaagattctttcctggttctcttgtttccaatgtgcaggtatactgtgtttttttgttcaatgctaagtttacaacagtaatgctatctctttagccattgagttactctattctcatatgccttagttattgatattcaaatttttaagatctaaaatatttatggtaccattcaattgttagtctgaaagtgttttacagatcttgaactctcccgttgaggaaaactctaaaagaaacttattttatttgtcattttagatcgttattgcattaagaattgacttttatacactgttttggagcctataggctgttattaccattc

SEQ ID NO: 28655 - DNA, 757 bp, Medicago truncatula
  Intron number 1 from transcript Medtr1g100490.1 (locus Med tr1g100490) derived from phytozome v7.0 (chr-ID MtChr1; po s 20890369 to 20891125 reverse strand)
ggcgaaccaggcgctgcaattgtaaccttaatgcgtgtagaatccgtgttttaggtagatgatgatagcctgcgatttttgaggttcttgctagcttattttgtttcaagaatttgttatcttatattttggctttgaattgtacataatagctttgcctctgtttgcacaattaatgtcatttatgtttgaaactgttcattcaaagaaacgtttaatattataaataaacaaagttggcaatgattgctattggggattcttatggtattgataattagtatagctgcatagtactatatttttggcaacagtttgtatttatactagtttaagtgaagacgatacttgtatttgtatcaatgaccatagcttaattatgtaagctcaatccatttattcgtgctcccttctaattgaaactacaaatatcttgttaatcaaaactgctagtttaaattgttatagtcgggatatatctatgaagttcacaacctgtcgttgaaaacaaccggtttgtatattccgatagccgtgtgcaggctcccctcttattattctggcttttttgtaacacatgttcaactgtggcatatgaatatggaaatgttgagcgagtttcttacacaaattttgatacatgtggctgcattaattggaattttatttgctttgcttcaatggctttatgtttcgagtgtcggggtgttgtttgctgataatcaccctgaagcaaacatcggatataaaactctcc

SEQ ID NO: 28656 - DNA, 394 bp, Medicago truncatula; identical to SEQ ID NO: 28425
  Intron number 1 from transcript AC235665_52.1 (locus AC235 665_52) derived from phytozome v7.0 (chr-ID AC235665; pos 282150 to 282543 reverse strand)

SEQ ID NO: 28657 - DNA, 879 bp, Medicago truncatula
  Intron number 2 from transcript Medtr3g080470.1 (locus Med tr3g080470) derived from phytozome v7.0 (chr-ID MtChr3; po s 18957698 to 18958576)
attattttctcctcgaccgtataagaaagtaagaggtatgtatgaatgagttaggcttggtcagacgcaattacaaatctttttcatttggacatacattcattaataaaaaacgagaattttttattttttttaggagaatgttaaacagtgtctcaggggcattggttaagcataaaaaagaagtaatatttaactaaaaagttgtgtaataattatttgatcaaaagtaaaaaacttatatttccaagacatagtttatatatttagattctttaaccaataccccggaacaccggttaacaaaactttttttattattgaaataaatgatgtgattgcaaatatgtgtctaattgcaaaatatttatgtctatgaccaaagtctttggatttcattttcggtttcttcttttatatatatatatatatacacttgtatatttagagactccaatagagtgtgacatactatagttgattagttagccttactaagtgtgggagttggttcaaaccaaagatgaccttagcttgattagtcacatttaagaacatggtcatgcaatcagtttgttgataagaaaaaaccaacatgttattggcatccaactggtgcatagctgccatttgcttcacctaaaaaagcaaaaaaaaaagcattcaatctcatggtatcacataatgtttatttgttactccctcgttgtattttattagggtatgttactttgggggaaaaaatatttttgataaatataaatcactttacacattttgtttctttttctatcataccttttattaggtattattctctctctttcaattcttttacactgtgtttggttaaggtgaaataggaaagagagaaagaac

SEQ ID NO: 28658 - DNA, 471 bp, Medicago truncatula
  Intron number 2 from transcript Medtr3g103740.1 (locus Med tr3g103740) derived from phytozome v7.0 (chr-ID MtChr3; po s 25611185 to 25611655)
ttgtagttttagggtttctatgtgatttcagcgtgaaaattgggtttggttgctcattgttcgaattttaaatacccaaatgatgataattggttctggattttgattcggtgtgtttttagggttttctcagttttagcttgttgattttgagatgtatgaaaatttgttgatttgtgaataactctgggaataaatttggctggtttggagaaaattttgagtttttaccatggttgctctctcttttcgtttttccgatattatgaattaggagtatatcagactaataaattagcttgggatttgaacttagaagacgaacaaaaaatactgcttaatgaagtgattatccttggtggtatattatatatattttttctgttgagttatagatattcctcatattaatatgttcttcgatgtatcttattaggataattattctggagctttatttgctgatctgat

SEQ ID NO: 28659 - DNA, 346 bp, Medicago truncatula
  Intron number 1 from transcript Medtr4g019210.1 (locus Med tr4g019210) derived from phytozome v7.0 (chr-ID MtChr4; po s 3864199 to 3864544)
ggtattttttatttttttttttaattatttactatgttatctttattttagtgttaaaaattcaaattttttatgtttaaatttgctttttcagtgacccattttcattttcgttcttttttaatgtaagatcatgaaacttgagatcaaacagaagatgggtttctttgttatccaattgaagggaaaaaaaactatttttttggggtttaaagtgaaactctcggcctaatctatgaatttcttgattgattatgtgcttttctgttccaggctttataaatggccaaacaatattgtatattgtataggctatacaaatccaacaattgcatcttctctctcg

SEQ ID NO: 28660 - DNA, 697 bp, Medicago truncatula
  Intron number 2 from transcript AC235671_6.1 (locus AC2356 71_6) derived from phytozome v7.0 (chr-ID AC235671; pos 24 923 to 25619)
agccgattactttactcccaggtggcaatattgtggtgagtagtaacatctttttctgccatttattttgtagcatgtggaagaaatgcaaatttgttttaacataacaattcaattatgttagtagtataatgatattgtattatataccaatcaaatcttaaatgaaatatggttgaggaaagaacaaataaatataaaatagtttaaatatatcccctcatatctttttaattcaaaaccagcaaactaacttaaaacgattagaaaccagaatacttttttttctctcttcattttactgttttttcagaaaacacaaggtggtgttctttttattactttaggctaggcttacacgagttaatatgcagaccatgacacgtgtttgtctgtttataacttttctctttacaaaaagtttaaattctttcagacaggtctttaaatattgggtcttgctaaagactagtaaggattcatccaataaatttggcacttaatactgccaaaggataattgacctaaatgcagtaaaaaacatttaggatccaagttagttttctactcaagtaaacaacacatcatgtgtgtgcacctacttttcatcttaacatgtattttctttgcatcttaactttatgaaaagtatgattgaataggtaaaaggaggaaccttgagagcatctgatacttt

SEQ ID NO: 28661 - DNA, 787 bp, Medicago truncatula
  Intron number 1 from transcript Medtr1g103530.1 (locus Med tr1g103530) derived from phytozome v7.0 (chr-ID MtChr1; po s 21596945 to 21597731)
aaactgtttttcaggtaatttctttcttcttcttttttgttgacaaaagaataatctttttatggttgtacaaatttaaaataggcaattcatgtaaattgtaagggtgagggtataaatttaggggtatagggtaaaatttccagtttttgggagtggtttctgcaggctgtttatagacccagttttgatggatgatttcggatgtcagccattacttttcacatcctgtgacgttctcgcgcgtcctattcagattctaaaattcgaaatatttcaccgtgttattgaaggtttttatgttgttcggattctaaaatccaaactgcatagggcgcagtgagaaactcataccggtggaaaaagaaacagtctcgaatgtctatgaacttatggggccttttaggatctctttgactttgtttgttatggtgttccgcctatttatgacatccgtgtgtttgagtttttccgatttgtttgtaggtcaggcgcatcttatgcaagtttagtctaagtaatattagttttgtttttaattatgaagttcaaacattgaaatcaaaagaaaatgtgttgtcatttgattttttcttttcttctctttttgtttttagataaattaatacaaaacaacagtgaacatatttacttctactttgatttctttttcttccttttttttttttttggataatttaattaatcttgaaaatgtgttctcattccacatatttactccatatatgcagggattagattttgtgatatcagaggcaagcaaata

SEQ ID NO: 28662 - DNA, 788 bp, Medicago truncatula
  Intron number 2 from transcript Medtr1g121920.2 (locus Med tr1g121920) derived from phytozome v7.0 (chr-ID MtChr1; po s 26679356 to 26680143 reverse strand)
gaatttggtcctaaaattcagcaggtgataggctggtaagtaaaataaaaactcttattttatttggctatttttatagtaatttgataggataattgaggaacaattgaatcacaaagatgtaccaacactggattctcagtgttagcccaccacctgtttgttaaaataccccttccacccaccttttattccaacaccattttctgcattatggtaagattcatacatccataattgaactagaataagtaacaatgatttatgtggataatactttaattaccctttactctatgttgaagcctaatgtttgccttagttacgtgggacagtatggccacaatgtgaagtggatattgttggggtatacggtggagtctgctacagggattttagaggtctcaaagggttattctagtcttagaaaagttgaaacgagggaatgttattgtttttgcaaacatgtttatgcactgaccattgtttcaacataattcaatcttttacgggggttattggaagaaattcgacaaccttgaggtagatagtgatgtcattcatgttgtttgggtccaatgtttgttagcatggatgtttcattaatggaaaacaaactaaattgaaagtgtattttgtacgacgttggatatcgtgttgcgttttgtttgtcgaaatatgacagctcgtgaggcttaacattttgtttctaaaggtaccaaaacttcaaatttagattgacttgtctgtcaggtttggacaactgcagggtgttgatctccaaagcg

SEQ ID NO: 28663 - DNA, 927 bp, Medicago truncatula
  Intron number 2 from transcript Medtr3g040210.1 (locus Med tr3g040210) derived from phytozome v7.0 (chr-ID MtChr3; po s 10957690 to 10958616)
tcttggtgggcagtgttggtgtttttcgccaccatcttctgctaataaacatacctaattagtttcatacccccaaattataaatttactattgaatttgaatgttatgatgcaattataatgtattaataaaagagaatttgaatgttatgatgcaatgataatgtatgaataaaaaagcaatataataaattgcaaattgggcagtgttggtgtgttttctttcatgatacttctttcactagtaactcttttttatacaattctttaaagggaaatgctaaccggtgcctcgggggcaccggttagccggacccttctttaaaaataaaaaataaactctttttattacaattaattatcatttatatgaatatattaccaaaatctactatataagaaaatcaattcacactaaatattctccaatgtcctttttcgttgccttttgaattgtgacacactcgccttttaaggtgtattttttttcttcttttccctaattaaaacttggtaccacatgcatatagagtagaactagaacatcgcatacatatgagtctatgtgacagtcgtgtatttgattatgtgaacttatgtgaagatgtgtacgtggatatttgtgctttgtgataaatgtgtaattgtgttagtttggtaatgaagtgttaataatgtatattcgactttgtgacaaaatgatgatgtggatacttgctataacttgtgatgataattgaaagttgttgcagttattttattgattgattgaatgaaatgataaatgtttatagtagtttaggaaatgaatatgtgtatatgatatttgaatcataaatattaagcttgagttcatatattctttatgttgaacatatatcttttcctccagtgacattttggtcgcctacatcatcgtagtgaaga

SEQ ID NO: 28664 - DNA, 385 bp, Medicago truncatula
  Intron number 1 from transcript Medtr3g068960.1 (locus Med tr3g068960) derived from phytozome v7.0 (chr-ID MtChr3; po s 16389280 to 16389664 reverse strand)
gctgctttggtatgtatgcatttttcttcttcatttttttgtctttcctttagtctaacatttaggatgattgcatttaagaaatattcatcatactaaactgagggaccaagattgcatgcagtcacaattgtacaaaacaaaactatctattcaagattatatgaatcacattgtaaattcaataatttgatctaaaccatccaatttctatcaataatcattcatacaatcaacttttgtttctacaaaatccaaaaatgtgcatcttgatcacatttgtcacatagactaatgcatctttattaatgaaactaatttgattattaaacaatcaaatattaattgttgtgtattgtggcatagttacctggaagaacagaca

SEQ ID NO: 28665 - DNA, 716 bp, Medicago truncatula
  Intron number 2 from transcript Medtr3g148940.1 (locus Med tr3g148940) derived from phytozome v7.0 (chr-ID MtChr3; po s 38849890 to 38850605)
tgattcgaagactttctcaagaaaaagagttagaggtagctttctaacatcatgtcatcattgtcatgtctaaaacattatcctatatttctaaaacatgtttcaccactatattttattgtaattgtttatgtattttattacacttatatgtattcaaagaggcaagctatgaagcactgctactaactaacacattgacactgatgatgatgatgatgatgatgatgatgatgatgatgatgatgatgatgatgataataataataataataataataataataataataataatgataatgataatgataataataataataataataatttcagaaaatagaattatcgaatgtaagcacatttgtgtcatgtcgtgtcggtgttggacacgacacacagacactatacacacacgtttgatctgagtgtctgtcctacaaacatctgttagtctcatgtcggtgttggacacctgacacacatttgatttgagtgttagtcctacaagcatagttatcattttcttaaaaatgttggtgttaccttaacatagattggaatatacattctcttccggtgtttcttaaatcttgcttcatttgctgagcattttacccttgttgtgattctatgtacactcgttttgtttgttgccttttgatgagtatcctcttgctcatgatttgaatagggacatcttggttgtgtca

SEQ ID NO: 28666 - DNA, 761 bp, Medicago truncatula
  Intron number 1 from transcript Medtr1g065950.1 (locus Med tr1g065950) derived from phytozome v7.0 (chr-ID MtChr1; po s 13283763 to 13284523 reverse strand)
gataaatacataagagttctgtttctaatcacacagtgctgacaatgcgacagtgtttttactatgaggagtggtgatggatctgataataaatttttggggcccactgctcagagtgatttactcaagattcatcatcatatataattccatctgttttgacgtaaaatgacaataaatctagcactctcgcattaacgtcaaatcatcatgatggagtcagctgaaatttcagctatttctattttaatataaaaaaatgaacattcggttgcaccttcttctcaatacatcaatgatcggatcagaccacaaatattctcagatatttctttttaaatataagtgagcacatagtgtataagaaattcatcttcagtcttattacatggttctttctttattatcttcattgcttgaaatgtcctttttgcagcaggtgatggaactgaaaaagttaaaataaaatgaattaattgatcaatcaagttctatatttgacttctctgttttggttaaagattttgaattgaatattttgaaactatacgattttaatcttaataattatccttgttgacatgcattaattgtttttgtttttatgtttaattgttttcaagaagtacaagactaaaaaattaatttaaccaactatatattcattgttcatgccatatgatatatacatggtaaaaactgtatacaatattgatttattgattgatttttcgaacaggcggggagcgatttcttttact

SEQ ID NO: 28667 - DNA, 918 bp, Medicago truncatula
  Intron number 3 from transcript Medtr1g112210.2 (locus Med tr1g112210) derived from phytozome v7.0 (chr-ID MtChr1; po s 24082103 to 24083020 reverse strand)
ctcaacagactgtatgtatccaagagcttagtttttttttctttttttttgtgatctttgcattgaactctttcatctgtatgatatctttattttttaaagaatatgaacatggtttaattcataatagaagccttaatataaatttttcctgtttaccaagtcaagtaatctatagcataacttcattcctccctctctgttagcaagtcataaaattggaggctttcagcgctgtggtttttgaaaggggaaacttttgctattttgtgtcttttgttttatggttaattctgagcgtgagcggccttgacaaaaaagtgcttcctttttatcttgtggtcacatatcaggaaaatcacctccccgctaatgggatttggctttgttcatttgatcttttctagacccttcaatggcgggagcctagtgtaatactgtgccacgttgtttaataatctatgatttggattttcatccctttttaaactccaatagattcaaattatttggatgtttgtaactatttgaaaagtttttataaatttggcaatgcaaattgtatgcttatattaagagaaattgactggggcaaccatattcactataaaacattcgtttgtcttggtagcgctttaaaggtcatggttcgaggcggagctttgtctgtaccctgtttgggatctgctgcctacctcatgagaggtaggggatgaatggtttgtaatttgggagggttctcttcataacgatgttattcactatgcattatagttccattatagctttctcgtatatacttatgttttcagaaagtgaatgatcttgaagaatattttgtcaagtagatataacatttgagttcatttgctcacaaattcctctttccttcctcccacccgtccttgtttttttcag

SEQ ID NO: 28668 - DNA, 750 bp, Medicago truncatula
  Intron number 1 from transcript Medtr2g021710.1 (locus Med tr2g021710) derived from phytozome v7.0 (chr-ID MtChr2; po s 5576435 to 5577184)
tattggtaggtggcactggctactcaactttgcaggtttgcattaatgtcacactttgatctctacctgtgacgaaattacaaaggtagctgcattcttgttcgtaatatcaatgttttgaattccgttcattttcgatagtatctcattgttgcaccgttatatggcatcggatgctttttctgcacatgtcattttgtcccatttcaactctctactataattaatggagtcatggatggaatcatatggatatacattttttattttgcagtttaccgtaccccacaagttttcacaattagatcagtttaattcattaaagtgaaatacccaatatagtattaactttttgttgactttcactttgtaccaatcggtcaacttgtcctctagattcgaaatagaaaaataagagaaatgatctatgaacatttaaaatgaataacgtattgggatgatgatgatcgtgttggttctcggtaaaagttcatcttgaaccttcatggtaaattagggcgacattagaaacaactgtagaatactagagtgttttttttttttttttgaatcagcaaatattattaaacgtcatcctcgcaagacgtaaggtatggacgaaatagatacaaatggtgccgcatatagacggtacaccataacctccaaacaaagctcatgaagataaacccaccaaaacacatcaccacctaagacggacaccttaacagaaacaaacactgtaaacac

SEQ ID NO: 28669 - DNA, 767 bp, Medicago truncatula
  Intron number 3 from transcript Medtr2g013730.2 (locus Med tr2g013730) derived from phytozome v7.0 (chr-ID MtChr2; po s 3179498 to 3180264 reverse strand)
aagctaaggaggctgaattaagaaaacgagagcaggtataaaatggaatcttatggactctagaatgaaatttttaacccaggaaaacttgtatttacaggggagtctaatttttattactaattactaattttaatttatatgttcccagattttttttttttgtgtgtagaaacaactacctagaccggtgtttaattgataaacaatacatattgacttatagcatgtttggatcagcttctttttgacgcagacgcacgtctagtggccatttttccgtgaaaacaagaagctagtatttgctgcttctaaaaattgacgtctaggggcttggttgacgctgatccaaatagtctattaactaagaacctagctggttaatttgaactaagttattattattttataatctatatattaatttctgaagcgtaatgcttgaatctgtgattactatattattttttagacattggaaactatgtgcgtctaaactctgaaattgctgtgattagaaggtagtttgatctcttgaataatgcatcttctgaaacatgtgttatcctctatagatcttggtgtcttctattctatgtttagaatgtatgtatatgttgagatttactttcagtgagctttgtatatatgaagccttgacggcctgtttcttattaactatacttgcctggaaattcaccaacatttttgtcttaatttgtcaaaatgcaggaagtaagacggaaagaagaagccatttcaagagg

SEQ ID NO: 28670 - DNA, 660 bp, Medicago truncatula; identical to SEQ ID NO: 28142
  Intron number 1 from transcript Medtr2g013730.2 (locus Med tr2g013730) derived from phytozome v7.0 (chr-ID MtChr2; po s 3180497 to 3181156 reverse strand)

SEQ ID NO: 28671 - DNA, 744 bp, Medicago truncatula
  Intron number 2 from transcript Medtr2g018830.1 (locus Med tr2g018830) derived from phytozome v7.0 (chr-ID MtChr2; po s 5046093 to 5046836 reverse strand)
ttgccactgaagtaaactctgtagaacaggtactgtaggtagctaaaagatattctattctagcaaattatggattgaatgaatatacacttttcaaactatatgatatttgtgttaacttacacattgcacatatttaaacttatataagtctgtttggattgactaatttgagtatacctgctgacgtaaacactgatgcgactgtttgggagagcttatggaaacaacttatgacatgttcataagctatttttatatgaaaacaacttatagtttatatgaaaacagcttgacgttattttatcttttattatggaaacaacttatacataagcacttatgtgataagagattatgctataagttgttaattaagttgtttatccaaacagtagtgtccaaaggcttgatatgtggatagaatttttctgaaacacttatgttttttaaaagccttctcatttaacttgtttgcaatctaataagcttagaaaaacttttcttttagtgaagaatcataatcttattttatctgagaagcacctataatgttgcaacttacaagctaattcaaactggaccaaagtatactaatttcatgcatttgttaggttcttagacctaaaggattagggtcttggcattttgactattattcgtgtgtgtttttgatgatatgccaactctgtgaacttttgatgtccagagtttgaatactatttctaaagaaagcgcgaggcc

SEQ ID NO: 28672 - DNA, 370 bp, Medicago truncatula
  Intron number 1 from transcript Medtr3g092590.1 (locus Med tr3g092590) derived from phytozome v7.0 (chr-ID MtChr3; po s 21794234 to 21794603 reverse strand)
taaaagtctcaggttagtttttaatttgtgatagtagctatactctctagaccgacacctctgatcaaaggtgtgtctggtgtcagacacttgttattgtctgatatcgacatatgtgattacattcaattgattgatttatcaaattattatcgctgtccatgtgttgttgacatgtatgttagtgttgtgttcggtgtctatgtatgtgtcggtcttcataggtatataacattgtgttttgttttattgtgtaattaaattggttggagtcaataacgtgatttgatgttattaagaatattttttgtttgttattttgatttttaagtgctaattattggatttgtctttttttggattgtaacag

SEQ ID NO: 28673 - DNA, 608 bp, Medicago truncatula
  Intron number 1 from transcript Medtr1g013150.1 (locus Med tr1g013150) derived from phytozome v7.0 (chr-ID MtChr1; po s 2284540 to 2285147 reverse strand)
gacaggtattaataatatttcttaatttggttccattttgatgattagttcttgttcgaataagattatggttttctatttgtgaggtgttggttcagcggtgaaagtttgaccttttaactttaagggccggaattcaaatcccatcaggcgcaattgtaaaatgactattaacgccactttaattaactaacattctccttccccctttttttttcaaattttatggaaaaatccttataagctcatagatgttcatggaaaaattaaacaaaagaattagtaacatattgttgatgtactattgtcgttgtggaccatattgtgtaagtacatttgtatgtgctcttagagtgtgagacgtgtactttgatgagttgtcggaaacaaactcgccaaaatctcgtaattattacaagattccttttcatagtgttttttgaacaagttttgtgaactgagccttataatgtttagtctttttgtaaatctcctatttatgaagcattgactttgaagatttgattgaaatatttgttcttatattgttttattaaactaaaccttgcacagagttggacttgaacttccaacaattgaagttagat

SEQ ID NO: 28674 - DNA, 585 bp, Medicago truncatula
  Intron number 6 from transcript Medtr2g080800.1 (locus Med tr2g080800) derived from phytozome v7.0 (chr-ID MtChr2; po s 18729601 to 18730185 reverse strand)
aagggattcaatgtaagaacttatatagttgatttgctagaatacatgtgttgtgttctcttcattcttttgacttttcaaagaaagttgcaaatctctatccgaagtatacgacacttcaatcccaacagtttttcgcaaacttccaaaaattaaacttaaatccaacatcatgatgataccacatatatttagggagaatgtaatgtagattaaattaaaactaaataaaattgtgtatttttttaattgattttgtgtacttgtgccacttttttcgaatttattcaatacgcaattttattcgaattcacgctggttttaattagtcttcgaagacattatattgtttagctgccaaaatcataaaataaatgcaaatataaacaaaaataaacaaaagaacaaaattgatacacataaagtgtcattttattattacattaatatatttaaaataaggtatgtttcttgtctagggaagggggattggggtaaaactacatcagaagaagatggaggtgatggggtaaagcaaaatctgtggtaggggagggactggggtaaagttaaacctctagtggt

SEQ ID NO: 28675 - DNA, 986 bp, Medicago truncatula
  Intron number 2 from transcript Medtr2g080800.1 (locus Med tr2g080800) derived from phytozome v7.0 (chr-ID MtChr2; po s 18733164 to 18734149 reverse strand)
gagtgttgggctttgggtttgggcctagggttcctgtacgtttttgctttttttgctatttacaccttgttttcttgctgattgaacccctgcttgctcaatttttctctcaaaaaattctagaaaaattcctattgttttttggttcattcttggtactgatgtgatgtttttgcatgtgaaaaagtggtaaaaatatagatgtcattttcttgtttaatttgttctttttgacctaattttgtgaatttcttgccatatttttcctcataaattttggcacatgttatgaacaattagtatacaattttatgataaatgtgatgttgattttatgattgtgctactgttttggtatgatttgtgtgtttcttgcatttcaagcaacttttcttctcaatatgtcttggttattttcaccatttcttcaccattttatttcatattcaattgattactttttcctatcactcatgttatattttttttcatcttgttttgctaacattgttgactcatgtttcactcatcccatagcatctcacctcatcattctcatttctattaggataggttttatttcttgcaatttttccttttttttatttccaatggttatgtaatattttaggctagtttaaattcatcttttaaattcttgcaagactatagcatgtatttaggactcgatgtaaaggactatggacactataagtgatgtacaccgacacaagcaccgacacatgcacacatcccacatggatattctagatgtatgattagggaatgtatgtttaggtcttacaatgcttagacaaaaaatcattttcccaaaaaaaaatgtgaataacctcacttgaaaaccttttttctaaaataggagtcaaaactcctcattttccttttgttttcttaagtaaaaaaatcttaatgaattttaatcatacttagaccttattttgcaaaataactaattccacctcaca

SEQ ID NO: 28676 - DNA, 721 bp, Medicago truncatula
  Intron number 2 from transcript Medtr3g005690.1 (locus Med tr3g005690) derived from phytozome v7.0 (chr-ID MtChr3; po s 395753 to 396473)
aaggaagactcactttggaacaagtcttgaggttttttgaaattttgattttatcttgatttagcttttttctgttcatgttgttgttttgattaatgtcattggaagaaattgatttgactaggtattgagtagccgttagtagccggtatagtaactttatagtgtaccagaatttgaacacatcaactgttgttctgcgatatgctatttattacaaacagttgttgtattacaaaccgtttttgttacaaacagtttttttcgtatagtggctatagcttgtttttgtcgtatagtggctatagcttgttgttgtcgtatggtggctataacggaatttgtacatatggctaatttctgtttttggagattgactatgtagcgtattgagtgatcattatgttggattagtttacattctcttgatttgcacgtagtattgtcgattgagaattgtggaagaaaatagctgcttgttcaaattttgatatacatcagtgctgtagtgccgttgtagccgctaattcacaatgttttatactaaatagtgtatcgcaaaacaacatcaatttgatcaaatttcgctatgcaatcattattgttctgtgatacattatttaataatacaaacggttgttttatagtggctatagtggagtttgtacgaatagctattttctgtgatctgtgattgacagtactgttaaatagcgtagtc

SEQ ID NO: 28677 - DNA, 635 bp, Medicago truncatula
  Intron number 1 from transcript Medtr3g148160.2 (locus Med tr3g148160) derived from phytozome v7.0 (chr-ID MtChr3; po s 38510603 to 38511237)
tggttgcccattagcaggtttgcagaattgttaaggtcagttttgttttcttcaatttggtttcagatgttatggcacaattatgtattttttttagctttgctactccagttttgcatctctttatgttgaagtcattgtcgtaatatgagaatgatgcttgattatattttgctttctttagtctttagatatacatagatgaataatttggaggcttattacttatcatgttttttggttcctgtaggaattttggaagttgttttgatgtattttactttttcacatgccctgagtttttcatgtctcgatagagagaaaatatacgataatagagtatgttgtttttaccctggaatatcacaaccaaaacctggcataatgtggtcaactaaagctatatttgatgagatgctctacatgttttctttaatcttattgtttttgacatgttttcttatacaaaaaaggcgaagtcaagtcatgatagtttggtcattttgcctttgatttagcctgtcttcgagttggagttgctctgtctgagtagtgtgttgtagcttttgcagtgttgatatatgcatactgtttcaggattttggttgttgtattgtatcttcagtggggagttg

SEQ ID NO: 28678 - DNA, 878 bp, Medicago truncatula
  Intron number 1 from transcript Medtr2g006940.1 (locus Med tr2g006940) derived from phytozome v7.0 (chr-ID MtChr2; po s 878143 to 879020)
cacgctaattacgttcaacaggtcagttctttttagattttttgtatgtgtttactgcaattagtaagagtttttgtagataatagatagagttaggtttgccttgttttttggtggataatcaaattataggaaaattaattgatatagtggtgtttgcctttggaccttggaaccttcaatcctgcagtgtcaatttcgttgggctagtccataccgagcttcactatggcccgttcttgggtcggatactgagttttttttatttttttattttaattattggtagatgttaattaagatatttgacccctaataggtgtttggtagtgtttctcaaaacacgcagtttgtcttaattacaggatccgaatgtgcaaaaaatatccctccagtatcttgttgcagggggttgtgtggggtgggggcgaggagaactatataggctcctcaaattatctccacagctttatgcctttgggcctattataagactaaggccaaatacctctttttctcctttaagtttgacaaaatataccatgttagtcctttaagtttacacatgtttattttttgttgtgactctgaatacattccaggtaccataaattcgataaagtaatgtactacttcgtaccacatatttgtaccagtatcgaagagtatcacttttcaaataattatcgtcttgggtttcagtgtttggtaacccaaaaatcaagatagttccactttacttcataactattcactattttctgcttgattgtgaatcaacttcaattgtttttattccaatattttctctggtttgataattttatgtttctttttgtcaagcctgggtgttcaagtgagctatctggagttctaac

SEQ ID NO: 28679 - DNA, 917 bp, Medicago truncatula
  Intron number 1 from transcript Medtr3g133190.1 (locus Med tr3g133190) derived from phytozome v7.0 (chr-ID MtChr3; po s 33691856 to 33692772)
tcgtcaaaactcatctccaacgatccatatttctggttagctttgagttcaattcattcaatgactaccagcaatttaacactttgttataaagattatagacttttgtgattaattcaactcttacgccgttagatctaaacttgcctgatttttgagcaatgagactgatagcatgcatgtatttggttgggatcaagaaaaggggaatataaggtatcaacaacataccagttgctgtgtggatttgataatctagtcgaacacggtgattggagaaaagtttggcggttggcccgaaagagttagggcctgtttgattgacttttgctttttagtttttaaattttattttataaatcacttttacaaaacactatttaagaataaagacatgtttgattatcctatttttaaatcagttttcagtattttaattttttttaaatatttactaaaatgccattaatgaaagttttccgtgtttttcttcaattgagagaaaacttgaaaaccaaaacacctttcggcagtttccatatttcagtttttaaaacaaacaaattacagttttaaaataatcaaattttgaaagacgttcatcaaacaagtttttaaaattttcaattttataaaacaaaaaaacagtatttgagaagcatttcaaacaggtccttgacactttatgcggatagttagttagtcatgatcatttgtgaactaactataggaagcatacattgcatttgggagaagcttttcgtaaacattgagccgaggtgatacttttgagactactttacacgtgcttgagggtgtggatccgactagtagaagatgagttcaggaaccagttttttttctttttctttctgtaaacttatgagtggattcatctaattttaacccataggaac

SEQ ID NO: 28680 - DNA, 814 bp, Medicago truncatula
  Intron number 1 from transcript Medtr2g046740.1 (locus Med tr2g046740) derived from phytozome v7.0 (chr-ID MtChr2; po s 13135065 to 13135878)
cacaaaaacatcacaagagtttaattgtgcctgtggtggacccctttctcatttttactccccctatgtttctcaattaaataaaagatctaaaacgatccaacactcatcaattgttggtaatgtgtctgggatgatgttagtcgttgtatatagcatctctcttttgacatacaacttgttataaatccacaaaactacatgtctaagtttctctaaatcaaattaggcttaatttcactttccgcctcataagtttttgaattttgcgattttgatcctcctaatttattttgtacgattttaaccaagtttctcaattatttgatttcatggctccccacttgttttctcgcaattttgtgttgagttgccatttttttatgccatgggagccttctcaattgtccaacatggatattattaaatttaaaaaataaaaacccaaataaataaaaaacacaaaaaatgttagatcacgtgctccatgattataccccatttcttcatttcactttcacccttaaaaatttatcttacttcattccttaatgtttattccggctctattgcatttagcattggttttgctcagtttgttccaattcatggacaatatattgtccctaagataagaatctcataaatagatgaaaggggcgaccatcagtatccgtttctaatagccacttcccacgacttcaaacgtcctgtgaaatgaagaagaaagggatgttatctaacattttttgagttgcttttaatttgattatacccatgtcggacatgtgacaaggcttgccacaaataattc

SEQ ID NO: 28681 - DNA, 688 bp, Medicago truncatula
  Intron number 1 from transcript Medtr1g008790.1 (locus Med tr1g008790) derived from phytozome v7.0 (chr-ID MtChr1; po s 903401 to 904088)
gaggaatacaagtaattatttaactatttgggtttgttaatttgggtagttatttaactttttgttggtgcactgtcaactacctgtcaatgtggttctgctgtagaactcgccatggtttgttgtagggtttatcttaacctctttggtattgagaaactagaagtcaagtaagaatacaatactgctgttttgatagataaattcagtgccacaacataaaggcaaacaaataatttttttattttttattttgagctgttggttgatttatctctaaatacagtcaaaatatcttaggcttttcaacttatgcttaatgtaggacccgtatagttaagctgtctgctgaaaaccatgcaagcaatagtttattatgtgttacatagtaacatagacaaattgaaatttgcaacactgaagtataagtggttgtctataaactagtttggaatttttaacaatgcgctattcgtcatgatttggatcaactttgttgtgttacacgcttcacttaatcagattatcagagcacagatgtttataactcctgttgtttcatgcatttagatttggttttttgggattgaagttaagatttgtaatttttttttttctttccgtttttagatgtaaggaagaagtgaaagcagggtagtcgtttggtcatttcgaaaaaggaaaggaa

SEQ ID NO: 28682 - DNA, 697 bp, Medicago truncatula
  Intron number 2 from transcript Medtr1g008790.1 (locus Med tr1g008790) derived from phytozome v7.0 (chr-ID MtChr1; po s 904258 to 904954)
caggtagttaattaacttgtttggatttgttaattaggtattgtatttgttgtgaatttatttgttattaagcaagcgtctcagtgtgaatgttgatcgttggagtagagttgtgttctgtgtgaggaatggtttcttgacaaattctactgtggactacctgttaatgtcgttccactgtagaaccttccacggtttattatagggtttatcataaccttcaatctttctgtttccttaagactagctagctgcccgaatattgagaaactagaagtcaagtaagaatagtagactgctgttttgatagaaaaattcagtgccacaacataaaggtaagaaataaagttttcatattttgtgctattagttgattatctataaatacaggcaaaatatcttttgcctcccagactgtacttaatgtaggactggtgcagttaaggtgtctgaagaaaactatgacaacagtagcgtagtttttatttcatagtaacaaagacaaatcaaaatttacaacacggtttgtctacaaactaatttggatttttgcacactgctctatttgtcatgatttcgatcaacttggctgtgttatgcacaacacttaatcagattatcaggtcacagatgtttattactattgttgttatatgcttttagatttgatgcatgtttgtatatctctttttcttag

SEQ ID NO: 28683 - DNA, 769 bp, Medicago truncatula
  Intron number 2 from transcript Medtr1g108530.1 (locus Med tr1g108530) derived from phytozome v7.0 (chr-ID MtChr1; po s 23181897 to 23182665 reverse strand)
attttcaggttcgatttttcactgttgctttggtaaaatgtagtgtgttttctgttttcagctttgatagttcatttctaggccctctttggataaacaaattatagcttatagcacatacacttgtgtataagtataagttataaccacttctatagcaaaagataaagtaaagttaaattattttcgtataagctataagcagttttcttaaaacttttgaaaattaactgaaaatgtttgttgttttcatgagttctcccaatcaatctcacaaaacttatgtcggtggataagctcaaacaagccggtcccaataaacctttagggccgtttatgcaaataaataagtttttatgtattatactattattcataagcttgccaaggtaatttatgaaaaaacagcttatgaaggtacaattttcgtcggtgggaatttatgaattaacataaaagctactttatttgcataagtaatttttaatatgctaaaaaataagccaatcaaaaagagcccttaatcataaacattttactcatatactacatggttaggatgcagattattatactgtcaatcaattgtatcataatctggaaaacatcggctttaattataattcttctaaagtaacgcaaatgagtggttgtgatttgttgaggatgtatcaaaattaaaatcaaatcacaaatgttactctgttttcttggttttaggacttcatttacgtggctatttattgttttgtttttattttggcagaaa

SEQ ID NO: 28684 - DNA, 959 bp, Medicago truncatula
  Intron number 2 from transcript Medtr1g111670.1 (locus Med tr1g111670) derived from phytozome v7.0 (chr-ID MtChr1; po s 23856315 to 23857273 reverse strand)
tgcataaatcttccccaattactcataaagttccggtaattttatatcattttcttaaaatgtatgaattaattttattttattttcaaatttgtagatatggctgaaccattgtttattagttatttttcttatagatacagattaagtaaactaccaacttagtaggacgctatcaattaggtatctgatcctgtcaaatttattttaccgatattagtcattctgagagtatgttagtgactaaattaatagtaagtggttaattataaggactgaattgataataagttattaaaatatagggatctaattgatagttagtggttaaataatgggactcgatagtttaatagagttagggacctttttgaaatactcataatcgcaaggacctattcgagagcttcataccaactaagagagtaatttgatggtttacttgtacaaaagactcttaagaatgtggatttaggtatttaaggttttgggctgattaggtcatgtctgtataaaaaacttaattaagcacttatagtgtaagtgtttatcatattattgcttaggtataagctatttatataacaaaagataaaataaaatcacattgttttcatataagttataagctgttttcataactatcctagatagtttatgggcatgtcataagctatattcgtaagttatcccaaacaatctcagacatgcttatgccagtagataatctgaaataagttaatccaaacaggccttatatgtggacatgttgaatgaaaaacaagtgcttaattagcgttgtttctgaaattgtgttatctaatattttgttaaaggaagtgtgtggatttattccttgtttcaattcaaaagcacatgttttttttcttcttctggtgaagttttctcatgtatttttaatagggtaaatccacaccttttgcatctcctctgggttt

SEQ ID NO: 28685 - DNA, 665 bp, Medicago truncatula
  Intron number 1 from transcript Medtr2g100300.1 (locus Med tr2g100300) derived from phytozome v7.0 (chr-ID MtChr2; po s 23329101 to 23329765)
gtcaatttccaccacggaagaaaaatcacactgatgtaatctttacttgtttatcttcttctcactttttctatttctatattcatagcattggattaacaatttgtgttatagtaagatgaaaaatgaaaattacccttttgttttcaattgtgttacccctttttgtttcatgtttttttatggattagtgtgttttaacgctgctttaatttggattgaaattaaaaaagtcttttttttattgtttgcattggtttcatatttcaattcatttgcaccatgtagttgcacatgaattttcaatactcatttatagttttagggcctgtttcgattgacttattttttagcttatgcaaaacaacttatgcaaataattaagtttttatgtattactcataagcttgtcaaggtagtttatgaaaaaacagcagttttgagcttatgcaaaacaacttgtgcaaataaataagcttttatgtcttattcataagcttgtcaaggtagtttatgaaaaaacagcttatgaagatacaatttttgttagtgagagcttgtgaattaacataaaggtttatttatttgcataagctattttacataagctcaaaaataagccaatccaaatgggcccttattttgggattccattcaaaagttgt

SEQ ID NO: 28686 - DNA, 691 bp, Medicago truncatula
  Intron number 1 from transcript Medtr1g107880.1 (locus Med tr1g107880) derived from phytozome v7.0 (chr-ID MtChr1; po s 22865827 to 22866517 reverse strand)
tgcgattccgcttccctctgtgtgtgcgttgctggctttctcttatgtgtttcctgtcttgttttattcctgtccttttctggttgtctttcaggttgtatttatagggtaaggctgagactagggtttgttgagatgagcagaaacttgtgctgagatgagaggagcgtgttagctgttgttggattgcaacgcgttttgctggatttggattgagatgaggtgaagcacgctcgtgtgacagactgcaatttttggattgggaccgtttttggatttatcattggacaaaaataatgaaataaaaacaagataaagacaacaataaaaagattttttaaaagcaaaattaaagttaatttaaaaataaaagatggaaataaaaataaatagagaagagggcccgactcggattcaaaaatgaggtattttaaagtaccttcatagagatttttcattgaaaagttagggactgatcagggtcaaatgacatgcgtcagtgtgaccttaggtcaaaaattggggtatgacaatctttcaataacatttcaaatcttaaataaagcattaaactcaagaataataacaatattgaataaataagctagaaccttaaattaaatgatcaaagattacaaattaatagcttgtttgaataccttaaaaaccacaagcgtagatgtagctacat

SEQ ID NO: 28687 - DNA, 748 bp, Medicago truncatula
  Intron number 1 from transcript Medtr2g096390.1 (locus Med tr2g096390) derived from phytozome v7.0 (chr-ID MtChr2; po s 22339875 to 22340622)
atttctgcatctggaatacttgaatattcatacaagtatgtttttctttttcttttttgtgttgagtttgctttaatgtgtcattcttcttgttttttaaatgaaactgctctaaattcttgtacatttacatgttttgagactgaattatgagcagctatctatttttagagtttaattttgatacactctcttttacattgtcaacaaatcataactgatgactgtagaagtagttatagttgaattcaattttttttttaatgatttgatgattatgattgattgaaagtttaaaatatcaattttttcccgaaggtttgaactcatgacctggacaaggtcatgagttcaaaccttcgaaacagcctcccctttactagggtaagactgcttcatctatcctgtcgataggagattcgtgcattaagccgtcttttatgaaatggtccaccataacaccattatacttgttgaaataagtattagattgtctcttaacttttgactcatgtataatgttgtccttttatattgcaccaaatactatatagttatgataatttgcaaattatggtgacaactaattgtcttcaaaagtggagtgaagatcacaattgtttgaactcaatgtaataattaataatgacttttttttcatctaattatctatttcttctctttctgttttaattctcttgtttacacttcagggacttgcaaaaggcaacatataattttacaacac

SEQ ID NO: 28688 - DNA, 427 bp, Medicago truncatula
  Intron number 1 from transcript Medtr1g009520.1 (locus Med tr1g009520) derived from phytozome v7.0 (chr-ID MtChr1; po s 1311741 to 1312167)
ccaaaagccatcatagatcttcttcaccctggttagtacatagtactatcttagtttctatttaattatcaatttgttttcaagaaaaacaaatttcaatttttttccttctaattactggttatatctttactaatatcaattatttctttaacttatcgactttttttttatatgtaagaacaagtggggatcttctagtgtcttgaatgtttgattttgaatgtcaaaattgaaaattgcaaaaaggggaaacttatggagcttgaatgtggttatttttaatagggggccaaaatcgcaactagtgcaaatttagaaggtcaaaagtgcgtttaagcctagcatatttaacccactttcattcattaatagaaaatctaaatgaatttgtaatgaaatgtaggcacagctaacggaaaaacaa

SEQ ID NO: 28689 - DNA, 1019 bp, Medicago truncatula
  Intron number 2 from transcript Medtr3g010510.1 (locus Med tr3g010510) derived from phytozome v7.0 (chr-ID MtChr3; po s 1848459 to 1849477)
agatttcagacactgtaactaactaactaactaactgctttcattcattactcattgaatttgattggatgcatgtgtaacaaagttttacatgacctgtgcataaaattaatctcttaaggatttgtaagaaagttttttataatgtccttaatttaaaatagaaaagtaagtcctcccctccaaaatcaacctcgaaagcaagtttgtttttcatacacttacaatgtagaaatgttacactttcagcaagtcataaccatccatatagtactttatgagtagttaggataaaagttaaatgtttgtcatgatatgatgattatgattgattgacagtgtaaaagctattaatttttcttcccaatcatatatctttattagacttacgttaattaagagagcgtgaagtgagtgagctaatgaaaagtaagtgtatgtttgaaatttgtttattaattgattagtggaaaacaagcttaaaagacatttagatagtaagagtagtagcgtaagtgagtcagttactgaatagtaagagtatgaccctgtttggataagcatattatgttgccgcttatagcataattgtttatcatataagagctaatgtataaactattttttataataaaagataaaataaagtcaaactgtttttgtataagatataagttgttttcataagctatactggagagcttatcaaaataagctgaaaacagcctatgaaaatgtcataagttattttcatatgttctccaaacatgtctcacaacacgtgctaatatcaatagatatactcaaataatcaatccattcagactgtatatttgaattttgtttataaattgattagtacaaaacaagcttaaaagacatgtatattagaagaagagtagtatttgttttgtagttgttacttttaactattttatcttatttcattgcaattactttagccttttgtttttgctttcacaggtttgttctgttgttgactctgctgaattgtgcag

SEQ ID NO: 28690 - DNA, 570 bp, Medicago truncatula
  Intron number 1 from transcript Medtr1g030880.1 (locus Med tr1g030880) derived from phytozome v7.0 (chr-ID MtChr1; po s 7350872 to 7351441)
ctgctattcaacttgctgaacaactggtataatatatagtattctatagactcaatactttccatttttctcaattattcttcatataaaccaggtttcttgtctccaatattctattcatattattatacttatcaaaatactaaaagtcaaaccaaaatttttggcctcacaatgtttgcttcaaactatctatatataccaaaatcagtgtgtactttggtggtcattaatattactatatatgttttttattctctaatcctctggttctcaaaaagaaagaagtcatgacaaatagctgtttaacctttgaccaataagttagtatagtatgacaaataacttttcagtcaggatttgaacttgaatttttccgaatgatttggcgttaatagaaactcattaaccacttaagtctaactacttgattttggagcgcgaaagaataatgctaaatataactaaatattacaattgaagtaaattaagatgaaagttgaaatgatattttataatcatggaaattgaatgaattaatacaggtggagaggaatattgacttggtat

SEQ ID NO: 28691 - DNA, 767 bp, Medicago truncatula
  Intron number 1 from transcript Medtr4g022000.1 (locus Med tr4g022000) derived from phytozome v7.0 (chr-ID MtChr4; po s 4328379 to 4329145)
ttactttcttcataaaagaaggtaaactagctttgataattagttacttatggataagatgatttgattatgttgatctcatgaatttgaaattgtttattgtagttgttgatattgaattcttagaatttgagcttttagttggtggttaatggtattactgtttgtattattatgcttttaatttagttgttttagagattcactttaagatttaattaattgaatccattcatagatatgatttatgagttatgactgagtattatgacgtcgtttgatcgatgattgtcaagtcaagattcatatcgtgaatcggaggaactattttgtgaattgtgaattgaaagtttattatgaattgtagtagagatattacttgtaaaaatatgaaatttttaagtaaaatcaagagacattaaaaaatattataagccaatatatcgtaaatacagctcaaaataattcaagatttaagtcataaatcagctgaagaaaaataaaaatgattgactatacaaagttgaacaaaaacaagtggatggattgactaaccttaggtaatggttcattacaatgaatcagtattcatcatagtgaatcaggatttaagataaaattcatgtgcaaaattgatacgcactaggaattgtagcgattggattgactagtatgtcccgaagatactggtaaccatgccctgatcgtatgtgctatgtacccttttgtcaggttgttatcttctggaactactattatccctcgag

SEQ ID NO: 28692 - DNA, 803 bp, Medicago truncatula
  Intron number 1 from transcript Medtr1g107150.1 (locus Med tr1g107150) derived from phytozome v7.0 (chr-ID MtChr1; po s 22533282 to 22534084)
acgtagcgcaccctaaacggagccgtttcttcgaggtaagaagatccaacccacactgctctttctttcattcgttcgattcagttacttgaaacatgcaaattttgctgtgtaatgctaggttaattgtagtccctgttttgttcattgttgaagcaaaatcatcataacccataataactcaatacgaaaacagggtaataagttctcaaattagggcttgatttggtagaacaataattgaagataatggagaaatgcatattttagttgttacaattctgtgaaactaatggggtgcagaaaaataaccccttttgtttgttttcttgtttaacatgtttgttcgcaaggtgtttgtcaaaatgcctcaataaggttaatacctgaattggaaattttatcataaataaataagtttagttgtattgcatgaaatactgacacatacacagacacgatcttgacactgacacatacacagacatgatcttgacactgacacatcaacactagtgataaaaaaagtgaattaattgaatgtaatcacatttgtagttttcagacacccgacacgccttcaatcagaggtgtcagtgatacgatggttgtatttgtattcattttgatgactataagtgtagtcatcattccagtttttattctataggattatgtgtgcacaggaagcatagcagaacctgcacacatttatcaaaaaattcaagttttatgtattttcagtttcctctttcctctaactatagttactaaaatgacagtggaagcattaaccaacaaca

SEQ ID NO: 28693 - DNA, 467 bp, Medicago truncatula
  Intron number 1 from transcript Medtr1g129810.1 (locus Med tr1g129810) derived from phytozome v7.0 (chr-ID MtChr1; po s 29055321 to 29055787)
tttgggagaatcttgagtttgtgttacaatgtgtggaagtattctatgattgtttgtctttttttttttgatcttgattccttcttcagtttttactttttattctacattatatactctctcctataaaaggagcacattacccatctatctttgtttataatctatatttaggaaaatgcttagtatagttagtagtatgaaaagcagtttaactacacacgcgaagggctccaaagtggaaaattatttccccttgacccatttttctttattcctcctatataattttgttatatactacaagaaacaatggcacacacaattaggggcgtgtaaaaaatatggatatattaaccgacatggataatggccagaaattattaggggcaattgctaataataaagttgatacttaaataaaatattcaggataaatcagtggaacttgattcacaggtccacca

SEQ ID NO: 28694 - DNA, 346 bp, Medicago truncatula
  Intron number 1 from transcript Medtr2g122740.1 (locus Med tr2g122740) derived from phytozome v7.0 (chr-ID MtChr2; po s 29566714 to 29567059)
acttctttccctctccagctctctctcttagcctagtaagtcctaactataactaactctcttctttatttcttctatatttttcttatttcacatatagttacattagtttttatgtttaaatttttgtttttcctattgtttttaactcaccaaccgataaataaaattgtttcaagtgacacttaagtcattagggttattaattaataataaaaaaatttccttttaaaagttatgagacttttcatctaatataatgaactaattttttgagttgaactctcttcctagacttaagttctaacatattttctttgctcaaatcaggcggggatatttcggc

SEQ ID NO: 28695 - DNA, 224 bp, Medicago truncatula
  Intron number 1 from transcript Medtr1g014080.2 (locus Med tr1g014080) derived from phytozome v7.0 (chr-ID MtChr1; po s 2827974 to 2828197)
tcttgcgctggtaactaacttttaactaacttccttcatctttatatgtttgtattaaaaatttgaaaagaagacataaagtggaaagaaatttatgattttacatttgaaaaatatttttttttgttgaaaaaatgaaatggggttttgaattttgataattcattttgttccacaatgatttgaaataatgtgtatgtttgtgtgttgtagttttgttggtg

SEQ ID NO: 28696 - DNA, 773 bp, Medicago truncatula
  Intron number 1 from transcript Medtr3g092460.1 (locus Med tr3g092460) derived from phytozome v7.0 (chr-ID MtChr3; po s 21729748 to 21730520)
ctccagcagtgcgtggatagttgctgaattatatttttattaattcttttttaatatttactaaaataattaattgttaattatatcaaatatctctaattttaagttttctatttccagaagaaaaaaaaaagagttatatttttcatttttttcttaattaattttaatattgaaatattttttaattttttattattggaaatattttttatatttggttcattagatttatattacatatggagtggttttcttatttctcattctcaaatatgaagaagatgattggttgaagaaagttgaatagtgtgaagagattggtaaaagcggtgtagcggctggaagagaaaaaaggagatttatgattttggtaataattaaattaaattgaaataacaatcctatccttttgtcttcattgattttataatgaaaataagggcttttagtatccaattgaaaaggtgtttcatgctaaaacacaccttcacacaagtgaatgggtgtgttgtagcaatacccatttttaaatggatagattggatccaatcaatttgaaaaagtttgtttggtggacggattagatggattttgcattgaatggatttgatggactaaattgtcacccttagaacggagcacatgtttagggggttcaagtctcttattagtttaaccaattcattgttgataaaaattcgttcgattttaatttgatgtattatgtataagcaaataaataattttggggggatgaagtagaagaggtg

SEQ ID NO: 28697 - DNA, 878 bp, Medicago truncatula; identical to SEQ ID NO: 28678
  Intron number 1 from transcript Medtr2g006860.1 (locus Med tr2g006860) derived from phytozome v7.0 (chr-ID MtChr2; po s 839093 to 839970)

SEQ ID NO: 28698 - DNA, 236 bp, Medicago truncatula
  Intron number 1 from transcript Medtr3g138650.1 (locus Med tr3g138650) derived from phytozome v7.0 (chr-ID MtChr3; po s 35470598 to 35470833)
tctttctctcattctttctatcttccctttctcaggtacctaactttctctctttttccctccctttttcttcaaccattatccatatcaattgtaaaatttatgcacacaaaattaaattaaaaattaaatcaaattttgtgtttatatttcaaaaaatgaccctacactaatgttatgatcacttggtatccttggcaggaaaaaatcaaataaacaatagtgcttttctttca

SEQ ID NO: 28699 - DNA, 505 bp, Medicago truncatula
  Intron number 3 from transcript Medtr3g138650.1 (locus Med tr3g138650) derived from phytozome v7.0 (chr-ID MtChr3; po s 35471635 to 35472139)
tggtgaaatcgttggcctttttggagtctttggtatagttacatatttctctaatttttttctcctggtcgaattttgattggaaagtatgtcgaaaatatttcacaagggaatcatgtcatggatattttatcagtattttcgtattaatgtttctttccgaaatttttccatttcttacaatatatagcctgattttgtacttttgtcttccattttttagtgatgtcctccatattttgttatagtattgttctatcgttctctgccaccgctaaagaatatttttgaaggttttccagttcgcaaacctttggttggctaagaccagaataaatgcttcatcctcctatttgttgttatttttgaacctccatttattccatataggaataattgtttagtctattagtgtttctttgtttggcctgagaaattaaccgtgtaagagttatttcatattgtttatgcctatatataaacttgtttataactcttttaggtc

SEQ ID NO: 28700 - DNA, 619 bp, Medicago truncatula
  Intron number 2 from transcript Medtr2g103010.1 (locus Med tr2g103010) derived from phytozome v7.0 (chr-ID MtChr2; po s 23821740 to 23822358 reverse strand)
gatccttccttgttccaccagggttagtttttttattttattgtatttctagttcatgtatgtaatgttgtatagtataggaagcactaacacagacacagacacgaacaatatacatgcaccgataccgacatgtaaacacaagaaataatttaagaaagtgaaaatgattgtatgtaaccacatgtatcgaagttctgtcgatgttagacatcaacacctatcgagcccttgaacacgatttcaaattgaagaatccatactagtctgctagataatgtatactaacattttaaatagcaagtgtataccaaataatcatcggcttttgattgtactataccttggacctaattcatgtatcttacttttcatatagtcatgcatcttcactttgctatcttgtctcattagcatcaaaggctataacatattgtataagtttgatgtatcaaagaagaaaactatgtagtctaccatattgctaattatatgttgcatttgctatccaaaagttttatgattcttcaaactcagttccttcgtctaccaaattattaaccagtctcggaaaacaattacagctcaggttcttccactggtggtaccgtagcaaagg

SEQ ID NO: 28701 - DNA, 692 bp, Medicago truncatula
  Intron number 1 from transcript Medtr1g042080.1 (locus Med tr1g042080) derived from phytozome v7.0 (chr-ID MtChr1; po s 9533595 to 9534286)
acaaggtatgtgtcaatccaccattttttttttttgtgaaaactggaagtaaaattccattaatggagagaaaaagcttaaggaagaagaaaggtttactcttattcaactatttcatacaaaactgaaacttacaagtagtacatgaagagtatatatagaacatgtaaccctataactgtcaactaactctagttacttctctaactaactaagattaagaaacagttgcaaggggttaatttgatttgcaagtttactaactaactcttctctatactaacttcatcatttttgtttttcgtttagtttaagactatctagatcatgatgattttgaaggtagaaattttatactccctccggtcctatttataagagaaagttgggtcaacaaaagttgatgtatctggactgaattttgaaccagatacataaacttttgttgacccaatattcccctataaataagaccggagtgagtagtaatattaactacaatattagtcattactaaataatgcttaacacattttatatttgtctcttgatatacttatttgattgattagattgcatttcgtgaattcaaatattctaaataatgcttaacacatttttgtatttttctcttgatatacttatttgattgattaggttgcatttcgtgaattcaaatatttagccttatc

SEQ ID NO: 28702 - DNA, 609 bp, Medicago truncatula
  Intron number 4 from transcript Medtr3g009380.1 (locus Med tr3g009380) derived from phytozome v7.0 (chr-ID MtChr3; po s 1347706 to 1348314 reverse strand)
ttcaaggtgaatgttttattgactaacctaggggaattgttattgttttgtcaatgttggtgaacaacttagttcagtgcttatagcgtaagcgtttatcatataagtgcttatgtatacgctatttctacaaccgacgataaaatgaagtcaatttgcttttaaatcagttgtttggataagctataatgtataagctgtttcgtgagctctcccaaacagtctcacgtgcttatgccagttgataagctcaaataagtcaatccaaacaaactcttaatacttgatgtgtgtgaaataataacataaaccttccttctattgccattttctattatttatatttctgggatcagtgatcaagattgaatttacatatcagtggctatgtataaaataatcctaacggagtcacatattttccctgcctatgttcttttgaatttaaagaacttagggtttacgttcttctcagacccacctaatgaatagtgaattgaaggatgggaaaatgtgtgtaagtctagattgtatgaaatgctgacctgtttttggtttaaaatccctgctataggattgccttctttgtcctacaggatttgctgccaa

SEQ ID NO: 28703 - DNA, 716 bp, Medicago truncatula
  Intron number 1 from transcript Medtr1g068700.1 (locus Med tr1g068700) derived from phytozome v7.0 (chr-ID MtChr1; po s 13770257 to 13770972 reverse strand)
aaggtgaagtttgaacctaatgcgatgaggagatgcttacctgtcacatctcacattaaatacgggcttgatctttatgccgaggaagaaattgtggggacatgacccttggtttcctcctgccacgtgtcaaggctacttactgcacttgatggcctagaccgttgagtatttaatagctttgattttcaaggatgttttttagtcgttggtttgatataaacacctgagtttgtatcagacttctcgatgaacctttggattgattgaggttttctaatcatgaccattgcatcgtttttgaagagttggattcatttgcaaaacactatattggatgaatgacctccaaggctattcaaacattttgtggagagtataaaagattttggaggggtattcaaaagacttttacaatttcttttatgagtttctctattctctattatgtaaatatcaagctttttcttagagctttatctttcgatttaacaagttggttcgtcttgaccttatcttcttgtggttcctctagtatttttgtgaccagtttggttctgataaccgaacaatttgtaggttatcattttgcacttatcccccataacctatgagaaattgagtgtatgcatggcctataacatataatcagtgactatttaggagtttatggttgtgagtaacttttagtgttatttaatcattttgaactagta

SEQ ID NO: 28704 - DNA, 546 bp, Medicago truncatula
  Intron number 2 from transcript Medtr2g080470.3 (locus Med tr2g080470) derived from phytozome v7.0 (chr-ID MtChr2; po s 18543539 to 18544084 reverse strand)
ctctacctgacatcttgactcagagtggtcatcaggtacttccaccactaccatgttacttataatgcacctactgcaagttcaagtcaccactaatagtttaccaagaaattattctcatttcttatgtttacttcatttgaatgtgtgagtgtgtgtacatttcttcattaggtgtatattttgtgcaaaagaaaataatttagtacagaaacaaccaagaaaagttatttttttatcaagggttgggaaaagtgtatagagacagagtaaatatgtgtaatctcaacaaaaaaataattaaggattgatatttcagcacatctatgatttgttatgcgtgtgcatgtaatatcaataaccaatttattcatcgattattaatattacttactttacactttaacttggcacgccgtagaggtctcgtcctttattatgataggatgttactatagcatggaaatgctttggttgtgtatattatctcctgattttatgtatttgttttattccttttgattttattttcttggagcaattagc

SEQ ID NO: 28705 - DNA, 978 bp, Medicago truncatula
  Intron number 2 from transcript Medtr3g122460.1 (locus Med tr3g122460) derived from phytozome v7.0 (chr-ID MtChr3; po s 30464607 to 30465584 reverse strand)
acaaggaagacgctctaggtctttcctttcacttttaacctaattaattctatatcaaatgtttctcgttatcatcaatattttttctagggtttgggtttagttatgtaattagtaatacccacgagatctaacctattatcagaaactgtaactagtcttttggttattggtttatttctgtttttttgtcttgctaaaaccaatattttcattaatttagtcttaattaacaaagtgttgatgctcaaatttatcatttgtactgttggtaatgtattcagtcaatttatgcttgagaatttgcaagagataccttggtggtttatgtttttaaagctttgactgtgagagagatgacctgaaatgggtgaacgttaatgcagaagaatgtttactgttagataacaagaaatcagttaaacatttgattaaatgttttatacataaatgaatttcccaaacacaatattcatggaaaaaaacaagttttcaatttgccatatcctaagttggttgcagctgtgaggccctaagattgacagcttaatttttgacgttctgaattttgttaccttcgatatccctgataaactagccagatggccatgtcttatcttagtttccgtatatctaattttattaaggcaaacgcctttcccgaatccaaaacacaaaggtggtcctattagaccagtagtctctgattcgatggtgcccgattaccaagagggatggccacttatgtagtctttggctacactgtttctttcaactgagcttgctcttattgctcctataatgtttgcggttcttttcatgttgtcactgtatacaactgttccaaaatagcaatttgtgttcttgatttctttcactttttatttaatcaatgctgtattgcatttatttggcattccatgtctttataattttcaataatcagttttgttggacattgtgatgcagctggtgctg

SEQ ID NO: 28706 - DNA, 721 bp, Medicago truncatula
  Intron number 2 from transcript Medtr1g121420.1 (locus Med tr1g121420) derived from phytozome v7.0 (chr-ID MtChr1; po s 26452865 to 26453585)
acctacctcgccctcattcccgccaggcaagtactgttcttacttccattcaaatcttttcccatgtactttaatggaatatcaataagcttccttcacctatatttatttcacaaactctggtcaatatccaagtgctactaaaattacgtgatttagttataaccattaacattattagattaacgagcatcctgtctaccggcacttttgattgaaggtgtgtcctgtgtcccacgaaaaccaattcgtgattacattcaatcatgtcatttctcataaattatcacgacttgtcagtgtcggtgcctggtgctttggatagttcaactggtttgagctaagagataaagagtaaatattaatctataaactactaccgctgttctgttgaactgctccctctgttacaaaatataagtaaaagtaattcaaacaagtttgatgtatttggttcaaaatttggcccaaatatatcaatcaactttctttaactcattttagtttatattttgtaactgaggtaataactactaacatttgccattcaaaaaaaaaatcatccgtttgtcttcataacattatttttcttcgatgtaagctgctttcttgcttaagattatgctcctaccaaatacaagttcagctgctttagaagttatattcccgttcgtttcatttttcaggacaataccatttgcctggaatctcattacagccg

SEQ ID NO: 28707 - DNA, 495 bp, Medicago truncatula
  Intron number 1 from transcript Medtr2g018740.1 (locus Med tr2g018740) derived from phytozome v7.0 (chr-ID MtChr2; po s 5013446 to 5013940)
gactaaaagttgaacctgcaatcttatcagtcgaggtattatttctggacgtgcaacttatgcttgtatgtcctctgtttctctaagtgcatttgtttgaagcaaaacacatgcaaattgaaggataagttaatctaccttgcccccaaatttttcttctgtaaggttaatgtgtcagtttctctaaagctccagcccatggttattccaagggggtatctgatttgaaattggcagctgctactgtatttctagcttccttgtttacttttttttttttaatttgaatataacacaacctattgtatttcttttcttctttttaatatcaataatatttcttttcaaaaagaaacgtcgctttatagaacctgaactacattatcgtttggaagtacagtatattgaggaatcactatgcctttgtgctttatagattaaagtattcaacatacaaataaaacgtgctttataattttcagggtagaggcttca

SEQ ID NO: 28708 - DNA, 1008 bp, Medicago truncatula
  Intron number 2 from transcript Medtr2g018740.1 (locus Med tr2g018740) derived from phytozome v7.0 (chr-ID MtChr2; po s 5014019 to 5015026)
agcgggtaatttgccttcattgagataggacaattttaaccaattcgttatattttcgaggcatttaattcagtctaatgacatatgttgttccatggtgtttgcattaggcttactcatggacaccaaaatattagttttcattttgatccttataagatattctggggctcttcattggcaaaactaactgttagaatcaaattatgcagtaaatatgtagaaagaggatggatatgaatattgcagtattttattgaaagcagcggttatgtttccaacagggaagttatagaattgattgacaagttacaaactaaatatataaaacagcaactgctacaactaactacagctctaggaatcagagagcctagtctcctcctaaaccaaataaccaactgatcaagttttcgtcatccttattttatttaaatacgcaaacctacttgcataattgggcctattgattattacgcctacgcctaacataaaccttagtgataggaggtctactaacacgaacactgttaggtatctggtggtattgatagggtaactgctgacgcagtcagttattttaatatatagttatttaggagcagttagcattttgtataatatgcagtatttgtgttgattaggagcggttacaggcagtttatgccctttgtttgtataaataaggccatttggccacaacagtagagaggattgagaattattcaattaggaaccttattggttttgggcagagagagaaatgtctcttctctgaggagcttttgctctgggattacagaggataagtaatattttattttcaatcaataatagtattccttttgtttctcttaatttgggttcctatcaaacacacactaactcaagcatttctgcttttgatataagaaagtcagatttatattaatagtttgaacaaaaaaaaaaatggaatgtaatggtgattttggtctatgctatctctctaataggaatccactggag

SEQ ID NO: 28709 - DNA, 363 bp, Medicago truncatula
  Intron number 1 from transcript Medtr3g033990.1 (locus Med tr3g033990) derived from phytozome v7.0 (chr-ID MtChr3; po s 9274850 to 9275212)
acaataactttaccaattgcgtcaaggttaccctcagatgaaattgttaggaaattgaagaataaacaataaatcttaaaagactttgaattagtgtgtgaattaaaactagttaaagtctcacgtggaaaaattagttttaattaataatctatatctatctacatctacattatatataaagaaatacatcgtttttaggtgattttttcatttctaattatatccttaaatgaatttgattataaaaatgatattttgttgttgtcgtttaaaaagataagaatttatagtattatatctgttattttgttagtgtcaatggaaaatacaagtatagtttgttatgtacatttaagggaa

SEQ ID NO: 28710 - DNA, 495 bp, Medicago truncatula
  Intron number 1 from transcript Medtr1g065880.1 (locus Med tr1g065880) derived from phytozome v7.0 (chr-ID MtChr1; po s 13244732 to 13245226)
aggaagtaagtctatatctctatttctttttagtattctcggtactaaacttgattagctaatgcctatgctatagattctcattggtattgttctccttgacatacgtatgctctctgtttgtaaaagtatatatgtatcatctaaggacctcattagaaatttttatagtaggaatctagatcaaaacacacaatttgaatcataattgccatcaaaagttatgtattctcttcggcatagaaactttgtgcagtgggtgtatttagggatgctttttagaattctgtcatgaatcatgatattaaatatgattaagtttctttgttagtcttctttgtatctgaagcatatgattgaaattgattagtttgtgtcgtatttttttatgcagtatctgttggtttacttggtaaatacgtcatgaaaaatatacttggaactgatttatttgaaagagaagaaaaaaggagccaggggagcgggcaaagattt

SEQ ID NO: 28711 - DNA, 667 bp, Medicago truncatula
  Intron number 1 from transcript Medtr1g034300.1 (locus Med tr1g034300) derived from phytozome v7.0 (chr-ID MtChr1; po s 8185573 to 8186239)
ggaagtatattgttttgccaaaaacaacaataaaggtaatttaccttgctagctatttgtattaatttgaagacaattctattctttgttcaatttaattatatattcaatcttcaaacttagtaaaacaaattgaacaagtcgtagttctttaacattgaatcaagattatggaattttaaagagaagctgagcaatttaacaacatagtttttcaaaatttatattagaatgacttggatcttctacaacttcaaactctccggtcaaatctcaatggttagattaacctaatggtcaatagcattatatattttttccgacaataatagtattatatcttggattaatccaatgacgaggtttagctgaagaaaatgcaaatgatttagagtatttgataaaaaaaatccttaagaatagtctaaaatattattatttaggttaaaatacatcataggtccttaactatattgttttccgacataaactaaggcttgcaagtatgactttgtaggttcttcaactaccctagtcaacacaggtcagcttttaagtttaagtttgctttattttaattttaatctatatgaaaattatcatttttcttaaattaattttcataaatgcaggatcaattttaggttcgttattttttgtcttgttg

SEQ ID NO: 28712 - DNA, 1029 bp, Medicago truncatula
  Intron number 1 from transcript Medtr3g044260.1 (locus Med tr3g044260) derived from phytozome v7.0 (chr-ID MtChr3; po s 12312118 to 12313146 reverse strand)
aaggttgaatagatttgataatccttatatgaagattgaatcgattcaaattgtctcctacatgattggaagtgatgccgtagtgtctgaaaactcccagcttacattgaatcgattcataaatttaaaagtgcataaaaatagttgaaagaaaccctaagacctagactttgtaaaacatgatttccacctcaaggcatgttcaaaacacgagtttaataaaagtttttttgtggcagtcagtgtgtgttacgcggcattgtgtgttttgtttatgtaagttttttgcctgcgctgctacttcaaattcaggtctgccttcaatttttctttttagccattttgtatcatatactttgttgattcaattttaatctttgcccaatcattgattcaatttagtgaaatttattgttactttattacattgttataaatcttagacatttaaaattaaaattatgcagagaatctttatagaatcatccccaaagttagtctaacacaatttttgtctttttattttgttataatttataggttggcacagtgtttgtagctatcctaaggttcaattttgagtatattttgttgcagttttttaggctggatattttttgcatagttagttatattagcaataggttctttgtagacaagcttttggtattttaaattcaatgtgtctttaaaaattgaactcttaacaaatgatatatctttatatgttcatggttagttacctttctttttaaaacttttgatatgtttattctctttgttatgagtacaagagataacattaagagagtcctactcttgtttaggaattagagaattttcttggtggtacattacatcggcactttattcatttcagaggtctgctgctatatcctattttgctgacttgctgatgcagattgtttggaccattttttctgttttttgtgtggttctattcccaattcaactcacatttttctggtgtcagagaagacaatttcgacgcccggtttggtctgaggc

SEQ ID NO: 28713 - DNA, 723 bp, Medicago truncatula
  Intron number 1 from transcript Medtr3g138090.1 (locus Med tr3g138090) derived from phytozome v7.0 (chr-ID MtChr3; po s 35206837 to 35207559 reverse strand)
cattctcagatcgccgcaaaacctcactctcaacggtaaatctcactctcaagtttcattccacacttcgcttcgattactcatagcttcgaaaattctccgattagcttatcaattttcgttttctactgcttcaaacggtgtatagttttttcgccattctagggtttctactttttttctggctaaattgcaactgttttttgcttttcttctccaattgctttgttgattcagttgaattgtatgtattgtatttacatgctgtattgctttgcatattatggctatttgtatttaaatttttaagcaacaacttcttgatggcattttgtagccataacgttgtttttggtgaataaagatactaaaagatgatatttgagtttatctggggtaagtcttgtgagactgattgggagaatttatgaaaacggcatctgacaattttcagaagttctccaatatagcttataaaaacaacttatagcatatgcacaaacaatttaacggtattttatcttttgctataaaaataaaatatcttaagcgcttctgctataggctgcaaataagataagctgtttatccaaatcatatgcaaaatgaaaaatgagtttgccatgattttatcccctttagtacattataataattgtttacttattggcaggtttttggttgacaggatttacacagttttttccgtcctgtgcacctcag

SEQ ID NO: 28714 - DNA, 820 bp, Medicago truncatula
  Intron number 1 from transcript Medtr2g043170.1 (locus Med tr2g043170) derived from phytozome v7.0 (chr-ID MtChr2; po s 12308209 to 12309028)
tttgttttcaactcttaagctttccaatctttcaggtatgtattcaagtgacctttcttttagttgttttctaagtatgggaagagtctttttattatccttgaatgatactatacttaagagtatatcttaagctatatattttgtagtcaacaatatcacgtggcataggcagaacaggacgaggatacataacaaatgaggcttagtagtgaaaatagtgatcatgatgttttttttttttttgaaggagtagtgatcatgatgatgttgatgaataagttataagttgttacaaattgaaattttatttaaggaatcacttttatttattttaaatgcttggatgagttactttaaccatattagggtttgaatacttgtaacaatgaactttgattattattcgcgacttatcagacggttacttgctatacagctatagtgttttggcgactttccagctgtactcatccaccgactacatagattttgataagaaaataattgagatgattatatatttagggaaatgctaaacttcccgtgaaaaatcatcccgattcaatttgtttggctattgaatctgctgtgtttttttgctaagtcaaagattgaagtggtttgatttataacacaatgcatttcgggaacatatggttcgctgtatataacattgctgatttatttacgatggttatacttttggttgcataacatattaacaagccttacaagaatcttcttactttattttactcatcaaatggttgaaagtctaatttaatgatatacaattatgttgaaattcagtgtgata

SEQ ID NO: 28715 - DNA, 207 bp, Medicago truncatula
  Intron number 4 from transcript Medtr2g026420.1 (locus Med tr2g026420) derived from phytozome v7.0 (chr-ID MtChr2; po s 7213065 to 7213271)
tcaaggtaacaaccttgatgatcaggcgtatagtgccatagtttgagatggattattagttttgattttgcattgtaaattatgcatcttttcttctatagtgataatgcattacattactttggagattgtacgatttaatttgtgcttaattaatgctcgtgagtcttgtccttatttttagtttgtacggtgaaattacagaac

SEQ ID NO: 28716 - DNA, 947 bp, Medicago truncatula
  Intron number 1 from transcript Medtr1g025720.1 (locus Med tr1g025720) derived from phytozome v7.0 (chr-ID MtChr1; po s 6420755 to 6421701 reverse strand)
tcctccatttgcagaaaacactacttcctctccaggtatttaccatattaaacttatgaaaagatcatagaaagttttacttacagcattgaccgtttctttaagttttaaaataattttgatgtaaattagttagagtattttgtttaaagatttttaagaaaaatatgtgattttgtgtttgtttaaaattatatacaaaaatttctcgtgagcttaactcaaatggtatgaacaatgcattgtcatatacaatggtcggagttcgaacctcgacaccccatttatacaaaaattcatcgtgaatttttaaccgatagactacttgtacttgataaaaaaaattatatacaataaaagtctatgttatgtttataatggttttcttctaaaagctaatggaaataccttttcattatcaacacaattatttatttgaaacataataattttttaaaaagttacacacaaacataactaaaacataaaaaataattttttgataatcttaaacaaacaaacattatatttgtttgtaaaaaaaaaaagcattatatttgttaaaaagatttcaaaatcaagtttatggtggtctcccaaaaaaaaaattatggtggtctttctccgtgttttacaaaaactcttaaaactcttttctctgcctaaatcatctttctctcatttttttaatggatgatattttaatgtttcctcatgtcacatgatcaatttccgtgcttgactatccttgatacattaaattttctcttagtgagtatagttatttattttgaacaacgaataattaaaaaaaaatagaaaaaaacaattaattttgttaggtttttgaggaaataaattttgttagttgttaattgtttttgttaaaggaaagtttctttgcttgtgcaggaaaaagcaacaacagtactaccataggtatcgct

SEQ ID NO: 28717 - DNA, 564 bp, Medicago truncatula
  Intron number 1 from transcript Medtr1g090220.1 (locus Med tr1g090220) derived from phytozome v7.0 (chr-ID MtChr1; po s 18220236 to 18220799 reverse strand)
tttttgtttgcttatactttgaatgtgagtttgaaggttacaatagagtattgatttactttgtgatgaatgaggatttaaagattggagcagaataatgatatttttggttgaaaggttgaagcaaaagagtgaattctctgttgaaaggttgtagaacacaacaaagcaataatgatgtttagtctgtgaatataggagaacaataatgaatcatgaatcatatgcaggaggacaataatgaatcatattatctgaatagtcttttttaacatattttggctttagatcaaaaagatattgtcttataaaactcataatcatatggtagggaccaaacatattctggaagaatttgcaacaaagcaagatttctattttttccactctttgtcaaaacagttttttcttccttgctttgcttgtttttcttctcaatggtgatcttgtgtgattgcctgcttgtattttcaatgtgacattaaaggtttagataaaaagtgtcctttatttctttttattgtgtttgtgatggaatattcacattacttgtatgcatgcagt

SEQ ID NO: 28718 - DNA, 1035 bp, Medicago truncatula
  Intron number 1 from transcript Medtr1g090040.2 (locus Med tr1g090040) derived from phytozome v7.0 (chr-ID MtChr1; po s 18113627 to 18114661 reverse strand)
aactggtggttggaaagcttgttcctttgttgttggtaaaatctctcactctttttttatatactagtccttttcatctctttatgtttagaactttgaagtaaaagtgtttgttattctctatagggtccaaaatattgctctccaataagtgtggaaagataacaaactttgaggaagttcctctaaaaaaacaaactttgagtgaatttgagaaaattatggatgctaagataagaaccaatatcctctaaaataaataggaagataagaaccactagtatattataaacgcctaaaaaaaatgtactccaaagcttgaaccttcgtttagtttagtgtgacacgatttgggatagtgtaatggataagtatttcttcataaggaaatacgattttaaagatattttaaattttcaatgcatcttaatgaagcaaaatttagttcgaatcttgaatttctcatttattcacattttaaatttctaacgaccaaactatttaacaaagaaataaagaaattccaatgccatttaaaaaatatactactactattgacgtttaagctttctaattttttttttttttttttttaaaaaagtttaaggtttctaattaaaatgttcacatccttataattttattttgatggatacatccttataattttttacaaaaataaaaattgcacatcatattttgtatttattactaaacaatatctatattttgtaacgtatattacttaataaacattaaatttctcaaacttacacttcaaaaatatttacttaattaatgggtcacgtcaatatcacaatattacatttttacatttttttaatttaataaaacttattaaatagggccaccattatgcatgccaataataatttgtccggtctcgatattactcaatatttggcatagcaaataataatttagtaataacaagttaacttctactccaaagcttcaatcttcattttacaaacgtataaaccttattgcttgtcaaatatatgaatgcagtgt

SEQ ID NO: 28719 - DNA, 819 bp, Medicago truncatula
  Intron number 2 from transcript Medtr1g099060.1 (locus Med tr1g099060) derived from phytozome v7.0 (chr-ID MtChr1; po s 20138481 to 20139299)
acggttcaggaaacaaaaagtttagattctgtaaggtaaattgcattctcctttaacttgtttgggttcagtccctggaaattcagaatctgttggtttttagtgtatctttggttctgcgttgacaagagttgattttgtaatattcattcctactaaaattatttatgtgtttagatacattcctttaaaagtgagctgatttaaatttgtgtgttagattcaattttagaatcaaaagctagaaatagtagcttttagtccccacaatttatttctaaaaaaagaaagaattgcttttggcacttgaaaccaaacaccctagtcctaatgttagcttattcagccacatggcagcacatggtgtgattatattgagttacgtatgacgtcaggactgaaagcaacagatgacagagactaaaatcttatttgaactttttagatactatttggttttcttttgttgcttaaattgcgagttctcagtactgcttgttaaaagagataagtgttgttgtctaatagcggttatagcggaatctgaacaaaccgctaatgttccatgatacactatttgtccttggtacaaagtgttgtcaattagcggcgctgtagcaccatacaatagtggaattcaaacaaaccgctattttccatgattgactgcattgaagacaaatctttgaagaaataatccaatcaaatttgaataccttgttggtagttattcgatttgtaatatctataactataccacttatcattacttggttgtcttcagcatatatcaaaacaaagggtgcttggtttgccgga

SEQ ID NO: 28720 - DNA, 798 bp, Medicago truncatula
  Intron number 1 from transcript Medtr1g125960.1 (locus Med tr1g125960) derived from phytozome v7.0 (chr-ID MtChr1; po s 27976368 to 27977165)
actttccttattacttgaggtattgtaatgtaatatcaatgaatctttgaataattacactttaaatttgttgtgttatgttattacttaagttgtatccttcttgattgtgaaaagctccttgaaataagctgaaaccgcgcttttcagtatgttataagttattttcataagttatcttgaatattcaaataagttgttcatctaaatgcgcacaaaatatgataatctttttgccatatttgttgttttatacgatccaatcacttatagcatacctactagcataagttttgagagactgtttgggagaatttatgaaaaatagcttatgacaattttcataagttttgcaatatagtttattaaaaacaacttatatagcatatacaaaaacaatttaactttttatcttttgctataaatatagtttatgcaagcttatacctaagtgcttatcatgataagtgttaatgttatatgctgcaaacaaactgtttatccaaacaggcccttagtcggcatgcttggtgttatattgagtttctagtattgtagttgactagtttcatgaactatggacaatcttttagctttgagatatatttgattctcaagtcctatcacatgtggaattggtttagccttagaagaatttatgccagtaggtatgctatcacatttgccaagaataaccttcttcttccccctgattaaatttaaccccccatcttatgtttcaatatgatgattgaaatgacagtgaaaaaaacaaaattttgttgacaagtgctggat

SEQ ID NO: 28721 - DNA, 1001 bp, Medicago truncatula
  Intron number 2 from transcript Medtr3g016530.1 (locus Med tr3g016530) derived from phytozome v7.0 (chr-ID MtChr3; po s 3231508 to 3232508 reverse strand)
agttttattgttctgcactagttagttgcagctctgtaagtacagtgacagctgctacttgctgagttataccacagtcaattgtataatcatattaatttgattagttttgctagaaagaaagctataattgatccatagtagcaattaaaatcaataattgattagattaaatgatagtaagtactcggagaatgttgttcctttagattgattatgtcattgtgtcggctgcagagtgcagaccatttgaactggtaacctcagacttttgtagagattcttggaacaattaagtgtcacaaagttaaaaaaattcttcgcaaattttacttgatatttcttcctactatgtgtgacataaaaacagtgtaaacaacctctctacttaaaggcttataacaaagaaagacacttctatatgaaaatatggtagaaatatgattatcaaagtttattttcattacgggttttaaaaccgaatcgaattcccctttcttcagatgggcacgagtctgatctgattactttgttagaacagaaaagaagttgaaattttcaaaagctaagaatattctctaatcaaattgaaacattatcttgtaaatgtcttcatcaattagtaggtactctaaagtgaaagggacagatagcattattagtatcaatctgtttttcacactttgaagtatacaaacaccagacacgacactactaacacatagacactatacactgtttaagaaaattgaagtaattaaatgcaattacacgtgtcactgttgtgttgatgtccgacactgacatggtgtcggttctacatagtttccgtgaacgattcagatggtgcacactgtacagttagtgctgcaatttctagagcataaaacatttgcagcaatgtggttggttatatatggtcaccggaattttaatctgcagcactaatttcaagtggttcttgatgtgtgtgcgttatatgcaggtgaagcaaacaaaat

SEQ ID NO: 28722 - DNA, 888 bp, Medicago truncatula
  Intron number 1 from transcript Medtr1g028340.1 (locus Med tr1g028340) derived from phytozome v7.0 (chr-ID MtChr1; po s 6861405 to 6862292 reverse strand)
agcacaatcctggacatcagtctgatttcgctgaggtagtttgataagcacttacttagataatcacttttttcaattagatgattaaatttggttgttgttgcggattttcaattttcaatataacgtggttgtgaaaaaagaaagaaaaaagctgttcacaatgagaagtgtttgtagggtttgtttgttagagattgtaaaataagtgatttggatacttcaaaacatatagcgattaatttttaaagtaagaaaaaaagcagaagttgttagttgttttgtgtttgtttaccagagtgaaaatcacttataaaaagtgatttacttgaagttaggatttgtagcttttgattatagaattgatttttacacacaaatttatagttcaactcacttttacataaatgtgtccaaacacaaatcactttaccttgagctcacttttagttagaatcaattttatagaatcagttcacccaaaatcaattattgtcaccacagaaccaaacatacactaaaaactgcttcaatggagaagctgttgttttttgtttttgttgttttgaaaatctgtaactaatggatgcaaatttctacaagtgattatttcattgaagaaaaaaaaatctaaaaattgtttaaaatgagaagctcttttgtagcctctttagaaaatcattttgtggttttttcttttttagaaagtgtttttttatgcatatgcttttttattttttaaaaattaatatctaaattgttgcgtatgtgaatcccttttttaataatctgtaacgaacgggctgacctgaatctgatgttgatgttaatatgattttggttttgtttgcagacgatttacaaaataagctttgggcagatttattt

SEQ ID NO: 28723 - DNA, 570 bp, Medicago truncatula
  Intron number 1 from transcript Medtr3g128290.1 (locus Med tr3g128290) derived from phytozome v7.0 (chr-ID MtChr3; po s 32830392 to 32830961 reverse strand)
attggtaggggagatctgaaatgaaacagcaactccacctcctataaagtttgggatatcgctcacccaaaaagtaatttttaattaaaataaaatcaaatgctattaacaaataacaatggattgatctctttcaaaaaaaaaaaatggattgatttaaatagtagaagatttagacttgttaaacaagtggtgaaaggtttgatcttgaactcttgggtatgagaaaatttggttggaaggatagaacttaccttctttgtctacaaatttcattaattgaaattaatcatcgttaaacggcaaaaacttcgtagatataatggtaataaaaaataaaaaaatcaaacgaacactagcaagtttttttttagtctcttatactactagtaagcttttaattacatatactaaaaattgttacactattttagagaactgtacaaaacataaaagttgttaatagttacataaactctaactagataagttccttttatcatttttcaaatataaattgatctgccaaatataatggggttggttttgaatgagaattgcaggaacagt

SEQ ID NO: 28724 - DNA, 600 bp, Medicago truncatula
  Intron number 1 from transcript Medtr3g148600.1 (locus Med tr3g148600) derived from phytozome v7.0 (chr-ID MtChr3; po s 38693405 to 38694004 reverse strand)
aagaattgactggaacaatcatctttgttggacaggtgttcaatcctcttgctgggtgattttagcgtgccacactcgccaatagataaatagggaatttatttttcctgacaatatgatgttagtaaaatgagaatgtaggtagatgatttacctgcctttccatatgtttcctcatagatgttttttttttttttccctttctttccgatgagttcatacttgtgtattttaataaattttggtagacttcctttaatttctttaacaactcatgatatctaacacctgccaaggtaattggaaggatatatatagaatcagaaggaatatagtggtaaacattaaatctggttgggcacacgaacatttaatgccacactactactgcatagctctcttcggtcttcactttgtgttcctccattgactcaaatattctttttttttgtgtaattttttgtgaaattaaattaggatctgtatttttttttggtacttgcatggtaacattatgcttagaaattatagacgatgattaaattgtagatgttagttttatcatgaaacttttgatattatgttacttcgaaggcctaa

SEQ ID NO: 28725 - DNA, 747 bp, Medicago truncatula
  Intron number 2 from transcript Medtr3g064280.1 (locus Med tr3g064280) derived from phytozome v7.0 (chr-ID MtChr3; po s 14525290 to 14526036 reverse strand)
agactgatcttgaattttggaagactttgttccctgtaagtttgaatttgtttttgtttttttctttggagaaaaaggaaaattgattggtggaattgataggtttgttttgtttgcttctatgtttttttgttctggaacaaattgttttgttttattgcaattttgaactcatatgtggatgatattgataagtatgttgagttcagaaaaaatacaaaggctattatttttcccatcctatgagttttcgcgcgccctatttgtattctgaaatccgaaatatttcaatgtgtttgtggaggttttataggttttttatgcagtttggattgcaaagggcgcgtgagaagctcatagggtggaaaagaaacagtcaaaaacaaaatagagaaaatttaatcctgtccatttaatcctttgtactttatgtacatgatgaatcagtattgtcaaataacggctatagtgcaacagaatttgaacaaattgctattgttatgcatacgctttttagccaagtgttgtcaaatagcggctatagcgtcgttataacactggcatagcggagttcttttcaaaacaaattgctattttttgtgatctacgattgacagcaatgtaactgatactaacaattatgaagtgatatggtcattttccttcatttatttatcactatgaatggatagtgactttattctttgatgtttcaacttcaggttgctgttgcacacacaattggac

SEQ ID NO: 28726 - DNA, 962 bp, Medicago truncatula
  Intron number 1 from transcript Medtr2g007270.1 (locus Med tr2g007270) derived from phytozome v7.0 (chr-ID MtChr2; po s 1048209 to 1049170 reverse strand)
cgtagtaagcattttctctctctctctctctctctctctctctctctctctctctctctctctctctctcaccctttttgctttaacttagctggattcattcataattcaataaattttacattttcatgcaatttttttgtaacccaaattcaagatatgtgttcatttctttttgtaattgtgttatagtgcttagatcttaattgggtctatctaattatttttattgcttaaaaaaaactcaccttttccaatctaggttttattctttgctatgtttaattaaactctaaatgcaaatttaacatttttaagagtgattgttttgattttgttctatagagatttgacgataatttttatgtttaatcactatcttattttgtgatttaaagtatgttttttgaattcagatttggcgtttgggggtgttaattttgagggtaatttgaagtaaatgggagctaaactcaaagggattgtgataattaagatagttagaggaaaaagattattcaattaatttgttagagtaatttgatttgaggtttttagattctagtagttaattcttttgcttgatgacattgattttgatttaaattgtactcttcactcgcatattgctaatttggaaacatgttatttgatccgttgttatactggttagtattgtttaagtacaacagaattgggagctaaactgggaagggattatataaataagacaatttgagaaatgaaatgtttcaattagtttgcgagagttagatgatttgaggttttcagaaaattctgatgcttgtgcatgacggcaccgattttgacttcaaatcatactctatttgtatattgcaaatttggaaagacgttatttgatttgtccgtatactgacagctatttatttcaattattgtccacagcaatcgagcctacagaaattgaatctctgcctgat

SEQ ID NO: 28727 - DNA, 558 bp, Medicago truncatula
  Intron number 1 from transcript Medtr2g111210.1 (locus Med tr2g111210) derived from phytozome v7.0 (chr-ID MtChr2; po s 26320531 to 26321088 reverse strand)
gtggcggatctctttggtggccggcgggagccacggtatcccccaagaataaattatatagtacaatagatgactcgaacccatgttctcttcctgctttcaaacaattaataccactagaacaattattaattattgttatatatatatatatatatatatatatatatatatatatatatatatatatatatatatatatatatatatatatatatattcaatcatgtttgtttcactttttaaagcatagtgaataaaaactgagatatatttatattgtgtttgttacatttatttttaattttgaatttacttccatcaattattcatattgtgtttgttatatatatattttttaattttgcattcacttccatcaattattttttaaaagaataaaggataagaaaaaaattgatatatcgtggacaataaagattgaatttgttacactttttttttaatatttgaatttactcttatctatttgatatatgtgctatttatatttaatgttgagggtaatttgggaaagagaaaaaatcaatccaaaag

SEQ ID NO: 28728 - DNA, 668 bp, Medicago truncatula
  Intron number 1 from transcript Medtr3g093990.1 (locus Med tr3g093990) derived from phytozome v7.0 (chr-ID MtChr3; po s 22441178 to 22441845 reverse strand)
ttttcaaaaataaggaccataccgttcaccaattggtagagaaaattaaattacagtcttttgggtggatgaagactactaatttttctatccgtaataattttcatatgtggtggttaagcccttttgtttgtttgggtattggctagcttgttctttggctatttttgcccttgttcttttggctacattttgtccttgtaattgcttacttttgagttttctctagcacaccttgtgcttgagatttctcttttgatttctaatatatattccatttttgcttgttaaaaaaaaagttttgacccctttctgatgtaacatattttatatgcaatgtcatacgccttattaatgttgaatgatcaacatccatgtaaaatgatcaatattaattaaagtagtaaagataaaaatgagagaaataaaaatatgatacacttataggttttaactccatcaaaaaaaagttataggttctaatattgcttgaagtaacataggaaaaatatactacaaattcgtatgagaatgattttcaccaaaacagttttatttcaaccatacggatttatttttttgcattagctaatatcgattttaagtgcatattgatttcttttttttttacaggagtatacattttttttagaggaagacaggaacat

SEQ ID NO: 28729 - DNA, 1029 bp, Medicago truncatula
  Intron number 1 from transcript Medtr2g093110.1 (locus Med tr2g093110) derived from phytozome v7.0 (chr-ID MtChr2; po s 21536877 to 21537905 reverse strand)
ataaggggattcataccttttgcaaggaaggaaaggtgaaagaagctaaaacttccttataggattaatgttgtattgtgttctattagatgcataatatctactttaatgttgtattgtgttctattagatgcataatatcttagtggttaatcaactatatatgatgattaatggattatgtaagattaaaatagttgatggagtagagcatgaatctctttgaagaaacatattatggaaagaaaatgatttataataagatagcttacaagatggcttgtgcaaattagggaaaatctgttatgcttattaataataaattgcataatggaggtcaaccggccaatgtcatcatttacaattctgttacatttttctgcaaaactcaaggtatttgtgttagtcaagaaagttaaagaccagaggcatatcgaagttgtatccatatcatatgcctattgacggtttgtgctaatgtgaaaagacttacgacttaaggatgcagagcaagtttttggtgaaggattcaataatgtcgcaacttatgttatgatcaatgtgctttgttaagagggttagtttgaagaatcacctgtcttgcaggtgcagtaaaaaatggaagatacttgcttaagttgtaactgatgaaataattctacgcactctcactatagatctcttttaagactaaaagtaggtaaggttaaagtgatgtactatgtattggggtcactatgactttagttttgattaaatatatttactgtaagtttcaatttgatattgtagttattgtaactttcaatttgatattgtagttactattgtagtgagtgtaaggttcaatttgataatgtagttggaaagtgttggttttttaagccttgaaaataaatccctctttcttccctattgttgatttctgtatgattttaccttttatagctactagattttttttccttttcagtttgttgtagttttcttgcagacctggtagaattcaaatcatatacgtattctttg

SEQ ID NO: 28730 - DNA, 910 bp, Medicago truncatula
  Intron number 1 from transcript Medtr1g073940.1 (locus Med tr1g073940) derived from phytozome v7.0 (chr-ID MtChr1; po s 14860286 to 14861195 reverse strand)
gttacgtcaacctctcctctcatcaagaaggtaacaaacaacgctttctcagattctttgcattgttgttgaattttcgttttagtttacttgatttgattaattttttgcttttcttgcgttttgatagttagttatgcttgaattgatggctaattattataattagtattattgttgttgtttgattaggaaaccctatatcttgattcttgaaaatggaagtgattcaagaaatggaaaattctgattgaattagttatgctttattgtaatgtagtaaaagggtgaaaaattatgcatgtataatgtatgctagaatgatgttagttgattaaagattaaaactttaccagttttaagtttgttagctttctttggaggaaagagaaaaaaatataattttttcaagatttttgcttcctgtgttatttcccaaaatttatctgaacaagttatgttaccgatcaagatttgtaactgtgtcgatcttgatatttgcaatcttaatttaattttttgatagttgttagttgatttgattgaagtaaaatttattggcttttcgttaggttgtttttggaccaagttttttctagttagttgatttgatatgctagttaatttttggaggaaagaaaatacatttttttcaagatttttatattagaaattgcattttttgcttgatgagtttttttccaaaatttgtaagactaagttatgttactgatccgtatatgtaattgtatcaagtttgaaatttgtaattgtaatttttgttagccgtaaaggattaaaaataataaagaaattctgactatatttaagaatgttttaccctgttaatgtattttattttgctgattgagtagcaattcgtgcaatcgagttgaagaatcattcttcc

SEQ ID NO: 28731 - DNA, 706 bp, Medicago truncatula
  Intron number 1 from transcript Medtr1g143820.1 (locus Med tr1g143820) derived from phytozome v7.0 (chr-ID MtChr1; po s 31867640 to 31868345)
tcacccagatcttagcttaactttctttttctcaggttagtcaacacaatcccaatacttttcatactcatatcttcattttctgtttcttaatcacccatttcttacttttttttttttttttttttttttttttttttttttggtaaaacgataaatattttattaattaagtcacactattgaccaccggatggatttgaactctgtaccttgagttaacacctaagtgtaagttgaaaggtgtatgtactatgaaagtttttttttttattttaacatttaagggaattcatgtattggatccccaagttttctttagtattaaactttccaattggagtaactgaaaaggtttatgttgcatgggtccttagataaggcttttttgtggggttttttttgctttgttaggttcatgatttttgaattttacagcttaggatgatgttcaacgtctcaataaccagattaagattggagcactatactagacatttgaatctgtatcttgatatatggtcccctccattatgttataatgtttcattgagtgccttgttgtaaagtttgaatggcccatttgtttaaaaagttaacttttttcaaatggaaaatctatatcactttttttgccattgcaactagcaattgctgttttctaactgtaactagttttgcttgtggcagaattatttaaggaaag

SEQ ID NO: 28732 - DNA, 908 bp, Medicago truncatula
  Intron number 1 from transcript Medtr1g016600.1 (locus Med tr1g016600) derived from phytozome v7.0 (chr-ID MtChr1; po s 3236336 to 3237243)
accctggcgttcctctctgctcttcttccttcaaggtaacatttcgatttcgtttcttatcttcgattcatagcttattcatatagttgattttacttctgttaatacattacataatttgatcatagttttttttttgttttgtttctggttttactttttgttttgaagctatatcctgtgtttatgtacacgttaaatcgcaattctgaatccaaaattatgtaatgatcgttttttgtttatgaatccgtaatttttgtttgttgtgatgacattcttttttttcatttagggttttgtatgttcatatttgatgcatatatacttaacatacatgaacatgtgaatatcaatattctttttggagtaaaccaccaaattcgtttcaaagtagtcgccgactctgtcaaattttagtctattagtctgaaaacgtgttagggactaaattgatagtaagtggttaaacatagagttttaattgataacagcttgttaaaatataggaacgtaactgatagtagatggttaaatatagggaccaacatgatagtttaatagagtcagggactaatttggtggtttattcttcgttttgaattttatactttgtgtttgttttcgtatcatgttgtgtttgatctatctgctgaaacactcggtgtctatgctactggatattgaattattgacttgaattttgtattttttttgtcctgcgttggttatagtattaatttttttttccttgggcacatacatggattgttttctttgttcgatcggtagaactttttgttgattgtagttttttttttttcttttttcctttgggatcatacttatgcattgttctctttgttgaattggcagatcttttcgtggttttaagcttttaaggacaa

SEQ ID NO: 28733 - DNA, 999 bp, Medicago truncatula
  Intron number 1 from transcript Medtr1g118050.1 (locus Med tr1g118050) derived from phytozome v7.0 (chr-ID MtChr1; po s 25563795 to 25564793 reverse strand)
ctaagcttcgcagcttgttgccaagcacaaccaaagtaagtatatagtagtaaaaaaaaattcaacttctttgaaactagcatacatgtttttcaagttaaaaaaaactattgcaattatcaattgattactaagctccaagaaatttaaaatgcaaacctaatcaaagatctcaactcaaccaatatagtactaatatataatacattaatactataatataatagtatgaaagtgagttttgcaagagtgttttttctaagtggcctttttgaattcaatatatgccttttgtagattcaaaatatctattacttttgagccataaacaacaaaatcaaaatcgaatataaccttttagaaaatgaggtgcaaagagtcttattgttttgtttgcttttgtaaacacattgttcttttcttccttttttttttatcattaataactttaattatgtaactatatgtgtgtgttttgggagtgtgtctataatgtgtggtagttccaaggaagcagctagctggctaaagaaaaagtggtaaataaaaagtgaattagtgttaatgtctcttggtatgataaagaggaaccaaaacagcatgcagttgaaaagcttcgcatgaaaatatattgtctttgccggataatatgttgatcagtcaaactcaattgaagaatgaaaagaaataaaggcagagacaaaaactagcatagcacctttgtcagtcacaaacataacacactacactactatgtgcatgacacttccaccattcaaaatatatccactatttctatttcacattctttatatcatatgctctataacctactaaccttatgtatatatgagatctatttttaattaactaaaaatttagtgctttactctatttttaagtaattatttatatgaaaaaactttgtttatgtttgattttttgtttgttttgtttattatagacagacaaagcatcattgctagcagaagttataca

SEQ ID NO: 28734 - DNA, 590 bp, Medicago truncatula
  Intron number 1 from transcript Medtr3g101410.1 (locus Med tr3g101410) derived from phytozome v7.0 (chr-ID MtChr3; po s 24560803 to 24561392)
aaaaaaacaaagaaattgtgacactcatcaagcaagtgtataatggacgaactagatggcgcaaggagcaaagaaaggacaagaccgagttgcaatacttgattagaaagttggaggagcatcgatatgtctacttcacaagagctaatagcgaggaaaccacacttgaagatttattctttgctcacccgaaattaattcatatggtcaacacttttccaccgttttggtcatggactccacctacaaaaccaatacttactgaatgcctttatttgagattgttggtatcacctctaccaaattgacatgttcggttgcgtttgcctttctttcctttgaaagagagaataacttcatatggacacttgagatgttggttggtcttttgacctcaaaaaacaacatgcctaaggtgattatcaccgatagggaccccgctttgatgaaagtcgttgccgaagttctccctaaaatggaccatgtactttgttattttcttattgggaagaatgtcaaatctaggtgcatcacggattgtagagtcaatgccaagccaaagaaaggaaaaggataagttgttgacaaag

SEQ ID NO: 28735 - DNA, 716 bp, Medicago truncatula
  Intron number 1 from transcript Medtr2g120570.1 (locus Med tr2g120570) derived from phytozome v7.0 (chr-ID MtChr2; po s 28389253 to 28389968)
ctctcactgattcccaagctcaagttggatcttcggtaattcttctcttcattttggtttttactgtttttaaagatcttgtttttattggtaatgaaattcaatgtgagtagaagaatgtagattgtggttatggttagagctttgttcttttgacacaatatgagacaataattttgatagttaatgtagttcaaatgcattgttaattatgttcagtgaatgattaacgcatataacacagtgtagaaatttattaatattaatcattcactaaatacagttaataacaattttcatgtgtatattttaacacctgataatcatgtatatttggacacaatttggatgggtaatggatatgctgtacaattgaacacctgaaaatgtggttaattaattacattggtggatgagtaatgagttgcaataccttgttatatttgtcaacaaccctaaattatgttaacctatccaaattgttgttaatatttgttgtcaaagtagcatttctgtcatgcttatgatctttgtggcatgactttcggttgctagctttgaaatcacctttttctttaatgctgaaacatagctgtttgattggacatggtatttgtacgcgtggtttacatttcattatgtcaaaattgaaatgtaatcttcaacggttctaaagcgtgaagtattgaacttttgatgtttcttttgtgttaggt

SEQ ID NO: 28736 - DNA, 311 bp, Medicago truncatula
  Intron number 1 from transcript Medtr2g126310.1 (locus Med tr2g126310) derived from phytozome v7.0 (chr-ID MtChr2; po s 30576217 to 30576527 reverse strand)
aagaggaagaggaggaggaagaacaacaagaatacgtttgaactgggaatgattaaacaaattcatttgcttttcctttaatttattggtctttgatttattggtttttgttattattgaatgattgtagcatgctactagaaaaacaaatattacgactctttttttatcttcatcttcatcttaaccctagttatttatttatcactaagatagtcattttgaaattactagttttcatgattgttgagttgtgttgtctaacttgttttctattgacagtgctgctcatgttgcagttacaacacttc

SEQ ID NO: 28737 - DNA, 961 bp, Medicago truncatula
  Intron number 2 from transcript Medtr4g006060.1 (locus Med tr4g006060) derived from phytozome v7.0 (chr-ID MtChr4; po s 617046 to 618006)
gggtcgattggcaagaagaaatttaccaaaaggtactaagtggtttttctttttacttttatttcctcactgaagtcttgcaaggatagaagaaattagtcaagcaaatcattaagtttttcttttttaaataggtctgaaaccggctatcaattatgtgcaatgtttgaatgaatgattctcatcttagcatgatatttgaaatcttgtgctctgcaagtatagaaactgcggatgtttgaccaaaataaattcagttttatatctgggtgatttgcttttattattgctattgttatcttctgttggttaatgccatcctgccattcaaacagtgtctgtaattactaatatgatacgattttttttttttaaacggcaaaatttattaataaccaaatccctgcacaagacaaacaaggaccagtaagacaaaaactacacagcaaagggcgccatatataggcagaacacccaaaaggggaccggtctgataccatttttatatgttttgtgttatttagtgagagttggtgttactgttaactctagacatcatctcaatttaagcatgaaaatgagttgtgatattacaagtgtgagttaaagtcctgcattggatggaagagttgaggttgggcaatgcataagtgagatgacccgtaaatccattgccttaaggttttgggtgaagatgtggtgtccaactcacttgtgtggttgctcttagccaatatgttgatccaacccagtgaggctctccctcatagcccaaaaaaatgaaacttgcaatttatgagaccacagaacagtagggaaagaaaaaaccaaaacgaacttctcatatcatatctagaggtgttaatgcagcagtgatacaaatgttattgtatgagggatttcaaggttactaatattttgattatttgattttgtctgtttcaatctacagctgcaaacc

SEQ ID NO: 28738 - DNA, 799 bp, Medicago truncatula
  Intron number 1 from transcript Medtr2g049260.1 (locus Med tr2g049260) derived from phytozome v7.0 (chr-ID MtChr2; po s 13460028 to 13460826 reverse strand)
tgtttgatacattttcacatacaccaatacattttttaatttaaaagtatttctagacggcaataaaaatgaattgtgttgtgaccccctctatcaaaattgtggaaatgttcacattcaatatatatatcttttgataagtttcaatacataaattaaatggtcatgaattaaggtggcatgatgctttgatttttctgaacaaccactttattttttaagacggttcgaattatttcactatccataacaagaagtgttttaatcccttaaactggtatgaattctgctcattacccaaacaatatcgctcattcccaaagtaattgtccaaaatgcctctgtgcatgttaacatgcgctagtgtattttttacctatgttaagtcaagctacgtgacttaacacgcgctagtgtattctgagagtgagttaacctaagctacgtgacttaacttgcgctagtctattctgagggtgagttaacccacgctagttggccggtgcagaactaaagaacaaacattttttggtctgtggtcagtttttcaacattcaatccacacgtttttaacactattttacacgtttttaacactatttttcaacattaatggtgtttacaacctatactaccatttccacctataaatacccctccatacttccctaattcctcacaccatatcactttctccccctcctcactctctccctctattgctcttctttctttctttttcaatattttctttgggggcaaaggtgatcaaacttcttcggagtaaaatagtgagaaa

SEQ ID NO: 28739 - DNA, 610 bp, Medicago truncatula
  Intron number 1 from transcript Medtr3g137320.1 (locus Med tr3g137320) derived from phytozome v7.0 (chr-ID MtChr3; po s 34803765 to 34804374)
tctaaagttctcagctttaccggtaagcttttaatttggttcatgtttcatctgattattggtttttgattctgttaattgatgaagtttgttatcatagatatgaatttgatgttttgattttagttttctatattgatttgttatgatttttattttggttttgtaaattaaatctacctttttttggtggatctgattagtgatatgaacaattttattttattttattttgagatagtatataatttggcatgaaattgttttaataatttgcttttattgataagagataattttactggtagttgttttatgtattttgtgggaaatgaatcatgttcacatataagatagatagttttgtatgcatatgagatcagtaattttgctcaaaattgatttgatcagtaattttgctcgaagatttgtgttggatttcattaatatgtctagtttatatgatttggtctttttttgtttggttgtgttcaaatcttttactcagaatatataatattactgtagagctgttatgtttctctaattttttttatatgtttggatttatgtatattgaccttgtgtgtgtttgatttctcaggaggtg

SEQ ID NO: 28740 - DNA, 693 bp, Medicago truncatula
  Intron number 1 from transcript Medtr3g041040.1 (locus Med tr3g041040) derived from phytozome v7.0 (chr-ID MtChr3; po s 11356588 to 11357280 reverse strand)
catcttttattaaaaaaaatcatttggtttcccttgtttgaatttattcttttgccactcttaaatcttaatgtttaaataaccttttccaagtaaaatttgaagtgcaatgcaatattattgcttgactatgtcccaactaaagtatttcaaactaactgatttctgtggttcacaaatggggtgtcatccagcaatggatttttcttttaacgtgtaatttatcttgtaacgagtaatcctaagttttaaaaaaaaaaaaaaaaaactttccaaatttgctactttgatttcttttgtttcttgacgatttgtatatttttctaaacatctttttgctacaaaaaatagataaatctatttgtttagaatttttcgacgcataaaattatgttgtattatccatttgaaacctctttcatgctattgatctgattaattaagtttcttttatagagatattgttggtctttataacttatgtgattttatctgaatgtttcaaataggtgatatctatctttcatactattctaagaacaatttctcttctattaattttgcagcagattcattggtttgatgttcaattttatttttttgacttatgacctaaatcattaggtacagtttatgtttgtttggtttccacttgcagctgttattattgattgaagaaatatttgctctaca

SEQ ID NO: 28741 - DNA, 827 bp, Medicago truncatula
  Intron number 1 from transcript Medtr3g124170.1 (locus Med tr3g124170) derived from phytozome v7.0 (chr-ID MtChr3; po s 31392735 to 31393561)
acgaagactcggaagattggaacacgcctgtaagtctgaagccgttattatctaatgtttgaagtttttattgtttaaaacttaaatgctcatattaacgtgaatattgtaaacaatttattattgttcgaacaatgtaggagtttaattaaaattaaagattggaggagcacgatgaattgtgaagtatgttgttgcattgaagatgttcttaatggatgaaccgaacaatgatgtatgatgaccctttttcttaagatgttcgtgacaggtcgtttgtttaaattgtttgttgctttgcatgtgtttatgcgtgaacttaagcatttctataaaattttagattatgatggtggaacatgtttaatttgttgtggattgtttaatttgtaaacgaaatcaatgtgtttaatttgttgtggattgtttaatttgtaaacgaactcaagcatttctatccattatctagttttgtgattttggtattacttacttctcatacgtgctttgccctcttggtttttggagggttttaacttttaattctcttatattaattccatgaccaactggacatgtcggccttcatttttttttctttcagaatctaaaaaaaaattcacttttactcaatattttctttgatttttttaaggggattttcttcattgcgtatagtttttttatatgaaagtatataggttttttcaatttaaaatatatatatatatatatatatatatatttgtttgtactgtctgtttgaaatgattttacacaaatgtctaattagttttactgttttgatatttgtgtaggtattttaa

SEQ ID NO: 28742 - DNA, 816 bp, Medicago truncatula
  Intron number 2 from transcript Medtr1g062550.1 (locus Med tr1g062550) derived from phytozome v7.0 (chr-ID MtChr1; po s 12309962 to 12310777)
gatagaggaggtgccaacacaaatatctgatgtatactttaaagatctcttgagttaatatatcttttcttttattaaaaaaaaaaaaaaaactatcatttggttaacaagaaattcttgtagacgtcaatgaccaagttaaaaacaaatttaagagctaaatcattcaatggtttgtgaataaaccctccttgatttcttcttctctccattaccatgtaaatgttgatgagagaaatttttattttccctctaaattgatagagggaatcaagactttaaaaaaaaaaaaaaaatccttctaaattgatagattcatcactctagtggatgaatcccaggaaaagttttacttatgacaactttggaaaattacaattttttataacttgatgatgattttattcatgaaagattttattttgtcttgaattttggatcactatgatattatgtttcatgagcataaattattaatgcaagcaaaaaaaaaagttcctaggtttttttttggtaatggacattaggcctacaacctttatatatggtgatttttttcaattttattggttagaattatagatccatggctcatgacgttagatctcaaagaaaaatttgattttaaacgaaaatgatttcttgtaaaatgtttaagttttaatgaagtatgaataaaatcattttcttggcttgaatgaacttgtggttaatggatctattgcttttcgatagagtatttatgaaagaaataattttgatgatattttattgatggcagaactttttaaggggaaatagtcatttttcgtgcta

SEQ ID NO: 28743 - DNA, 658 bp, Medicago truncatula
  Intron number 1 from transcript Medtr3g143140.1 (locus Med tr3g143140) derived from phytozome v7.0 (chr-ID MtChr3; po s 36859620 to 36860277 reverse strand)
tcttcctagatctgcttcttgctatagaaccagaggtacgtttctgttcccaatcttcatctctcagatcgcattcttcatttctttcttttacttgttcactagctaaccgcgttcattcgaatcttgtttcttgaaattctagaatctagatccgtttcaattttacttgatttcaatttcttgaatctcagttcgattttagtatacgtgttgatgttaaatctggctgattatcataacaattaggcttagtgatttgttttaactttgaagtatgaaaaaacaaaaaatagtgtacatgttagatgttaaatcttgctgattatcataacaattatgctatgcttagtgatttgatttaactttgaagtgtgaaaacgttctgatctaactgtttcatatcgtgatttcattatctcacttcttatatctgatttatttaccatatctaatacttttaccgttttactaattcaacgttacattactttagtttagtttttttttttttctctttcttttttcctaatttgtgattctggtttatagtagaataattagtactcatattttcgtaatttatttttaaagtcttaattaattgagtagttattaatcaggtacaatcatcattggtgagtttgatccgacaaca

SEQ ID NO: 28744 - DNA, 599 bp, Medicago truncatula
  Intron number 1 from transcript Medtr3g162440.1 (locus Med tr3g162440) derived from phytozome v7.0 (chr-ID MtChr3; po s 42428186 to 42428784)
ggtataatttcttttcttgacaccgttaatttaaggtttatcatctagctcttgggtcattgattcaggagcaataaaatttatgtatgtagtagagtgtcttcaagactctactgattttgagtcttcaagaccaagaacaagaaaaataatttaaaaggaaagggggtgtgcagaacagtaaacagcgggtacagtagagcaaaatttagaaaaagaaagaaaggaagttgagccggtttattttcaacaaaagggtcggtttaatttaaaaagtgtctctctaccttctttcttttcttttttttgtgtggagtgtttgtggttgatttgagggttgtaatctgtggttgtggctggcttgtggggtaatttgtgtttatgtgttcggtattatgaattggtgatgatatttgtgttgctgggtttggttttgtggtttatgtgtattgtgttgagaaatgttgccgcttaagaattagggtttttatctttgtagaattttctgcctcctcaaaggatttgttactgttgttatatagtgtgattttctggacctgttttgttatcatggttctgggttttttagggttaaagga

SEQ ID NO: 28745 - DNA, 391 bp, Medicago truncatula
  Intron number 1 from transcript Medtr3g028670.1 (locus Med tr3g028670) derived from phytozome v7.0 (chr-ID MtChr3; po s 7431423 to 7431813)
ccttcgtagaatcacttccaagatttttgttaaaggtacatattgattttttttattgtcttcagatttgaattacctttgatttcttcaattatgattgatataaaactagattagatatttttagccacccaaatccgagattacttgatccttggtgttggaacctgagggatatttaggagcagaaggaagggtttctgcagggctgaagtatacctgggcattgctgctgctacagttgttgtttcaacatatctagtttttagtagtgctgctgtgttgttctttcaaaaagagaaaaatggccccaacttaacaattttgctgatgacgtgaccttaatcttgatgcaggtttagccttttctactacagaggagaaattagct

SEQ ID NO: 28746 - DNA, 715 bp, Medicago truncatula
  Intron number 1 from transcript Medtr1g126850.1 (locus Med tr1g126850) derived from phytozome v7.0 (chr-ID MtChr1; po s 28369504 to 28370218)
atagcagtgagtgtgaagtggaagttgttagtttggtaatctcttattatccttaattctgtatgtaaatttataggcaaaatacatcttgcggtatttcaagttatttaattatatcaaatttgtcttaaagttttattgtgcctcacatagagcatttaagttccatttggtgtacattgtcacaatttttttacacatcatgtagaagatgggaaaatggtacatgtcggataagtggcgaaccccgtttataccacataagtaacataacagataaatgtgtatatttgtaacgtaatgtgtaaaaaagggtaacattgtacacgtaatgggacttataggacttatgtgaaacaaaaaagactaatctagtactagtttgcccaaactattcttttcttccaaaaatgtgttctcttgtgatatcacatacatttatttcactgatagaaacaaaaaggaatatcataatattacttaatagttattaacttcattgatagcagcagtattactggaagtattatgttaggatgtagaataatagatattagagtagttaaagtagttagagaagttagtttgttagagatgatgcgtacaaataggagaacaaaagtatctttgaacatttgtaatttttttcttgcaaaaggttagtctattctgaaatttttggtcattttccaaggcctcaacagtggaaaggata

SEQ ID NO: 28747 - DNA, 610 bp, Medicago truncatula
  Intron number 1 from transcript Medtr1g100310.1 (locus Med tr1g100310) derived from phytozome v7.0 (chr-ID MtChr1; po s 20767225 to 20767834 reverse strand)
tggcacgcaggaattctgtaaggcgcgcttataaggtatgttgattatggcacgcaggaattgcatgacataagtacattccttcctaagtttgcttgacgactattccaaaataaacttcctacaaatgactattccaaaacatgactcattttgttggtggttgcaacactgaggaatccgcgactcatctttttctttgagtgttccgtgtttactactgtatgtaagcaatgtgcagttttggtgttaactccgtcgtacataatgatgaggctgaacacatcgatcaatatgtgagattgattggtgggtggagagttgttgaacatagtgtggtgtggctcgcttgtatttgaggcgagacatggaagggcattcagtgacaatgaagtgaggctgaaaaatttagtggaagaagaaaaaacttatcatggaattggttgaaaactaaagcgaacagtctcaactatactatttctcaatggtgtctgtacccgcatgaatggctaggactgatttaaaaaactaggaaacaatatttgtgatactgttgcatcattctggtaagttctaaatgaggagtagcagaggatcaagcgttgttcgc

SEQ ID NO: 28748 - DNA, 894 bp, Medicago truncatula
  Intron number 1 from transcript Medtr2g034520.1 (locus Med tr2g034520) derived from phytozome v7.0 (chr-ID MtChr2; po s 9663546 to 9664439 reverse strand)
tttttcaaataccagagttggtatcacttttccaggtaaacattatatctatggtgatagttgttatgaatctgtcacaagaaacatacaattcaatgtgtatagttagttagacgtatggaacacgtatcgtatccgggatcccggatgacagttgcgtctttagttggtaaaaagcattgaagatgtatttgagaagtaaaggtgaaaatatatatttttttaaatagtatagattattatcagatactttttggacacgtatcgggaagtatgagatgcttattagtatccgatacgcgtgtcggtcggtactcttctatttttgaagtatttgggattcatagctgcttcttgacccccactttgaacatttttctatatgtcctttctgtttctctatattatgaaatttagttcaagtttaggaataattaattatctattaggctattgtcatgttctatgccaagatgttttgtatgatgattcagaacatgggaagaggtttcatatatctagcaagtagtagtgcttcaatataaatgctttccttttccaaatcaaaatttttgctagtagtacaatatcaatgatttccttttccaaaacaaaatcttcactatacacctattattgttgattaaatacaacttttacttttgttgattttgaaggggtttgaaattaacctctatgatcaaaatgccatatgtcttgctttctttaggcataattggcatcttatgttgggcatatttggaaaattgcaaactaatttcacatctgaattactagccatattgtatctgatcaaggttaaggattgagaaactaagtattacttcaaattttgcagagacgtcttcttaactttgtcgggaaggctcttgt

SEQ ID NO: 28749 - DNA, 899 bp, Medicago truncatula
  Intron number 2 from transcript Medtr2g121760.1 (locus Med tr2g121760) derived from phytozome v7.0 (chr-ID MtChr2; po s 28964388 to 28965286)
tgtgggttgttggagctcttccgtggacaaccgtgactcttgtgctctagatttattttttttgacaaaattgtgatgtagagttgactgccatctcatggtaattttataatatataaatatatttttatttaaaaaacaatatgtaaatattttcttaataaatggattattttttaaataaaaacttgtattttgtttttttgacggttttctgttttaatagtattttttaaaaatattcatccattgtaaatgtaatttaattaaaaggtattcatccattaaaaaataattatattcatccattgtagtatgctattataaacggattggtcaaatatccgtctattaaaagtatgataattgatgaactagattatttttatatttagtagatggatgatatctgatttttttccccaaattttttaatgaattgttaattgattaatatattgtttttatacatcaattaacaacctaatttacaaaattcaattcattttgccacatctaactcatgtcattccaaaaacattcttacttgaaggtacccatcgtcaagtcaaatgggataacaaatcaaatcttctagttatataaaaaaaatgctaacaagcggggcgtttgttccgctaaaaaaaattgaccattagttaagaaattaaaaaagaaaatatcatgttgaaaaaattgtgtattctatactttttaaaaattgaaaatgagttattttcaatgtaaaatttgtccctttttttttttaacgtcttgatgaatgttccatgacacttgttaacataacattatttatatatgagcttaatgctaatcacaagaacacactaaccaccttttctttgtcctccccttcctttgaataacaacaggttgga

SEQ ID NO: 28750 - DNA, 843 bp, Medicago truncatula
  Intron number 1 from transcript Medtr1g107310.1 (locus Med tr1g107310) derived from phytozome v7.0 (chr-ID MtChr1; po s 22611464 to 22612306 reverse strand)
taggaagcttggcctattctataccaaatatcaaggtaaattgattgagtttatttcagatctttctttggtatttttgtttttatctgtgctttattggttttttaagttttggatgattcggaatagttaaagatgttttttagttgagatggctagtttgtaatttttcattcatggtttttgaggtttcagatctattttgtttttttgtgatctggatgatatgttccaaacattgatcagttgaagattcctttgtttatttttttcttagcttaaaagggggtgattgaaatgaaaaaaattgtcttttaattttagcatgattagaaattgcgcaattgcagctgcatttgcttgcattttgccgtaatatcgaaggttatgcgttggattatggataggtgtatatatgattttaattcaaaaccctctgtaggttttcgcttaaacttgactagacaatggggctataacctgaatcttttgttagaaatgtcttgtaacagctttttcattttgtgcctttagttcctcatttagctttggataaaactgaatactttttctgtagctagtgtgattttttacaactatggaatgctcattgcttatgctaggtgattgacctttggcttgggattcggttgcatttttgcaattgaaatttggaatgtttatttgttaagctctgctcttgatttttgttcctattatatgttctgaaatggattaacaaatctagaatctgatttccacaaaatgcacatgaaactaatttatattttgaaattttataatgtagccagggaaactcttaaaacattacggtctgcgttt

SEQ ID NO: 28751 - DNA, 483 bp, Medicago truncatula
  Intron number 1 from transcript Medtr3g069160.1 (locus Med tr3g069160) derived from phytozome v7.0 (chr-ID MtChr3; po s 16501230 to 16501712)
gaaaaaaccgtaggtaattctaaggagaccattttaaaaaatttatggacctcttcctacggttgcggctgtcactaaaacttaccgttgttttattttgcccagactccaaaaaaattatggctccgcgtattgattatgactagaaaattgctcttctcccttttgtttttgctcattcacgtgtctacgtgagttaactcacgctgaaaaatatccagcgtaagttaactcacgttggccataattgttgggttttagcaattttgaaagagagaagggcaatttccttacgactactattgcttcaatgacattgtactctataaacgcctactctatgcaagatgctaaaataacattgtctcgttctatttaggttactcgaaggatgtgaaagtcattcctgatattttttctttagagagggatgattatgttcatcggcttatcttttgaattccttggaaggggatttgtggc

SEQ ID NO: 28752 - DNA, 388 bp, Medicago truncatula
  Intron number 2 from transcript AC235757_30.1 (locus AC235 757_30) derived from phytozome v7.0 (chr-ID AC235757; pos 91500 to 91887)
tgtccccaggtagtaatttaatataggtttaaattggtttctgttacaggtgtctaatattcattttagttcttataaagttcttattcaagggagaaaaattaatcgatctacgttaattccagtataaataaatatttaagggactaaaataaagtaatgaggaccaacagcgaaaaatgagataattagaagtacttaaaacaaaacaatttttttttacaggaactacaagaaaacaaaatagtatatttgcatggacaaaaacatatttcaacctatcatataataggtcaataactaattaccatgagaagattttgttcaagctaataacttttggcaactctccttttttgtgcaggccttgtgggactgtctctttctt

SEQ ID NO: 28753 - DNA, 681 bp, Medicago truncatula
  Intron number 2 from transcript Medtr1g023130.1 (locus Med tr1g023130) derived from phytozome v7.0 (chr-ID MtChr1; po s 5042855 to 5043535 reverse strand)
ttgaagctgccaagttccagtgcttcagtacttttgtaagtaactgaggtatttttaaccattgaatgtgtgattattaaatccagattcatattctgaatcggaacacctttttttttagagttgtgaattgaatcttattatcaattgtaagatatataatcaataagagtatgacatttttatgtaaacacgacatgacatagcaaaaaacattagctaatatatacaaatttcaaaattcaagtcctaaatcaaaatgatataaagtgtatgcaaaacactgcacaatacactgtaggaaggaagaataaaaagcacgttgtaggaggcagtggggaccaaaagcacagtatgcaaggctcttcagtggtgattttgatgataaactacacagaatctatacaaagttaattatttatagatacaatagttattgaccttttttatttttacttggatgggatgttctttctctggcaatttttgatgtatttgcataagcgatttaagtcatcgccgactttcgaagacttatcgaataactgttacttgtgtcggttgcattaagatataccgagccctgcaaatttccggggccttaattattgtgcaatgtcaatattgtaaatttatgttttagctgcttttcatttttgcagagctgacaagggagactcc

SEQ ID NO: 28754 - DNA, 549 bp, Medicago truncatula
  Intron number 1 from transcript Medtr2g026690.1 (locus Med tr2g026690) derived from phytozome v7.0 (chr-ID MtChr2; po s 7336415 to 7336963)
caagcttataggtgaatgtgatatacatttattatttttgtcaatagctttgtcatctaccatctatttaccttgagttatttgcttccattttaaagaaaatggcaagccaaatatatgtaacaattggtcaagtttgaggctgctcattaacctacatcacccgattgtttagaagtttaagacttggtaagtttgcattatgatttcacaatacaatattatgatttcttgaatagttttcgtgaccttaacacttttcaagctcagagtcaaagcttcagtcataacttaagtcagggttcgacttcttctcaacgtactttgtacaatgatttttccaatctgtctcaagttaggccaattgctgaatttagagacttagtcaaggttccttaaaaaaaaagacttagtcaaggtcggttttttgaatgcacaaacatgctttgagtttttttacgcacaaattaaaaataaatttattctttatttcatttgcataatttgtttcaagatacatactgcatcactattggaaaaataactaaa

SEQ ID NO: 28755 - DNA, 395 bp, Medicago truncatula
  Intron number 3 from transcript Medtr2g026690.1 (locus Med tr2g026690) derived from phytozome v7.0 (chr-ID MtChr2; po s 7337259 to 7337653)
ttactgcccaagctcttaggaagactaagcaagaggtatccctaatttagttttcatattattttccgcatggttgatagatattataacttatgtaattgtatttatttatgaaggtcgatgaggatgatcctaaaatataccaaaaacatctatataaactactcggccttgagtctgtgttacgtgtcaaccatcagccatactatcatcaatcattcgttttaggtgtttcccgtgatcctgttgtcataaaaaaaattaagtctcatcttcagctagaggggcaataacttgatgaggttctttgtgtctgtcgtgttctttttttaataattgatttgactgtttctttttctgtcacttatatttgattttcattttattattgtaga

SEQ ID NO: 28756 - DNA, 862 bp, Medicago truncatula
  Intron number 1 from transcript Medtr3g148430.1 (locus Med tr3g148430) derived from phytozome v7.0 (chr-ID MtChr3; po s 38640946 to 38641807 reverse strand)
aatcaaacactgcctctgttgatttcgtgaacaaggtataataatatgcaatccctcttttttaagcttgaattgatgcaatgttcttattgctattaactaattcattaaaaagggaaagaaaaaataaagtcaacattacaagcaacattttttcaagttaatttcaaaaagtaaaatacacaattttcgaaaaaaacatttccttctctacttccttaactggtgcccgggggcactggttaacatttcccttctttattatattactcttttgacttcattatttgatgaaatcatggaatacttagggtaccatgtgtgacctaaatattcatctttattcttgtctttttctattaatagaattttttagtatttttaacacaaaggaggcaggggcacatacagtgtgtatatttaatttggtgttatgaatgtttgtattcttctgatcatacaaactttctaaacaaaggatttcttgtgacactgaaacccaaggatgataattgaatttgaataggaaattttgttcatatttactagcactaagagaatagaattttcctgatcctttagcatttttccaaatatcaacttctttgtaaacaatcagtgttatgttaatttgatgaatggtctgttttgcaattcagtctcaccgatctgttgtaaggtattaattcatctgtgatgtaccaaaccaatttagcaacagaatatatgacaaaaacataatgaaaaggtttaattctacaattgaaatgctcactagaataatttaatcgatttttttgtactattaatttatatttgatgttgttttaaaggcttttgaagggagaaaagaagtgaattt

SEQ ID NO: 28757 - DNA, 891 bp, Medicago truncatula
  Intron number 1 from transcript Medtr3g020760.1 (locus Med tr3g020760) derived from phytozome v7.0 (chr-ID MtChr3; po s 4791634 to 4792524)
caaaagttttgtcaataaattggaatcaagagaatcctttaagtgtggagacatttttctactttctagataacatgcttaaaatttatttatttttattcattctactatattgtagttcctattttatttgatgtaatcaactttcaaagggaattattttattgcagttcctatttttggtacttctatattgaatttggattagcttccatttaatgagaaaatttattttgttgtacaactattcgctattgtttagatgcattgcataaattgaagatcctttgaatttgtgcaagctattatctctagagctgagtttgtgcaaactaccaaaaaggaaagaaaatgttccatctcctcacagttttgccgactcgttgagcagcatgtggtgcaaagtgagtgtttctagcactcctcttcaattattagaaaacactaatgggttggtcatttatcttaattttccgattgagaataaaatcctttatcttttttgtttattttagtcccatattttctatactgttaatgtataggcaaactgtgttacatggtacatcagttctggtacaaattagaacccaaaaagctgcagtagaaagccagaaaagggatagttactccaactttggaatggataaaaataaaggagtgatttgaaattggaaattaagagaaagaaccaagggattaattttgtttagttattatacatattatgttgaatttttttgaggtttgcattgtattgtatgtctgaagttttcttgttatttaagttaatctgaaaataggagcgtttcagccgtttgtttcttttttgggatttgtaggtctcgtgttttcttgttttttttagcataaggatcaggtacatccgtg

SEQ ID NO: 28758 - DNA, 954 bp, Medicago truncatula
  Intron number 2 from transcript Medtr2g121440.1 (locus Med tr2g121440) derived from phytozome v7.0 (chr-ID MtChr2; po s 28819534 to 28820487)
ctgcttttccaggtactcaattgtatttatgcttgttcaatttcaatttaagtgtcattttgattttagatagatgataaactttagatcagacgatggaggagaaaccaccaaactgaattaggattctataatagctaattattacagaataattcaagcactatttacttggttagttggttggtagttaagtagttaggttgttattccctcacaagctctgtataggccctttttggataataaatagcttaattcgaagatttataacataacaccttatcatgataatcgattatgtataagctatttctatacagtattttcacaggcctgtttggataaacaacttatttgccgcttatagcataaccacttatgtataagcttcttctttagctatcttggaaaacttatgaaagtaagctaaaacagtttatgaataatgtcataagatgttctcataagttttcccaaatactctcacaaaacttatgtaactagataagctcaaataatccaatacaaacagacccataagctatattggagagataagttgaaaacaactcatgaacatgtattaagttgttttcataagtttctcccaaaaagttacgcaagtgctaatgacagtacataagttcaaataagccaatccaaacaggcccatagagcctgatgttttcacttctactaccttatatcaatcaatgtgaaacctagagagtttttctctctaacaagctctcaatcttatttttcctacgagatgaatcttcatctctttgatcgtgtgatttggaacagttttggattgtgaggggttaaactgaagggagttggaaaggagagaaaatagtttttactttgtaatttatggacttttgagattattatcatgggaatactctaatgattttacatctttgatttaatttaatccagact

SEQ ID NO: 28759 - DNA, 963 bp, Medicago truncatula
  Intron number 2 from transcript Medtr3g021360.1 (locus Med tr3g021360) derived from phytozome v7.0 (chr-ID MtChr3; po s 5320791 to 5321753 reverse strand)
caggtctcaaagattcaggtttacttacactccggtactggagtctggaatgaattaggccagaaaaggttgttaatttttgattcatcgcaataaatagttttttgcgtgtggatttgttagttaccgtgttggtggtcagatccactcccccccgctttgaagatctggtctaatgctcgtcaactatgtatctcatttttgcaatttggtttcgtgcctgtatacggatttatttcggattcagttttgtgatcttgaactctattgagctgtcgtgtgttttcttttttgtttttttactaagttagactatatgttccccaacttttgtaattttccctttttaattgaatctatttaggatgttgcagataaaaaaagaaacaaaaaatctatctattctattaagttgagtatgactcatattcatgatatactatgaatcactaacactgacacctcgatcaaaagtgtaagtactataaagcttataattgcttgagtatagtggaacaagagtgtgtgttctttgagctttgccttcgcccatttgtcattaatgtgtttgcgattcatgggtaaacttacaaaatggaccagagtagttaaacattacatttttttttggtcaagtagttaaacagtacattaattctacgtattgcctaattgaaaaattataataatttatcataagatattcattgtaagaatttttttccctgatgacatttgacctaatttcacacatctattttctgttatttttttcccacattcatgaaatctcgcacggatcattactagtaagcatataaatctagttgaaggaaacattatgaagaagtagtcctatctatgttatatgattagttttggttgaatcacataaaatgactgtttcaatttatacgtactactgtaatgtgcaggtctcaacaagaatataaatttattaga

SEQ ID NO: 28760 - DNA, 456 bp, Medicago truncatula
  Intron number 1 from transcript Medtr1g010240.1 (locus Med tr1g010240) derived from phytozome v7.0 (chr-ID MtChr1; po s 1661853 to 1662308 reverse strand)
atttccttcttcactctctaccgcttcttccgaaggtacgcgccaaaacaaattaatctcatcatagttttgcatgcatgtgtgtatactatcatggttttaaattgcaattgtgatcacagctgcgcagggacggtcctaagattcttggtgccttggacgaaacaataaaattgtgcccttttaattatcctgatatttttcttcttgcattttttgttgcaaaagattcatttataatcgaagttctctaaaaaaaaatatattttcaatagaattaatcaaagcggattaaaaagaaatatatttatatagtactaactactaagtaaaaataataattttagtgcccctaaaaaaatggtgtcctgggctgccgcccctccatcccgccctcagggccaccctacgttacaaacatatactctaaaccatgtaatgtgttatggtgcaggt

SEQ ID NO: 28761 - DNA, 590 bp, Medicago truncatula
  Intron number 1 from transcript Medtr1g017190.1 (locus Med tr1g017190) derived from phytozome v7.0 (chr-ID MtChr1; po s 3571229 to 3571818 reverse strand)
tacgctttgctcaatctcggaatcggaaacgatacgtgagattcttcatcttcttcgctatttttgttttgtttctgtatatagccgaagtgataaacatcgcatgaaactcatacatacaactgtaagatcatgggttcaaacccaacaaaagtatccagtttagcaatatcgacattgtcaattgaatttctttgttatattgttaactttctttttttgtgggtaggtaaattttggtggctaattttgattgattatgtcattttcatttaataattaattgattatgattattctctttgtattaaattgttaaaatgacaagcatgtgattttaattttggtagttatatatcattttttgtttttattattattaataaagttgttctgttttgtaatctttttttttttaatgatagtgtctatttctacacatgaggatgatgtgtgttttcattgtttcttgcatatgtctgattgtgatgttaggagaataatcgaaaaaaagtttttttttttttttttatttggttttttttgttattgcagaaataaagcagccattgttaaagttggttctgtac

SEQ ID NO: 28762 - DNA, 198 bp, Medicago truncatula
  Intron number 1 from transcript Medtr1g106850.1 (locus Med tr1g106850) derived from phytozome v7.0 (chr-ID MtChr1; po s 22408559 to 22408756 reverse strand)
attttgctggtacgtctttatatgtatacatacgttcatgctattttttttcatgttcctcagcactctttattttctttgatttgatttgtaacaaagattaagaaacaattgagatttgttattgatgtcttcaactagaagtatacatagctacacataaatttacgatattatttgttgtgttattgtaggcat

SEQ ID NO: 28763 - DNA, 968 bp, Medicago truncatula
  Intron number 1 from transcript Medtr2g130160.1 (locus Med tr2g130160) derived from phytozome v7.0 (chr-ID MtChr2; po s 31665151 to 31666118)
atccagagacaaaggagaggagacaagaaaaaaaagtaataatatttataggtgaattaaaaaaaaaaaggacctatcaggtgatgaacaagatagtgaaaactcaaatgaatcgaaaagagtctgtcgacgactcgacattttgctgatcaaatccttaagctagaagagtaagatgatcaatctcttatgaaaattttatttattttcatttgataggttttttaggattcaattttgcttattggcgaaggatatcgaatacagatatcttgctgtcactgtatgtaatactgaaaaaatatggttatattcccccaaaatcaattttaaaatttaaaaaatattatagtttttggagggcataatgaagctatttttcgatatccatcccgaaagttgaagatgtggtggattcgattcaacggatcatcgcttgacaatggtttgtaaatctgttggattgttgtctcataagtgacgaggttttttattgtacatatttttctttcaatgagtttaatacctcttgtgcttattagtccgttattatgggtgtagtgcaacttgtacttttttaatgataagtatggagtaattttttgataaataatggtgagtatttaattaattaggaaaggtgaatctaatgtcctaagatttgtgcttaatggcttttgtatgtgtcatttctgcttttaaagttgtcattcaattggctttacaattcaatataatccctaattgtgttttttgtttcttaaatgaagaatattcaaaacgcttacaaaatagcccaagagcttgagcttgagccacaataagtgaaatggtggtttcaaaacaaaagagcacagattaaagtaacatgttttctttagttttatcaaaatcttagtttcaatttttttttacatgccactagttgatataacatactaataatttttttggaggtttccttctgg

SEQ ID NO: 28764 - DNA, 459 bp, Medicago truncatula
  Intron number 1 from transcript Medtr4g009230.1 (locus Med tr4g009230) derived from phytozome v7.0 (chr-ID MtChr4; po s 1422037 to 1422495)
ttgttaaaagtcattatcctcggtgatagtgggtatgcttcttctttttcattttttttcctccaattttttcttccaatttttagttttgaatttaatcatcaaatgagttatatcatttcattgattgaaaaatgaaaagggttgttgcatttaatcttaaagtttacttttttaattcaaatttaacaaaatttgatggatttttgatcgaagggaaattattaataatcagaccatgtttagattcttgaaaatatgaaattttattgtcaaaagaaaccttttttatgtgatgaaaaaatggaaaaatagttatagattcaattttccaacatgggattttttcacatcaattttagatgcaattttgttgttggagttattgaccaagctatatttgttaattgacattttttttttttgaaattcttttgcagggttggtaaaacatcattg

SEQ ID NO: 28765 - DNA, 828 bp, Medicago truncatula
  Intron number 1 from transcript Medtr3g136370.1 (locus Med tr3g136370) derived from phytozome v7.0 (chr-ID MtChr3; po s 34411962 to 34412789 reverse strand)
tcttacacggtatatgttgcgtcgcttttatatggttaaatatatttttgtctctgcaaaagtttgatttttttgctctcacaaaaaaaaatcacattttttttttttgtataaaattatcctgcaagcaattttaattagtcctatcgttaatccttaaaataaaaatagtcatattgttaagttggcttaaattttaaatgattttttttttagacatgtttaaaacattattaaaagttctagcacaagatataacttaaaattcaatttataagtctaaattttcattacttttattttattacttttaagtttttttgttaaaaaaatcattttaattaatctcatattgaagaaaaataattgtaggatgacttttttataatgtcctaaacacaactataatagccccccattattggttgatcaagttttgtcatctaatagtgcgtgtgcaatggtgtgcgtgtgatatttatttgatatttcgactaagctgtaaaaaaacataattgtagtaaatcgttcaaaaaatttaaagttgaaccaacatagtgtgacatatatagtagatgctttgattcactgataatttggtccaaagtttgatctttgatcgatgataatggagaagtgtttgtggtgagtgaggggaccaacccttaaaaaaaaaaataagttatctaaaattatttgtttgtgcagttgtgcgcaaaagttaacctgatttacaagaaaattaaaagaaagttaaaacaatattaatctaacagcatgaactatttggaaggagcggaacaatcgtgtgtttcaaaacacgacagc

SEQ ID NO: 28766 - DNA, 588 bp, Medicago truncatula
  Intron number 1 from transcript Medtr3g149790.1 (locus Med tr3g149790) derived from phytozome v7.0 (chr-ID MtChr3; po s 39289632 to 39290219)
tgcctcttttactggttggtgcttgtatatccgtcactactcactatgcctttatcattttcctaacgcacatagatttttaatttgctaagttagagatctgaaagctgtattatttacagttatgagaaaccagttcttacaacgatgttcgctacttaccaagtagcactattttcactgcattcatcactttactctttccaaatttaaagcttgacggaaagtgaaataaatttgcttgtttttcttctgatatgaaacagtctacaacatgtttgattcaagaactcaggactttttaccagatctgacttaagaagttctcaacagagatcaaaaggacaaatatatattgcactgtatttcttttctgagagtaagtccggtgatcgtaacggaatggacaacgatggagaaactattttttcttttcttttcttcaattttcttgaaggtcgaagacactgaattaatgtataacgtgttgtatattatttattaattaattaatagttattaaaaaaaaaacaagtttatcaaaatcaataaggatacttggctggggattatatcgaagttgacata

SEQ ID NO: 28767 - DNA, 335 bp, Medicago truncatula
  Intron number 3 from transcript Medtr3g105210.1 (locus Med tr3g105210) derived from phytozome v7.0 (chr-ID MtChr3; po s 26260985 to 26261319)
aagtcttgaggcctgttgggtctgcaactcaacaggtaacatattcatagagattcaacaagattctaagtcttagcttccctaaaaaatttcattttgtttaatgtctgtgaagtttgatttgaattgtcaaatgagtcaaaacgtcttatatatggacgactcttcttcagctctagcataagaagttctttgctttaattcatgcttgaaattgtgtgttcttgttcttaatatatgctgtttcatttcacaaacattctgaatttgccagcaattttctagcctgttcaccaatagtatgttgataatttatgtctcataagcagatatac

SEQ ID NO: 28768 - DNA, 802 bp, Medicago truncatula
  Intron number 1 from transcript Medtr2g091800.1 (locus Med tr2g091800) derived from phytozome v7.0 (chr-ID MtChr2; po s 20776340 to 20777141)
ggtaatgtatttgttagaacttagattgcttccaatgaagtttgtctcaactggtatatttagatattatagtctataaataaaaatatcggtttaaatcctcttgatccttaattagtagatcttttgtgggcactactatgagtccttactaaaccttgtgcatataattgaattaggtaattttcctcatcttatggtaatctgttgtggctgcaattggaaatattgtgttggagctgattttggtttctgttatttttataacagtggagtcatggtccatttaagtatcattaagagctaatatgatggtggtgtgtgatagtgcattggtgattttatgttggcttcttgaagcaccttgttagaagatgtgtttttgtttttggtcatttgcattcttattaagttggctggtagcaggcttgctttgttaagtctttttatgtagttcaggggtgggttgtaggttctggtctttgtagtgggtgagtttagaatttcttcctctcacgtgcattttgatgtatcagtggccgacaatgtgcttattacctgtttgttgttgttggagctactttgtacgtcttgtgctaagttgctcttgataaataaaagttttgcttaaaagaaaataacatttgagattgatctattttattaacattactaagggtagtaaacacaccagacattgatttaggaaacaaatagtctttttttgtttttgtttttgagagataggaaacattaaacatcaattgttttatttcaacttatagctagcaaaggggaggct

SEQ ID NO: 28769 - DNA, 982 bp, Medicago truncatula
  Intron number 1 from transcript Medtr3g119620.1 (locus Med tr3g119620) derived from phytozome v7.0 (chr-ID MtChr3; po s 29882103 to 29883084)
atcaaaattcaaacatcgagacttcggtagaaaaggtaaatgctaaaccttaattgttagatttttacaactatctatgcttatatatatatatatatatatatatatcttaggtcttttgttttctgttttcatgttatctttttcgccctcaaataaatcatattttaatatatgatttttttctctatagaagttgtacatgtgtcgtgcctatccttctagttcaatcataatatacagatctattaaacttgttgtttatatatttttcgagtttattaaatcaaactttaaaatacattgtatattttaaaaggaattttaatacaatatttatcaaatatttaacggtaggatctctaatataatattaaagtctaacataggatgtccaaaatatgacatgaggaagtgatctaattggggttaatacacatgcagtaatgtatattatgtctatgaaatacatataaactactgaaaatgatgtaattatcacataaaattacatattgaaagaatgcagtatttataataatccctttgtgtttctagacctttatttttgaatatctttattttttatttctctaattgtttctttcgtatctaaatgatagatgtatattttattagtgtgctttgattttgaaagagttaatgttccttgatatgaatgatataaaaagaaaatctagtttgattatcttgcaccttaattactatttgttttcttttatgtatagagttcacttcttcatttcatctttaaccaacctctctttattaccatcatcattttgaaaataatgaatggatatcaatataaattaaatctactcttgcatattagattttctaattttatagaatatattattcatattttgtacatgcattgtattaatttttgagatatatgtatagttcatttaaatatactagtattatgtatttcaattttcaattgatcaggaag

SEQ ID NO: 28770 - DNA, 894 bp, Medicago truncatula
  Intron number 1 from transcript Medtr3g101810.1 (locus Med tr3g101810) derived from phytozome v7.0 (chr-ID MtChr3; po s 24698428 to 24699321 reverse strand)
tcggcaatacttgttattgcaacagcgttttgcaggtttcaaccaatcttatttacttatattctagattcagattttgattcaattatgtataaatcatcaatttttgtgtggatatgtagatagtttatcattgatttaaattttattacttttctgaatgtgaacgttttaggaatttgttatttttgttttgctgaatttttaagtgctttattaaacaatggttattaggatgagattgttggacattaaatttttgacctaaatcattttgttgcatttgagtaagtaattttatttcattaactggaaaaaatggtttgcttaagtttattttagagtaaaccaccaaattctttgtagggcctctcaaacaggtcccaccattatgaatgtttcaaaaaggtttatgactgtcaaattttactcatattagatcttctgttaccgcgtgaaggacgaaattgatagtaagttgttaaaattcgggtcctgtcctaattgatggcaactggttaaagataaggactaacttgacaatttaatagagttgggaaccttttgaaatattcataatctcaaggacctatttaagagtgacctacaaagtgagggactaatttggtgaattactctttattatatatatttaggtaatgtaagtacattttgtttgccctgtttatgatgtaaggccaacaagtagcaaaactaattgttagtcttactattggaaaggatgctagaatcaatgttatcaacaattgtctattacacagtgataactgagtttgttaatgaactgtgtttgtataccttgtaactaaatttgtggttttttcctctcattctacaggctctatacttctgtgttccgtttcgagaacaatt

SEQ ID NO: 28771 - DNA, 647 bp, Medicago truncatula
  Intron number 2 from transcript Medtr2g121690.1 (locus Med tr2g121690) derived from phytozome v7.0 (chr-ID MtChr2; po s 28930575 to 28931221)
taatctttacaaccttaactcctacaaatactctggtaagttagtatcaaaatcatacctttatttgatttgattcaactattataaatccattttgtaaatttaatattgttatgattaatgggtagtaataaaaatgaattttttttttgttctttgaatgttgtttttgttgttaaagggttctctttggataaacagcttattttgcatcttaaagtataatgggttatatcatataactgcttatgattaagtgatttctatatgataagctaaaataaagtcaagctgtttttgtataatctataagctgttttgataagtcatcacgaagagcttattcaagtaagctgaaaaatgctcatgaacaagccataaactgtgttaataagttcttccaaacagtataacaaatgcttatgcaagtagataaactctaaaaagcctaagttttaatcaactgacatacttgttgaaattagtgaagttggtgttgagatttagatttcaataatgctaatgccatgtgtgtgatggtttcatagttgcaattttaattatttttttggtgagtgaagcttagtttatgttttcattatggtataataggtttggccaacaagaaaactgtaactattcagtct

SEQ ID NO: 28772 - DNA, 728 bp, Medicago truncatula
  Intron number 1 from transcript Medtr3g128170.2 (locus Med tr3g128170) derived from phytozome v7.0 (chr-ID MtChr3; po s 32764144 to 32764871)
ttggctttgggctttggtttgggcctaggtctcttgtgcgtttctgcctcttgtcttgctatttgcactgtttttctttgctatttgaaccaatgttttgattaaaaatcttgataaatttcctagaaaatccatgcttacttcttgatttttttcttgatgtttttatggtacttttgcatattgggattggcaaaattcttgtatgattaatccatggcattttaattctttcttggattatttcttatgatttttttgccaattttatcattgatttgtgaatatgtgataaaggccttttgatatgttaatgtgaggtgctcatgcctacaatcccatgttgattttgctgttttagattgattcatgaaaccttgattttatgagcaatgtatgcatactctagaaaataataaaatgctaattctatcccaaaattggtatgaaactaagcttgcttgtttctaatgatcctatgattatagcttgagataaaaaaaaaactatttcaaacttgttatagcatgagaattagaagctacaaatgccttaggtttcatatcaaaattttagggtttattatcattttattactatctttgtggcattttatgcgttgttgcctcttgctactctttatgctttatttcactaacaagtttatttccatgtttcatgcatctcatttagcattccctccacttttttttagcctagcatttatt

SEQ ID NO: 28773 - DNA, 652 bp, Medicago truncatula
  Intron number 3 from transcript Medtr2g117590.1 (locus Med tr2g117590) derived from phytozome v7.0 (chr-ID MtChr2; po s 27669373 to 27670024 reverse strand)
ctcttaagccagtgctcttggtaggaacgtttcaggtaagaagggggcattaattacacttcattttatgttcattattattacatatcatgcttaaagattgtgttactatggatttagataacacatatttactcataagtgagtaggggacgatgtttttaaaaccaaatcgaaaatcaaactagtgaaacctccgaatcatagttcaactacagttaaacacttgaatcagataacatataaatcaatagaaaagaaaaaatatatattaaaacgtaaaaaaccggttgaaccaacaacaattcaaccagttcaatccggttcaatcagaatgcattacaattaggatcaaaccaaccagcgaaactgtccaaatttttgtttggtcaaacttttaaaacattggtaggggtagactaaaccatagtatttaaactttgtattatactatgtaaccttaaaaattgcatagccgaaaaactcctcgggccactctaccgtcgaagatgttgacacaattgggcgaactttgttatcaatcgtttttatgtgcgtttactaatatgttttctttataaccaaattttgctgctctaaaatattattttacaaaatttcaggatagtttcctagctagctttgccctagg

SEQ ID NO: 28774 - DNA, 856 bp, Medicago truncatula
  Intron number 2 from transcript Medtr2g019080.1 (locus Med tr2g019080) derived from phytozome v7.0 (chr-ID MtChr2; po s 5157710 to 5158565)
tgctcattattctattgaaaccctaaagagaaagggtgatttctcctttggtcttcttcttactcatctcttttttctatatgttcacaattgctaacatgatttgagagtcgggttatggattgcaatgtgggaattgaattcaagcccacggtagggatgaagggttggtattgaagttgtttgtagtttgtttagtctcactttgttaaggttttcgggtttatcgggtatataaatgtacatgaacaccctcgctctttgagataattttgttaagagtcccacatcggataggacatgacctgacaatatgtttataagtgggggcaatcctcacctcacaggttggttttgcctgggctctgacaccactattataaatggtggttgggtctaacacaacctcacaaaaggtcatgtcttatccgatgtgggagtcttaacaaatttttaggcttggaatgcaaacccatttaacaacaacaatgtgttcgtgttgcaagtgagcataaaattgaacattaatggtttgtttcgaatcaaactggttcaattttatgctcacgagctgaaaatacctttacgaaaaaaaccaaattttgccttttcgatttgaactgattcttttgtgaacccaactataccaaattgtaaaacaattttttttagcagccttgatattcatgtgttacttaatcgttagtacttcttagataacatgaatcaagagtctacaatgaaacttagttcgggttgcttttacatttagtgttattgtctagagaacctctatgtcatatgattttttggtatgccaccaaatcattgaatagtgatacaagaatttgtgtca

SEQ ID NO: 28775 - DNA, 659 bp, Medicago truncatula
  Intron number 1 from transcript Medtr3g133460.1 (locus Med tr3g133460) derived from phytozome v7.0 (chr-ID MtChr3; po s 33833573 to 33834231)
actgttgtggttgttcagtaagtacctaatatcataaaaggattttttatgttggcattagtactagtgttattagtttatgatgagcactagtgttattcttcaaccattttgaatggttgaagaagatgaatgggagagtggttgaatggggaatgaaagatggaggataaactcaaatttaaagaagaaaagaggtgtgagtgattggattgaagggggaatctaattaacttgttgatttatttaaattgtaaaatgtcatttgcaaataataaaagggatatgttaaatgtgtaaaatactccctaattgttggtgtatactaaattatccaccttcttttaaagttagtctaaatctcgccattttgatttactagcgaaatagaatttgatagatacaatgtgaaaacatttttacgatttagctcacgagtttgagggagaggatccactccggtggaaatttcctcctgtgaaataatcttaaccatccattcttttaatgacatcttaattaatcttagcccttaatttttattttttattttacaagttgattcatttcttttcttcccttcctcacgttgtttctttgccattcattcactctcaatttcagaaacccatctcaacagcggcggcggaacggtggtt

SEQ ID NO: 28776 - DNA, 871 bp, Medicago truncatula
  Intron number 2 from transcript Medtr4g005970.1 (locus Med tr4g005970) derived from phytozome v7.0 (chr-ID MtChr4; po s 565751 to 566621)
caacctgatcaacgccatagaatcgtcaacaaaatgtaagattcagtgtcagtactttatcactgaggttatttaaatagcattgttagctgttgttgcatttgaaaagaaaattaagaaattaataatcaatccataactttgacaacctttatagatgtgattatatccaagaaatagtgttatggaagaagttaaaaaataataaacatgaatcatgtctcaccgttctgtttaactttaaaaaattaaatcattttagcatacaacttcgctcaaaattctattcaatttttgagaaataataggcaaatgcaatcattaattttcagatgaatgttgttcatctgaatcactactaaatattttcaagttccatgcatatttttagctttgtttgtcctaaattgcttcttggatgagtgaggagggaatgatcttagtttagtatttatttgaatattaaattatatattgtatactttttaagttttatgatcttttactgttgcattgtgtaacattttgaaataattggaacaaacttttttgtatcattgatgaatgatgatcctttcaaattatggtttatgataaaacattttggcgtaatttgattcatgcaatcgaccccacttattgcgataaggcttggtggttgttgttgttgttgatgaatgatgatccttggttctgtgatctgtcctctaaacagtaatgtctatttttttgcttctgcaggtgtgggaataaataattatctgacaaagattatctttttaccgctaatcttgttgtgtttgtgccattgtctgaacatctctgtcacttgcactatctaaatttgaagtaattgcttttcctttgtaga

SEQ ID NO: 28777 - DNA, 1057 bp, Medicago truncatula
  Intron number 1 from transcript Medtr3g101950.1 (locus Med tr3g101950) derived from phytozome v7.0 (chr-ID MtChr3; po s 24770683 to 24771739 reverse strand)
gtagttgctacgctttgaaggatcacatcactcaggtaacagtccttgttctcttcttgttaggttcttgtgaaactcaaagatatggtaacgctgcaatttgatttccacattcactgaaatatgaatattaatatttatgattttttgtaaaaattaatttaactactacaacttttttttaatagtatactagtaaagtagaataaatccatatcgatattaaaaaataattaatatttttgtgatttttttgggggtatgttggtgatttttttttcgatagaaggggggtattttggtgattatttatttattacatatttactatatgtataattggagaaattaattaaaaatgaaagaaagtatgaattttttttttttggtaagaaagaaagtatgaattttgtttaactgaataatcgattactaaaaaatatattgaaaaaatatattgaattattttttaagaggtattcattgaggtaaaaagatttcatgcctatttttctcatattttgtggtcttaactcagttattcaaactgcaaaaattaattttttagaattttatgaaacttgaaatttggctatttttatttttgaaaatccttccgtttcattataagtttcaataaatttagaaattagtggcccataaacttaattctgttgataaagacaatgcataatatatgcaaagtccgggagcaccacaaaaatttaaaaattagtgtgaacattataaaattggaaaaacaaagatagtttaaagtgcaaaatgatttaaaaacgtgcgaacatgttgagaagcacttgtggagtataaaaaaataactttggatttggacccaatgttatttgtaaagggttttctttaaaaaaaaaatccacaatgtttctatgttttttataaacaaaatatcctttcacgtaattgcacatataaactatctttcaagctttttttttcggttacaaaaattttagggtgagggatggtgccccagttcaaggtaggaaagacttttggatttaaagaacacttacaaagg

SEQ ID NO: 28778 - DNA, 382 bp, Medicago truncatula
  Intron number 1 from transcript Medtr3g076540.1 (locus Med tr3g076540) derived from phytozome v7.0 (chr-ID MtChr3; po s 17715615 to 17715996 reverse strand)
actttggaggctccagagggaaaatttgtatgaactcaatttggctttctctgatagatgatgattctgaaatcaattttcgattggggaaattttggatggagtgagtttgggtctctaagcacttcttttgaaattatcagttagagaattttgtttgaaaagaaatgataaaaattgattgtaattatgaacatgttgaaaaacaattgtgaagatgcttgaataacttgatgtgaatcaattctaggtttttttcatgattttttatgtgggtagcatgaaaattggttttgtttttgaaggtaaaggtaaagttttttttgatgaattttgttgtttaagtttttttttctttctttctgggtttgtatgaaggtgg

SEQ ID NO: 28779 - DNA, 473 bp, Medicago truncatula
  Intron number 1 from transcript Medtr1g124520.1 (locus Med tr1g124520) derived from phytozome v7.0 (chr-ID MtChr1; po s 27149872 to 27150344 reverse strand)
ccacgttattcaactcgactctgtttcttcttcgggttagttctcaattttcaaatttctacttaattattctttgcattaactaactcttcgtcaattattgtttttttgatcatttttttaacttggttgtcaaaaagtttcgatctttcccacaaaatttcattgcaataggttttcaaacttatttcccctgtttttggactctgaattcctctgtttttttgtttttcacaaaattgacgttgaacttatgaaacacccaattcaattttttattttctaattaattttaaaaactacacaatcgatttcttgatattttttctcaattgggttgtaaaaaatttcacatttttctgtttactttgtgcatgcaataagggatattaacaaaatactctgttttctgattaccctgtttttactctgtttcagattccactattttatagccaaatcaaacggaaatt

SEQ ID NO: 28780 - DNA, 894 bp, Medicago truncatula
  Intron number 1 from transcript Medtr1g137760.1 (locus Med tr1g137760) derived from phytozome v7.0 (chr-ID MtChr1; po s 30586406 to 30587299)
ctgctaaaaactgcctcaatcttgcattgaataaggtaactgtctaatgcgtatgaggtgtttgataaatcgactcaatgaaattttactctgtttttgtaatcttgtgcttatttaggcttttgaggttatgattgaagaaacataatggtagattataatctatcctccaaatgctattatttctatttttcgaagatgtatgaatatgatcttaattccaggaacatttggtattagagtaagaggcagttgtctatttccaaaactagtttaatccttgtattaccagaacggatatgttagtaaagcttatggaacggagcaaataactgtgaacgtgtgtaatggttctgatacatgttgagtcgtttattctctgtttttcatgcttttaaattatttcactgttgacaaaaatagtttggttcttggtttttgtggtaatttacttttaggaaatgccatttattgttttttttaaactcggtatctggcctaaggaccgactaatccgagggctccaatcccatctgtccacttgcgggggcctctttttatgccagtatgctctgtatggacttagcccaccgaattggcaccagggggaatcaaatgtaagaccttgagaggagcacactccaaggtctgaagccaacaacactaggccaacccaaatgggttaataccatttattagtatctttaatttttttctatatttttaatatgaatattgaaaatctattgtagggcattactttttcctccggactccggagtcttggtttcactttattctggttgagattctatgtgttgaactgatgagtgatgatagatactgtttgtttatgcagggtcctaacaagaagattctttgtcaattatcaat

SEQ ID NO: 28781 - DNA, 853 bp, Medicago truncatula
  Intron number 2 from transcript Medtr4g006320.1 (locus Med tr4g006320) derived from phytozome v7.0 (chr-ID MtChr4; po s 750540 to 751392)
ggcttaaagaaggttcgtaattaaattaaatatagttaaattatggtttgatttccttgcatatgtcttactagcttcttcttttttgtttttttttttttgacaaaatgtcttactagcttatatatatatatagctgatatatagtataaaaaattattttttatacactcaaaatcataccaaccttttttatacaaaaaaaaaattatcttctagacactcaaaatcaattgtcaaaactcaataatgcagaaatattattacttttttaaataaagtagggaaaaaaaaaaaaaaaaaaatgatgatagataacccatgtgccaagtgacttaagattgaaggtatcgattttttaatattacattttaaatcttatatttttttcctcaaaaaaaaaaaaaacttatatttttacactcattattttatatctttcatatagtttaaattttacttaagagtgtggtttaaacaaaggtaacgattaagtgaagtcaatagcatacacttcttattattatttttattatattttaaaggcagtaatttatcatcttcttcccttttcccaaaattaattgggtagtttaatttaaaaccctctacaaaaagagtgtagcttaagcaaagtgaaaggttcgttattatccaatgaaaataaatcattgtggggggtcgttggtgcgttatattctaaagacatttgcattatttttttgtttgtctgtgaaatgtttttattttcattaatatttgtaaaaatacatctttctgaataaatatataaaaaagtgtgtataaataaaaataaataaacataatatttattatctgtataaatgtgtag

SEQ ID NO: 28782 - DNA, 658 bp, Medicago truncatula
  Intron number 1 from transcript Medtr3g030550.1 (locus Med tr3g030550) derived from phytozome v7.0 (chr-ID MtChr3; po s 8306597 to 8307254 reverse strand)
ggtgaaggttcagtttgagttgtatttgatgtggttggttggtcagaggttaagtctattattgtgggtgagtttggttgttgttggtctgttgtttgatggtcagagggtattgtttgatggtcaggagctgtttggtcagaagcaacttgttcagaggcagtttgctcctgaacagtttgctcagggatggtttgggtttctgtttgggtttccaaaacagtcttttcaggaactgtcttagaggctttagtgggtgttggttgcatttcaccacctagatgtttttctaagttgtgaagggttgaggattcttggtgttggggggtttctgaagtagttgcatctgaagctacttcagaggctttttgtgtggttgagttatgtggtgagtttgttgtaggttctgggtttggttgaggttgttgtacactaacaggttcaggattatctggatagagaggatgagtaggaggcaaattgaatttctcacaaagtttaattctattcttagaaaattctatttgagtttgctcccagtcaagtgttcctaaatctgttagtttggtaggtttggtttttagaagcttgtctatgtgttggctaaggggtttgtcatctgattctgttgatgatgaagagggtgaagagggtagag

SEQ ID NO: 28783 - DNA, 728 bp, Medicago truncatula
  Intron number 1 from transcript Medtr3g162780.2 (locus Med tr3g162780) derived from phytozome v7.0 (chr-ID MtChr3; po s 42585960 to 42586687)
aagacgtggcgctttgcgatttcattaatcaataggtacgcgagttttcaactcatatatgatacgatgattctctgtattgtattcgcttaatttcattttcgttaataataaatattaattaattaaaatcatttttttgtgggtcttgactttgaataccgttttttcagcatttatttcggatccttctttctgactgggatcttatgtttcctctatttatatatttattcacttttcactgtctatcagattcatttcattccctatcattttctgctgattttaggttggtactcatatcaaaatgtctaattgtttgcatgttctgctgtgtgtgtgtgttttaagttgattagtcggccgacgaaggcgtgattggtgggtgatctgtaagtacctctgtcagtgcttttcaagcattgaggtctgtgttgattctggcgtgcccccggtacccaactcacctaaacttttcatcataagtaaaagttgattagttagtttggtttccctatataattggctgctaaatattttaggatgataaatcatgtcttctgtttctttttccgggttgttttaaattgaaactgtgtttaacttcactgagaatacactggttgagtaacaatgatattttgttttggactatttctttgatcagattttgattatatgcttttacatcactgttccaggctaggccttgtttgtttgagtaa

SEQ ID NO: 28784 - DNA, 530 bp, Medicago truncatula
  Intron number 3 from transcript Medtr2g007930.2 (locus Med tr2g007930) derived from phytozome v7.0 (chr-ID MtChr2; po s 1322868 to 1323397)
ctgctaaaaggagactttcatctgctgttgttaaggtattttctttttccacttaattttgatattcaagtttagtttttagtttttagttttgaaaattcaaatgcagtgtgcaatgttttatgatttaagggttgtttgttacagattaaatttggttaatttgtttttagtagattctcttgaaaagttcttgattgacgattttatgaaaagaagtgaatttctttatagtaaataaatacaaaatttctttgtagtgtgcaattgtctaataatttaagggaccagctgttatagcttaaattggatagaagatttttatttttcattatggtaaacaaacacagaatagttatggttttattagaaatgtctacaaaacaatatcaaaattattagaaatctctaaatcataactagtagtgtcgtgcccctactcatgtgccttcctgacccctaaaccacaaaggggaaaacagaattgtgtctttttaactgtatatcttgtttggaaatgaaggttggtg

SEQ ID NO: 28785 - DNA, 839 bp, Medicago truncatula
  Intron number 1 from transcript Medtr1g013020.1 (locus Med tr1g013020) derived from phytozome v7.0 (chr-ID MtChr1; po s 2194142 to 2194980)
ctcttggtaggcatcacagcagtagtcaccgatctactgttgtgtaacagacactagcatatgcaaattaaacagagttctttatgccgaaaatagttccttggctaaaattggatatttgtcaatggagatggcagcaactgaagttaaattcatcagttaaagtggccttatagaggttgtggcgtgattaacctttgtttttagttggagccatgcataatctggaagatgtgactgaagatcaatacctctattgggaattttgctttttgctgataatttcctaacctggctttatgtctcaggtcaactttcttgtgtactttatttttgccgttggaggagctcagtaaacacttctactgccatgtgtttccatcacaaaagggtgattagatcccagtagtatccagatggaccagactgaaggggttgtttaggtgaaatttgttatatcttgtctttcattacttagatgatactgatacatttgccgggtgtccaaggataaccacgtagcatgattgtccttgcgaatgaagcctagtttatggaattttgatacttgttcttccacgaaagtttgcttctatagagcgatcattgtgttctttagtggcatgagtttgaatttagagtcattcatcaatctatgagagcaaaagttggggtccaaacctggcattcattaatatacggcaacaagtatttatttctttaagaacattaatttatctgtccatactcttcccttttgagttccaaaccaaacgtttgtaatgttttccatttttgttgtagaggagttgcaacttggaagtcaccattctatcaat

SEQ ID NO: 28786 - DNA, 795 bp, Medicago truncatula
  Intron number 2 from transcript Medtr2g025880.1 (locus Med tr2g025880) derived from phytozome v7.0 (chr-ID MtChr2; po s 6962152 to 6962946 reverse strand)
ttcatttctaagaataaggtttggttttgttttcaattctatttgcaaattcattatttcggtcttttttcttattattatcattatcgagaatatttaactatttttcaaaaccttaattaataacctatacttccattgggttttaaatagtggtagtcgcattgtgatcattgatatggttttaaatgcatatcaggattgatttgtaaccctaactataatcaattaatctcaattacatagactttgtgttctgggatttctgtttggttttgaaggtcaaattttctttttattggttgtgaattaagtgatgttagacacaagctcgtgtcttctcctttttgtgaaagagcaatgctgtgaactgggattttgtagaagaataacatgagatgtttgggagaatatttggattgctgtttgtaagttgtctgagtttttgctggtagtgtaaaaactgtgggagattttttggtttttctgttgttagttgggatcaattctttataggaaatgttaaccggtgcccccggggcactagttaaggaatcaaatatagaaagtattacattggaacttgtggtgtcaactcctaaaaagcataaaaagtgttattttcactttaaatttccttttttagtttccttaaccagtgcccctggttaacatgacccattttttattcatacaaaaagcaatagtactttctgaattctatgatccttttaccttaatctgtttggttattttataggacgccattgtttctggtattgaggacaagatttc

SEQ ID NO: 28787 - DNA, 854 bp, Medicago truncatula
  Intron number 1 from transcript Medtr2g033210.1 (locus Med tr2g033210) derived from phytozome v7.0 (chr-ID MtChr2; po s 9005672 to 9006525 reverse strand)
agagttcaaatactgcaaatactatccataataaagtgagtgaattatatggttgtgaaacgttgcctgcataccctagtactgtcctttgaacttggcactgtacatcctcaaattgtgctatgtgttaagcatgtaactattcttgatcttaatttacttattttctgtcttgttatgtcttaagcatggccttaatctcacctcatggtttaaggaattcaatgattaatatagtacatggtgatttcagtatgagaaaatgtcacatatggattgaaactctagaaacaattaattctccttctcgtaagtagaaacccgtacttgttttaatataagcgagacagtgacttaaaaagcaagaaatagacattagtgtctcaaaatcaatttatatttattattttcttttgtttttgtcgaacaattaggtcactgtctaaatcgtaaaaaagcggaggaccttaaacttctactcaaagataacaatgtccgtagtcgttaaggttttaagcaattttcaaacatttgcttatctatgtaatgtagaccagataattctccatcctaatgaatatctatatcatgaaatgtgttacactaaatataaatatatctctcggctaagattcaaactttgattcatctattgtgaaaattcagctcttcccgataaaccaacacatgttgattgatggatgtctctttatcacttttgtactgttttcgggaaataatttgtatacaaggctccaaattatatagtattttaaggctttattttattagaatagctgataagttagtttgtaacagaagagctcgtagaagaaaggttataagcaggcata

SEQ ID NO: 28788 - DNA, 475 bp, Medicago truncatula
  Intron number 1 from transcript Medtr1g024140.1 (locus Med tr1g024140) derived from phytozome v7.0 (chr-ID MtChr1; po s 5611228 to 5611702)
ataacaagaaagatccaccttcaccacaaagccaggttcatatactaacctctacttagtttcatttccatttcttttaattaaccatgcagtagagtgataattaactcacgtgtgcatataatgcattaaaaaatttagtataatcaagaacaacataaataattcacattaacttcatgtaatatataggtatatagggtaataacatatttctgactataatacttataaacttcagttatcagatgtatctatatttaatgtctgataattcttctaacatgaacttgctctttttccatataagacttgagttacatgaaaaaaatattaaacgaccaattttttatttattttttaattaaacgaacaatatttgtcgtttaaaagcttttgatttggcgattatatgttaatatgtattattatttgtgtatgtataggttgaaacgcatattccaggagggacaag

SEQ ID NO: 28789 - DNA, 724 bp, Medicago truncatula
  Intron number 2 from transcript Medtr3g022160.1 (locus Med tr3g022160) derived from phytozome v7.0 (chr-ID MtChr3; po s 5678161 to 5678884 reverse strand)
aggaggtggaactcaaaaaactgtttggatcatcggttgatttgttaatacaggattgtgataatttattttatttattttcaagaaactggttgttacatcggttgatttgttttatcactaccatatgtcatgtgaagccagtttgctctgtataatccataccctgacattgttctgtgagaggaaattactggaaggaagcactcatgtttaaaatgtgtttgttttgggagagttgaagtaaaaaaaaaccctctccctaaaaaaaaattgtatattactgatgcaaaaactgaaatcaaaatgcatccttttacttcttctggctgaagaactcacttttttcatattttttaacagttgatagtatatatgtttgaactctaaatggtattgcttcgtagtagattacacacactcttattttaatttgtatggaagatcatctagtcacctctgtggtgccaaactgacttgttaaatcattaaaagcattgtagtcaatccggatcgcagattataacggtttattcaaattccactgccctatagtgctatattgtagctaaagccactatttagcaacactttatattaactcatgtactgccactgattaaaattatgtttgttgatgtattctatgagagattctgtgttaagttattctaagtgcatttttttaggtgctgctaaaagaagaagagaagttggcagccca

SEQ ID NO: 28790 - DNA, 888 bp, Medicago truncatula
  Intron number 2 from transcript Medtr1g059650.1 (locus Med tr1g059650) derived from phytozome v7.0 (chr-ID MtChr1; po s 11697435 to 11698322 reverse strand)
cttgaggaagtgttaaagcagaagactttcaccaggtatacttggtatgaactgcgtgtggcataactgattttagtattgggttgcttgagaaatgcatttatttcctgcaattgaataatctcatctgcattgaattctcagattttttttatttcaataatctcaaactctaacacaacaaacacaaacacattaggcgtatcaggttagaggtgagaagagctaattttgattgtccaataatgtgtaaaaaattaagattattttacttaattcgaattgtcctatactatagtatgttatggattacatccatccatgaaagaccaagttcggtgctgcatgttgtgatgtcatatagtgtaatataggcttgctttatcagtggtttaagcagatattcatgtgatttttaattttattttttatagtgatgtgcatttacgtgattatgtttattgagcgacattaaattttagctggtttgtattgtgctgtgccagtaaaatgattttggtatgtttatttatttatttatataaataaccatataaataaaagaggagttttctgttaggttggttgatgttttgaatcttgatgatacggattggcgaacagtaatgcgatcatttattcttttttatacaagccatcaccgatgtcattgtttgatttatgtagctgtgtccacttggtgggttatacttgatggcgatgtaatttgcacttcctgtctaattttttgaagcttatttcttgtggttaaatttccaatctgtttcttcttattttcacgtgtcttttgtgatagcttcttgctgatatgtacatgataattgtctacttttccacagatcagagattgatcatttggtagagctt

SEQ ID NO: 28791 - DNA, 629 bp, Medicago truncatula; identical to SEQ ID NO: 28539
  Intron number 1 from transcript Medtr1g092820.1 (locus Med tr1g092820) derived from phytozome v7.0 (chr-ID MtChr1; po s 18691205 to 18691833 reverse strand)

SEQ ID NO: 28792 - DNA, 732 bp, Medicago truncatula
  Intron number 3 from transcript Medtr3g115070.1 (locus Med tr3g115070) derived from phytozome v7.0 (chr-ID MtChr3; po s 29245074 to 29245805)
gtgttaccatagatttccagattattgtactttatattacatttctcaactatttgtggatctacatgatatcactgagttttattcagtgggagattatcaatagtgtctaaattctatttattatgacattacatataagaaacacgacgtttatgttcccgctcttcggttttttatttctctaatattctttccattttaaggttactttgaaagatacaggaggtttgtgtagatgattatatgatatcattcttttattctccctaacttgttcttccaaaattatatcttaaatttgatcaagggattcacacagtgtatgcaagtacatacaccgacttttcaattttccagtgttgcaacaggttgagatggaaatggtgaggaacaatgctcattgagttattacaaggtaacaggaattaattccgtcaactagtattaagaataatcaattttataagaaactatgattttgattttgacaagaaagaaaccattatagaaattggaaaataaccaaaaactagctggcatgaaaattcaatttggttgtttcactttctttggttagaaatattatcataatgtgacacttcaacgccaaacaaactgagcagcagcagtcttttttactctttctccttaagtgaacaaatacttatcacaaactacaaaaactgttaaaaagggcaagagagggagacctagaaagcccaagagtcc

SEQ ID NO: 28793 - DNA, 240 bp, Medicago truncatula
  Intron number 1 from transcript Medtr1g083300.1 (locus Med tr1g083300) derived from phytozome v7.0 (chr-ID MtChr1; po s 16322692 to 16322931 reverse strand)
cagaggtgtttttgcatttacttgttttggcctatgccttagcacaaaagaaaagaaaagaaatatttatggaatggtatctcgttgtaaaaaccatgaaatcaaacttgtatcttataaggtaaaaattaaatcagataattagtccgtaaatttattaatttctaaagtctggttggtttctttgcaaaaaaaaaaagtttaggttggttggtttaaacaagaggagaaaaggggagc

SEQ ID NO: 28794 - DNA, 862 bp, Medicago truncatula
  Intron number 2 from transcript Medtr2g121020.1 (locus Med tr2g121020) derived from phytozome v7.0 (chr-ID MtChr2; po s 28615258 to 28616119 reverse strand)
tttcacaagttgatcttgttaaaggtattatttcctttttttttttttttttttttatcgaactaatttttgttgtgtttacagttttattgctttgcttagttaattgatgatgatgctttttttgttctagcaaaattaataacttgaaaagcaagttttttatttatttgtaaaataaaattaaatgtcttagttgttgattgcatgcatgttaatgacacatttccacagcaagatttgacatgcagtacattatatagcctgtataattttagagtttgtaaatttattaaggaacattaacttgaattagtttgtataatagtattattctgcataagattgtttgttttgtctttacaacttgagtccaggtaataactgttgaagcacggacaccggacacggactcagacacaccgacaccgctaataatttgagaaaattacatatttcagtgtaattataagtgtcggtgtccgactccgggacacgcctaatccaaggagtgtccttgcttcatcacacagagcagtttttcattgagagagagatttccaagttgatgactgttcaactttgttgaattaatgcgaccgaagagagcaagattggttaatggaacttattggcttgatgctattgaagagcttttatcattgccacaataaccgtttataagtttctagacatttcgtaacatttttctagattgaagtcttcagtttttctgatatcattaatatcagtttctatcaagtgtgtatcaattcctaccgatgtctcaaactcatagattaacttttaacagtttctaaacttatgactgatagaggaaacgatcgaagctaaaaacaag

SEQ ID NO: 28795 - DNA, 633 bp, Medicago truncatula
  Intron number 2 from transcript Medtr3g106390.1 (locus Med tr3g106390) derived from phytozome v7.0 (chr-ID MtChr3; po s 26774626 to 26775258)
tgggtaagtccatactctacaatccaaacattcttgtgcatttaattcattgatattaaacacaattctttgctaattaatctaatatcttaattctagctatataaatatatgatgtttaactcttcattagtagtttctcgtgcttggcttttccattatcttttcaatatgtattgatctacacttgacacagggttacgaattcttctaccaaaatgtcttaatattattgcatatttgatgtttgtgtgtattgaatattacactacactatacttcactataatactattattgaaaagttggaaaggaaaattatagcttaatgtggtaggtatgttttctgatgtcattaagtttattaagatatgaatgttcacacatccttatggtaattgctaagaaatatgccaaagtatagcttattctgcatctgcaattttttagttttctctcaaatctgaggtgtactactgtgtggagaggatgtttaagttccattgacaaggttgcttagctaaactttcatgtgtttaatcgatcgtttctggtttgacacatttctgttatattttttaatttaatgtgtctattttatcagatataaagtggttgtgcaagtagtttgcg

SEQ ID NO: 28796 - DNA, 267 bp, Medicago truncatula
  Intron number 2 from transcript Medtr1g016820.1 (locus Med tr1g016820) derived from phytozome v7.0 (chr-ID MtChr1; po s 3393514 to 3393780 reverse strand)
ttgtcgaacaaactgtggaaataagcaagaaagaggtatgtttttctatcttctatataatctgtgattttgttttttttccttgtcatttgatgtttcatctcttgcttttgtaggtagttgatcttctcaaattatcattgttctcaaactcccctttgacagatttaatcttaaagaagaatcaatttgttgataaattttaccaaagcaatcaaaaaatttgaatttggaaatggagagaaaccatctgaaaggggtaggtat

SEQ ID NO: 28797 - DNA, 819 bp, Medicago truncatula
  Intron number 2 from transcript Medtr3g156640.1 (locus Med tr3g156640) derived from phytozome v7.0 (chr-ID MtChr3; po s 41184112 to 41184930)
ttgcggttggttcaaattcttttgatcaggtactatttattttgttttcaatgcttatctgatgaatttaataatgtttactgttacaatttttggcaaccatctttccatttggtattcaatattcccttaaaaatggagatggaaaatttacgtgccagtttttctcaaaccttttcatataagacccttccctgaaaactcaccatagggcaccaagagtgaaaacttcaacaagcatacaaaatcaagcgtttagtaattcattattatctgccataattggataaaaggtatttgaaagcattagttagaacagctctctagttgttaaaatcacaagaacctagcctttaaagttttgctacaaatgtgtccttggatgggggatgttattttccccaagagcatgaagcttactattgtaatcaagtcgaggaatgtattgaccgagtacctagttgcaatggtttacctcaattttcttgttttattcatgaatttcttagctataaatggaacattaggtttgatcacttaaatgttggcttattaaaaccagtttagataaaaaaattatggccatggattttaattaattgcaaggggcatatccattgtcatgcggagacatcagtatagcttagagtaaaagtaaaaagaaaattagactgggatttaatttatttataaaaactactgtgttttttccttgttttgttcctcaaacttttgctaatcaggcctctgaaatattaattttgtgttgtgatcattttagcaggaaaaaggcctcacagatttctcctcttttggacc

SEQ ID NO: 28798 - DNA, 526 bp, Medicago truncatula
  Intron number 1 from transcript Medtr3g139830.1 (locus Med tr3g139830) derived from phytozome v7.0 (chr-ID MtChr3; po s 36085118 to 36085643 reverse strand)
ccactaaaccactttaaagctcctttaccttttcggtaaactaaacagccattttgatatttcaatgtgtgacattttatatgttataatttttatgacacaatatggttataattttcaaatgtattaattataaatatactacccaatgtttttcaattaattaatttgatcatcaaatgagttttttgttggtgattttgatcgtcgacgcttaattttccatatatctatctcttcacgtatgataacacaatctattatcccattttctctttattaaaaaacttatataattctatccatatatcatttttcttatgcagatgtgtaaaagatatatatcaaaatttgcaatttatttattctaattaatgagtatgttatttgtaatgttgttagccagaaaaaatggtatgtgtaatgcaatttcgaacttatatcaaatgaatataaaaaaaatagatttcttttaagcagtaaaacaaactaaaatttatgttgttaatattagtcttttggcgaa

SEQ ID NO: 28799 - DNA, 845 bp, Medicago truncatula
  Intron number 1 from transcript AC235668_17.1 (locus AC235 668_17) derived from phytozome v7.0 (chr-ID AC235668; pos 55740 to 56584 reverse strand)
tgttttgttggtgaccagtttgtattttctctttgtattgactcttgatttcttatcttccactctttgtggtgcttataattctttagttctttaatataattcattttgtctattctaaaaaaaataaaaaattggatttggtccaaagatggtccttactactttaagtaaattttaattatatactatttttttattttttaatattataaaaaaaattaccaatttaaaattaaaactatgcctcacaaattcattttgatgaatttatgttagatacattgatgagttctttttgtcaaaaaaaaataaaaatcgatgagttctatatttagatagagcatgaagcattagtaactagaaaatactgatatttcctttataaaaaaaaaaagtaaatactaatatatttcttaaaaaaaaaaatactaagatatatataaattatttaaataaaaaaactagaattggtaaaataaagcggatctgaatgtgtaaagaaataatattaacccttaattaataaattaataaattaaaaaatattagaagctctaactcaaccgacaaataccaaaattacaagatcgaacgtcgtgattcgggttcgaacccggatatattatatatacatctacatcatgataatgaatttcttttaacaacattgcttaatattttcactatacactttagtgatttttaacatctaaatctagtctaatctaaataaaacaaacgtacaaatcaactattgaggagagaatttaggtttgacatcattgacacctggcaaattatctatttgttattctttttgcaggttccacgtggtttggagg

SEQ ID NO: 28800 - DNA, 560 bp, Medicago truncatula; identical to SEQ ID NO: 28217
  Intron number 3 from transcript Medtr1g093020.1 (locus Med tr1g093020) derived from phytozome v7.0 (chr-ID MtChr1; po s 18795295 to 18795854)

SEQ ID NO: 28801 - DNA, 786 bp, Medicago truncatula
  Intron number 2 from transcript Medtr1g116710.1 (locus Med tr1g116710) derived from phytozome v7.0 (chr-ID MtChr1; po s 24729862 to 24730647)
gcacttgcatcacagctttgaagtcattgtaagagccctttgcttcttcttcttttaacttcaaatccaatttgttaaacattttctattttcattttctaaaatatgttagtttaaacttcctaataagaagatttctcactcttgaagtgaatcattttgatggagagaagatgaaatactattagggatgatgcgtttctagaaataatgaaaacaactctttggcattttcattttttccgaaaatgcacaaaattgttcacttcaagtatctattatttctctatgagcaagtaaagttaacagaaaaacacaaaattttgaagatgaaaataaaaaatgttttataacgtaaatgaaacctgataatatattactcagattctgtctttgtttgttaccattcaataaaacaaaagattatgtgtttgttgcttcttaactaatatttttattattaattttggttatacgatgtctgaactttgaattttacttgacctataatagcctgcagttttaaattcattgttaagttgtgctgagatttctcagcaaacaaacaattgattgagggaagtagtttatgaagttggttccttttttttgtttacttttgcttgatgcatgacacaatatagtaatgattgatcaatgtactgatatcctgttggaaaagatttctgttttttggtttttgtgttctttttaaattctgcttctataaggaatgttttttcttttgcaggagtttcagagcactagtttttccgaactcattga

SEQ ID NO: 28802 - DNA, 837 bp, Medicago truncatula
  Intron number 3 from transcript Medtr1g116710.1 (locus Med tr1g116710) derived from phytozome v7.0 (chr-ID MtChr1; po s 24730938 to 24731774)
caccttctttttagtgctaatcgttgggaaaagaggtttgtgcttttgtttttagtttcctaacatttatgttattatttgtaaaaagtagcatgggaagaacaaagaaaattcttgattcatgacttggaattttatatatggccattgagaactgtctagctagaaattggatacagtattcctagattgtgacataaaacaggaaatggaaactatacccgcttaggcatttgagttctttgataaaaaaaaactctcgtttacataatgattttggcagccaagtaagtgatatcttcatatatattatgaatgagaaattctctagtgcacgacgtattttagcaacaaaaccgcatgactatgtacgtggcatcactctctttgtttaaatcaaattttaattaaaataaatttaaaaaactgaaatagtgtgttggtggaacacacggtcatgtgtattttactacaacacatgtcgtgccattaagcattagtcattatgaatatatgctttatataatcagaagaagcaagctgtcttgcatcactgctttgatgacatgtagtgttgtaaggctgacatgggctctgactcttcgggaattactattcgatgagcttgcgacattgctccagttattaagttaatatggctgttatgactggtgatattttgactagttttatcctagaatgtggtgcttattagctgatgttgcatgcatgtttcttagcaaatgtaccacttggatatttttactggtacttgctcacgacaagtgaaatttcaagatttctttgattaagttgtgttgtctatgcaggtcattg

SEQ ID NO: 28803 - DNA, 335 bp, Medicago truncatula
  Intron number 1 from transcript Medtr3g031090.1 (locus Med tr3g031090) derived from phytozome v7.0 (chr-ID MtChr3; po s 8653753 to 8654087)
ggcagccaagtactgagaactaaggtattgttaaagttatgagttttaaataaaaataggagagaaataataagatctgaaatgttttaactaacatcttgatagaaacttgatactaaacattaatccctattaatagggataaatagactcagttgtaactaaatagggaaattaggaagaaaaaaaaatcaaaacaataataagtaaaataaaaactaatcttaagagagaatctaactctaagattataaactgattatagaaaataaactaagatattctaaaataacatcattgatattataaagtatttttcttatattctaacaggt

SEQ ID NO: 28804 - DNA, 387 bp, Medicago truncatula
  Intron number 2 from transcript Medtr2g122160.1 (locus Med tr2g122160) derived from phytozome v7.0 (chr-ID MtChr2; po s 29238792 to 29239178 reverse strand)
caccttcctggtaacccattatctctaaatcacaaaataaatatggcttttttaaatattcaacaagtttctgggttatttgttcttcagctaaaaataaataaaaattgtatttttcttgtgaattttgatcagattagctgatttattcatctaggtattattattaacgttcacaattttctgggctatttgtttttcagctaaacatcatttttttttttttttttttttttttttttttttttgtgaattttgattagattagttgatttatttatctgggtattgatattaatgtgttttgtttatgattaattttttccattttgatggaaattattacgagcagggttgctcaggattaggtgggagtggtaacatctg

SEQ ID NO: 28805 - DNA, 780 bp, Medicago truncatula
  Intron number 1 from transcript Medtr2g117060.1 (locus Med tr2g117060) derived from phytozome v7.0 (chr-ID MtChr2; po s 27423285 to 27424064)
gtttgagaaaaaatattctatttgcattttcagttttcattttaaattgcaaaaatattatattgtttttgctttattttattattttcaattacttacttgtgtagagaaaataaaaacagataataaagttaagaaggtgtgttgtcttcaaaccaagcatgtcattgaattgcagaaactacaaacattgcgatccttgtgaattgtgattgttaaaaattgcgaatgaatctggcttacgtgcaattgggctggctatagttgcagaaatttttgaaaccttaacactgcagtcgcaataatagttgtggatcacaatttaaaacacaaaaatggattccttaaagtaagtgcattggtggccattagattcagttcaaacaattcaaatatacgcatattatgttttttttaatccaaattacatagatcaaatctaaattgtcacccatgttttaactacttaaatttagggtgtgcacttttgttgtttattaagatgttttttgttccaatctgtcaatcatgccaaagtgaaacatgacttatatttcttacattttcatattggcaaactgatgccaaattttgggttctcattacgccaactaatttgtatgttaccgtcattctattattgttttaattgtaacaaacacataatcaagatgactcctgcatattatatttttctttccatccttttatggatctgtgatatcattccttatttttggtatagggaacagttgttcttgtttttcaaccagcagaaga

SEQ ID NO: 28806 - DNA, 359 bp, Medicago truncatula
  Intron number 3 from transcript Medtr3g092410.1 (locus Med tr3g092410) derived from phytozome v7.0 (chr-ID MtChr3; po s 21717387 to 21717745)
tgcgcccctatacctttttatccccgcggatacaggtaaattttgctcttctaatttgatcaatacttaaatagcatgatggtttaaatttgtttttggatacttccagccaacatcatataattcaagatttctcttacattacgcatgtatgtacgtgtgttgtaacactataatttatcaagtattaatttgaacagagttttgaaataaccttagatttctctattgactcgctttaacatacattatgtagttagtttttgtttttgtttcattgttctgatgcttacgtgttccaataaatcaatatctgacggtttttcttcatcacttatttacaactgataatatgcagc

SEQ ID NO: 28807 - DNA, 464 bp, Medicago truncatula
  Intron number 2 from transcript Medtr1g076860.2 (locus Med tr1g076860) derived from phytozome v7.0 (chr-ID MtChr1; po s 15478441 to 15478904 reverse strand)
cctagagaggtatgtgagaaaagcttatagtgtttttaattattgtctcttctttaatttaattattttcctttattattcacttttttcattgatactatattctattcatatatacctatttccctgttctgtattttaagttaagcttcttgttaattacacagtttttttttgttaaagttattttcttttgggtaggaagaaaaaaacaaagtgaaagtaaaacaaagtgtgataaaagtaataataaacaaatggatctttcactcttttgttttacttcagtggcttctactatgctagaatttttcttcacttttgtgttttgtttttctctttattattatctcttcactttttgattttttttttttgttttgttcttattttctgttccattttttgtccattggatcctttttgcagctaactggtgaaacggtgggagaagtaaaagctgt

SEQ ID NO: 28808 - DNA, 318 bp, Medicago truncatula
  Intron number 2 from transcript Medtr1g039810.1 (locus Med tr1g039810) derived from phytozome v7.0 (chr-ID MtChr1; po s 9205471 to 9205788)
gcttggtagaggtttgtcttgtgtctgtgcgcaaataagagatagtgatgcttctagcttttctgaattaactcttaagcaatatttttataatttactaaactagcttttagtttatgttttgagtgtttctaattctggtaattattacgctccatgcatcatccaacaaaaactagaagaaaacataatttttttgtagcatgttatatggactaaaaactagcttttagtttatgtttagagtcttgcttaactagcttttagtttatggcttgagactttaatgtggatattataggaggcctttaaggtatt

SEQ ID NO: 28809 - DNA, 449 bp, Medicago truncatula
  Intron number 1 from transcript Medtr3g130420.1 (locus Med tr3g130420) derived from phytozome v7.0 (chr-ID MtChr3; po s 33084049 to 33084497 reverse strand)
atcggatttgggtatccccactccgtctaatttccgtatgagcttggatttggagtacttgtcggcgccaataaacattttggaaaagaaaatgttgggagtttatcctagcgaatatcttccctaaaacatagcagaggcaatatcaagataattgtgttcacattatggttatagtttagctgtgaaacgttgaaaattgcatatttgaattaatgtttacgtatatcaaatgtcttggtaacctttttaaaattttgttctttttgttacttgtagttagtctaactgcaaaactcgtccataccaagtactatgttgctttcaatccgcatatcatcatatcaaatatttatgttgctttttaacgtagttgcatgacataatacctggtttatatccatcaatttgattattattttattttttggcagaaaagggaaaagcct

SEQ ID NO: 28810 - DNA, 729 bp, Medicago truncatula
  Intron number 1 from transcript Medtr2g118160.1 (locus Med tr2g118160) derived from phytozome v7.0 (chr-ID MtChr2; po s 27978957 to 27979685)
ttattagctcggtaagttcatctaattatgcagatctactgagtattgatcatcaatttgtgaattttttgttttggtagaatcatacgacgaattctatttattggtacctagttttaagtacaaaaagcatcacatataagataggatatgacataatcaataaatatgtgtgaataaatagatagtaaaaaccataggtgaatttgtaacatgatgttaattgttatccatttcacactgcaattcatgtgtaatttgcttgtttgatgaacatttcacagatttatttgcacttttagattgattaatttttcccctagctgtgctatcttaatccaacttatcctatactttacagtttgttccacattttttttttaattattattgttcaattatgaagatatcatcctgttctacaatttgacttcctcatcggtcatcatggacttagctgagttttattttcccttgttaacattttgggtccaatagtatattttgttctttgttaaagtttatttatacttatatgagtgataatattaatatgtttcttatttttcattaattattgttctgctcctccaagatggtagctagtaaatgtcttgtcttgagagattttcatttgtttttctttaatttattgtatcaaattggtagttatgcttatgattctttggttaaaccaatataacagtgtgttgctgatccttatttagg

SEQ ID NO: 28811 - DNA, 665 bp, Medicago truncatula
  Intron number 2 from transcript Medtr3g130520.1 (locus Med tr3g130520) derived from phytozome v7.0 (chr-ID MtChr3; po s 33151873 to 33152537 reverse strand)
gtgctgatcaagaacttaaagtttgttcatttcatcttcatcactttctcacatgtccggctttaattaactgcaaatatacttattcattgcctgttgtaaactatgaagcgaacacaacacttacgccagtaataattttataaaatagaagtaattgaatgcgtcgttgtcagtgtccaataccaacttgcaactcatacctagcaagtcttcaatctgtcataggttataaacaagtcattgaagtttctgtcaatctgttattgtataatcgtctaatttcatgtattgagttcatatggtttaattttcaacaaacggacctttgaataaacatttattgttgatgcctattagagctaaaactactgaacaaagctcaagaatagttttataaatcttcttttcatgttttttttttttttttttttttaccattttttttaaaataagttgaaaatcaaactttttgtatctgtgcatgttgttcaatagctagtttaattgaactaatgttctgttttacaaatgttatgaggagtgggggttaaatatgtgtaacatgcattccctatgaacttcttttactggatgttgagaaatttctgatttcaaatgtaaaatgtttgtgtcaggttctggttgttaggcaagacctaaag

SEQ ID NO: 28812 - DNA, 892 bp, Medicago truncatula
  Intron number 1 from transcript Medtr3g137810.1 (locus Med tr3g137810) derived from phytozome v7.0 (chr-ID MtChr3; po s 35033259 to 35034150)
acactaaggttagtccttgcaaatttaacttcttctttcatttgttaattattattcaaattgttttactagcaacaagagtaatacttcaattacgtcgctgtaattacagttttttggcatacatgtaatgagaatattatatattgagatgttaaggttggactttaagtttaagctctaggtatatgtatgaatttaacagtattttactccctttgtgattggtttcaatatacaatagtcctacgtccgtgcactgcatatttacgaagatcataggatgggagttaaaaattcaatggtgctatatagttgccttttaataaactatattgtggttgcagataggttttgaatgtttgtttctcaaaagctagagacccccaatcgacagattaaacattacacaaagagaagtagcaaaatgctaattgaggccgcaaatccatagttaatacctttcaaatgaacatatatcatttgctaaatttctgtatcattataaaattaaatcattcggtatgttcatataatagtagtatcatgacagttttgttaagaacatgccaagtctaaatcatgatccttttcttgctattatttgtgtacttttactcaagtttgttgagttagcaagtgctatggtttgtttgaattaagaaaaagatcgaagaatgtggagttatcactaccaaccttgtcaattttttttaacaggcaaaccattgattaaaagtaaaacataacaagtaggttgtttactcgatcaatgattttcaatgttccaccaccaaaaaaaagaagatttttaatgtttactttataagtgctgattgaaattctggatgctctaggtacaagaggctaactgggaattatacaagaaaca

SEQ ID NO: 28813 - DNA, 895 bp, Medicago truncatula
  Intron number 1 from transcript Medtr3g025740.1 (locus Med tr3g025740) derived from phytozome v7.0 (chr-ID MtChr3; po s 6787645 to 6788539)
tacacaagttctttcaaataattttatatctgtttttcttttgttaactactcctccatcataatatttgtaaaattttgttttaaaattaatgttactttctacttattaatggtgattttgctctatagtcccctcagattgctcagcctctaaaataagccgatcgggagttacgctctgatccaaaaaacagcgatcgggccataactctcgataggttttgcgcaatccggagttaagatacgttaattccaagggtctatttagctttgcaattacccttattaatcacctttcctccgtcacatgattatttgtcatattttaacataaatcatctgtttttcttattcatgctttcaactggctatgttatattggtgtagatcatcataagttttgcaaacatggaacttctagagtctctaatttctgtactgaatcaatgaaaattattcaaaaccatttcatgacattcttcattttcaagtaggggacattggtattgattatgaggtgcttaagaagcaagccaacttgtgccatgctctcaaactttgacaaggaaaccagtggaaactgtcacaatcccctgaaatctttttcttctctctatttttctctaatttagttattgtaatcagtctttatttagtaataaaagtcgtatctccgtttcaattcttagatattgaaaccaatttccatcggatgtcttttaaaaaccagtccatattttgtgttctgtagatataaaatattataaaaatatgttacatcaaacaaattgttatttttctctaatttcgttgtattttttgacacactttcatttgttgatgtatggtgaataatagactgcctgccactcgacaaaagtcctcttacccat

SEQ ID NO: 28814 - DNA, 538 bp, Medicago truncatula
  Intron number 2 from transcript AC235748_11.1 (locus AC235 748_11) derived from phytozome v7.0 (chr-ID AC235748; pos 38616 to 39153)
atcttcataccgccctcggcaccgctaaattgcaggtaattcatttcatcttagagctgaaattcaattcaatgcacatatgaatattttgaattaggtcatgaactaacattaaatcaatacacatctaacctgcagtcattaaggctttgtttgcgagttcagaagggaagggaggggaagggaagggaaggctttgaggggtggaaaatatgagggaaaatggagaaatctttcaaaaaatttaaaagagtagttttttttagagaatgatataaattaatgcatatgattaatatatttttaattttaaaaaataatataacaacatagattaaatttgaagaattcatataaaccctccaaaaccctcctccactacaatttttttagtttcccaaacgaggagggtttagtattatgaagaaaagttaaccccccccaaagccctcccctccaaactcgcaaacaaagcctaaagagagtagtgacaatgataatgattacgctgttgaatttgggttggaagtgcagttag

SEQ ID NO: 28815 - DNA, 937 bp, Medicago truncatula
  Intron number 3 from transcript Medtr2g007060.1 (locus Med tr2g007060) derived from phytozome v7.0 (chr-ID MtChr2; po s 934075 to 935011)
gctttcaagtttttgagcaatgtatggaatctttttcagtataagctatcttctgttgacggtgtttctacaaccttgttttgctgcttgtatttagattaaaaaaccaacaaattatacacaagatcaatatgacttagggcctgtttggatcgacttatctttgagcttatgaaaaatagcttatgcaaataaagaagcttttatgttaattcattagttctctctaacttatatattaattcattagttctcactaacaaaaattgtatcttcataagctgtttttttcataaactaccgtaacaagcttctgaataatacataaaagcttaattatttgcgtaagttgttttgcataagctcaaaaaaatccaatccaaacgggcccttaaatccagaagaatacatatcgggagaaatccaacagatccacttgtatatttcatttgcatattcctcctccggctatcttgaaagcaaccgtccaagatcaactcctgaatctgtcaagtgttgtattttgtctcatttatgattcacacttttttcttttccttgcctataactgcaatacttttctagataatcactaacttaagaattcaggggtttattacaaatgaagccatgaacctagtttgcaagaaaattgacagactcctatgtatttcatccctaccctgttaacatgaaaaaacctaatttaattttatcatatacacctcccaatttcagctcgtaaggtttcagtttgtcctcttttctttttttttctttcttttttaacacacacacacacacacactcttttgtttttgggataaaaatgataactgtaccaaggataaactgtttgtgaatatagttgacgatgttccgagtcatctaaaactatgtaaattattgtaggttaacaaattacgcattgaatcag

SEQ ID NO: 28816 - DNA, 796 bp, Medicago truncatula
  Intron number 1 from transcript Medtr2g014810.1 (locus Med tr2g014810) derived from phytozome v7.0 (chr-ID MtChr2; po s 3900656 to 3901451)
atcacgcatatcacggtgcttcttcccccgacaaggtgcttccttttgcacaatagtttagctacaaacttatttctatccgtaatcgtatatggttttcgaattcatacataaaaatccattttttgattacgttttcagcttttctttaaagtgtttgcaatgctatttattgtgtaaatgcagtgtttttgaggtagtattattaactagtcattgtttcatagcataattatgctaatacttattggtgtttgtttggttctgtggtgacaaaaattgattttaagtgaattgattctggataaaagtgagctgaaagtgaagtgatatatgtttagatacatttatacacaagttagttgaacaatacatttgaatgtaaaaataaattctagaatcaaaagctctaatttttagctttaagttagaatcaattctggaggcaaaatcaattttactcgagagcaacgaaacatatatcaaaatcaattctacacctctagaataaatatcggctcttccaaaagtggaaccaaacatacactaagaagaatgaagggatatcatgagatgcagtacttgagatgtggagttaagggtattactagtttagatgacttgttcaaattaatttttctgcaatttgcagttgttttatgatattaaaatctacgatgtatattgtttgtatactctatggttatttgttttggttaatctcgtgatacgtgagagtcggatgagatgactgaatgcttttaaatacttcagccaagttctcggggatctggtc

SEQ ID NO: 28817 - DNA, 588 bp, Medicago truncatula
  Intron number 2 from transcript Medtr3g151870.1 (locus Med tr3g151870) derived from phytozome v7.0 (chr-ID MtChr3; po s 40357259 to 40357846 reverse strand)
attaaaatcgaagctcagctcatcaattggttgttgtttattcattctgtgcataggaattgaccaatttgagaaagatgtatatagtcactgttattacaggttcatgccatgatttattatggaaccttaaagagtatatacactactacagtgttcgatttagaattcctaactgatgtagaacacggggtgattcaaatttggaattcttcctatgtgaagattagtttttgttgttttttattgtatttgatcgagatgaagccaaaaaggcaatgtttgctgaagaaaaaaaaaaggaagagggttctcagatgggaagtgtgcattcagtaacctaattttctatgcaacaagttgtccaaactccaaagacatgaacttctggcattctaactgccagaagttttaatagctttagaagtttctcttaatagtataataatgtggaatatacaatttgaattttcactttttgttacattcatcaccatatcaaccagaaatgattgcatgatgcgcatgcttaacaaactgatgtgtttttcaggtgaaatctttagtgatatttctggaagcccatac

SEQ ID NO: 28818 - DNA, 961 bp, Medicago truncatula
  Intron number 1 from transcript Medtr1g010050.1 (locus Med tr1g010050) derived from phytozome v7.0 (chr-ID MtChr1; po s 1571481 to 1572441 reverse strand)
aaggtacttatatattcacttttctaaaatttagtttatttactatccctataaatctttatcattatgaatcatactcttttacttattaaaagtttgatcattgaatgttatccccttcacaccttcttcaaatgaaaaaaatgatcattgtatcaattacttttttttaacaattacttcaagaaaccatatattttatgatggtattttattgattttatgatggtactttttataagttgtagatgcttaaattctttaactatttggtagatgtcccatttagttgtttatttcaggacattatttttcaatatcaaattgttgggatgattgatcactagcttatctctaacctaatcatgtttaagtttaccatagagtatttccttgaagaataagaattaatacctatatattgcatattccttttatatttcttttcatctagcttttcctaatttattcttgttcgtacaagataaaatgtcattctaacaaccaaacacaaaagaaagcaaaacagaatgttctttctaaatggtataatttggtgaatatccaattcgagtgggttgttgttagaccaagataatgtgcatgcacaaatccactaactaatgtaataaaaataatttaaaggataaattcttagatttgtgctacaaactgtttatataaagttctttaacttttatttttgaataaaataaagttatttaaattaaatttacactgatctttaccaaatgacatatcaacacatcttctaaaaccactacctagacatagctttcaatctctctttttataattaagataaatataaagtgacttctaaaccctagttctataataatatatcttcaaaataataccattaggttataacaaattattgaacgttatttatgatgtggttattataacccttttaaaatttgattatgacaggaca

SEQ ID NO: 28819 - DNA, 589 bp, Medicago truncatula
  Intron number 1 from transcript Medtr2g047010.1 (locus Med tr2g047010) derived from phytozome v7.0 (chr-ID MtChr2; po s 13245323 to 13245911)
tgctttttgttgaatcggtgtgattaagtgttttcttttacctaaacgcgatcttattattgtttatcatgattaatcattctaatttgtgtcgattcttttatatcattattgaatagctgggttaagtttaatgtgtaacctagctagattgttttttatcaagcttgtgaatatttgatgcttctgataaaggttctgtttgattgcaaaactaggaagctgtttggcatcacgttggtttgtcgcgtcgaaatcacgttgagctactttttttgggtgtaacccttcggttcttaagggaaaaagtgtcttgtaatttggagttcagcggtaaagtttgaccaagaattgctcttctaagaaatcaaactcaggtgagctattgtgattttgcaaaagctatatagtgtttagttttgcaaagttgcgtttgatttggtaacggtaacgatttctgatctcagatctgttgaattttggtactgtggtgattcaccttatgttgaaaaaatttaattgctccttttttgttttgttaatttcttgatctgtatggacaattggattcatatacatataggtgtag

SEQ ID NO: 28820 - DNA, 663 bp, Medicago truncatula
  Intron number 2 from transcript Medtr2g047010.1 (locus Med tr2g047010) derived from phytozome v7.0 (chr-ID MtChr2; po s 13245915 to 13246577)
aatcttgaatattatatgtaaggatctttgctatttttttattttgtaatatattggttttggttatgttgttgatggatctgtcaattttctattaccgatttattcattctgtaatattagcagctcttagttctttgatttggtttatcatgaatcgatagcgcaaatcaataaggaaatttatcattgttctgagttgtttgtataatcattatgttcattttatgttgcttgtttctggtgtgtagagagaatagaaatctgtgtttaatcttttttcttgttttctctgaagttgtgatagcaatgttgttatgtacctaggcatattgggttactgctatcacgcatttgtgaatctcgacttttggatgaagatcagactatttatattttgatcttcattcaatttgatggagtcagaatacaaagtctgatcttcattcaactgccatgatcccttgatcgtgtgtctgcacacttgaatatagatttaggtaatgtaatcctgatgtttgcatgaagtaattttaacttgagatatatttttgaaagtgactggagagtttgcatttgtcaaattatagggaaaacatttagtttgatcctggaaaaacacgcgtctcaaagaataatatgtcagtagagataacaaagagg

SEQ ID NO: 28821 - DNA, 859 bp, Medicago truncatula
  Intron number 1 from transcript Medtr3g067960.1 (locus Med tr3g067960) derived from phytozome v7.0 (chr-ID MtChr3; po s 15717832 to 15718690 reverse strand)
tgggacatcaagtggtacaaggtacgtacgaacatgtcacatacatcttatgcatgcatgtatatgaaaagagatcatatgatatttttaagatgagtgttttttgaacaaccaatttggttgataatttttgtgacaaccataatttataaagaaaaagtaggtatttgcacggaaaccaaaacaatagagagataaagtaaaaataatgtgagtatgagagagaaagttgtcacaaaaattgtcattaaatggatgttcaaataccatttctttatttttaaggcaaaactgtatcaattatcttatatcttataatttaattataatttcaacatagggttgtgtatcaaaatagagaccataaaacttagctctgattaaaagtggttgtaaagtaggtttcaatacattttattcaaagttccttccatttagtttttttcattcccaaaaaacattttaattttttattaagaacttaatttatgtcggacccaaattttttttttttgaaggatgggaccaaacttttagttagtttattattttttgtggtggccgaggtttgaatcttggatcttgcatatattatacattgtctctactaactgagttaagctcaggaagactttagttagtttatttgttattgctccaacatgtttgtgtagttggtcatcaaatcgtaaattttctatagagaatatttcatcacttaaaaccaaaactagagcctctacaatatatattttatttaaatacaatatttatgttgcattaacatttttctactttaactatatgtgaatggtactgtatagtacattaaaagactagtaccagaccattaccatca

SEQ ID NO: 28822 - DNA, 722 bp, Medicago truncatula
  Intron number 1 from transcript Medtr3g127660.1 (locus Med tr3g127660) derived from phytozome v7.0 (chr-ID MtChr3; po s 32435320 to 32436041 reverse strand)
tgctcttgagctcctcaaaacttctgcagctgatagtaagtcaatgcttcatttccctgaattgaattcgtctttgatattatctacttttcctttgtttcattaaacattttataccctttctttcttaatttgttgtaatcctctaaacatatggattaaggtaataattatttgtttactgttgaaaatgctgattaatttcttacctgttactgcactttatctctgaaagtttatgatcttttggatgattcaactgtttctccagatggtatattgtatccaaccgtcgaattttaaatcattgcagcaccctatttaccaggaaacatgtttttttttcttcatagtattcacaaaataaaggatgaagtttttttgcatgttaacattttctatttttttgcactagtcattctgagtctgtttaattcactctaggagatcaatttctgtttgttatatttcttaagcggttgggcttttatgttgcatcactttttacacatcaatgttccgaagatttgaagcttttaggacttgtggttgacggttgtgatgacatctagagggttatttaccaaaagaaagtaagacgggatagcatgttgttcattggttgatttgcaatctgaaacttgcaagttgtgactttcaaataatttatacaattaactttaacagggtacacaaaggaaaggagcagcattgtcgtcatt

SEQ ID NO: 28823 - DNA, 552 bp, Medicago truncatula
  Intron number 2 from transcript Medtr3g115050.1 (locus Med tr3g115050) derived from phytozome v7.0 (chr-ID MtChr3; po s 29239177 to 29239728)
tcattccaaacacttcccttctctcaactacggtggttgcttttcttcccttctattcttcattttcttctttccctcttccctttatgtttcaactatgcattttttaatttctactttcccccgcgccaaggaaatcaaaataagaaagcatttgggttacattgagtagtaacttgggttacttcaatgcacaatgttcaacccaatgatgccaaaactatgggtttttgaagttattattatttgtctattactctaatttgcacaaaatttagcataaatttgaccgatgaatgtcttccaagtgttcttcatcctggatgttttagttctatttaagtaagtacctacctctacctcgtaacccatcaaaccaaaaaatgttttctgttttttacacgttgtactcacagagagtgattgtttgactgagtgacaatgacgaattgcacataggaaaaacactatatttttgtgaagaccataagaaaaacacgaattgcgtgcgagaaatcaatagggtgggagaaggagtcctttgtgtttgat

SEQ ID NO: 28824 - DNA, 385 bp, Medicago truncatula
  Intron number 2 from transcript Medtr1g137960.1 (locus Med tr1g137960) derived from phytozome v7.0 (chr-ID MtChr1; po s 30655837 to 30656221 reverse strand)
tcgaatttttatcactcactgtaagttacgttaccatttaaattgcaacatggttttaaatttttcctttatacactctaacattaccattttgaatttcatgagcaggcttactgatccagagatcaatttctataacagaggctctcctatatttcgagacttaatcaaccttcaattaagcatgttttactttcaccattgggatcatgtaatggaagtgcttcagcattgccccaagcttcaaattcttctttattcttgaaggtttcttatgtttgtggattgtttttgttccttctttactttgactgtagttcacaaatcttatttttgtatatgttttgcagttatcagaggacaaaataaactggaaatacccaaa

SEQ ID NO: 28825 - DNA, 247 bp, Medicago truncatula
  Intron number 1 from transcript Medtr2g121910.1 (locus Med tr2g121910) derived from phytozome v7.0 (chr-ID MtChr2; po s 29034382 to 29034628)
gcaaattagctactgatattactggtgaggacaaaatgtaatttttattggatagacaaaatgttaatgtattggtatgttagtactttttccttcattagggtttgaatctcagtcctttgagtacttaacctcttctaactcaaactagttgaactatactctcgtaatactaatgttatacatataattttgcttcttattgagttgtttctttttgtagctgaaacattgggttttaagagtt

SEQ ID NO: 28826 - DNA, 598 bp, Medicago truncatula
  Intron number 1 from transcript Medtr2g100420.1 (locus Med tr2g100420) derived from phytozome v7.0 (chr-ID MtChr2; po s 23397123 to 23397720)
ttggggtggggattgaattccccgatataactacatcacatagttacaaactcttagtcgttcgatctagatctacgactaatattgcttcactgtatgaaattgactatatactttagatcactcaatttcaaatcaaagaccgaaactaactaatgcgtgaaactacatgatctcatactctagacaatcacgatccatggaggtgttgttaacaaattgtaccatctccccaaattcaattcttcccttatgcgtagaaaattcaaaacctttactacagggatcaactccaaccatgggaacacatcaatttttgtagtcaattttcttgagccagtaagactgcaaagtaaattcttcccttatgaaaagagatttttcatctattgcagacctaccgactcaagagattaatctctacatttacacgcacatcatcgagaaaaaaaataaaattcaaaaccaatattcatatatttttgtagctacattaatttgggccaaatgaaagcccaataaaacaaacacaatgcaaatcttgttgtttctcatgtaaacagtgtgttccattctctcttccctccattcacgctac

SEQ ID NO: 28827 - DNA, 706 bp, Medicago truncatula
  Intron number 3 from transcript Medtr2g071170.1 (locus Med tr2g071170) derived from phytozome v7.0 (chr-ID MtChr2; po s 16323568 to 16324273 reverse strand)
caaggtaaattcttggcctcaatctcacttatttttttcatttatcctatctctttgatgttggattttgactttgatcaataaaatttattcatcaaaaatatattttaaaatagtgtttggatgtctaattgcgaataatttttttgttggtatttatattcgagagagcgttgcttagattataatatattttcactggttatattgattttgtaattgagtttttgagttatagaatactcattatatttttatttatttatttgattttaaaaaaatcaaatagaaaactgaattaaaatgagataaaattgaacgtaaaatgaaataaaattattatattttttaaatatcttttaatttaaatataatagaatatgttccagtcctaatcatgaaccagacagaaaattagaatgggttccatttgatagtttctttttattatattatgttttaaatggttcaaaccataaaaactagtacattttattccattcatttctattgatccaaacattggaggaaaataatggacattataacttatgcttttctttctttcattatccattgttgcactttcgttatttttattttcttttttgaagaaaaattaattaattttgcattgtgcgtgcgtatatgatacaagtttgaatatataaaaaaggagggaggatttttcataagcacaaaagag

SEQ ID NO: 28828 - DNA, 735 bp, Medicago truncatula
  Intron number 1 from transcript Medtr4g005450.2 (locus Med tr4g005450) derived from phytozome v7.0 (chr-ID MtChr4; po s 233679 to 234413)
cattgtaaactttgaaatcttatcttcttcttaatttttttataatcataatcttgaaatatcattctctttttttttattatatattgatacgaaatttcgatcatcatttatcgatgattaatctctatcagagaatctttaagatacataagatagattatcccttttcaaccgaattttcttcgtatacaagagttagaaatcaaatatgtgacccattatttaataagttcaacaacttatctattgacttacctgattttatatacttgcatacattttgtgagattattaaaagaaaaaaacgtatataaacaacttatgacattttttatcttattttcacctcattgtcataaattatccaaaataacttataatatctatcatatacaaaaataatttaagttaactttatcttttgctattaaaataacttacgtaaacttatataagcgcttatcaaaataagtatttatgttataagatgtgaataagtatttatgttataagatgtgaataagttgtttcttctaaaagaactcaatttttttatgatttgaatcatttcattattggtatcaataatttcaaaaaaaatataaatgaaatgaaattattaaagtagtgtttgggtggttaaaatacttacctacttgcaatattttattcttttttggttttattcatttgagagagagagagagagagagagagagagagagagaaagg

SEQ ID NO: 28829 - DNA, 652 bp, Medicago truncatula
  Intron number 2 from transcript Medtr3g151800.1 (locus Med tr3g151800) derived from phytozome v7.0 (chr-ID MtChr3; po s 40327639 to 40328290)
tcaatgttagtttatttcaaagcttaatcactcttgcattatcgctaatcctacaatttttgtaattagttgtatggtaaaactattttacactgtcaagccatgtccattaagcacatttgctaattcacaaagactaatgaaactatcttcaccttctaacagcattttaaatttctattttctttttttactttgaatcagaatgacatttagatatgaattttcatttctaattataataatagagataatgtgaaagctagttagctgaaaacgatggtttgaaaatttgaatatctttttcgtttatagaaaatgcatatttatacaaaaacaccaagacaaactctttgttatgatgcttttttaccacttcttattgaatctgagtccattgttcatttattgaagcttcatatacaaacaaagtgtctacagtagctagctgccgacacaacagagtgaataattatgactgattaaatatctgaaagtaaatgaataataccactcctttcaattttttacatgatgtattgtttaatttttttttgtgatattaaattttgataattggaggaataggatatttttttactggttttttgtgttaggaggagattgagattgataccagggttctaagact

SEQ ID NO: 28830 - DNA, 669 bp, Medicago truncatula
  Intron number 1 from transcript Medtr3g123400.1 (locus Med tr3g123400) derived from phytozome v7.0 (chr-ID MtChr3; po s 30955566 to 30956234)
acattgttcctttcattcttggtcagctttttgtgtacaccaagacttttgagaaaacaccgattgataataatgtttgctcactttcgtcaaaaataaataaatatgtttgctcgctcatgtgagtcatgtcactttgacatttatgacattataacatgtgaccgtcaacatatttagatagggtagttgtttcactcaagaattcagttcacacacttatagttacactaacgaagcttctttcgggagagttgattgaagaggaataaaatagatattatccatcgaaaaacattgattgttatcttttatagacataactattacaacttaactaactttttattagttagttgcacacatcatgcgatgtttctccatcttcttggtattgtttattctaaaatacatggtgagaaatttggtattatgttcctacaaaccagtcccataaatttaagcccttgttgattctctcaactcatcctaagatttcttaggtgatatgcaaagtactaaagagtgatatagtaactcaaacaactccttcaagtcatttaggacttcctccatttagaagtggaaaattacgagtagttacctcttatttcgatgaattttagtgttgcagaaggatcttgatttagttcaacatcttttagttat

SEQ ID NO: 28831 - DNA, 941 bp, Medicago truncatula
  Intron number 1 from transcript Medtr2g130060.1 (locus Med tr2g130060) derived from phytozome v7.0 (chr-ID MtChr2; po s 31609557 to 31610497)
cgtcttacctccgctcaaacatccatacttaaaaagtaagataacccattttgttaacggtaatttcttttaataactatttttatgagttttattccaattttaattttgaaggagaaatgagttcacttttgaattgaatactttgaaactattattatttatcaaccaaggccatcacttttgttttggttggtggtacaatcaagttgaccactctaagtgatactttttttttaccaacagtgatacttaactcgacatatacacgcttttgataattatgctagcaactagcaatttttaagttttgctaatagtaacaactagcaatttcataaagcctctttttttaatatattatttaacaaaacctttttatttagtttttaattaagtttcatgcttcttttttaattgatttaaaagatttttttcgttgttatgaataatttgttttaattttcctttgtttggcgcttaattcctttgatgacgctactttttaatttactaagtatatttaatatatttttcgaagaattaatttgtatggttgaatttaagatcatgaatagctcgattccccattttagtttaattttatcgtttttaataattttaaactttgaactctttgcttaaacatactgtttaaaaaaataggaaaaagggggatatagaatgaaatatggggtcaatctatattccttgaactatctttcattataattctattttctgtgaaattttaacccacatgttattcgtgtgactaaggtaaacatttttactttaactcattgactgaaccacttattaaaaaggctaaatctaattaatttatttgttgtctaatttatttattcaattacataaacaagtcattaaactcatctatcaactaattagaaatttatgttttctcttgatgaagtttc

SEQ ID NO: 28832 - DNA, 725 bp, Medicago truncatula
  Intron number 1 from transcript Medtr3g030390.1 (locus Med tr3g030390) derived from phytozome v7.0 (chr-ID MtChr3; po s 8216211 to 8216935 reverse strand)
tccacaagaagcttcacgaagaccttgttgatgatagacaaaaggctagaacattcttgaaagcatgataacaataagatttccgacacgggtttcatttccaatgctaattggtcaatgtgtttggaaacatgggagtgaaaatcatgtaacgatgaaaatgataattcttcattaggttgagcaaattaatatttttagccacaataccatttatttttaattcacaaaatttaatttcatgtgattcataaaaaaaaaaattgacaaaatatgtgattcataaattaaaaagtataattttcgtaaaatacactaaactcatgtataattttaaaaagaaaatattaatttggtcgttagatcaagatccgagaattcaaatatgttttaaatcaggaccatcggatcaagaccggatggtcagatctaataaacaagggaatcgctttctcggttagtaaataaataagcagatggcacattggcttggcttgacctagttgtgtggttgacggcacagaaagcacattggctttgcaaacgtaaggacttatgtgtgactaaaatttacaaatctggacttatgagtgaccaaaataacttcaaatcaatttgttacaaacctgaattttaaagacccatggtgtaatttatcctagattatatggtttttattttatttatttacttttttttgcactagttcctaatcaagaaaatcg

SEQ ID NO: 28833 - DNA, 381 bp, Medicago truncatula
  Intron number 1 from transcript Medtr2g006610.1 (locus Med tr2g006610) derived from phytozome v7.0 (chr-ID MtChr2; po s 704518 to 704898)
ctgaaattcgtagacaggtgtttttacaattcctttctaaaaaaaattaactttgcgtgtttcgtttgtttggtgagaaagtttcggaacttcaacttcaatattcaacttttctccttaattacatagttcacacgtgttattattactttgattttcaaccacaaaacagagtaattactaattagagattaatctctatttatttacagagtttttatttttgattatttatttattgttatttttatttttcatttgcgtatgctttgatagtttcttcttttttaaggcaaattaattctttgtttttcgttgttgatgttttcttcttctttaagttttttattaaagtcttgttctattgagtgcagaagtact

SEQ ID NO: 28834 - DNA, 862 bp, Medicago truncatula
  Intron number 2 from transcript Medtr2g006610.1 (locus Med tr2g006610) derived from phytozome v7.0 (chr-ID MtChr2; po s 704982 to 705843)
ttagaggccaagttgcaagccgctgaacagaagaggtgggttccatgcatcagttttgctcttatgaagcactgacacggacatgttgacactagtaaaatttgaaataatggattaatcgaatgtaattacacatgttggtgtcggatactgacatgtgtaggacatgggacacactttccatcagaagtgtctggtgctacggttatgcatctatttaaatataagcactaaatgcattttacatttatgtctgtacgtacaagtgctctaagtttgcatttgaattcttttaaagaaagtatcaaattatgagataagttttagacctattttgggattcaaatgcacttttttctttggttaaaacataattagggaggcattatctgtgtcttatctgatcataaaatagtaattttttggtgttctagatggaaattgactgtcagtccttttctttatcattggacaattatgtttatttgataaaactaataacttttccatttatttatcagcttgtacaagttgtttgttttacatccttttgtttgagaagtttagataatgtttataaacttgatcacaaacttctgaaatttgatggtcaaatcaattgaaatacagtaatccaatcatagaaaaatttaattcttttcagttgcagttatttaacatgatcttatttttgtatctgattgtttttggtatgctttatctgttccattgattcccaaagtatgtaagacttgttttttttttttttccttccaattgtgacttgtgctacattttttacaatcgaaatgattttcttttctgctttcctgataggttgagccttttaacgaaggcccag

SEQ ID NO: 28835 - DNA, 926 bp, Medicago truncatula
  Intron number 1 from transcript Medtr1g020150.1 (locus Med tr1g020150) derived from phytozome v7.0 (chr-ID MtChr1; po s 4347590 to 4348515)
atttcctttcgagagataggtaagaaagaaactactgatactggttcatctgaggttttatagatttttgtattttgtttttgttcatcttcatagttgaagtgtgggatatagtgcaatgtttagtttttgtctgttcgatttccttatgcggcaatggatatttgtactacataacaatttgtgttatgccttcatcgtcgtttggagcaaaaaaatatgtactatattttaaattaaaattctttgaaatgattttttttctttccatttcctggctccttatgctgctgattgttgcttctgtgagactattaagttttttatatgaatgctgaaatatcatgtttctagacagaaaacagaatacttttataattggagaacttatatgatggaaacaagatttttttattgaaatctactaaataaatttcgcatcttctaccgtataagttgtctgatgaacggaaagtgaactcttgaactaaaatttgaaatctactaaagaaaattcacatcttttctacgtgttttattcctgacagaacctggatgccaaatcttatcacaaatcagtttctgtgtcgattaacctccttaacgatacaagtctacttctacaactaaacacattgtgtattaccatagattgcaaataacattcattccattcatggttaacttctatttttaataaacttggaatgaaactgatgaagcctcattcggaacaaagtgaccagtcttttataatattgaatgcataaacaatttaaacttgaaggtaaggtaatctaagggtatacctgttttataaaattgaacaaaaataatgtaatatttaattattgattttttttgctaataactcattatattgtcttccagggaaagtgaaggttcgtttcagtgtggtaattact

SEQ ID NO: 28836 - DNA, 761 bp, Medicago truncatula
  Intron number 1 from transcript Medtr1g078990.1 (locus Med tr1g078990) derived from phytozome v7.0 (chr-ID MtChr1; po s 15700437 to 15701197)
cctctttctattgcttctcctacattttaatttgggtacatttcctaactctttttcctcaaatactttgtggccattatttaagacatgtgacaatttatacatatataagtatagtatgcattatcatgtgaaaaatatacatgcaactttcatgagctccatgttattattcttcactatcttatatttttttaatggaaggtaacttgttcttataaaatcagtttgtaaggcttgttagattagatgtatcttcttttatacactattttcaagtgttctcttttcaatgtttattttcaaaacactccctcatggcctcacatcatatactacaaggtcaatgttatctaattatatttttggattagacctaactaattaattctaacaaattctcattttgatatcatattatgttattttgaattgaatattattttttcattaaaatgcaagggtgtcatagaaggatccgtgtttcccactttggaaaattctatacgtattaatttgtctaagtcacttaatctgatctatttaactaatattagacaactcaatttctgattttgatatacaaatcaagtctacaatataaagtttatgtgaatgcataaaatcctaatctgttatggacacgttatctatttctttaattgtatttttgtagatattgtaccatttcttctttcattattaatgtcatgtatttatgcatagggataagccaactacaggtaaactactactccaag

SEQ ID NO: 28837 - DNA, 751 bp, Medicago truncatula
  Intron number 1 from transcript Medtr3g159790.1 (locus Med tr3g159790) derived from phytozome v7.0 (chr-ID MtChr3; po s 41923606 to 41924356 reverse strand)
cacatcgtccaaagtgatcgtcatctccccgacaggtagatgaaaactactggtctccgtgtgccacctctcgcacagagcacataccatggcatgggtcacaatcgaatactcgttgtatatcaaatcatgtaagccagacgcctccacaggatcccaattaataacttttttttttgcacaaactgataataacttaaaaggcctcattttagatttcgccttgagcatcaatatgtgttgggccggccccgatgaccataaaagaaaacacaaataaaattaatcaaacatgtcatgatatatatatatatatatatatatatatagagaggggggggggggggggaggggatcaattcactctaagaaaaaaaagtaaggtgcaagttagcaagttgcacccacctagaattattataacaaagtttccaactttctatcggtgagtaattgattcattatcataaacaattttttgaccattttttttttaagaagctaaatttgcccatccaaattgacactggaccaaattaaaatatagatctgctcagttacactattaggtgaaattagatcatcaaatgggttgaaaacgatcaagagagagatcatgaagaacaaagattaaaaaacacaacattgtcttgaaattggatctggaatggtttctttgatggggtttccgaccgcaaacgtgtggtggaatgtagcaacagcggacttcgcataggaagggttgggtcac

SEQ ID NO: 28838 - DNA, 814 bp, Medicago truncatula
  Intron number 1 from transcript Medtr3g107170.1 (locus Med tr3g107170) derived from phytozome v7.0 (chr-ID MtChr3; po s 27184787 to 27185600 reverse strand)
aagaagaagagaaagaagaagattacacctaccaagtaatatatattttattttctttttaattcctcttgttgatctgttttagtttatcacttcttatttcattcttctcatgaacattaagattctagcataaatacatgttggaataattgattaattaattaatttgattagcataactaagatctagcctccatgagtcatcataattaatatattaattattaacaacaaccttaatcattacaatttgtgatatcattaccaataacatactacaacacatccccgtaatttaatttgttaagaaaccaaagtgagaaacacaacatgatgataaatagaacagaatggaagaggacaaatactaaagaacagtagcaaacaaggacctcctgtgctgtggatttttatgatcaaattcaaagccataatcaccattgttgtctcaagttaattaaagtttcttacaaaagattccatttcaattttaggtaccaaaatgtgccctaaatttaaaagtaaaatttcaaataaattgacatcttagctaccctaccattcaatttcaatctacattaatagcttgtggaaggccttttaagtctgagttactaaacaagtcttaatattgcattgaacttctttttttttttttttttttacaaattaatgttgcattgaactttgtttatatcattatgtacttaatcatatgaaacatttaatcattttgatttatatactgtgagtctgttattactatttggtccacagtttattgttttaggggatcacggtgtaagtatat

SEQ ID NO: 28839 - DNA, 637 bp, Medicago truncatula
  Intron number 1 from transcript Medtr2g091340.1 (locus Med tr2g091340) derived from phytozome v7.0 (chr-ID MtChr2; po s 20582937 to 20583573 reverse strand)
acaattaccatgtaagtatatacataatacaaataacaattctctccttatatagagatgtttaaagacatttctttttagttaagaagcatagtggctagaaattcaattcttaacgtgaataaatgaggaatctgaggtttaaacttcgatcattggatatatactgaaatgtctctgccaacttatctatgttcacagggataaatacattttttctttctttctagtaagcatagttttagtgtttgcattaaaagagtatcaccgaaaagattacccagcttcgctcacgaccaggcggctctacgttttcacatgcactatgatactaaaaatttattaattttcatatcaaaagaagaattgttgatttgtagtcgacttagaggccggtgtagtgctaaacaagagattgaaaatttaaaaaatttgtagtcgaccaggtagcaaagtacacatcagtgactcatggtttgttgaatttctaaatcaatttctaacacgttaaaaatttatttagcaaccagtttaattaagatactaatttgggatcaatagattttatttataatcattggacagtatacatgaatgacgaatataactatatttattgttaatttctcttcagaaa

SEQ ID NO: 28840 - DNA, 824 bp, Medicago truncatula
  Intron number 1 from transcript Medtr3g162140.1 (locus Med tr3g162140) derived from phytozome v7.0 (chr-ID MtChr3; po s 42289429 to 42290252)
acttggagagtaggtatgcttactttcaaatataacacctgttgctaagtacttcaaggtgatgtaggtgggtgcttttagaaactctgtgtaataagttattgtagtattattgacataggaaactgagaaaggacaaggttagttttgaattatgctctttacctaaattgattcgctcatttccaaagtaaatgactgaaatatccctatgtatattaactcacgctagtgcaaattataatgtaagttaacatacgttgcatgcaaaaagaaacacattaaaacccagcgtgagttaactctagatttttggctctaaaaatgtatcattaattgctaatttccctctaaaagctatgttaacctgaaaatctaattatttattaaaaaaaaaaaaagagaaattagtgtgatttgttgaagtgtgttgtataccgtgttttatagcctttacatattcttatcatttgaatttcaaatacaaaggttacagtaactataaacttcaattaatgtcaccattgttatcctccactaagtctggcataattcccatgcaggttcacgttttacaacaccagaacttttgggtataaatagtcaagctgacactttgcgtcctcgcaacctatttcgcagcagatagttaacggccatacccacaactgagactttgctctcataccattgcttgactggtaaatgcaaatttaagcaaagttgtttcccatgttgtcttccttataatgctattacttcatataactaatgttgtcttcatggcagacaccttggacaaggcctctacatcactcaagttg

SEQ ID NO: 28841 - DNA, 746 bp, Medicago truncatula
  Intron number 3 from transcript Medtr2g007140.1 (locus Med tr2g007140) derived from phytozome v7.0 (chr-ID MtChr2; po s 986367 to 987112 reverse strand)
tcactcttttggtaggtttcctatgtatataaactgaatggtcgatgtatctgcagctattggtagtctagaattgttctgttgagttgtacaaacatctagttatgttactttgagattctggttgataatacaagtttatagacaggattcatatcttggaaaatattcaaagtacagaggatactctgttgaaatttcagtggatatcattttaaatgaatttcgatttaaaaattgtttaaattatagtttgttaagtgtcgtcaataggcttgccggactaggatgttctagttcgtgcgccggtcacgattgtgaattttgggtcgtgacaacacatccctaaatttttgttattaatatgttagagataataggtctagttagataaaaagagaaaatcaaatgaaaattaacttaattgataaagagttgattaatcgtaaggtcgtagattcaactcccgtcaacttgaagatctatttagtagatgatatatgtaagtgttctttgaaatttagagtcggatctactattaaaaaatagagaaaaataaatttatgctattattaaaataaaagagcatagaaaacattctttcataaaaaaaaatatagagaaaatatagtgttattgattttcagtcaaaaataaaataaaataattgatttagctcacgagattaacaaataactttccgatgtgaagaacacaagggagggaagctcacaccaacaagaggc

SEQ ID NO: 28842 - DNA, 865 bp, Medicago truncatula
  Intron number 1 from transcript Medtr1g023670.1 (locus Med tr1g023670) derived from phytozome v7.0 (chr-ID MtChr1; po s 5325711 to 5326575)
tccattgctggcactggtatgttataagctcaattgggagtatattactctattaatagttattcctttattatactctactcattttaaatttttgatggttggtttgagggtgagatgttttttagggaaaataatcatagtttaagatttttttccttaaaaaaactattcatagtttaagatttttgtacaccgattaaaagattatttaatttgattgatgtaatttatttgtaccaataccttcttttttttttttataatttattactctaaataagatttttaaatagaatattgaactacaaaaaattatactaattaaattagatcactgaattttagtaatttgtaattagaagtagaacctaaagataaatttatttacaagttgaagtatctaattcaaattatttataagtttgtaaggatctaattaaaaatcatttagaagtttagggacttgattaaaagtttaggatcttggccctattttttgctttgttacctttgttattccgatgtatcttgatactcttacatttagtttttttaatactttttgtgctgaatttttcaaactttcagtaatatatttcattttagtttcttcaaaaaataaaaaagttcaggatctaattaaatatttttgacaaattcaatgactccattacttcatatttttttcctttcattcaatgatgacctatttaaaaattcacaaatatactatagttcatagacctaaaagatcaactagtatatttttatatgttactagttttattttggacatatagattcaacaattgatgatatatataatacatgaatcagattcaggccgtttctgttcctccaa

SEQ ID NO: 28843 - DNA, 647 bp, Medicago truncatula
  Intron number 1 from transcript Medtr2g041140.1 (locus Med tr2g041140) derived from phytozome v7.0 (chr-ID MtChr2; po s 11268834 to 11269480)
ctagtgtgcaaaccactacggtgagatgcatggatcatgatcacataaaactcttagagcctgtttgattcacttctcaaaatctgttttttagtttttaaaaattaaaaactacaaaattttttttgcaaactattttataattataacatgtaatttttaaaactaatttcagtttttttgttttaattttagagtttttgaaaagtttaaaaaggcggactagtgttaagttttcattaatggcacctttggtaattataacaacattttttcgttgccagcattttttttaaacaagaatgtaaatcatacatactttagaaaaaaatagtctctagccatacatttttcttgaataaacaaggcataaacttcattttacaccgtagaaaaatatttgggaccaacatttttcaaaattgtttgtttaatgatttccaactttctctaattcatcttacactaaattgttttaccattttgaaataattcagataataaaattttattccaataattttatttatttatctgctactatttgaattatcacatagtgtttggattcttttcacgtattgctaaacattggtttttgttcaattccagttccaattcaagcatcaagtaacaattttgtgggt

SEQ ID NO: 28844 - DNA, 983 bp, Medicago truncatula
  Intron number 1 from transcript Medtr3g113780.1 (locus Med tr3g113780) derived from phytozome v7.0 (chr-ID MtChr3; po s 28654055 to 28655037 reverse strand)
attctcctctccaaaggttagttctttaatatccaatgttttttttttttttttttttctgtatcgatgtccaatgttaactattattagtcaattgaagttgtatttgtatttgtatttgaatttaggttagtttgagtagcataagtaattatgtgactgtgtatacgctatttctatgttaaactgtttagataagttataagttattttcataagctattccaaccgagttatagaaataaggcgtaaaatgtttatggacattccataaggtctctcaaaatgtctactgtatgtttggttccactcttagaattgattttgccattttggttgttgttgaggataattgattctacatgaagctaggatttgtagcttttaattatagaattgattttcatacagttcaactcactttttacatgaatgtatccaaacacataccacttttagtccggaactaaaatcaattctacaaaatcaattctatcaaaattaattctccacaccgcacggccaaacatacgcttaatgtatgtttggtttcacttctggagggaccaaaattggattctagagatgtagaactgtttctcacatgtttgatggctctcgagtagaattgattttgcctcaagaattgattctacttggagctagaaattcgagcttttgattctagaattgattttaacactcaaatattattgttcaactcacttttatatccaaacataaagcactttatcttcaactcacttttagttagaatcaatccactcaaaatcaattttgtggatgtgaaccatacatacacttattgttcaattcactcactagtgcttatattagataaattcaaataattcaaattaaacaagctacaattttagtcaaaataaaacatgtttctatgtatattgatgagttttgaaatttgtttttgtgtagtgtaaaaagttgtgctgttggaagag

SEQ ID NO: 28845 - DNA, 508 bp, Medicago truncatula
  Intron number 2 from transcript Medtr1g083470.2 (locus Med tr1g083470) derived from phytozome v7.0 (chr-ID MtChr1; po s 16417527 to 16418034 reverse strand)
cagcgatctcaagttaaccaggtactctacctttctacgatcaacttataattcacatggatttgtttcattaggtcttttactttttatcgagcgagtcctaatattaattgttaatgtgttacatttggtttcttgctaaaaaattggcaaaatatattcatggaaaaaattcatttttaaaaaaaattcctgaaatttctaaatgaagaaaatattgactgtgatttggtttgaaaaaagataatgtattcttggcattttggagtccaactacatgtgattcactttgaatttgatagacaataatatcaagtaagaatttaaaagttaggaacatcataacatcaaggattgcctgtccatactaaaacgtggtagagtcattccatactaaaaaactatgtccatactaaaacgtggtagaatcattccattttaacaaaaaactatgttctaattaccaacatatgttgtattttaggttcataaggaacttcaggaaaca

SEQ ID NO: 28846 - DNA, 572 bp, Medicago truncatula
  Intron number 3 from transcript Medtr1g071340.1 (locus Med tr1g071340) derived from phytozome v7.0 (chr-ID MtChr1; po s 14267798 to 14268369)
gactcggtggaactttgaaggcaaaccaagaggccgtaaggctgcacctctttcctttctctttgagggttagagctagtgcttggtttcattcattacaaattggttctatcacttcatgggaccaaatgaggaaggcattcctttcccaattctttcccctgcaggagagagaatagtggatctgcagcttcatgcccatgcttataagagatttggttgattctgatcaaaggacatgtctatctctgagcaagagctccttttgctttgcttgctaacttttcaccaactacattgctcatagttagaagcttatgcagagatgaacattctgaccttcagaatgttcctttttttttcttactttagaatgatttgtgagacttacttttgatgtaatcaatccaaatagtaaagacacaactaaagtgcagtaattgtaatttctaggacaatatcctctttggaatattcctagtacttcaagtgtttatagtcttgaatgaaccttgaagacctttttgacattattcttgtaaatgcctttattgcttgattgatccatgtag

SEQ ID NO: 28847 - DNA, 933 bp, Medicago truncatula
  Intron number 1 from transcript Medtr2g121140.1 (locus Med tr2g121140) derived from phytozome v7.0 (chr-ID MtChr2; po s 28667701 to 28668633 reverse strand)
cgttatctgccgaaattgaaccactgtccacccaagtaattttcatagcttgctctatcggcggtaatgaggtgacgattatactatctttgtgtctggtcatcaatgagagttattgttttgcgctttcctttcagaattgttcttaacacctcgttcgggaaatgataaacaggaaaataactacaatattagtttaatgcatatttacatggataagatgtatgcgaatatagttacatataatttataaaataaaggtaacattactgattttaagctaaagaaaatgtagcatgacttctaatttatcttcctattatcttcctataaagtctagataaatgcatgcatgtacattatatgtaccccgttgaccaattaacattgttgaaacaaatgtaaattaagcatcacttccgcatgtgcatatatagctgacaccatttgacattgatgtctttgaacatttggtgcaactctcataatacaatccaaactggttaggattgaatttagttgttttccaaatagtgatgcagtatgtttcctaacacaaattatgcacatgaaataaagactaatgcaatatgtatttttaatttgtgcgtaaaaaactcaaagcatgtttgtgcataaaaaaagcagacattgactaagtttataaattcaacaattggcctaacttgagacagtttggaaaaattgttgtacgaagtacgttgagaagaagtcgaactctgacttaagttctaactgaagctttgactctgagcttaagaagtgttacggtcacaacaacaattcaagaaacatggtaaaaaacaatcaaatcggattgtgaaataataagttactctaacactgtatcgtgaaatcataatgcaaacttactaagttttaaacttctcaacaaccggatgatgtaggttg

SEQ ID NO: 28848 - DNA, 423 bp, Medicago truncatula
  Intron number 1 from transcript Medtr1g087350.1 (locus Med tr1g087350) derived from phytozome v7.0 (chr-ID MtChr1; po s 17585909 to 17586331 reverse strand)
tggcttttagctcttcatctttcatctcttacaaggtctttccattaagcttacactaacacaaaaaatagttctatctttatagcaattaattgaataaatagaaatatagtttctttttttttagattgatactaacacaaatttacatctttgatcttcttgattcagaaagaacacttgggttactttgtttttccttcatcatttccatgctcctttatcactaatatgaaatgcaagaaaacaatatcaaagaatattgtttctttggtatcaccggtgaagaacaaacgcaacccttcagcaactggctcagtttggttcaactcttatacactctcttctttttttagtttaagcctcaaattttagttctagtgatgatcttgttttgttgattcactgtagagtaaaactcca

SEQ ID NO: 28849 - DNA, 800 bp, Medicago truncatula
  Intron number 1 from transcript Medtr3g138120.1 (locus Med tr3g138120) derived from phytozome v7.0 (chr-ID MtChr3; po s 35226408 to 35227207)
ctgctccttcttaccgctccgccggagcttctcaggtttctccagtcctttcactgtttccctaatttcatttttagagcgttgcttcaattatatagtttagttaacaagttgattttgttgttaccgattaatcttgaaattcataagcaatgtataaaatcagtgcagggggctctcttgtgctgttatttttttcccctttccttagttgcatatagaagcatcatgtttacctcctttggtttttagtgtggtgtttcttttctttggggtggtggtttatggtgttcggtctatatgcggcacttttgtattctatttctttctgttttttttttttgcgagcggtacagtttttgtacttttcgacttgaataatattagccgattcaaaaaaatgtataaaatcagtctcctttaattttgcaagctgcatcctaatcagacagttgaattcattaagaattcttgttctgatataattcagctaatttatttttttatagtagaataaaattggcaaataagtttcccttaatagacatttgatatgctgtggtgttggtttgaatccgcagctctccacttcttagcacttaaggtgtgtgagtttcgcctccagggtcactagaacaaaataaaatgacaaataagttaacagtgaagggttgagcatagaatacggcattttaagagtatatttcagtgcaagttgatgatatgtttttcattctggttcactaatgtatattctctgtatttaatttaatcagatatcacagacggagttcacagaa

SEQ ID NO: 28850 - DNA, 935 bp, Medicago truncatula
  Intron number 1 from transcript Medtr2g008400.1 (locus Med tr2g008400) derived from phytozome v7.0 (chr-ID MtChr2; po s 1549137 to 1550071 reverse strand)
ctttcaatacttcactttttcaagccattggaagtgtgagttttcttttcttcttctttttatttatttgtttgggagcgatgcaattagtattaatcagacaacatggtccgagaaaaaaagtgattatatcgtattgaaaatcgataatttaattcattttttgtggaacacataaagaagtcttttttttttttttttatttctttcttggtagtagcttctcaaaaactgggaaaaggtgatgtttttcaaccttttatggaataaagacataaaaagttgttaattttattcattggagttggtggattttttttttgtttttgaaattttcagatattggttagattttgaatgtgaaatgtcatttaaaagaagtaaccatcatggcatgccacgttcaagggttggatctctagtttcaaaaatggagttgagaggatattagttgttgttgaattttgtaggtttgagtattaatagtaggtggtttagcaatgaggttaaatgtattagttagtgattaaaggaagtagatggtggtagttacatggttgaattttgtttatttttcatcatcctttctttaatgcttatagcataatttagcataaaagctaaagccttttaggtacaaatgttaaattgagcaatacaataataaatgaaacaaagatatgggtgagttctcagtttgaacttgccaaattagtactgtatctttttccagcttgcatattgaagcaaaagtgaacaattaattgctttaaccaatgaaaaagccaagttcatttattttgtagcagaagtatatactttgtcataattatcaagtactaaaagttaaggttatagactaaataaacttacaaaaataaaagggtttaaagtggtgttaagggctaatttatggtaatttcaggtggtttcaa

SEQ ID NO: 28851 - DNA, 956 bp, Medicago truncatula
  Intron number 2 from transcript Medtr3g009020.1 (locus Med tr3g009020) derived from phytozome v7.0 (chr-ID MtChr3; po s 1238332 to 1239287 reverse strand)
caaaaccaaatttaagcgtcttaagggtatgcatatatatgacatattaagtatatttaatcaagtgatagttttgaaattgattacttgttttttttggtcaagtgattacttgttactctatacttttctttttactttttgcttcaagattatttacatataaaaaattaataaattttgttactttgataaaattattttttttattttctttttggtcaaactatttatcttttttctataaactcttaataatttattatctcattctactttttcttttgacaaaatctcattctacctattttgctctttgtaataaatactttttttttaaatacttaaatgtattaatgatagaataacaatcaaaatgttggattaaactttaaaaatgacaagtaaataagaacaccactttttctacaaaagatacaagtaaaagggaaccaagagattttttttatctgcctctatttttaatattgtattttttatgataggccggttcaactttgaatctcttgtaaagaatataagagaagtattgacatcatccactctattttttctttctaatattcactttttatgggatgaaataatgtgacttccacaattttgcaagtatgcaccacataaagtagtggactccatatgtacaaagagtaagagactaaaagtgttagaatgattattgttgttagcactttcaagagtgagtataaatacttcattataaagtcttgtaaaatcaaaccatcttcattatatatatctaaggacaattgaaagacaattaaatatgtttggattttaaaacactcattaatttggaacaaaaacaaaatgataaaacaaccaaaaaaatatatgaaatggaggtactccttttgtttttcaattgaccgggtgtggtatgagttttgaagggtgtgctagagttgaaggag

SEQ ID NO: 28852 - DNA, 706 bp, Medicago truncatula
  Intron number 1 from transcript Medtr3g009020.1 (locus Med tr3g009020) derived from phytozome v7.0 (chr-ID MtChr3; po s 1239436 to 1240141 reverse strand)
ctgtaagtaataccaagtttatatatatcatctcttgcatatatacatagactagtacatcaaatacacaaatgaatttaactttcaattttggcaaaaatatttttgatgtaaaaatatatatatattcaatgttggcatcgatctaactttgaatgacaaaattatagacaatttttatgtaaattttcttcattaattcatttttttcttctaatattacagtgaaatacattgttatttaactaaatgcttatatacagttttagtctcttatttttcaaattcacaatttcaattctcctatgttacttttcacgaatttggtctccatacatattttttatgtgatttttgtcgtcatagttttttaatcacacttttgaaccattaatttcggaggtttttttgactgaaaagggaccaaaagtgtaacaaatcgagaaactataaaagtgtaattaaaaatgcaaggactaaaacaatgaaaaggtatatgtttagagaccaaattagtaaaaagtagaataatcgaaccaaaatcgtaaaattgagaaataaagggaacaccaaaaatgtatttaaaccttaagtttaatatatgcatgcacatataactcatatagaaaaacatgtaaacaaccaaaggatgtatacttatactgatgtggtttatttatacagagaacagatttgcaagagttag

SEQ ID NO: 28853 - DNA, 927 bp, Medicago truncatula
  Intron number 2 from transcript CU179634_20.1 (locus CU179 634_20) derived from phytozome v7.0 (chr-ID CU179634; pos 80013 to 80939 reverse strand)
tgtgtgccgaggggtatgtttatggctatgtttatggttttaaggttgtgtggtgcggttagatgtggagctgattgaagtaggctttttaaaaattaatgtggagtgggacgggttgcaagtatatgtaattttatgtgaattcaaacttatttttagtttttacatgttataagagtgatagaacattatttattaagataatttcttttaagctactaaaatatttaaaataataaataaaaatggtttaataaaaataataaaatttcttaccaatttcccagttgacctcttaaaaataatttttaggccaactacataaacaaattcctaaacttgttgggtttttcctctcatgtacctcaactacgtcatttttcaattgaatcattcaaccacccataatttgtttctttaaaacactgttggttgattttgatcagcttttctattgtaaatgtcttcaattgtgttcgaattgtaataattttgattgaaggaatgaagactaactgtgttagtctcatttgttttctaatgtgttcaaatgactcaagtaaaacataattattctcaaacattttcactttcaattggactaattatttgtggaacaacatatgtatcctctatcaatacccctcacaaatctgatttcacatcagacaacagtgtttgattaaacagaacaaattatgggagttcaattattcaataggaaaatgacgtagttaaggtacctgaggaaaaaaacctaataagtttagggatctgcttctgtatttggcctaaattttaaattactatcctattaaattaatacaacttaatgaaaagataaatttatttttatgaattttatcttagtatcaaatataattagaaaaagaaaatattaaaaaaattatgggaggcaggttgaaa

SEQ ID NO: 28854 - DNA, 632 bp, Medicago truncatula
  Intron number 3 from transcript Medtr3g043490.1 (locus Med tr3g043490) derived from phytozome v7.0 (chr-ID MtChr3; po s 11852360 to 11852991 reverse strand)
ataaagtcttgggtggtgttgtttgttgtccaaaggtataaaatttctcctgttctcgatcaaattgattttgctgcactaggtaaataagtgcaggctttatttcaaatttaatatcctcaaccgttgggtacacaatagtatcgtacggctcatctgaaaatgtgattgcatactctttgagagcacgtttctcagccatatcgttattactgtgtgtttctttgagccatccctgaaatcaaagcggttaaagataaaaaataaaaaataataataaaaataaaataaaataaaataaggagaaagggagagaggtagattttatatataaatatgtatatatatatatatatatatatatatatatatatatattttatatatagagagagagagagattttatatataaatatatatatatatatttttgttttttatatatttgttttttttagagagagagagagagagataaatataaaaaataaaaaagataagaaaaagaaataaaatatatattttttttttatatatatatatatatatatatatatattttatttacttaaataaattttttatttttttttagactaaacactattgaaaagttaatcaaattacaat

SEQ ID NO: 28855 - DNA, 453 bp, Medicago truncatula; identical to SEQ ID NO: 28366
  Intron number 2 from transcript Medtr3g142820.1 (locus Med tr3g142820) derived from phytozome v7.0 (chr-ID MtChr3; po s 36693742 to 36694194 reverse strand)

SEQ ID NO: 28856 - DNA, 915 bp, Medicago truncatula
  Intron number 2 from transcript Medtr2g018490.1 (locus Med tr2g018490) derived from phytozome v7.0 (chr-ID MtChr2; po s 4898242 to 4899156 reverse strand)
ttgaaggaaagaagtaagtaacaacttttaatgtcttaagataattgcatacaagggagctattcttgttgttgaattagttgggagagtgagaaatacatatttgatagaataattaacaatctacttcagaaagaaatagaaaagtgttctgtatgtagcttgttctgttttttgtttcttggtttggtcattgctactagaggacattttaagttcttcaaattctatgtttgcacaagtctcctcctttttaatctcactatttctaatgtttcagaggcccctactttaatttgttaaatttagactatcagttttaatcaaaaaacgtctgtgtttctagtgtttttttaatccagcaattgatttgaagttttatattaagtgcattggactaatcaaatactttttgagtatttttatcaggacttttgacaatatcaaattcaaactcgagttgttataatgtataaatgtcgtcaaagtagtttagttaatgatattgaagcatttcatatgattcatgctgtgcatagagataatgtttcagatcattttgctgtttattagctaatggatatgagacaaaaagttatgtttgaaaagatcaaattagaagaagtgtttttgtagttggcatttatttacatctttttgtcttgttgaattaactgctggttaaacaaaaaacctttattttgtacttcaatcaacgtcctgtggaagtatgtttcaagttatctgctctgatagatcatgtgagatcttaattgaagaatgcacctagcaatcatgggcttggttcaagattgatagaattcatatgaaaaaaaatgtgaaaaacaaaactccatatgcatccattgaaatatttctgatagtgaatgattgctccttgtaggttgggaattg

SEQ ID NO: 28857 - DNA, 709 bp, Medicago truncatula
  Intron number 1 from transcript Medtr3g086480.1 (locus Med tr3g086480) derived from phytozome v7.0 (chr-ID MtChr3; po s 20224932 to 20225640 reverse strand)
ttgtaggtctgtgaggctttcctatccatactctctcttcatatatctattttgtgcttaaactagcttaatttttaacaatctgtatataggatttttgatattgaatcagttatatcttcacattcctgtcatactgtgatcagtcattgcattgagattctctctacggtgatgactcagaagccaaatatattggctggtgtaaatagcccaattgcatcagttgagttatagcgctaggatatggaaggtatattccaggaaagggaagagagggacacatagaggagacttagaggtagagatggttatgcttagtggaaagtgattgggcctaggcaggaagttggcattcatttgctgcttcttgtgatctttctgttgtttctttaatgttgtttgtttccattttctactggtgtactctaatatcacaatccgagttctacataatataccctttaatgttttattaggctaagaggatcactttcacttagctatttacaatctaatggtgatttttttttttttatgattttgttcctatatttgattcactaattgaggttcttcatataggaaaaagttaacgtgccactaatttcattaatgtttggaccaaatatgtgtaaaatgtagctcacaatattctgtgttgattttcatgacttaggtccaaaatctacagtgaaaaaaaacaaag

SEQ ID NO: 28858 - DNA, 518 bp, Medicago truncatula
  Intron number 1 from transcript Medtr2g091510.1 (locus Med tr2g091510) derived from phytozome v7.0 (chr-ID MtChr2; po s 20636563 to 20637080 reverse strand)
aacaccaaaaatccaaaagggtcgaacaagagaaagtaagatttataatccatgtcttatactaagtttctttgatatttgacttgtttcaaatgttttcttttgttatcagtttttatatttacacctatcatccagttaagattttagaggggaaaaatcaatttttcttattttatttaattgttcattggaaaacttaaaaatgatagttgaagggaaaagaagatctgttcatcctaaaattaaattagtgttattctcttcttcttcaaatctagaaatttaacaagaagttttgattttgtgttttttctttgttctatttatgtgtccctttcacaagtaactcattttctaactttctaaatacactctttttattagaaatatataatttgtattaaactaattaattctatcaaaatcgacttgtatttgataattgtctctacttataaacacttttattatgtctatggtcggctatttgaagcgtgacccgaatcgttcgatag

SEQ ID NO: 28859 - DNA, 413 bp, Medicago truncatula
  Intron number 1 from transcript Medtr3g133640.1 (locus Med tr3g133640) derived from phytozome v7.0 (chr-ID MtChr3; po s 33889263 to 33889675 reverse strand)
tatccaatcttaataatcagattgacatcatccaggtcaaccacttatttattattttaacacacacataattaattactactttgtatcaatgatcaactttctttttgcttacacacaatttggtatcaataaagtgattatgatgatgcataaagaactggaagaacttgaaatagtaggtgaatcctccattgtatgcaataagtaagcaaaactaatatttatttttctttagcataaagtaaaaagagggtctaaattttgattaattttttataatcatctaaataagatgggttatccattgatgttttgcagtgttatttcaagcgttgaatctgttcctgatcgtaacattatattaaaattatgaccaaattgtgtttatatttatgtactagcaggactag

SEQ ID NO: 28860 - DNA, 934 bp, Medicago truncatula
  Intron number 1 from transcript Medtr1g083700.1 (locus Med tr1g083700) derived from phytozome v7.0 (chr-ID MtChr1; po s 16588693 to 16589626 reverse strand)
cgttatctgcagaaattgaaccactgcccacccaagtaattttcatagcttgctctatcggcggtaatgagatgacaattatactgtctctgtgtctggtcatcaatgagagtgattgttttgcgctttcctttcagaattgttcttgacacctcgtttgggaaatgccaaacagaaaaataactgcaatattagtttaatgcatatttacatagataagatgtatgcgaatatagttacatataatttataaaataaaggtagcataactgattttaagctaaagaaaatgtaacatgacttctaatttatcatcctattatcttcatataaagtctagataaatgcatgcatgtgcattatatgcaccccgttgaccaattaacattgttgaaacaaatggaaattaagcatcacttccgcatgtgcatatatagctggcatcatttgacattgatgtcttcgtacatttggtgcaactctcataatacaatccaaactggttatgattgaatttagttgttttccaaatagtgatgcaatatgtttcctaacacaaattatgcacatgaaataaagaataatgcaatatgtatttttaatttgtgcgtaaaaaaactcaaagcatgtttgtgcataaaaaaagcagacattgactaagtttataaattcagcaattggcctaacatgtgacagtttggaaaaatcgttgtacgaagtacgttgagaagaagtcgaactctgacttaagttctaactgaagtttgactctgagcttgagaagtgttaaagtcacgacaacaattcaagaaacatggtcaaaaaacaatcaaatcggattgtgaaataataagttactctaacactgtattgtgaaatcataatgcaaacttactaagtcttaaacttctcaacaaccggatgatgtaggttg

SEQ ID NO: 28861 - DNA, 1039 bp, Medicago truncatula
  Intron number 1 from transcript Medtr3g015900.1 (locus Med tr3g015900) derived from phytozome v7.0 (chr-ID MtChr3; po s 2973466 to 2974504)
agagtgagttcatacatctaccatttccaacgaaggtagaaattcgattttgttgcatgttagtttttcttttgtagttctgaaattcatcgttgtttaacactgatgaacgatttattctttgaatttagggtttttcgttacagttttgtgaattttcaaatggaaatgagtgaattctgttttttttattgcatgttagtttagttttgttgtttgtaattttgtatagtcattgttgtttgacactatctgaaacaactcacacacaaatgcgaggtccgggctcgaacttgtatgaaggtgtctaacctgtttggttgtgtgtttctattttgagttgttttagaattcgagtgttcttctttttaattgtgttcagttttcgacattgtttggattaacaacttatttgcagcatataacacaaacatttattatgctaagcgctaaaagtcctgtttacattggctttttgagcttatccactggtataagtcattaagttgtatgacactgtttgagagaacttaggaaaacaacttaaactattgtccataagttgttctcagcttattttcataagttctccaagatagcttatgaaaacagtttatagcttaaacaaaacaatttcactttattttatattttgctttagaaatagcttgtgtaagcttatgcgtaagtgcttatcatgataagcgtttgtgctataagctgtaaataagctgtttattcaaacgagttaaaataaagttaggagaacctataaaaataagctgaaagcaacttatagacaatgttttacactatttcgtaagctgatgctttcattatgaaatcaccattctaaataaagtataatataactgatctggacattgagcggcaaggaagcatagacgtttatatgttgtcttgctgtttgaggttcatgataactctggttatgttgttcaatttgaggttcatgctaatcttcttgttatgttcttgagcagcccggagatctgtacctggcaaattgagagattaa

SEQ ID NO: 28862 - DNA, 900 bp, Medicago truncatula
  Intron number 4 from transcript Medtr2g056530.1 (locus Med tr2g056530) derived from phytozome v7.0 (chr-ID MtChr2; po s 15483216 to 15484115)
ccaaggtggcagcgaattcggcacccgaggaagtggtagggtttgaacaaggttcttcttaagcaaaatgggaagcaaatccgcatatttcacaagaatcgggtcacactgagatgctttttgggcctgattttgcggaatgaacttccgaggaacctgattctgagagataggctgctgaggggcctgttgtcgaggcttttgagggcacattggctgatatggtgattgaggcctttggtggacaagcggtggatcgtttgtagccatcaatgaagatacaaggctagttaacttctctacctcagccctaagtgttgttacctctccacgaagctcatgaacctcttgctcaagccggtccatttttcctgtttgcacgagtgtctgcatatgcgagccgaacttggatgacgacatctggcccctttattgacggattgaccttttatggagaggacacaatgtaagacacggactagaaactatgaatacaaaatgatgcatgatatgcttatgaaaaaaaaaaaagataataatttttttgaaggacttatcaaagcgaaatgtaaacacagtacgaatatggtttcattttgaatattgtaaagacgtcgcaaacggttcctttttcaaaaggtaagaacgaaaccaaggaaaaagtacaaaagctaaagctcagttaagatttttgaagttgtatctcttggtgttcattcttacaaggtccatatccatgatgtttacaaaaacttgactaagtccttcaatttttgatggaaaaagttgtttatgaatggatgcatgtatgcatggttatgctaaagtacatagaatacatgatgaggttaagtcccataatgttggagtcaagggtaacaacgccatttggtaaggact

SEQ ID NO: 28863 - DNA, 991 bp, Medicago truncatula
  Intron number 4 from transcript Medtr2g015180.1 (locus Med tr2g015180) derived from phytozome v7.0 (chr-ID MtChr2; po s 4063122 to 4064112 reverse strand)
tgctgccccaggcagttggagtcaggtaccggtgatcaaattatcactgccctcgcatatgaattgttcacaatcatacagccatatatatttcaacaacatatttcatatttaacacacattttcttttgatttagtttcttagaaatcaaaagcagctgtaatttcttttaccaaacacaaactatgtctctttgtgctgaaaagcatttaaataagaaaacgttgtatcaacgaggggattgactcacctagtatcattaaatgtaactgacatgaaggtcttgctttagatgtcttcaggttatccttcatcgatagggtcgtttatgagctctcactgtgagacatgtctatgctctagattcataattgactaaccgtccttcttcctaaacttatcctcagaacagacacatacagtactcccttatgttgtgatattagttaatgattttgtcttttcccttcaattttattatttcataatcgtcctaatgtataattcactttaaggaaggattttaatttaaacctagaggtcactatcatttgaagacataactccatgattttttgtgttgttgcaaaagtgaacaacacatttgactagaacagaatgttagttctcccacccctagcctccaaagatttcatttacataaaatacagtaacaaattgtttgccgcactgatgcaaatgaaggaggcgaaatgcaccagaaaatccagttgtactacagcgacccagctaaaatcttttgctgttttgctaaaaaagttaacaccactaaggatgaaaactagatcggacttatctatgatagaatagggcacaagtttcaagttattgccaaatataaataatagaggggaaaaacaagataaagcattcataaatctcatctgccagccatcttgatgtatggatgatacttaaaaaaatgtacatgcaggttttgagtcgaaaactgtaccttccagccaagct

SEQ ID NO: 28864 - DNA, 967 bp, Medicago truncatula
  Intron number 4 from transcript Medtr1g074300.1 (locus Med tr1g074300) derived from phytozome v7.0 (chr-ID MtChr1; po s 15035600 to 15036566)
tatttgtcctactagagagttggctattcaggttagatgatgtttttatctttatgccctgtttggataaataacgtagttaagggtttatagtgttacgtataagctatatctataatagattaggggactgtttgttgcagattatagaaagagttattttgatactcaattagtttttttaaaaagcagaagctgtttcgtgtttgtttacgaaaacaagaaaaatatatattttgtgttatttagagatttaaaaaaaaaagtctgaagctatttctgtctgcatactgcccataaaaatcacttttttgaaaaatggttttgaacttgttcatttgtttacctccttgtttttgaaaaaaattgattttggaaaaagttaatcgtaatagcttttcattttagtcaaacatgattgttaaataaaatcctaaacaaacacttgtatatgacaaaagtgtttttttttttcttctaaaaaaattaaaaacaaatacgtccttaattaatcagttataagaaaacgtttttaagagaagctactaaaaacaacttctcatttgaagcagtttttagattactttcagatttaaaattcttaagaatccataccaagcagatggaaacttccaagggtgattaagttttttcaaaaaaggggattaagttgtaacaaacaggctataaataaagtcatattcttttcatataaaatactatcctatccttgagagcttatatgaaaataagatgaaaaccacatatggaaatatcataagctgactccataagctctttcaaacagtttcacaaatgcttatgctagtagatgagttattcaaatagtcctttatttggtttgatttaatttgattattcttgtttcataatagcctgtgttgaacaatgtggcctgtttgttatttgctgtgttgtgtgttagaacattgaggttctccgtaag

SEQ ID NO: 28865 - DNA, 640 bp, Medicago truncatula; identical to SEQ ID NO: 27905
  Intron number 1 from transcript Medtr2g032580.1 (locus Med tr2g032580) derived from phytozome v7.0 (chr-ID MtChr2; po s 8690491 to 8691130 reverse strand)

SEQ ID NO: 28866 - DNA, 464 bp, Medicago truncatula
  Intron number 3 from transcript Medtr4g006220.1 (locus Med tr4g006220) derived from phytozome v7.0 (chr-ID MtChr4; po s 700814 to 701277)
tgggtgttcctcctacagtgttgtttgttgacgtggttcgttgaaataatcttgctttaagaaaatttctaatcttttagaagttctctaatttacgaagaatgacaatgttccgtaatttgaacatttctcttttaaagcaaatttttaaaaaaattcgtaataattaaaaactgatattataaatattttagaataaataatatcagttttttaacatcactcatctgggttgcaatttagtttgtgtctgacatataaagaaattggactagcaataatagtaataccaaaattctcttggtactaaagttgtttgatttgctgaatgttatatttgcagagatttctaaattgcaattattaatttttgtcaaaattctacttttgcaatgcttagaaattattttatgtataattttcccttattctcattgcaacagcattctttctgtctgcgctga

SEQ ID NO: 28867 - DNA, 892 bp, Medicago truncatula
  Intron number 1 from transcript Medtr1g009280.1 (locus Med tr1g009280) derived from phytozome v7.0 (chr-ID MtChr1; po s 1181737 to 1182628 reverse strand)
agaaggctggtaagagattatcgaatttcattctttgccctagtttttttattttattttattttaaatttaattcttgtttatattttttttaagcattgtaattattattgaaatttgtttgtaatgatggttgaaatttatgtgattagaatatgagttatacattgattattgagatgagaatgttaattgttaattattttagggttttacattgtaatggagaatcatagacaataagctgcatggttgaaatttatatgatgatattatgagtaacctatgatgatgttgattcttgatacttaaaatgttaatttttaattagtttatgactttttattatgatgtagaatcataaacaataggctaatgatcaaaaccatctgtgacgagatcatccgtccaaaatatcgaatagaattgaatatatgagtcacttttttatatatcatggtgactattgtaagcaacttataagttcattgaataattatagtccaaatacattaggtattcaataaacttgaaaaatgaacatgtgcttataacagtgatcggaggaagtaccttaattttatggtctaatccatactcacttgaatttctaacagccataccctagagtgtgcgtctctcacataactaaatctgtaccacttatcctgcagtggattggtaatggaaaacaccggtctattacaattggatccacttccacgcccccataatccgaaccatggatctgagtataatttgttaaataccaagactaggactattaatagattttgacactagtgttctgtccttttcttccctctctaatttgatggcgtgtggtggaattaattctgttttttataatggacagcaccaaatcagggta

SEQ ID NO: 28868 - DNA, 671 bp, Medicago truncatula
  Intron number 2 from transcript Medtr4g012210.1 (locus Med tr4g012210) derived from phytozome v7.0 (chr-ID MtChr4; po s 1996295 to 1996965)
ttcatcgatacatttgttccccgtctcttgaccaggtgatttaactattttctgtcattttttcacaatcatttcactgtttcataatgtagaaggtgtttggacacttattcgataagtagttattatatataagagcttctgcttaagttttttgtacaatcgaagagtttatggatttggaaccattgcggttgagaaaccatgcagttacacactgtacttaatctctgccattgatttgagatcaggtggattaaattacagattcattacaaatcatctcatccatcaattttaaatcggatggttgaggtgaggaactgagtcacacagttactgcaccgaatccatttccatagtttatgggtgtaaactctgtatagattgtttgtattagctattttgaagagcttataaaaataattcaaagcagcttgttagcatgtcataagctatttctatcagctcttcttatgacctacacaagtgtttgtgtaataagcccaaaaaagtaatttcaaacgcccatatagacttggaaaatagaaatcaaacagcatagagacacgccattatcattcggagcatgtcttctttcaattccacagtatcatgtaagttatattgaagagttattgattagttagtgatttgacaggaagttgttg

SEQ ID NO: 28869 - DNA, 841 bp, Medicago truncatula
  Intron number 1 from transcript Medtr3g029260.1 (locus Med tr3g029260) derived from phytozome v7.0 (chr-ID MtChr3; po s 7702208 to 7703048 reverse strand)
tggcactgcttgagcttgatagttcgcttgtctatgttagtatatctcattgttacagaaaataattattttataacttactagtgtatttatccggcattgttcggttagacacattcaagaagataaagaaattatatatatgatatccgcaaataaaatttaggcttaattgcacttttgggcccttatcttttcaaaagttgcatttatggacccctaactaatttaaatacaaaacagccccctatgttttgattctttggcagttttggacccccagtctattgtttactcggtcaacgctgacgtggcaccctaagtgaggtgtcacatgtcaattttttttatgccacatgtcacttccacgtatattcccaataaaaaaagttaagtaaaatatcaagaattagaaaaatatttaatagaaaaaaaaaagttaagtaaaaaaagttcaagaattcaataaaaaaagttaaataaaatatttaatagatatgatcaaaagtttgttgagatatttatgataaataaaatattgattttgaaaaattagaaaaataataaaaatattgcaaataaacgtggaagtacgtggcataaaaaactttactttatatatatactattgatattaaaataagttttttttttttttacaagaaaaaaatgtggctatttttatccaagttgaatgatctgagtcattgataccaatctatgaaatccaatgatactaagttgtccacgtcagtaatccaagtcgaagtgaaaacctaaaacctcaaagcttatatagtcgtcgcgcagacccaactcgattgtcctgattttttgaaca

SEQ ID NO: 28870 - DNA, 374 bp, Medicago truncatula
  Intron number 1 from transcript Medtr1g137610.1 (locus Med tr1g137610) derived from phytozome v7.0 (chr-ID MtChr1; po s 30528108 to 30528481)
ctgctcaaaaggatagtaagaagaactagctagctacttagtttccttttctaataatgttatggctatggtgttatatgttctgaagaatattttgtcatgtgctactgctaaggaataaataagaattaatctttaagtttgtcctaaggtaaatgtacgataataaaacacttttctttgttggtccctttaattttttagtaaagatatttcttcaattttcgctttaggtctcatttgaataagaagacctttgaatttttagtaaagatgaagcaatatctttactaaaaattcaaaggtctaataaagcattgttcctttgtacattctataaagaaaggataattaatacatagaagagctgaaca

SEQ ID NO: 28871 - DNA, 876 bp, Medicago truncatula
  Intron number 2 from transcript Medtr1g046340.1 (locus Med tr1g046340) derived from phytozome v7.0 (chr-ID MtChr1; po s 10778875 to 10779750 reverse strand)
aaccgctcaatttgaaggatatcaagttagtttgtttcttactcgattcatttcaattttttttattcttgttttagttttttttttattgatgttaagtttgatgccatggacatatgacacgccttcgataagaagtgtcagtgcagaaatttactaagaatcttggtaaatttgtatccgagtgtaatactctatcagtgtaattttatctcctatattacgaaaaacaaaaaaaaaaagactttatgagtagaatgcttttaagaaaaacaaaaaatgactaaaggatgtagaatgattttactaagctggtcttattaactattttactaagcatagcagatacgaggattttgtgttggatgtgtggtaaggctagacatgataggattagaaatggcaacattggagagagttgcagtagcacctatcatagaaaagatggtggaaaataggcttaggtggtttgggcatgtagagaggattcctgtagattttgtagtaaggagagtagatcacatggagcgtagtcaaatcactagaggcagtcaacaagacgaagacctagaaaaactataagaacaattattaagaaagattaatgagttggatagagatatgatagaacagtatggtgtcgtttgatccatgtagccggccccacttagtgggatatgaattggttgttgccgttgtagccttatttatataaatgcacagtgaaaacttagaaatgctacttaacatgattttgtcaatatgaagtggtaggagttattacacttacattcatcattttaccttgtaaaatcatgttttacattagttatggaataaaatttgaagaaatgttttgtcttcagggaagaaact

SEQ ID NO: 28872 - DNA, 748 bp, Medicago truncatula
  Intron number 1 from transcript Medtr3g019600.1 (locus Med tr3g019600) derived from phytozome v7.0 (chr-ID MtChr3; po s 4116799 to 4117546 reverse strand)
aggtacatatcattaatcttgctgttgctttgcatgtcattccaagcatgataatcccatgttgctgctagctcatatcccaagtccaagtattacatccctgtcgaagcaattgaggatacctgcatactgttggtgaaaacaaaatgcaactatgatgatcattgtctactagattccaagaaaaaatgtaactgcaaaatgtcaatttggcaacactaacatacacaaatcaatcttcacatcaaagagaccacagtgatgattgttacttgttctatattagtcctttttttttctagagcacttaaattttgctctgaaggtagtgaaattcactttataagttcatggttgcagttaacaagtctggtggaaaaagaaaaatgcatttagcatattcaggacatgaatttatttggttgtgaacttaatttgaaaatcctcttgttactgtttctagaggccacaatcttcattttggtaaaaagagtaatgttaaaacctatcaaagaggaaattaatttgtacctcatcagataccactcctgcaaacaagataaaataattcaatacaagaggaaaataatttaaaaaacaaaagataatttaggatcaagtaactgtagaaagctaatcctctttagcacttaatgtgtttacaagtttcatacttacaatacattaaatttaacttgttgaaatatatatagataaagagtaccaaagttacaacgaaaagaagagg

SEQ ID NO: 28873 - DNA, 898 bp, Medicago truncatula
  Intron number 9 from transcript Medtr3g092210.3 (locus Med tr3g092210) derived from phytozome v7.0 (chr-ID MtChr3; po s 21622222 to 21623119 reverse strand)
gagaaattgctggtgagaaggcgggaatcttaaaggtaatattttgagtaaaataatatcctaatcgtttgaacccttcattggaccctgtcatagagggtgcgttaatgcattatagcaccaagttgtcaggtaaaagctaggttgttaagaggggatggcctccactttgaaccagagttctgtgtctcacatccaacacccaaccgatatagaagtcacactcgttattttctttctttattatttaactttataagtagaagaaaataagaggagtcatggtgtattggttgaagtttctgctgatttggatttcaggagtttgagttggatttggattgcctgcagtcacaatttcacagtcaacacatcggtggttgttggatcgagatcaggcagtgtgaaagcaaacatattttaatttttttaaagtctaaaataccgagcttgaaatttggactgtccaatctcaatccaacagcaaccaatgtactgactgcaagagtgtgttgtgactgcaggcaatccaagttcgttagagttgtgatatcaatctcctgcaaatgtatagtaatgttgcttacactggagctataataggtcagacccttccctagaacccaccactgtggcatctttagagtaagaggttttccctttttaaaaagataccggaaaagctccaaagtgtgtattgggaattgccatttcatgtgcaacccagctgtgattatatctatcttttacactttcctgtctttccttgtatcaccctgtgctttttttttttatcctttatcatttttctagaaatttcttttcattccttatatttattttatatattttgactttatgtagcatcgaattccagcatttacagttactcaacctg

SEQ ID NO: 28874 - DNA, 873 bp, Medicago truncatula
  Intron number 1 from transcript Medtr1g124740.1 (locus Med tr1g124740) derived from phytozome v7.0 (chr-ID MtChr1; po s 27260803 to 27261675)
gcctcgtaattctcgattattattcttttcattttcaattatcaaaacccttttatgatgtttatgttgttttctcattattaatattattacattagatttagctcttatttgaccttatctaccgacatcattttttctcactgtttgggtggggacaacttatgaaaacagcttatcacaatttttataagcttttttcaaatagaccttataataataacttgtatcatatacaaaaacagtttaatatattttttttcttttatgcaagcttatacacaagtatctgtcgtaataagtgcttgtgctataagctgcaaatatgcaatttatccaaacaggcctaaagtaaagtcaaatagtttttatatgagctataagttgtttttgatatgctctcttggagagcttgtgcaaataaatcgaaattagattatggacatgtcacaaatggtctttataagctctcccaaaaagtcttacaagtgcttacgtcagtagataagcttaaacgcaaataagtcagctcaaacaggtccttaaactgactactaggggatggtgatattgattgaatatagccggtgagggttttgaaaagcaaacccgttaaaggagctatattttgcggggttcttggcggtgcaagtaagctcacacagcatataactatgactagaacatagcttaaagatgtttgaaagtacgcgtaggttttggactgtttataatatgaaatacaagtagtccttctaacatggactttgctattacgttttgaggtttaatcgttgtgttggcatttcattaatgttggatgtgtttctgataacaggaaaaactttatcagtggatttggagacagcaaga

SEQ ID NO: 28875 - DNA, 984 bp, Medicago truncatula
  Intron number 1 from transcript Medtr1g149740.1 (locus Med tr1g149740) derived from phytozome v7.0 (chr-ID MtChr1; po s 33102256 to 33103239)
atcccctctctcctccacctccactcctccaacaggttcatatcgcaatttcatttcatttcattgacttagcaaatacatgagaaatgtttattcaatgttcttcacccgagtgatattagcatactgaataataaattctgtaaaatttggatcaattttcataaaatctttgattgtgaattgcaaattagtagcttatgtaataatgcaatgatgtgctctatcagttgagggaagggtatgttggatgaaggattttagaagatttttttttgttattagactaagtgacacaactgcgagctaccgggttcggacctgggtgaagatgtccaacctaacaatattgacattgccagttgagatagaccttagggatgttttttggaagggaaggttttgaagagctaagtttatatttttgtacacatttgagattttattgaaaaaaaataacattatagatgctcatataacatatcaatcagaccctttttttaaaattggtatccggcgtaaggattgactaatttgggggaccaaccatccacatgtgggggttcaattgaagtcagggcaaaaccctgtattgactggcacgacataggaattcttggcagttggaggatttgaacatgagacttacaaaggagcacactctctagccttggtccctagcctacaccactaggccaacccctggggttcatttcaatcggacttaatttattattagaaacattttatagcttctttaattttcaaaagaaaaataagtccacgctatgtaaatgcagtttatggcttattgatatctcgggatttgcttaatcaatgtaaaaaaaaaaatgaagatattgaaaatttatgtagaacagcttggtgttgtgaattttgaggacattgcacttgtgagttgtgacaaactgacaatcttcaattatctgttgatattctctgtttaggttaacgttgttgtcg

SEQ ID NO: 28876 - DNA, 722 bp, Medicago truncatula
  Intron number 1 from transcript Medtr1g116940.1 (locus Med tr1g116940) derived from phytozome v7.0 (chr-ID MtChr1; po s 24885678 to 24886399)
aagaacgtgagccggctaaggacagaacacctagtgtaagtactagcattgctaacagcagcaaacaaccttgctattaaaacacagatctaacgaaaaattctaatagttttcttctcttttttttttttgtcaaattgagcaacctagaaatattaactttgattttcatttggactattgagtgaatttaaagctaagcaacctaaatgcagcaactgaatcatcatcgacggctatgaagcacagacactccttggataaagcgtatccccgtgtcagacacgtgtcgtgtccgacacggacacaacaccaacacatatattttgtgattttctagaaaatttagctgtgttggcgtgtcggtgtccgtgtcgtgtttggtgtccgtatccgtatccgtgcttcatagatccacgggcttgcaggccctgaatataattatatctttaccttcataaggatgattttctaaattttttagattaagtatttttggagatgcaaagcatttggatattcttactcaaaatttaagttcaaataataaggttttgcgggacctctctaatttctagacctagaaattttattctaaatgacatcactattgtataagtaaaactcattgtaaatgccttgactctctgactatatgactgatctgtttttcgaatgaaaatctaaacgatgctttctaacatccactgattgatgcagat

SEQ ID NO: 28877 - DNA, 730 bp, Medicago truncatula
  Intron number 2 from transcript Medtr2g052540.1 (locus Med tr2g052540) derived from phytozome v7.0 (chr-ID MtChr2; po s 14266968 to 14267697)
ctgaagcaacccctttaagtgttgccaaaaccattcaggaaagtgctcctctttatattttactcaaagtctgaccaattatttaaatcagaattcgtattcaagtttttccgaacgatttatctttatgtgaagcacactagataattgaagacaatcactaattggttatggttaccatttatataaattatcttattggctatgaaccacggatatggacactgaacaagacactgacactgctaataatttggaaaaatctttaaattcagtgtaattatatgtgtcagtatcgtgtcggtgtcgaacacgacacatgacgcctaatctgaatagtattcgtgcttcatagcttattggtgatttggtgcataataataacaaacagaatataagacatactcaaagatatttttgtaattttaatagaaatcatctcatatttattttggtacttggttacaagggaaggagctcaatgtccgactattaagtaagtaaaacatggccaatgattataccgatcatgatttgagctcagctctttaaacaattcgtctttaactgaagttcattaatgacttgaggataatcgtttgtttgaatcatctcattgtttactccgaatgttgtgttgaaattcttacttgcttacattttttggggttagaattgtttgggtggatatgatcgttatcttacacttcgatcctgttgcaggtgtggg

SEQ ID NO: 28878 - DNA, 601 bp, Medicago truncatula
  Intron number 1 from transcript Medtr2g033270.1 (locus Med tr2g033270) derived from phytozome v7.0 (chr-ID MtChr2; po s 9023825 to 9024425)
ttgctcttagtagtttcttttctaggcttttgacttatatccttcttgatgggttgatatttaggaggattcactctaaaaacatgttccttctatttagcttattacaacttgataaacaatgtccgctagattgacattttgtataaaaatttgacatttttttcttaaagtatagggacatataatgcaaatttttccctttctacaagaatggattgatgaagtctttaagagaggttcaaatcaatcagcactctggcatagtggtcaaacaatctaatttttgtagcatcatctaatgaaataggtgttcattaatcgttagcaatttcgaaaagggtttaatgccttcaatattcatgagttcatctttgcgctccatttaggaagcctccctttacccctgttcacaaatagaaccaagggctgagattaaaatgttaacataaaatatttatttaatgaataacaaaagccacgcgcatcctcctttctctgtaacaacaatttttttttctctctctctttttctgtttttctcagatctcaaatcatgattcagttgttcaatttttcagctatcagatcaacagaaaag

SEQ ID NO: 28879 - DNA, 753 bp, Medicago truncatula
  Intron number 2 from transcript Medtr1g047320.1 (locus Med tr1g047320) derived from phytozome v7.0 (chr-ID MtChr1; po s 11386736 to 11387488 reverse strand)
ccaagtctctcgaggcctttttatcaggtaaaatcgtgtttcggtttttgaatgacaaatgttagtatgttagttttatttttaattacaaaatgttgtcaaattgtggcactaaagtatagatgaatttgaacaaattgccattttctatggtatgcaatttagtacaaaatgctgtcgaataaactgttgttttccgcgatctgcgattgacaacactggttggtttagaagtttggtgcttaggtttagttagaatggatgatatattatattctcatgtatgccaaaactgatttgatctttttgagttcgtttccagttgtgcggtatggatcacaataaaccaattagtttaaccactgttctatttactctccgtttcatgtacaaatctttgaagacatgaaacaaatcgaaaataaggtgaaagttttgtaatcgaaagtgaaaacagaaaatgaattctaattagttgccattttggatttgcttagattagatttccattgtaggctgtgtcaacctgttttcttggactaaatgatcataccgttttcttgttcaaatttatcttccagctaaccaaatctcagtcttggggcacactgaggttgtgttaaaattattatatatcgatctgcaaagatttattttgctactgaaaatatcttaatttcatgttttgtattttattagtggcataattatatttcagggaatttcaagttctaccataccaagtttctcaat

SEQ ID NO: 28880 - DNA, 776 bp, Medicago truncatula
  Intron number 1 from transcript Medtr2g017550.1 (locus Med tr2g017550) derived from phytozome v7.0 (chr-ID MtChr2; po s 4393406 to 4394181)
ttccaaaaccctccaggatcttcttagcttccaacgtaagttaactccataattttatatctagagtaaatttattttggtccttcgtaattttctaacgatcctcgacaataataagattcaaacatgtctttgaatttttatttttatttttattttttttatttttatagtggtcggggtttgaacctcaaaccttacatatatattgcattgtccatgccgatctgaactaagctcacgagaacctttgaaatttttatactagagataaattagcctctaatttattataatagaactaattttcatttgtcagaaaattgtaaataacaaaaatgaatcctcgttcttacttatatctatataattccgatgtatggttaaaagttaaaacaaatatgaaaaaatagttaattgttttgcgcacaaaaataatatagttaaagggagtgcaaacaattactttcttcactaacataaacaaaaatacatatattttttttattatatttaaggttaaaggaagtacacataaccttatggataaaaaaaaatattgttgagagggatacttcattaaaaatggtgagtgagtgttaagtttgatgtaaattagtcatccaaagatatttcaccccaataacataacatagttaaaaaaaaaaatattaaaaaaaaaaagctatacattttctctttatgctggtatatatttttaattttttcacagtcattgtatatttatttttgatgttttctttttcagtggagaa

SEQ ID NO: 28881 - DNA, 885 bp, Medicago truncatula
  Intron number 1 from transcript Medtr3g101240.1 (locus Med tr3g101240) derived from phytozome v7.0 (chr-ID MtChr3; po s 24485645 to 24486529 reverse strand)
gtcaaatccctctgtctcaaagcaaacgagaccctgtaagtcatcaattttcacgtttcttctgtttttactttctataagtcatcaaaggacaaaattctgttattaggttttcactattttcacttgattttttgatttatttttactataatatttgttgattttttgatttgttttgattatggttttagtatgatagtaacaattatctttcaaggaaagttagtaggtttattttttgatttgtgttgattttttgatttgttttgatttgtttatttttacacagcagcaacaattattttaatgaaaagttattttattttaagggtatctttcaaggagatttagtaggtttggggagtgtttgggttgatgtatttgctcttatatactgacataagtgttgtgagactgttatttggcaagaacttatcaaaacagcttatgacatgttcataagctgttttcagcttattctcataagtcatcgaagataggctattaaaatagctaatagtttatgcaaaagcaatataacttgattttggcaagaactaatagttttgtaagactgttgtttggcaaaaacttatgaaaacagcttatgacatgttcataagctgtttttagcttatcctcttaagtcatcaaagatcttgatttaacttagttttccatttaagaaaatataaagagaggttctgtgaaaagtaatgacaatgatgaactaaagacatatgtaaaaaaaactggttaaaaagacaaatagcgaagtagcgagactgaagcaattatggccaaatcaacagttgtaactcattcacatattttcatgaattttcatttgctatatttagccccacattacttttaatttac

SEQ ID NO: 28882 - DNA, 993 bp, Medicago truncatula
  Intron number 1 from transcript Medtr1g090230.1 (locus Med tr1g090230) derived from phytozome v7.0 (chr-ID MtChr1; po s 18224221 to 18225213)
ttgattctacttcccccttgaagttcaatcttctggtcagttttttttctttctttttttcattagcttagcttctttggatgttgatttttcttagcttttattacacttgtgtatgattgcataatagaaattgggaaaatgattggggaagtagtaatagattactgcctttgcaaaaggaaaatatgtaggtataggtcacagtcacatgttgaatttatgtatttgaagttctttgttatatcatacacatgttaaaaaaaactaaacagttctaggggaatcttttgtgattttatgtaaggtttctgatagttttagccttagcaattggaagcattattagggataaacaacttgagggccaatttggattaccttatttgagcttatctgctaacacaagcacttgttacactatttgggataacatatgacatgttcataagatctcgaggataacttatgaaaacagcttatagattatatgaaaacagtttgactgtattttatcttttgttttagaaatagcttattcataagcgcttatgctctaagctgcaaaataagctgtttatccaaacagggcaagcgcttgtagtataaacacttgtattataagcgcttatgtataagttatttctttaacaaaagttatattataagcgcttatgtataatttatcataagctataaattgttttcattagctgtcatggagagcttatgggtataagctgaaaacaagtgcttatgttacaaaatccttacacaaataagtcaatccaagcaaatccttacacaaccacataaggcaattgcctgatatagcacattgatttggattttggaatggtggtaaacttatttgtgatttacaaaatgcttttattgttttttgtttgttattttattttcccgaaactcaattctcatgtttgatttggtaatgcagagtgctgtttctgggttaaatagaggtcttgcagc

SEQ ID NO: 28883 - DNA, 345 bp, Medicago truncatula
  Intron number 1 from transcript Medtr3g125180.1 (locus Med tr3g125180) derived from phytozome v7.0 (chr-ID MtChr3; po s 32049972 to 32050316)
atctctcgtcgtcgttttcaaattaaacttgtcaggtgcttatctccacagcccttcctttctttgctcatctagcgaccactagtagtgattccataaacgtagtcttcccaatcacttctaccaccaaaaccttgattttggaatatatttaaatcaaaaaaattattaggggttcaattgtttcttcttcttcttgtttcgtgaagtacggattctaatttaaaattttccagatccaatatatttagataaagaaattcatttagatgtgaattgatggtggtggtggtggtgccagaacttagggcggttgttcaggccagttgtggttcgccggaatag

SEQ ID NO: 28884 - DNA, 426 bp, Medicago truncatula
  Intron number 1 from transcript Medtr1g046460.1 (locus Med tr1g046460) derived from phytozome v7.0 (chr-ID MtChr1; po s 10819144 to 10819569)
ccaggtttcaacatagtagctttcttcttcacaaggttaccaacccttctatttcgtttctattcttatcatcttattcgtgtagtttagatttacatctgtgattattattagatgatttgttttttctatttgttattcaatttgaatttggctggaacctatgtgcatgttttatcgcagttcttaaaacagatggtgtgataattatttgaggcaagataatctttttgtttatgaatcggtagtttatttgtttgtcatgaaggcatcgatcttttcctctagggttttgtattttcatactagatgcatgtaacagacatggatatgctatatatatatgattaagctttttcattaatgcagtttgtgtttgttttatgatcagactttgtttgctacatcggcggaaacacacattcg

SEQ ID NO: 28885 - DNA, 642 bp, Medicago truncatula
  Intron number 1 from transcript Medtr1g016990.2 (locus Med tr1g016990) derived from phytozome v7.0 (chr-ID MtChr1; po s 3466831 to 3467472 reverse strand)
tcctggtacacttcttcaacctccttatatcattcatttcttcattcttctttttctcaattataaaaaagctaactttgtttattcttcaattgtttgttcacaaagttttctccattttcatgtgagaatgcaaaaaaaattaaatttttaactcttattgttaatttagtattcatattctcatatgggtcttccttgttcttcatgattatgaactctacatttagtttaatctctattattggttctatctttaattatcttgatatatttctctgtctaatgaagatgataaaagtttatgaaataaaaaaatcatatttatttttttaatatttaatatttttctatctttgtttgttgtctctttatattttaatgtttcatatttaaatatttaatttcatgtttttgttgtatatggttggttttagatcattctttgattattatatcacttttcttgaatcatgttgttgagaaagaaacaaaaaggaaaaatagtaaactttagatgattcctcttttttgctaattgatttggcacgtagatttgcaaaagttgtatttgaatttttattccatagtttggtatttataaggtaatggatggttatttgttttaattcagatatagca

SEQ ID NO: 28886 - DNA, 928 bp, Medicago truncatula
  Intron number 1 from transcript Medtr1g046220.1 (locus Med tr1g046220) derived from phytozome v7.0 (chr-ID MtChr1; po s 10700921 to 10701848)
ataaggttaattaatttctcttatttcctttctttttagtttataattgtggagaataattaagttcaatctattactcatttcatgtatggtttgatgtacttcaattgcggcctaatataaatgttttaaagttcactgtcactgctgtcaagatcgcttcacatataccgtaagattgttcaattttccgatctatcattcgtccagaattgggttttgctgaaatcgtgagatcgtacggtctcaaaggatttatatgcagtctggtatagcaaccgcagttgcgactaaaacagccgtgattacttgtatttcacggcaatattatgatttacagtgtaactacaacagcgatcacaatttagaaccaaatttgtgcttttgttaagtttttgtatccattcaagtttctattttaagattataaggtagtactagttttgtactcatgagattaatatgtatgagagtaatgttatttaatataataatttgtacaattggcagtgaaaagagcaagtaaaaacagaaattaaaaaacagaaaaaagtaacagatcaatttctatacagaatcaatatttgtacaaaagctgtagttttaggactatctatgcactcataatcaatctttttacacaatcattcgatcagatatcattattcaaatgtttataacaaaataacattatggtggtgagaactgattagatgactatgtagaagagtctggtcagatggatcgatttaagagggaaagttctcgcacgactcaaatccaagacattggttaagagattaataaaactcaattctgcttgtaactaagaattaagtttgaaaaaattataaggtgttgcctttaattgaatgcttatttgtttgggtttggttgcttatagtatgacaaaatgtggtgcaggagc

SEQ ID NO: 28887 - DNA, 434 bp, Medicago truncatula
  Intron number 1 from transcript Medtr3g111320.1 (locus Med tr3g111320) derived from phytozome v7.0 (chr-ID MtChr3; po s 28241400 to 28241833 reverse strand)
gttagtttcatcaccacttcttcaatttcaattttccgaatttcacttcacactttcagctttaatcaccaatttcaattttccgaatttcacttcacactttcagctttaatcaccaatttcaattttccgaatttcacttcacaccttcagctttaatcactctactagggtttatcgcttttcactaattttcatcactttaacttctgttcagtaacaatttcacttttgattttaatttctctcagtaagtcgttgggagaaaaagaaattactttttaatttttctgtgaatttaactgtgtaatttaattgtatatatataaagtagaaaacttgatgataatttactatgttttgttgttgatttgttgtttgtgttgtgtttggcaatagtcaagtcgaggtggaagggatcgatccagaaggga

SEQ ID NO: 28888 - DNA, 757 bp, Medicago truncatula
  Intron number 2 from transcript Medtr1g120760.2 (locus Med tr1g120760) derived from phytozome v7.0 (chr-ID MtChr1; po s 26098926 to 26099682)
acattctgcgtcatagtttactcaaattcaacaaggttagctgccctcctaattttatctcaattttccattccgaagatacatcagcttatttgattctaaaataaatggagaaactggaaattaatatactacttctttcgtcctagctacatcaacttatgatgacttatttttgcttacattttagacggaagaagtattaataatatgaaataaataaattgggacagtgttgtttcgaaagaaaaatattgggaccagcgcgagcggtggctaaaatacaatgggcttttgctgacttaattgaattcatactcttttatttaattatatattatatacacgatgcaatgaaatctttacacatttatccaatcaagtcattttaatatctatctggcgtgacctcattggatgaattacgctgctgccacataaaaatttaacttttttttttttgtttaaacattgaatttcatacttataataaaaaatctttaatttctattttctttgtttaaaaaaggaaaacaaaattaaataattgcacaaaaactcacattgccctatttaatttagttctttttttattttatttaaaacatttccgtaaaaaaatactccatggcacaattaatacatacgcgcaatcacctctataaaaacaaaggaattctttgtttttcacttattacaaaactgaactttattttacgttttctaagaaaaaataatttgacttgcagagaagaaa

SEQ ID NO: 28889 - DNA, 958 bp, Medicago truncatula
  Intron number 1 from transcript Medtr2g045960.1 (locus Med tr2g045960) derived from phytozome v7.0 (chr-ID MtChr2; po s 12779532 to 12780489)
ttattacaggtttgactcattcagtttatcttctatatatttcctacattaaatatagacatatctcttacctgaaattcaaacactattttaaatcacttggtgagaatctaatcctttttcctcgaaccaattttcaatattaactcattaattttgttttaagattaaatatgtctcaggtctagaggcggagagaaggagaggcatgcaggtgccatggtgtctccacaatatatatatatatatatatatatatatatatatatttatagttgtaaaaaagaaacttaaaccagtcaaacaaataataaatggccagtcaaacaaataataaatggtgcaagtattagttttgtcttttttatttaatttattttgacaaatatattttatttcatcatatttagctttatttttatattttcttttatgagattttattagtattttcactttatctcctgcagtttggttaattaaaagttatattctttttgttttgtcaatttcatatcttattttaaataatgacactttaaattattttttacaataaggtttttataaagtttaataattaaattcatatattgtgtcacattaatgtttaagaaagtattgttgattgcactaccaaatacaaactattatttgacttgtttttcaagagaaacgagagaatacacaataaacacaattcaacaagagaatacacaataaacacaattcaacgaaagaatacacaaaaaaccaaattcattcacaaatttaaatttaaagttgttaaaatatagtaattcaacaaatattagtatttttttttaagaaaaaaatactaatcaatttacatggattaaccatgggtaggagtccctcccttataactaattaactgtattctttcaatttacatggggccatgtgttctctttatagggcaaggaaatattgtgac

SEQ ID NO: 28890 - DNA, 688 bp, Medicago truncatula
  Intron number 2 from transcript Medtr2g097290.1 (locus Med tr2g097290) derived from phytozome v7.0 (chr-ID MtChr2; po s 22785524 to 22786211)
tggttagttcaataatatgctattaaatatcctttaagtactactatgttaataaagtaattgataatgtatttgttgtggtgaattacattcataataggtgttattatagttatatatagaaaacaaagaattaaatatcatcaagtgattttatgatagtgtttgattccatgaataaatgctttgcaattattgagatttttctccattaatttctatgacttactgacttgggttgcataatataaatttggaagatctctattattcttaacatttatacatttggaagatctctattaatcttaacatttaattatgtgagaaaagtgggagtgtttgtggatgttactaatcatagcatgatatatcgcgtcctatgaagcacgaacactccttgaattaggcgtgtcccagtgtcggacacatgtcgtgttcgacactgacacatataattacattgaattatgtttcaaattattagcggtgttggcgtatcagtgtccgtgtccgtgcttcatagatcgtttcgaaaggttgttaaggatatacgtaagagttaaatacgtttttagtgtgaaaattcttgctaggtttatttgtcgtgtcctttctatgttttctcaaattggtctttgtatctattctcatttcacttgatatatatatataattttatttgcag

SEQ ID NO: 28891 - DNA, 363 bp, Medicago truncatula
  Intron number 2 from transcript Medtr2g052750.1 (locus Med tr2g052750) derived from phytozome v7.0 (chr-ID MtChr2; po s 14349317 to 14349679)
taataaagcggtaagtctatgtgttggggggaagaggggagggtttcttaggctttgactcttctgcttgagaatctaactattgagtttcagactttcagcaattgttggttgatgatttcattggtttgtaagatcaatgtatctaaagtttttcctaaagttatctaaaattttcttgtcttcatgatcaaggattatagtttgcttctcgcaatgcatgcttgtatattttataatctctaatttctattttcacattattctgattgttgctcccctcttgctctgtagctttctaatgtctaatttaaacactgataaaggcattgcatttcttatgaatatagcaggttcttgata

SEQ ID NO: 28892 - DNA, 698 bp, Medicago truncatula
  Intron number 1 from transcript Medtr1g089880.2 (locus Med tr1g089880) derived from phytozome v7.0 (chr-ID MtChr1; po s 18038736 to 18039433 reverse strand)
attattacttcatttccagatccaaaactctaaatgtgagtctttctcaaccaccctttacattttcatgcatcaaaatccacttttttctttccttctaagatctaacatgttcatttgttactattgttgatgtttgttaaacaggttctgtttggtactttttttgtttttttaacaaatggttcttgcatggttggatccagtgttagaaaaaaaatattgtaataatgtgtacattatgaaaagataatttctttaaaccaaccacttagtatatgtttcttcttctccttgcttatgcttaattattaatttactaatctatttgtttttgtctagtgtatgataccttgtcggataatcatattgttgagttgttaattttgaattattagagttttaatcattgattgaagatgcttgccaaccaatttgattactttccttttctgtgttttagtttttcttaacttagttaggtagacaatttggttttaaattttatatgttaaataattcacatatgctaacaacttcaatacttttggaatttgtcctgctcattacttaggttttttaatcaatctttggccccatggttccactttttagttgaaagcaactattatgatttctaaagaatattctcttatcttctagggtttattaaataattgaatttatatacacgtttg

SEQ ID NO: 28893 - DNA, 397 bp, Medicago truncatula
  Intron number 1 from transcript Medtr2g045470.1 (locus Med tr2g045470) derived from phytozome v7.0 (chr-ID MtChr2; po s 12575509 to 12575905)
gttttagtaggaaactcactgagacaagtaggtctcatctcacgtttttcttagacagacaggtaaaggctgatgaagaatcaaagttgtcacttgaagaatagacttcaagattagtttaaaaactttatttatgtaaacttatgaatttcatttatgtataccctgaaaactataccttgcaattatgtttaaggaaaagatttaatttcccctataattcaactttgttattttaattatccagtatcaagttataatgttatgtataaaattctagaaaattatacagggcgttatagaattcctttatgatttattaatgttacttattagtgtacatttagatttatttatattttttggtttctttctcaaatttagggtgatcgagttc

SEQ ID NO: 28894 - DNA, 654 bp, Medicago truncatula
  Intron number 1 from transcript Medtr1g120810.1 (locus Med tr1g120810) derived from phytozome v7.0 (chr-ID MtChr1; po s 26128658 to 26129311 reverse strand)
gggtgcataagtacttaattcgtgatttggtaaaaaaaaaaagtacttaattcgtgtaaaagaataaactcttggaagtcttgcagaaaatgcctcttggttttccattgattgttttgtaatatttctggatcaattaatacttgactagacaattagtaggaaagataatgtagcaactaggattgattttgtttaatgtggccatgtgcaattcattgataaagttagatggaatgttctcatcactcttctatggttgctattattcccttcgtttctttttaattgtcattttttgagaaaagatttgtttatatttaactgttactttcaaattcaatgtaatattaaatgttgttttaccaatattatccttatatatttattggagagagaaacatatgaaatgaaatattaaattaataatgccattttagtaaaagtaaaaaacaattgtatcaagagtagtaacatttattgattgttttggtttgtgtaaaatgtcaaaaagtgacaattaaaaaggaatgaaggtagtataaggaaaaaagaactattttttaagcttatgtatttgatatttaatataaaacaaatacgtctattgcctactaagtgattgggattcagaagtgaaggaaattattttat

SEQ ID NO: 28895 - DNA, 704 bp, Medicago truncatula
  Intron number 1 from transcript Medtr2g097000.1 (locus Med tr2g097000) derived from phytozome v7.0 (chr-ID MtChr2; po s 22597809 to 22598512 reverse strand)
aaaaatcggcacagtaaggaagccattgatatgattcaagtaaattctaatccaaaaattaaaaggtgtcataggccactcaccattctcataagataaaaacctaattcatttcaattttatctccaatgaatttacaaatgtttacttatagtaaaattcaccataaatctaattgggccataagtgatactattctctagacgaacattggttacatgacatcaatggaatctaacctaaaactattacaaatctgaaattaaaacaaactaagaattattacaataaaatattttcatttttgactcattaacttatttcttcatgacacaagttagcaattttcttaaaaaagttcatcctaatttattaaaatatggactctctttatttttttttattggtcctcgtcactccctctttcttgatgaaattcaaccacaaaattaagcatcttcattatatcctccatgaagaaagaacacaaaccaacgaaacgtccatgatatccaccagggtcaaatgaaattgtggaaaaacatcaaacggagcaagtagatgaagcacattttcacctttttcattcaagaatctaacatattaatttttaaggtaaggagttttaaaggtagggagaagtttatacttcaatttaacaagagatacatcaactaaattagtagaagctacaaagaggcaag

SEQ ID NO: 28896 - DNA, 996 bp, Medicago truncatula
  Intron number 2 from transcript CU013523_17.1 (locus CU013 523_17) derived from phytozome v7.0 (chr-ID CU013523; pos 60021 to 61016)
ctctctgctagttagtgtcactgatactgattcaggtttgctagcccaactctatagaacaggactgctggtttatccatgaagtgtttgggagtagactgaggtgcagttgctgacttgtgaactgaactacttactgatttccagaaaatatagatggaagttgctccaaagaactattcttaaacaggtgctcttcccctgtatcctttcttttctgttacctctggtgggttgtgggctaaaagggagattaaagtatttattaaccatgattaaaagcagcctcttaaaaaatcaaagttatacccctctttagggaagggttttataaatacaaaagggctatggctgtgaaccgttgacttgtccaactaatttttttgactgtatactgctgattggaaacgtttgcttcctgggaagaagacttgtcaatgccagccaagtgcttcagtgctctgccatatatatattcatgtagagtccagggcatgagtctctgtcctcatgctttctttgttttcctttcccatgcttctaaagcctctctgagaattgtgagtgtgtcctctttcctcctttagcaaactttgttattgcctcacaaaagaagaatgtgtcttgttcctgctgctgagttcttcccaaagacacacatggaagaagcaaggtcttccatacattgaaagaaggtgtcaaatcttgttgatgctcactgcctacgaagcattgactcaataagttcattgcatcaaaaatgacaaaagaccagcacacctcaccagggcagctgtagtcttcttttctatatcatgtgtttttgctaaaccaacaccagcagttcctctttcacagacccatttctgctagcttagatcggtatttttggcattagtgttttgttgtatttagcatccaatttgactttttttaattttaattttatttatttttcaagtattcactttacttccttctccctactcaccttct

SEQ ID NO: 28897 - DNA, 909 bp, Medicago truncatula
  Intron number 2 from transcript Medtr3g157050.1 (locus Med tr3g157050) derived from phytozome v7.0 (chr-ID MtChr3; po s 41335936 to 41336844 reverse strand)
ctaaattgtctgcgtatcttcccaaggtataaacttgtgtgaatttcaacttatatttagcatttagggaatgttcctatttataaatcttttatattttaatttttcatatgtttatcttgatttaaatctacaattgcatttagggatggagattttagttttttttttgcttatttagggatgtttggatggacttatttgagcttgcctgctggcataagcacttgtggaaacaacttaaggcttgtccacaaactgtatgacaatagtctgactttattttaactttagccatgaaaatagtttatctataagcacctatatgctatatgataactgcttaatttttttaattcttcatcgaaactacgaggggatgaataattcttttgaagaagtatcggttgactacttgcaacttcgcaacatggatgtaaatgtgacaaacttgttttctacaactgcattaagggatgaagatgttagtttttttttttttgttctgccatttagggtctgttcgggtcgacttattagagcctatctcttgacataaacacttgcgagactttttgatggatcttttaggctgttttccgcatattccataagtcctctataataggttatgaaaatagtttgactttattttatcttttgttatcgaagtagcttatacgtaaacacttaaatgataatcagttatgctatacgtatccccatttactgcttgcaactttgtaacttagtaaaccatctcataagatagatgtttctgactctaattaatctctctttccctttctatcttcatcagaaaatattaggctgttctcttcctttgtttttgacgggaaatagcaatggtctttcgagtaataattttgtcactgattgtataggagg

SEQ ID NO: 28898 - DNA, 610 bp, Medicago truncatula; identical to SEQ ID NO: 28739
  Intron number 1 from transcript Medtr3g137010.1 (locus Med tr3g137010) derived from phytozome v7.0 (chr-ID MtChr3; po s 34677335 to 34677944)

SEQ ID NO: 28899 - DNA, 867 bp, Medicago truncatula
  Intron number 1 from transcript Medtr2g092570.2 (locus Med tr2g092570) derived from phytozome v7.0 (chr-ID MtChr2; po s 21173095 to 21173961)
tgcaaagctagcagaacaagctgaacgctgttccctctctctctctctctctctctctctctctcaacactatttatggttcttcattttacttgctttcaattttctatcatgttttcacaaacttttactcctacccattttctctttcttacttattacattctttcttttcataaagtttcattttttacaaaaaaaaacttaacattttttgtttttgcttcattgacccattacaagcgtgtgggtatgtgaaagtaaagtaacgggatttatggatttattacaagagtgtgtgtgcctaaagcatggacactctaagacactgatacatataattatacttaattatgtgattttatcaaattattaactgtgacagcatgtcagtgtcgtctggtatctccgtctgtatccgtgcttcataggctgtgtccgcaatttttttagtaaagcccaatttagccacccagagttttattgcggctcaatttaaactagtctcttatgatattttcataccagggacaaattatatttgggtcattatattagaggaaataatttctgtgggactagttttgatgttattttttgtcgaaactaaattgggccgcgagaaaattatgagagactaaattgattttttttttcccttcactttagtaaaagtactgataccatgactgccgcgtaaacaccggtaataatttaagaaaataaaagtggtcgaatgtaatcacttgtgttggtgtcagacatggacatgtgtgaacaccttcaattcgggttttggtgttacgtagtttttttcaatgaattgtttcaagaaattttaatgatgtagtaatatggtgtgcagaa

SEQ ID NO: 28900 - DNA, 317 bp, Medicago truncatula
  Intron number 1 from transcript Medtr1g140400.1 (locus Med tr1g140400) derived from phytozome v7.0 (chr-ID MtChr1; po s 31038072 to 31038388 reverse strand)
gctttgttcacattccaaacattctcactggtaattctgtcaaccttgtttcttttatgttttcaatttctcttctttttttttattttttttttgttctgctttgatgtctcttcctttttctattttggcaaagcttagttgaaagttgaaaacttgatattcatggttcataaatttattagtagttaaaaacttggtaaaaaagaaatgaattttgaactgatatgattagtgggttgttcaattctgatatgacaactttgtttgtgatgaatgcagatcaagttgggaaaaaaatcagagtttgtgtgcaa

SEQ ID NO: 28901 - DNA, 735 bp, Medicago truncatula
  Intron number 2 from transcript Medtr3g064810.1 (locus Med tr3g064810) derived from phytozome v7.0 (chr-ID MtChr3; po s 14993632 to 14994366)
tactggatcaaaagtagatcagaagctatacagaggtatgattggttctctgttatatctcactgcatctagaccagatattttattcagtgtatgcttgtgtgcaagattccaatcagatcctagagaatctcatttaactgcagttaagagaatcttcaggtatctgaagggaacaactaatttgggactcctgtataggaaatctctagattatcagttggttggattctgtgatgctgattttgctggtgataggattgaaagaaaatcaaccagtggaaactgtcagttcctgggagagaatctgatatcctcgactagtaaaatatgtccacagcaaaagcagaatacatctcagctgcaagttgttgtacacaactactttggatgaaacatcagttggaggactatcagataattgctaatagtattcccatcttttttgataatactgctgctatttgtttatcaaagaatccaattctacattcaagagccaagcatattgaaatcaaacaccattttatcagagattatgttcaaagaggagttttagatataaagttcattgatactgatcatcaatgggctgatatatttacaaaacctctaactgttgaaagatttgattttattaagaaaattttgaacatgcattttgtgtctgattaaagcttgcttgcctctgaataagaagtttggttctgaagttcgttcagaagctatcaatcc

SEQ ID NO: 28902 - DNA, 476 bp, Medicago truncatula
  Intron number 2 from transcript Medtr3g036840.1 (locus Med tr3g036840) derived from phytozome v7.0 (chr-ID MtChr3; po s 9821278 to 9821753)
ctacacaggtaacctaccttcatctcagccccatgtatgcaaaatattctcattcatctactgcagttgcactacaccgactctattttgttttagtgaggcgtcacagtttagtcattaattaaaatgtgccttagttggttgagtagagcagataaatgtttatgaactagtcccttgagtctcgatttccaagcaatttgattatgagacttttgtttgtttatgaactagttataaaatgtacgttaaactttggttccatgattctaataaaactgtgcacacaaggaatagaacagaaatgaactctctattgctaccttgattttatttgttctctctgctgctacttttataggacataagttgttatgagaactaatattactcaatgcttattctaatgaagaaagagtgttttcttaatttctgtaatgaactgagagacaagaactacttaagtgactcgaggg

SEQ ID NO: 28903 - DNA, 612 bp, Medicago truncatula
  Intron number 1 from transcript Medtr2g014320.1 (locus Med tr2g014320) derived from phytozome v7.0 (chr-ID MtChr2; po s 3614630 to 3615241 reverse strand)
gcaaaacgtggctacaaaattcgtatccttttttattttcttataaatgtattatgcttgatgaaattgcttatctggaactgattcaacttttattttatttttttgttaagaaataatttaaatcaaataaagttaggtactttgtattgaagtctattttttaaatttttttaagcttttggttttctgatttgagaggacaagttttgatgtaatctgtttgttttctgggaaaatcagtgaagcaaatttttttgaagttgctgtgaaaagtttaatttttttttaatattttaatttctgaaaattgttgcaaaagttaatgggagcttgaagattttgcctttgatttctggttttatctgttcttttttatttcaatcatttgaaaacattcagcttttttcatcttaatgaaagtcataattttttttatatgatgatgtgaattttgttggttaagcttaaaaaggtgatttttaatttattggtggtgttgaatctttgttttttatgttcatctgattttgtaagttgttgagtgtatttgttgataatgtgatttcctgagccaattaacttcagaggaatttgtagctcattcaagca

SEQ ID NO: 28904 - DNA, 906 bp, Medicago truncatula
  Intron number 1 from transcript Medtr3g076480.1 (locus Med tr3g076480) derived from phytozome v7.0 (chr-ID MtChr3; po s 17685569 to 17686474)
cgagattcattgcctcaaagaatttccatgtaaggatatgttcttaaactttttttattgcgattcaagaactttggctaaatttgtttatggtatcttcattatatgatgttgttcatgtaattttttcaaacttattatttcatgttatatttggtttgtttggaagtgaattgattttagtagttttccaattgctaaatcttatgattggtgatcttatttattttgagacttgaattcccgtgtttctttctttttagttcatgtgcagtttataagttgtagattgattagtttttgtcagctgagatttggattgagacttccatccctgtgtcaacattcttctccaccttcgattatgtattttccggcgacaagatgatgtcgttaagcaacattaatccaatgccttcagcgcaatggcgacaatgtatccatcctctattcaaaataattatttgctatgactaattcacattgttttccaattattcaatcttatagattgaataatggttggacagatttcttgaacgttgaagcggaggaatcgaagacagtggcggagggtgattattcaatcgatacaagcaattagagggatttttaaaaattcaccggaaggtgattgtcatgatcgttgatgatctagataggtattcttcataatattcattggttggattcgatgtatcggtctctctatctcatctaattatgtttctgattttttttctccctatattttcttcacttttgcaggttttcctttttggtaggattgtgtttattgaggaacgcatagcttgactgtaatacttattgtaatacttacaagttgcaattgctgtcaaaaatgctaaaatgagtcaaatttactaattgcaggcttataaggag

SEQ ID NO: 28905 - DNA, 629 bp, Medicago truncatula
  Intron number 1 from transcript Medtr3g132960.1 (locus Med tr3g132960) derived from phytozome v7.0 (chr-ID MtChr3; po s 33559624 to 33560252)
gtttcagatagcgaggtaatctaatttatgtaaacgatccttacaaatatcgagaattttgattttagtcctctatttatttttgttgctagtcattaaaaatacacaattttctgtttttgattttggttgctttgttttagtatcatatttgttcttgtcataggtagaagatttgcttgtagctctttgtaataaggactaaaatgaatattgaccaatcttaatactcacagatattacaaacggtaaaaagtgacatatttgcaaatgactataaacaaacaaatattttttgaacgactaagaaacattggcatatttggagggactaggcatatttaaacctttttacttatatgtctattcgtttcccattgcaatttttgctaagtttctgtttcaattttattgcaaaacaaatcaaacataacattaaacaataatatgaaatatgtctctgtatttgaatcttattgttaatttttttgtcgagttcctttaaaaaaaattaccctattatattgtgttttttgtttgttttttaataaacgtgttttgggtttggtttaatttggtggttattgttgtttgtttgattgtttgatattggtggctttgttcagatt

SEQ ID NO: 28906 - DNA, 955 bp, Medicago truncatula
  Intron number 2 from transcript Medtr3g132960.1 (locus Med tr3g132960) derived from phytozome v7.0 (chr-ID MtChr3; po s 33560383 to 33561337)
gtgaggggcttcaaaattttcactggcttgttcaggtgattgagcacattgactgttttgatgaatttatttctaggatcttctgtttgatgttttatttgttaattttgtttattgttagtaacatactgttttttaacctctctgaacatgattataagtattaaggagtcatattcctaaagcttatgactaaaggttttgacttaatggttatcattcactttcaacttgtctggctacaatgtgtaaaggtctataataagcttagatcaaatgagtttttataaaatcatttctgtaacatgaccagcataagttgatccctgtccatccttgaagaacttgtggatattcaagaggtctccgaacttgaaaaaaattgtattcccttgcataagcaacaatgaatgatctcaggagacgagtaactagtgacacaaagaaagctacaattatatgtagtatgaatcatagaagattgactaggtacagcatactgtatttcagaattttctttaaaatttaagcatatcaaacctgcttaagcatatcaaaaccgcttaacaactagactgaaacgcttgccttgattagggactatgagaatttaagagagcgcataactaaatgaagaaaccaaatataaacttgcccagcaacacacatcaatcactatcatacacgaacctaaaaatcaccgatatagtttatgcaatggttttaatcttattattctgttcttaatttaactgttagtttaaaagtccgctgttatgcaatggtttcatcatgttttagataatgatttctatattccccatgaagccatgatatgttagtattttgtttagcttgtatttttcttatcagataatgcctttgcttattcctattagttatactaaatatttttgcaggatttgaggtgctttgttctcaatcttatttcact

SEQ ID NO: 28907 - DNA, 371 bp, Medicago truncatula
  Intron number 4 from transcript Medtr4g012230.1 (locus Med tr4g012230) derived from phytozome v7.0 (chr-ID MtChr4; po s 2023127 to 2023497)
gatcattggaaactcaattacgtaaaaatattgtttctgatatcttattttattggatttgactcttctaaattgcgctctttcgcttttaagactaatataagtgattataatcgttacggaaaaatttcaccaatgattgttatgtcaacctttatagcaccgacatttcaatttgaaggtgtgtctgttgtctgatacgtgtctgttgtctgttaagtgtcaatgtccgacacaactaactttcgtggttacattcaattattgttattatctgataatagaagactcgtatcaaaagttaatgaggtcaatgataaaataatactaatcactattttccaaaaattgattatgtgaaggaccatctc

SEQ ID NO: 28908 - DNA, 731 bp, Medicago truncatula
  Intron number 1 from transcript Medtr3g062150.1 (locus Med tr3g062150) derived from phytozome v7.0 (chr-ID MtChr3; po s 14254821 to 14255551)
actccggtattgcgacttagagggagggtaaaaaaggtcaattttttttcttatttcttgatttgatggtgttaaaatgaggggaggttagtgttgttttggaaaacttgaggggaggaatattatatgtaactagaaggattacctacactaccttcactaagtatagagatttgtcactcttcatgtttctttccatggactgaagacaattatcctaaaaaattagacaaggatgttagatccataattctccttggattctgaagtgtgagcataaattttgttgcattttgatgccgattgcattacgcccttaggaacgcaaaatatcctaaagtggcattttccgatgctatgtctcctcttgcaacaacaatagtgacaaatgcgagattttacttccccttgccaaatgcgacaagtctcacatccaaaccaagatggtttctccttttcaagtttaacttttggaatttctaccatagatttctgaagtgcttctaattaactttttgtttctaaaactagcgtccaaataaaaaatgaccttctttttggttgtcaacttcttaaaagaatctttagcttcactatggaaattttcaaaagcaatttttgaagttcataatagaaaaagcttagtaagattattgtatcttcaaacaaatagtcccatctctatgtcatcgttatctttcttttattttttctcatgattttccaaagcc

SEQ ID NO: 28909 - DNA, 808 bp, Medicago truncatula
  Intron number 2 from transcript Medtr1g009870.1 (locus Med tr1g009870) derived from phytozome v7.0 (chr-ID MtChr1; po s 1462489 to 1463296)
ggagcttccaggtaaaattttatatatgcatggatctttttgtttaattgaagattcacttgactctatttgattttgccctttttttcatttatcaagaacaagaatagatctatattgaaactaaatatttgttttgtatttcatctacttaatttacttttcctttcatccatgttttataaaaacaaaaaactagggtttcttcaagattctactattaagctacaacaaattcagcagctaacttataaacactccaatttcttcatgctagaaaaaataaaattagtgacggaaaaaatgattgtatcataactaatctttatgtttttctgaaatatatgactttcatctttcttgtgatatggttaaggtttactatagtatacacaaaattttattttatttcataaatcctcattttttcaaaaaaaaaaaaaatcctcattgtcgcaaagaaaattaatatatatctggcaaaataaatatgataattatttaatggattatgttaacaagtgtccttactagttaaatattcaaaaaagggaacaattgctaaattctatgtagaaaaaaatactttttggtatttcattgagtcaaatacacaatttttaaggttaagtttctacttttagtttctaaacaaatgtcccaaggacacatgttagcatttcccttatttaattaatttttttatgacctaataatatatagtatggtttctctattaattaaattaaatttgttcaacttttttcttctaattatttaattatgtaaatttatagggaaggccaag

SEQ ID NO: 28910 - DNA, 645 bp, Medicago truncatula
  Intron number 2 from transcript Medtr3g109230.1 (locus Med tr3g109230) derived from phytozome v7.0 (chr-ID MtChr3; po s 27339878 to 27340522 reverse strand)
tggttctgttacgctctcttttggaagacactgtgaagtttcttgtcttctttctctattttctttgggcttgtttggatcgacttatttaagcatatctattggcataggcacttgtaagactatttgggagagcttatggaaaccacttatggcatgtccataagctgttttcatcttatttctataaactctctaggatagcttatgaaaacaagttataacttatatgaaaacaattatactttattttatcttttgtcatagaaatagcttatatatcaacacttgtatgatacacgcttttgctgagagcagcacttaattaagttgtccatccaaacagagcctttgcagtgcgtacttggacttgaaacagtataaaatgaatttttgtcatgtttgttgtgtgtaatgggtgtgcagtgtgttggggatacaattaatacactcacacacttggttaataagagagaaaaggagagcactatgatattcaatcagagaattttttattgaatttacatgtaaataagcacactttgtaggcttcacttgatttacaacaagactaacaaaactaaattagtttgaattaatctcaacgcagggcttgttggtagaaacgggacgggaaaaacaact

SEQ ID NO: 28911 - DNA, 726 bp, Medicago truncatula
  Intron number 2 from transcript Medtr2g018680.1 (locus Med tr2g018680) derived from phytozome v7.0 (chr-ID MtChr2; po s 5000037 to 5000762 reverse strand)
ggatttgtaagtgcctacaacttcttctttggcatcatggccactttattttcaatctgaaaattctttttttgttttaagccttttctgtaaaaaaatctttgaatacagcaaacatatttaaaaataagaaaaatgatttttgtacaactaaatttaggcaactttcacgctaaattttcaagtagttaatgcaattcaaataggtagttaatcaaactcagtagatggttaagggatatacaagatatcaaaactcattaaccaccaacgaacattcgttgaccacaagtttagacattcttaaccataattttcaaatgttcaactacatgtagatttgaactccttaaacctgtgattaaccacgtttacatttgtggttaatgaagtagcgttaatggatgttaagttttcatacctagtatatccattaaccatttatcgaacgtaatcatctactaattgcagttaaccacctatttgaattgtgttaatcacttcgattgttgtcgtaaaagttgtctaattttgataattcctataacacaacttaaaaataaagtggtgttttgtaataattgaaattaaaaacaaaaatgaaaacaatgagattgttttctcaaattaaatgttagtatgtgttttagttttgcattctcaagttttgtttcatgatatatgaatgcaggtatttcaaaaaggggctccaatagcaagagactt

SEQ ID NO: 28912 - DNA, 1009 bp, Medicago truncatula
  Intron number 2 from transcript Medtr2g030360.1 (locus Med tr2g030360) derived from phytozome v7.0 (chr-ID MtChr2; po s 8412310 to 8413318)
tgcaagtggagataattcagaatctggagttgcaggtacttttcaactatcatgtaccattgtacttggttaattctataatgcactatgaaattgatgtactgtgtaactgcactatggagatattgtttctaaaatttaaatttactatgtttacaaatcaaataaaaagcgaatagatataagtataatgagaaatgttgtatattacgaatgcgaaacacgtggccgaacatggtgatttccatccagtcaaagtttatatttttccatctttaaatgttatttatgttatttaaaaaccaattgcatgtagccacctttgcattcttcgatgttgtgttgcttgctctttgtaaggaatagcatagctcttagtataatatatatccgtaccatataattcttcaactttagtgtactgtaaaattagcctgtgtttttttggcgttggaattgtcaacaattcgacaatttgtagcttagaaattatcgccgtggaatgagtgtcgggatgcaagaaaaatgttgctgaaacattcccaaacaagcacttaatgtgtatattttcggtggagtatatgttgtttttcgcttcactttgacaatttttagctttgaaattatcgccgtgggaagtgtcgggatgcgagaaactgtaaccgtatgttttgatcgaagtgtaggtttgaaacggaaatccaaacatcccttaaattacattgtcatttaccgaatacaaaattcttaatatctttccatacgactgaataagttgatgttgacagttgtaatggcaggcctgtggagtgtttgtttgaataaagatagtgaaccatttttcgctaaagaatgaaatatactataacagtgatagttatttagagcttcaattgtctatttattgatttatttcagattcattgatattgttgaatgtttgataataattttcctggttttttgcgagtcaggtcaaggagcaggtgaagcgaaaagggctttgtat

SEQ ID NO: 28913 - DNA, 563 bp, Medicago truncatula
  Intron number 2 from transcript Medtr2g092930.1 (locus Med tr2g092930) derived from phytozome v7.0 (chr-ID MtChr2; po s 21462449 to 21463011)
tggtatgaagttttttattatttatgaggttatgttatgttcttgttcagtctcagtagcattctttctaatccctttctactatttaagtctctgttagcttattttgcatgatacaaatccaatcatgactgtagtgttaaagttataattacaacagagaaatgttagcaagactctatctttcgtctttcaatacactattgaagagtgatattcatttgagtcccaccacattgagaatgggacacacgacttcagtgatgttcacatgaatttctctttaacaatagtatactgaaattgtgttaatggcattcctcagtgttctttagtttcaagcagaaataattgtagctggattctggttggatttagtatgaaaaagggcattagacttgtacaaatttttatgagcctttgcttaatagtttctggtcaagcatatgtttcttttttatattgtcgttagttaaattggatgtttcagtgattaccttttgagttctatttgtttgatatgaatagttcacagtggagtctctatcatctttatctgacac

SEQ ID NO: 28914 - DNA, 678 bp, Medicago truncatula
  Intron number 1 from transcript Medtr3g030260.1 (locus Med tr3g030260) derived from phytozome v7.0 (chr-ID MtChr3; po s 8164248 to 8164925 reverse strand)
tccaacaggtaaatctcatcaaccttttttcttcgatcgtttctcacatttcttcaatttcgttgtttttcttgttttttgtttttttaactttgtttttgtatggtttttgcaatttaggtttcaaaagaggaaaaaaaaatgacccatttgattatttatgttgttaatcttgttgtttgatgatttttgttcttgatgtgattaaagattcgtttgatgattgttttaagctattttttgattattattcttgtgttttgacattgtattaatcagaaaaattgattaaattaaagtttaatcagttctttttctgtttaggttgatttaattttagggtttttagtctaaaaattaaagatgaatttttaaaatttaatttttagggttttattttttctgatgatatatgactttaacacaaaaattgaaatcctaatgtatgtgactcagaaattctgtttgtaaatgttagttttttttttttttttttttttttttaatgatgttcttgtaattttttttctttgttcattcactttagtaattgaagattatttctcattttcttggttgataacttgttttttttttttttttttttttttttctttttctgcaatttatttaattatttacttaagtttatgaattgtttcagggtttgcaagtttt

SEQ ID NO: 28915 - DNA, 794 bp, Medicago truncatula
  Intron number 1 from transcript Medtr2g046570.1 (locus Med tr2g046570) derived from phytozome v7.0 (chr-ID MtChr2; po s 13072020 to 13072813 reverse strand)
ctcaccgatcatcaactttttcatcatctcttaaggtcgcttttttcttctatcgtcttttccgattcgtttttttttttttttccttttgttttgttttaatcgatttactttttattttattgttgttttgaaggattcgatctgtttatggcttttttgtatgtttgatttgttgtttttttcaatactgttcaattgttatcgattctgtctttttttttgttatgtttgaagcgttcgatgactttgtttttttgtattcttgttttaggattagtttcatatgcttgatttttattgtatgttagatttttctgttgaatagcatcatcgattttatttattcaagagattatgttattttattttaatctatcttttttaatctcatcacgttcattgctgtaataatttgttgctataatggtttattttgcaaacttgattttagtaaatgttagatttaatgaagttatttatgttttttttttttgagataaaaaagcttacccttttcttgaggtagagggtggtgagcgatttaatttgataatatttttgcttagttgagagagtgaaggtaacatactagttttttggtgggatggaaaagattttcttataggaaaatgattaatttactgttatttaccatcatagcttttatcttttacgttgcatgttatattttagtgttctgttacataaaaacttcaatttgagttatgtcaaaattatcatggttacttcatttgtaattaatgccaaactaagcatgctttagtaattgt

SEQ ID NO: 28916 - DNA, 1028 bp, Medicago truncatula
  Intron number 1 from transcript Medtr3g080210.1 (locus Med tr3g080210) derived from phytozome v7.0 (chr-ID MtChr3; po s 18785812 to 18786839 reverse strand)
atttggctcataggaaagcagaagaagcaggtaaatacatgcatttcttttccttctatcatcaatatttacaccatgccatatatacttacttgattatcattaattactagtaacattattcactttatgctagatttttattttaacgttgtaaataagagtgtggtatatatataacattcactttacctgcacaaagtataagttcatccaaaattaggaaccatgcatgtatatataatttaatttcttcttcttctgttttttttttttttttttggaatttggaagcgggaaccaatgtacaaatttatgaaaaagaaaattaaagatataatttgttgtcaaaagtgattaattgacaaaaaagatgctagagttgaggcacaattcttggtgtgatgtttgtttcttatggccgtaggaaaagaaaagacacaaatttcatttgattcttttaatgtaatttaatttaattttgttcgtaactttttttcttctttttgtcaaccaaattattacttagacccctttaattaacaaaagcataacaattaaggtaaaataaacaaaaagcaataatttggtttagcatgttaaacaaacagtggcattggccacaaaagaaaaagaatgagatggtccaaaagattatttagcaaagcatgatagagagcattcaatgggggcattatgtgtagtactaaatgggagtggcaccccaccactcatcaacggtgtaggactgttccccttgtctctaaggatgggtccaatttttgtgacatcaagtatatatcttggtagaaataattctagaaaatagtttagatcatcaaaatctttgactttagttatcgattaagactttgtaactaagcaagaagcattataattttagttgcataatcaaatgtcacactttgctacaactaatgatagaaagtctactttaacttttaacattaattaatatgttgatatatatacattctatgattgaatttgaagtaacagaacaataa

SEQ ID NO: 28917 - DNA, 788 bp, Medicago truncatula
  Intron number 1 from transcript Medtr2g122650.1 (locus Med tr2g122650) derived from phytozome v7.0 (chr-ID MtChr2; po s 29520254 to 29521041)
gttcgtgaagtgtgtcattcccaataattattaaggtattttcatttatttaattttccatactttagcttaatcatgtcttttatttagctgatgaatcctacacaaatgcttaaactattaattacttcaaatgtttgtatcaaatgtttgttgttgtcttatgtggattgacttattagagcttatccagcggcatgacatgaataattgtttcagacaacttatgaaaacagcttaggacattttcataggttgttttcagcttattttcataagctcacggagatagcttatacatatcatgatagatacttatgatataagctgcaaattaactgtacgtttggtttcacttttggaggtgttaaaattgattctagatgtgtagaattgattttgacatgtttggatattgattagtagaattgattctacttgaagctagaatttgtagcttcttgcttttacaattgattttagcattgaatttattgttcaattcattttttacacaaatatatccaaacataaatcactttacactcgactaacatttagttagaatcaattttacaaaattagttcattcagaatcaatttgtgtctctgtagaaccatacacatactaagctgtttttccaaacagggccttaagttatactatcatagtgagtccattgcttgttcttctcatattttgatttcagtttccaactgtcatactggattcgatagtaggtttcatctgagttgtactttggcttattttttaggtttgtttgtaa

SEQ ID NO: 28918 - DNA, 979 bp, Medicago truncatula
  Intron number 1 from transcript Medtr3g110470.1 (locus Med tr3g110470) derived from phytozome v7.0 (chr-ID MtChr3; po s 27837713 to 27838691)
atttgcgacacaaaaaacctctacttggagaccaagtaagttctatcactctcatattggtcacaccaaatggttaatactataataactttgcttagtttcaagagcttaaatatatattaacgtgctaattaacaaaactattttttaatctaatcatggcttacaatctgaaacagaaactattcttacaataaatattagagaaatgttcaaacatttacacaaaagctatttatggtaattgtagagaaataagtaaaatgtgagtccttccttaaaaaagatggttaatatttagaatatattattgaaaaaacccgtatttcatcaaaaataacttcatcagtttttttcatgtgtaaatataacttctttttttcttattttatgttgtaaaagaactgtaaaaaaaaagtgggtatgattaattgatgaaaaaaattatttaaggattgttttctgttgtaaggaccaaattattttttatttattgttagggagtatatccattttttggagactaatagttgcctttattttttatttataagaatggtcacatggtgtgttcgtataccatatatgaccatgtactttatttttccattttccttaatggtgactttagccagcagttggagaaatattatagacatgctgcagtagatagtatcaaacatataaactcaaaatagacagacagaagaaagagacatacagtaacacatatagacattaagtttgttttcattcaatttgttattcttattcagttatagattttgggtcaatgatttcttgtactatagtacttagttggtcattcagcatgccttctccaattttattgtatttttacataaaaattgagtttctgttttacaaaaagaattccatatattattatgattttttttcattttggatttttttttttacagattcaagaatttactaaagggatagctgaatatcc

SEQ ID NO: 28919 - DNA, 161 bp, Medicago truncatula
  Intron number 2 from transcript Medtr1g137530.1 (locus Med tr1g137530) derived from phytozome v7.0 (chr-ID MtChr1; po s 30500707 to 30500867 reverse strand)
ccaatgtaagtataatttaattattattttacttatttaatgttagaagtaaaatttaggttagcatatatttaatgtttgatttacttattatttatttaacgatgttgtttgctgttttttgtttttgtatttcagttttgaagaaaacatagggtgaa

SEQ ID NO: 28920 - DNA, 688 bp, Medicago truncatula
  Intron number 1 from transcript Medtr1g149480.1 (locus Med tr1g149480) derived from phytozome v7.0 (chr-ID MtChr1; po s 33015113 to 33015800)
attgagttataacaagacgtgagataaacacaagtatcttctggttccctttcaatcagcagtgcctgtctcagcattttttttagggaaccagcgatcttatttatatctagggagggttaaacaaatttactaacttatttatagtaagggataagggtaatttttttttttttttttgggtatgggtaaaatattgttattcctttttaagagggtagaatattatttacattgttgtggttctattgctgtgtattgttcttttttctaatggaatttaaataattttttaatatataatttaaataatattataaatataacaatatagtttaaatgaaggggtaaaattgaaaagaaaaaggtcactgcaaaaaatatgtattccctttatatattattatagattttagtgagatttatttaaataaatttataataattttgtcaaaaactgttgttctgacgggcactcagtgtcagtggttgtctattcgctttgtttattacgctaatgcgtataaattccaaaaaatgtattatatatatatatatatatatatatatatatatatattatatttaaatagaaaagtagattttatgaaatttagattttgattaaccaagggataatcttttcaaaaaaggatttttgggtcaaagttatttctgggggtgggag

SEQ ID NO: 28921 - DNA, 972 bp, Medicago truncatula
  Intron number 2 from transcript Medtr1g010560.1 (locus Med tr1g010560) derived from phytozome v7.0 (chr-ID MtChr1; po s 1794271 to 1795242 reverse strand)
atctagcttttgaggttctaaattcattgaaggtaatatatttctggaaatttattgtttcttatgcttttcaaaatgatttcacgcctctccattcatgtgccagtctgtgccttgttcctttctttgtatacactgcttttcttggcttccttatgttgctttgccaatggccattgggtttttaaaagggctgtcttggcatatatacagacaaaactgcaagggcccttgtaaatttaaattgtagtagttccttgtcttccactttctattttattatttttctagtgggggtaagccaactcctctaaaagatttcgtggttaggtgaaggctagataataaaatttttcctctagccttccgcatgcaatagccgcttgggtttaaagtttgtcttgtagaattccattttaccttgtgcggaaattaagctttatttgaaagaatggggcagcaaccattgaacactgatcacttagtaaataggtttataggggggatgtaattgcatgtcaaggatcaactttaatggaggctcatgagtgtgtttatgtctgaaagttgcctattcattttgaaagaatggggcagcaaccattgaacactgatcacttagtaaataggtttataggggggatgtaattgcatgtcaaggatcaactttaatggaggctcatgagtgtgtttatgtctgaaagttgcctattcattttgctaattgttcttaccttgacttatgctaggtttgttatgtatcttttttgtgtttccaatcagtgagttcccatttatggtgcagaaagttgtacatatcaatcgcaaacggacttgcaccattagtagatcaaaactaattccccattgctttattttttgacataagtactctttatttatgcttcgatatgtattgatgccgtaaattatttaacacctttccctcattgacttttattatatagacag

SEQ ID NO: 28922 - DNA, 702 bp, Medicago truncatula
  Intron number 3 from transcript Medtr3g016620.1 (locus Med tr3g016620) derived from phytozome v7.0 (chr-ID MtChr3; po s 3283194 to 3283895 reverse strand)
tttctggtgaccctagtggaaggtttatttttcaggtttttcttttgcaccactctttctttgcatttacctttgtttttgtttatttgtttattgtcttcttcattcaacatatttggggtccatttcaattgaatagtttaaaactaggttatatatcatatgattttaacttgtacacacattttttgaaatatttgccacagtgtagcactgactctttagattgaaggcacgtgtcagacaccgacatatgtggttacatttattgtatgtttggttttgtgagacaaaaaatgattttgaatggattgattgtataaaatttgattctgatgaaagtgagttgaacaataaatttgaggcggaaaatcaattctacttgagaacatccaaacatgtcaaaataaatttttacacctttagaaacaattttgactccaccaaaagtgaaatcaaacatacactaatcactttcattttctcaaatttgtgtctgcgtttacatgttagtgtcctgtttgtgtctatgtttgcttcattggttgcatctaattgttggctaaaatatattaatattgttcgttttgtaaattttcatgacagtgtaaggaatcattcattcccttgattgaaactgtgatgtgcatattctccattttcttaggttacaggggaatccaggaaaaaagaccaatatct

SEQ ID NO: 28923 - DNA, 727 bp, Medicago truncatula
  Intron number 2 from transcript Medtr2g097310.1 (locus Med tr2g097310) derived from phytozome v7.0 (chr-ID MtChr2; po s 22790947 to 22791673 reverse strand)
tggatctttcgccaaacacggaatattgcttcgacgtaagtatgtctacacaatgaaatctaagatattagaagtgttagtatgtttacttaaataatgttaatgatttttcaaattttatatgggaatgaatgttgtatcatgattgtttgtttcatttgatttgattttgtataatgatcaatttatacacgtcattgatttagataatttgatacgaacattagactctagttatagggggacaagaatatgtttgttgtcttattccaataaactttatgcttaaattagattgaataatacaaccatttaaagttgcatatttttaatataaatgaaattaatgtatgaaggtgatttcatactgcagaaagcaatggaaagtattttagtatttttcacaatggtggtcttgtaggccgatgtgaaatatgttaacgaataaaaaatggaacctgagttcacatcggtggaacatataccagatgtgaaatgtatgtatttgacatcagtttcaatggttgcaccgaggtgaaaatatatgctttagtataaattatctcatatcaaatcagtgattggccgccggatgtggaaaacatcttgtcacatctgtttcccacccgatgtgaaatcttgctgacatacaacatcatctttaattacatcagctgggacccgatgtgaagtgtcatttctgaagtagtgtcctttgcacatagca

SEQ ID NO: 28924 - DNA, 741 bp, Medicago truncatula
  Intron number 1 from transcript Medtr2g097310.1 (locus Med tr2g097310) derived from phytozome v7.0 (chr-ID MtChr2; po s 22791675 to 22792415 reverse strand)
tgtggttgtttgctgggttttgttcgaaaatagtactcagcgtgagttaagtcacgtaagggcaaaattgtcctttcagttgggagcgagcaaatttcgctgggtaaagagcagaattctagcatcagtatttcttggtgggctcacattagtgcacatccctattttgttcttttcacttactattttgtgtccttagtttgttccattacatttagtaccacagccatggatatgtttgttgtttcaagactaagttcaagaatatgtttgttgtttcaagacttataagttcaagaataagtttaagtttatgcttttggaaggtaatggattcaatcacgtgttttgttatcagttgggaatgatgcgggtacaaggatacgaatagttggtgtttgcgaaacttggaagtttaacaaccattatcttaaccaaacatgaaggtcttgtttctttggaattagctagttatgaggtgttttatgcaacttgaaattcccaaaagcaacaccattataatctcctaaactaagagtctaagataacttgagtatttgattatgcttcttttgagaatagttggatggactgatgtcttgatgactagcttccattaattgacgattttccacatttgtgtgacttgttggctaggattatgtgtgtctttttactaagatatgtatagtgaatactttgattgtcctactgagaatataaattactttttccttgcag

SEQ ID NO: 28925 - DNA, 606 bp, Medicago truncatula
  Intron number 1 from transcript Medtr1g071450.1 (locus Med tr1g071450) derived from phytozome v7.0 (chr-ID MtChr1; po s 14373770 to 14374375)
ggtttgcacaactgcatcaaaataggtgcttgttaattaaggacaagttgcaaatgattataaaaatgtcaatgttggtttccttttttcagagatttgtatgtgatttaaaagtttttcttcgaattttctttacaaatatttgaaaatttatagtaaagtaaaaacgaaataagtaagtaccactgctgtaattattagtaaaatgaaaactacaagtaaaacataaaatggtttttcaaatcaaataaatttcgccaatgaagtgattgtgagatttcctgctgtattttgcttataaagagttgcttgaatgtgggagtagacgttttgtcactttttaccccaaaatcgataagatggaattctatgtcaatggtctttttaaaaatagagttgactgccaatacttgtgttgacttgaccttcattgaatatgaaagacctgtaatcttgaaataagcatgcggaagatgccaaaagatgaaaatttgaattttcttttgtgagtgtgtcgactttggtatctttatttttatgtcattgttttgtcaatggtttccgagtgttgacggtaactatgccttctcgcaggtactgaaccta

SEQ ID NO: 28926 - DNA, 804 bp, Medicago truncatula
  Intron number 2 from transcript Medtr2g092280.1 (locus Med tr2g092280) derived from phytozome v7.0 (chr-ID MtChr2; po s 21033961 to 21034764)
tccgtttcctctggttttgggctgggccttctgttgtacgtttttttgcttcttttgctgcttgcaccattttctttgctatttgcacctgtggcctgctcattcttgtttacaaaatttctaaaaaaaatcctagttgtttcttggtacatttttggcatttttatggtgttttcctgcatgtaaaaaatatcaaaatggcatgaacaaatttccatgtgtttttacacttttggtatactttttgctatgtttttgttcttgatactttgatatgtgttatgaataaatgataccatatcttatgatgaatatgcctctggacatgtgcttctttttgctgttttgaatatgattttatggatttcttgttttacaagcaacaaatgtttgttttagagaataaagtgtcaaatttctctatgaatttggtgtgataccttgcttgcatatgtttccattaatttcatgtcatggcttgaaaccaaatttcttgcaaaattgccatgatgtgatgattatgggttgcaagcacctttaggtatcacatcaaagtttttaggttcattgccactttattaccttttctttgccatttttatgcatttccttttgattacttcctactattgtgtgctttatgattactaaccatttcatctcatgtgccatacctttcatagcattccaccactctctccactttctttagcttagcatttattttatttttttacaagttttaattcatttggtaatgtaatttgttatcattggtttgtagcttggcaaaggggccataga

SEQ ID NO: 28927 - DNA, 984 bp, Medicago truncatula
  Intron number 4 from transcript Medtr3g163590.1 (locus Med tr3g163590) derived from phytozome v7.0 (chr-ID MtChr3; po s 43005884 to 43006867)
cagatttcaggtaatcctatatattttatgttatcattcttatcttttttatgaaagaaataattaactgagaatgcaagatggattccaaaggaggatataaacaaagttgcagaacaagacaactaaaataaacctgaactggaagtgaaaactcatttccatattccgtgcttgtttaaaatgcaataaataattgatatagttagtcctactttttagaattaagaaaatctgtagttattcctttaaatgtacaacttcctagattgattgttaatatccctagagtatacaacttcctaggttagtgcttattcattaagctttaaatgtatttattgtaatacaagtatacaactataaatacaagttgtagctagaaacacagaaattacagaattctatttaggtgcatatctgttatagcataaatgatttaatcttggtgggagctgtggaatgctatattggctttttaaggagtttgtttctttctattttaagattttgtaaaaaaaaaatgcctctagagaagaaactgtaaaggagaggaaaatcctccataaagcaagcaactttctctcaaaaatcctttaaaaattcaactccatagcaactagccacacagttttgaacaagcttgtgatctaaaaccctcaattcattctactcaataaacctgccatcaagcttaacataaaatggtgtattggatcttcctggtttagaccactctgattttgaattctaaacttaaggccaaccttttcaattaaggggtcaccattaagagacaactttgatttaagtcctccaaattcatacaaagcttttgtttctatggagaaatggggatatctattatttcttaaatcgtttctatcaagggatgccttcaattattgaagactcttaacttattttgtgttgcatttttttaacaattgtggtcgtttgactcctttgcattcattgtgcagt

SEQ ID NO: 28928 - DNA, 1014 bp, Medicago truncatula
  Intron number 1 from transcript Medtr3g079830.1 (locus Med tr3g079830) derived from phytozome v7.0 (chr-ID MtChr3; po s 18627951 to 18628964 reverse strand)
ctcctcaacatgtaactatcttccccttttcattattttcgttattcttcaattctcttttctcatgttcctttcaattttacttttgtttttatataatttattttcatgattttgagtaccgatttcagaaaagtttctaacttcacaattggaatgataaaaattaggattcaaaatttcactctgttaagtgttgtgtttgtaagctttataataatggtaaaaatgtatatttgatgcacttgttttagttaatatacctctgtttggataagcagcttaattgagtgcttatattgttcaaataaactcaatttagtgcttatgtataagctatttctataatagagaataaaattaagtcaaactgttttcagataacatagacctataagctatttttgtaagctacactatacagcttatgtgtataggtcctgttttacagctgatagcataaatgcctatcatgataccttaagtgtctatcgtgataggcacttatgtataagctatttttataacaataggtaaaataaagttaggttatcttcatataatctataagctatcttggagagtttatgaaaataagatgaaaacaatttgtgaacatgtcataagctgctttcataagttttcccaaaccgtctcacagtggttatgcaagtggataagcccaaataagcaaagtcaaacaaccacataggttaaaacagcttctggcatttccacaagtttttaaaaaaattctcacaagtgcttaaaccagaagattagatcaaataagccaatacaaacgcggcttaattgggcttctcaatctttatttccgtcttcttctttatttggttatttttgtttttttaacagttttgaatcgtgtacaaattctatctattggtgggtattgtttctggtttgatatttttgtttcttcggctttttgttatttaacattattcatgttttggtttatgcagacagatacaatacaatattctggtgctt

SEQ ID NO: 28929 - DNA, 577 bp, Medicago truncatula
  Intron number 1 from transcript Medtr1g124390.1 (locus Med tr1g124390) derived from phytozome v7.0 (chr-ID MtChr1; po s 27110293 to 27110869 reverse strand)
agtacacaattcgtcccttaacttaatattagataacattttcatcctttatcttttttgttgtctcaatttagtcatttatgttataaaatgtcaatatcttatcaatttttataagatttttcaatgaaatttgagtttaggtttgtatgatgaaaatttgagtcaacagacgaattgtgtaatttttccttaattatgttattacttattttgttttaattttgaaaagaaaaaaaaaactcataaacaccactgtatagaaaacaaagccaaagtgtatgttcgtgcaatttcgtcaaatgattgtcgcactatttagcatcactctttgttatatcttcttctctttctaaaattactctcaaatctcagtgcaaataacatgtgtaacaaatcgatagagtaaatttaaatattaaaataaaatgtaacaagttatatgcgttcgatttttgtcctggtcatttaaaaaagataacagatgagagtgaattcaaatattaaaaaaatataacaaacaaattttttttgttaccacacaaaatatatcatgtaacaaacacgatatgagtac

SEQ ID NO: 28930 - DNA, 623 bp, Medicago truncatula
  Intron number 2 from transcript Medtr3g111470.1 (locus Med tr3g111470) derived from phytozome v7.0 (chr-ID MtChr3; po s 28357344 to 28357966)
gttgcaggctaggccctattgtcagtgaagcacaggtatgtttgctgtctatcacttctgtatatacaccagatatgtgcttaacttaccacttgctgttaaaatcatacattagttattggtggagagattgaaagcggcaattgagtcttacttatcgtatctatatgcaaagaaaccttgttccatttactctcataagatttttggtttaagacgttgtttgttgtcgttatcgtatctatatgcaaaaggacgtttttaatcaatggctttagtttggttaaaacattcagttgatacataatccgaaaaatctactgctagcatggacttactgtatttgtcttgtgtttgttttgttccaaggctttctctgttatccaaaatgaaaacgtgtaatagtgtgatatcagtgattatgatccaagttgcatgcaatgtgtagtgatacaaagttttgcgtagttaccatgatttagctttctttctgaccatgcaatttaaaaacattaagattgattcagcatttatttgctttgaaccaagacaatacaacatctaatatttgggttacatatgattcagtataagaaagtgttaaattttatctcaacggctaa

SEQ ID NO: 28931 - DNA, 611 bp, Medicago truncatula
  Intron number 1 from transcript Medtr3g150460.1 (locus Med tr3g150460) derived from phytozome v7.0 (chr-ID MtChr3; po s 39643893 to 39644503 reverse strand)
ctgctcgcgttgcttgcgttagcaggtaattccttcatcgtttggtttcatatttcaatatcgatttgataaggaatctgattgcactgtttcattcaattttactttggcttttgttttgattcatcgcattaatcactggaacctgtttatggcaatagtataaatgattccgtttgaattttgaatttcttatatgagcgtcattgaggattgattatggtcctgtttggataaatagctttatttgcaagcattaacacttatcaccataagagcttatgtataaactatttctattacaaaagatagcacaaggttaaattattttcgtataagctatagtttattttcataagctatcttggataacttatgagaataacctgaaaacagcttatgaacatgtcataagctgttttcataagttcttctaaacagtcttacaagtgtttataccattaaataagctcaaataagtcaatccaaacaggctcttagaaactttgcttttgctattataattttattaaccacgacgtagctcttgagcactttagctgttataaatgacggttaatttttttcttcatttatttattggcagtgtg

SEQ ID NO: 28932 - DNA, 1020 bp, Medicago truncatula
  Intron number 1 from transcript Medtr3g137430.1 (locus Med tr3g137430) derived from phytozome v7.0 (chr-ID MtChr3; po s 34845413 to 34846432)
gttgttggatcaggttgatgtccgtagctttttttacttccattctatttaatactatatttttctttgcttaaaaaaatagttggtttttaatttaattttttgtacgatgactttatctgtatttcctagcatacattgtgatccagcattgtctacttgcgagtgccagctctaaacacgggaggacatttttatttttgctttcttttcctatataaacataaacagctcattatgaagagaagaggtgcatatagaataattgactatgaagtcagaatcgttaactagctgttgaatcattgatccaacgcatgctctcgcttccaaccgttttctttcgtcgtctcggtcaaaaagaaaattcagctgcgtcaaacaaatcttcattgacaccaaaatagaagtatggtaaaaaaaaaaaaagaagtatgttcgtaaattgcagggtaaatattgtaccaattattttttgtagagtaaatatattctgtccttataaaatggaacttctgaaaaatttcgtccaaaagaatattatgcaattttagtttctgctaaaacataatttgtttaattatatgtctcagttgacatttgcatttttgaaatgattagttatactgaattttaatacaattaaaactaaaatatcttttacttcatttaacaagtaaaagatattataaaagtaataaatatatattgatatcataaaatgataaataatttgagattgataaatattttaacccagacatataatataataagattgagcaagagtatacttagcacagagtcaattacgaataaattttattttttattgaataaaatacaagtgggtcacatcatatgtatttcatcccataaattaatgagttttaaaaaaaaatgttaatataaatgtttttagcattgttcataaatttgttacgtgtagagggtttgttgatctttttggcatctattattttagcacaaaactttttggttcttaaaaagaaataattt

SEQ ID NO: 28933 - DNA, 565 bp, Medicago truncatula
  Intron number 3 from transcript Medtr3g136830.1 (locus Med tr3g136830) derived from phytozome v7.0 (chr-ID MtChr3; po s 34616728 to 34617292)
ctgtttaaagctggtgcatcctgttggctttgcgggtacctaattagtaaaatcattctattttatacgagtattgttttattttatgtgcattctacgatctgatacagaaaagaaaacctaattgttaatctagctttgtaaatgcaaacttttgaatattgagtcttctaacattattgaggaacataatgaatattaagccatgcccccttccgattaggccttgtttggataaacaacctacttaagtgcttatgtgtaagatatttttataacaaaagataaaataaagtcaagtgttttcgtctaagctatctatcagctgtttccataagctatcatggagagcttattgaaatatgctgaaaacaacttatagaaatgttatgagttgtttctattagttcctcccaacaatcatataagtattcgtgtcaattttttctagctcaattttttctagctccaaaagggaagaaggaagttttggcagaagtgttaaaaaaaccatttattttcatattattgttcatcttctttttacttcagaggcaggaaggag

SEQ ID NO: 28934 - DNA, 591 bp, Medicago truncatula
  Intron number 3 from transcript Medtr1g016690.1 (locus Med tr1g016690) derived from phytozome v7.0 (chr-ID MtChr1; po s 3279654 to 3280244)
ctccaagctgcccagttaaaaagaaggtaataattcaaaattctattagcaaacaatatttttgtctacaccaaacaagtgtattcttaagatgatcttgatgcgaagtgtctactacttcaccaattagtaatctctatcgaaaaatttgacaagaactttaagtgggtttttcctaccaaccacattttttcatataaagactcgaatatgagacttttttaagagatttaagttcagttccactcagaccaatatattgatgagaaagaattttagggtttcttctaagttttaaaattatcttatttttcactttatttatttttttccaaagatttgtacaatataaaaatgaaagtaatgtacaagtatttaaaaataagaaacaaaagtaaaaatagaggacaattttacaatcaaagtgaaaacaataaataaaacagaaaacattttcttaaagtaaacaaattctaaaattttggtattcatgattttgattcaagaatcacccaaacaagatcaaattttgatctcttatgtcattattaattaggtgcaaaaaagtgtagaagaccctactatactagt

SEQ ID NO: 28935 - DNA, 489 bp, Medicago truncatula
  Intron number 1 from transcript Medtr3g138940.1 (locus Med tr3g138940) derived from phytozome v7.0 (chr-ID MtChr3; po s 35604179 to 35604667 reverse strand)
attgtcttgataaatctggagaagatgtaagattttcgatacacactctttataatttattattattgataatgataactatgctgttaaattgtgcattaattttatgttttgtcgaactttagtgttcaagcttgatagttttttttttggctgtaatgagtctagcgatgaaactcacacacacagtgatgagaagtggggaattgcggatacaaacctgcaccctaacatatgagatgtccctgtagccttttactgtatgagatgagacaaacttgataggtttttaattaagaaagaaaaggtctgtagttactaggtttttattcttctatagtttataagtcaaaatagattgatgaggttgttgatttagccgtggtgtcaacattcgtgatggttgaagatttaaatggcatagcttagtaatttgttataacctaatgacgtaaaattcttaatatcgtatgcaggttgcgcctccaa

SEQ ID NO: 28936 - DNA, 851 bp, Medicago truncatula
  Intron number 4 from transcript Medtr1g099500.1 (locus Med tr1g099500) derived from phytozome v7.0 (chr-ID MtChr1; po s 20348517 to 20349367)
gctcctataaggtgacattgctataacttttgtggtaacatattagcattctagcaatctcctaatcattctaatatcaactatgaataaaagaatttgatatttgtaagtaattaaataactacaatgttcactcctcctcttgacaacatggagacagttttactttttcattgattttcactctaaatgcaaattgatgtgaaagaggacatgatgtttagaatggaaaatcaaaataaggcatcaaataagtagaagctcattattaccagtatcacagtatcacactgatgtttatttaggctttgtttgcgagtttggaggggaagggaggggaaggcttgggaaaaaaggaatgagcaagtggaagaaatagaggaaaatgagaggggagggctttgggggttaacttttcttcataatactaaacccccctcattttggggaactaaaaaattgcattggaggagggtttttgggggttttggagggtttatatgaatttttcaaatttaatctatgttgttatattgtttttaaaattaaaaatatagtaatcatatgcattaatttatcattctctaaaaaactacacttttaaaaaatttgaaagatttcttcattttccctcgtattttccacccctcaaagtctttccttccccttccctccaaactcgcaaacaaagccttagtgtttgttgtctaaatttccttttctgacttaactatgcccttctatgctcaatgaagaaaaaagcaaatataaggaaactttatcaataactgatgcatgcattgaatttgattgcagagataggaatacaggaatttgggacgaggtttcca

SEQ ID NO: 28937 - DNA, 781 bp, Medicago truncatula
  Intron number 1 from transcript Medtr2g117560.1 (locus Med tr2g117560) derived from phytozome v7.0 (chr-ID MtChr2; po s 27646668 to 27647448)
cttagctcatttcactctacttgaatatctcagaggtatattattatactcaattttcacgtgtttggatggacttgtttgagattatctactgatataagcacttaccacttgtgagactctttggaagagcatatagaaacaacttataacgagtatgtttgaattaacttatttgagtttatcggctgatataaaacacctgggagactgtttaagagaacttattagatgatcataagttgttttcaacatttttccataagatcatgatagtttatgaaaatagcttatacagaaacaattttgctttattttatcgtgtgtaatagaaatagtatatttataagcaattacatgataagcgcttgtgctataagctgcaaagtaagttgtttatccaaacaggactatgtccataagctattttcagcttatttttataagctagctgttaaaacagttcattagtaagatgacaaattattattattttatattgttgtagaaataattgatacataagcacttatgctatatgtgcttaataagaccaatttttagcttaagttaaagtcatttggttcatgaaccaagttcagcgagttaatctgtaagcacttcacgatttaattgaaattttgttttttcttgtgtacttaattttgatttgtcgatttaaatggtttcctttgtgaagctaaactgattatagttttccactctatttggtataaaagatataggtctgactgggactaaactaggctgcggtgaaggt

SEQ ID NO: 28938 - DNA, 675 bp, Medicago truncatula
  Intron number 2 from transcript Medtr2g008810.1 (locus Med tr2g008810) derived from phytozome v7.0 (chr-ID MtChr2; po s 1786314 to 1786988 reverse strand)
ggtaattatcgaaagcatgtttcttaaaaatataaatttgttacttaatttttgcttttaagaatatccactatttgtctacaaacatatttttttcagaagaaagaatctcagttttatggggtctctaaagtaaactcatagtttatagaataaaatattacatatttcaatcgttggctgaaaaaaatcaagtattgatattttaatattacatccataatttattttgataatggtcaaatggtagagatatcttacctattttctaaagtgaattattcactttaatagagtatggtccatagttatcacatgtgttattaaattattgggatccggctcctttaaagtgagaaacacaactcactttacaattaaaagtagatattgtaggtaaatcataacaaatcatagatctgttgaaataacaatcattgaatttctcattttaccctttactcactttagaggatccaaattatgaaattccttaaaccattttacgaaacaatattcatgtttttttttttgtatattttgggaattttagttgacaaatcaattctcgttgatcatttttattgtcattttgaattcatgttatactttcagactatgggataaagtctatttacttttttcaccctttgatctcttgattgttcagaaact

SEQ ID NO: 28939 - DNA, 343 bp, Medicago truncatula
  Intron number 2 from transcript Medtr2g127090.1 (locus Med tr2g127090) derived from phytozome v7.0 (chr-ID MtChr2; po s 30915138 to 30915480 reverse strand)
gaatattcttctccgccgcataccaccaccatcaggttccattactctctcttcgtttcgtgttccttcagtttttttggatgattaaatctcctctttcattttcagtttagttttggctttgattttgggtatagttatatgattacttaattgattctttaattattgtatgtttcaatttgattcttgttctttgatcgatgattaaatttcctccatcaaaattgattttcacatatttggttgttgtctagtagaattgattccgacttgaagctagaatgacattgattttaacgcgaatattctatttttttcttcagtgttttcagttaatttg

SEQ ID NO: 28940 - DNA, 1006 bp, Medicago truncatula
  Intron number 1 from transcript Medtr3g031500.1 (locus Med tr3g031500) derived from phytozome v7.0 (chr-ID MtChr3; po s 8854427 to 8855432)
gctgctgtgtgtttgattttgaatcctgtgtgtgattttttgtgtggaatatgttatatcttctgtttgaaccgttagatctttgatctaacggtcactgtgcttcctgcattttacactatcttttgtgcttttttttggaccctttgatctttgatccagtggctgtgatgtgatcttgggagttagatctggacctctggtttcatccagcggaccagattaaatcctgctgagcctctttttaattgctttttaattgtgttttaaatactttttttacactttcttggcgttttatgcttctaaaaaatttctaaaaatatttccctatcattttaatttttcctctaagtgttagagtttatttgcttatttttgcatttattttctttactttgttcttttaattcttgctcattaaattccatatatgttcttgatgcattttttacatattatgatatttttgcatgtgaaataatgtgtgaagatatctctaggaatatggtatgatgctttgcttgtgtgtgttcttatgatcctcacattgtagcttaaaatcaaatctcttttaaaaatggctatgatgagggaattataagccatatgcatgtctaagtgtcataaccaattttaggtatattttgccattttatttcatttcattacttttttttttcttttttctcttgctattctattcaattttgtttacctttctactatttttatgccttatgatactaaccatttcatctcacatttcattcatctcatagttttagcatcttttttattcatttctatatcaattgggtttgtaataattttagatagattagttccttttttaattccttgcaagaccatagcatgtatttaggattcaatgtaaaggactatggacactataaatgatgtacaccgacacaagcaccgacacgcacacacgttgcatgattaccgtttagatgtatgcttaggaaacgcgatttttagacaa

SEQ ID NO: 28941 - DNA, 912 bp, Medicago truncatula
  Intron number 3 from transcript Medtr3g106180.1 (locus Med tr3g106180) derived from phytozome v7.0 (chr-ID MtChr3; po s 26703381 to 26704292 reverse strand)
atattactacgtcgtattcatttgctagagcgcgggtttgaacttgcaatactccattaatgtgtgagtttttgtgctagactcctcaattttaggtgttatagtttatttttaaattatattagtagagttaattttaatggtataatatattttatgtactaaaacaccttgttaattatagttagtggtattgttagatgattgaaatacgttaaataatgatgttagtcgaaaagaataataaatattgtattgatactataaaatgacaaataatttgagacagaaaaataattaaattgacacttaatttgagacggcatgagaaatgaagatgaaatggacacctaattatatttgtcaggttgtaaacaaagcaagagaaacccaaacttaaaagctcaagtttgcttataaagatgactgacctcttctgtctagacaaagcaagaaccgaagccagaaccgaaataggaatatgagccggaaacggaattggaaccgccaagggattgggattcaaaaccatttgaagaactggtgtatagtgacatctctggccggtttgacgatgaccctgatccttactactttgcgtgtccgctctatgtctataagaataaaataaagccttgaaacaacaagaggatgcaaaagaggcatcgactaagtatttcgagatctctcgtaacataattgtaagtctcgtctcttttgcttttaattgtgtttcactcagttgtaatatgattctggaatagcatattatgtctgttagttgttagtctgtcatatattttctcgcactttgcattttgctttgatctctttgacccgttgttttgccaccctaaccattttcgtaattttacaggaaccaattgctcattacaccgaatctatcacact

SEQ ID NO: 28942 - DNA, 777 bp, Medicago truncatula
  Intron number 1 from transcript Medtr3g012900.1 (locus Med tr3g012900) derived from phytozome v7.0 (chr-ID MtChr3; po s 2283385 to 2284161)
tcgacatccattgggaaaagagaagagtgaaggaggtaattgtaaatgctaactacattaacaactagatgggctgttttctttgtctaaataatttggtgttagggtaatttctttgggacgtagttatgcacaacaagatttcattcataatggataatgccctcataactccaaaaataattggctggtattcaacctggctttaagattaaaggaaaaaaatctcttttttcctctaaaacttaagtattaagtattgtagatttgtttaaagttcccactttccaaattatttagaaaggagcttttatttttttttgttcttttctcttcacgaaaaaacatgccctcctattcatgtgagtgggaactgttacttttttagaaggctttctttccttaatcccttttgttttactttattcttttcacttgtattaatctaccaagatagaagagtgtggtctattgactgcgctggtaccttttcttgaagctcctattttctatatcatagttaacttttgctcatgattcaaaggaattatcattaactgaacattcttattgcacattctttcgtagtttcagtcttatcctccctgtagccgtgcgtgactcttctttaacaatctttcaatgtctttggatgttatctaaaacaacggagactatttttatcgtagattattaccttaatttccagccagatttatagattctcactatataagtatctgatctggtaaaatttgatatcttgtgtgatacagg

SEQ ID NO: 28943 - DNA, 747 bp, Medicago truncatula
  Intron number 1 from transcript Medtr2g021450.1 (locus Med tr2g021450) derived from phytozome v7.0 (chr-ID MtChr2; po s 5446041 to 5446787)
ccaatccgtggaggttcacgtcgtttaccgttctggtatcctttgcttgaccgcatataaaaattgtctaggtggaagagttgtcatttgtctatgggggttcgattgatgtttttgaaattagtattgtctttgcttccggtctattttatctcctttacatttcctttgcatactcttccgacttacattaagtgtgatgtttgaaatagctacctacttgtcactctatctgaacacgtttaactatttcaccaactactatattaataagggtactttagtaaatgaaacacattttatcatagaaatttgcacactcaatgattttcttaacaagtgtgcctaaccaccttcaaagacacttaacatgagaatgagatggaaacatttgtctcttttcttgaaattatgttggtcaataatgaatcttagccctccatacatcatgttaaagttatggagtgtcattggtgtttattattttcgtttgcaagaaacgccttttatttttttcatttggttttgaatagtagctatatatgacagtcttctttcttctttttggtactttcttgatgattattctatataattttctcacgtgggtgtacatgtacatggatattgcaattcattctttgattttctcatattctgttctctgtttaaacctattttgcttcttattgattggtttttattaatttagctggcttgaagcagtcagtttaaacacctttgagt

SEQ ID NO: 28944 - DNA, 950 bp, Medicago truncatula
  Intron number 1 from transcript Medtr2g077090.1 (locus Med tr2g077090) derived from phytozome v7.0 (chr-ID MtChr2; po s 17621296 to 17622245)
ttgtggttggcttgttgcaagtggaatgtatgttctgtgcatttgtcaaacctaatattctacttttgcatgtcatgaatttgaaaatatagaatagttaagttaaagtcaaaaaaacggttgattaattaaataatgcataataaggttatccttaacaaattttgtaatacgtacgttattgacattccgtcaatcttacaccaattttttgagatagtcaatcttccaacatatccttgataataattagtattattatattataataaaactagttttttctttattgagattaattggtttctttaatatatataaccttcaagttttgtctaaaccatattagagatttttatttttttgactaaaccatcttagtgatttaaagcttgagaaatttaataaaactagtttgcattttctttggtttaaaatagaacggaaagatcggttacaccgttaaacaaagttttttttctttctaaaaactaaactagcatatctaaattggtggctgggagaatcgaatatgagatattgaggaggacacttcaaagtctcaaataaagttgacaaatgttgttttgttgatgttattaaaaaatacaagaatttatattatatttgttatatcgttttaagataagtatagtttgttttccttaaaaaagaatttatattatactcgttatattgttttttttttcaagataagtataatttgttttccttaaaaaaatatatagtttgttacaatataaaattatatgtgagacttaaccaacttcattaaaattaggaaacagataagtattcctcgtgaaacaaactaaggttatgaattaagtattctttgtcaaacccttacatatgaactaagtattcaagaacattgtttgtttataagcacagaagcacacgatcaaccttgcacatcctctctctct

SEQ ID NO: 28945 - DNA, 497 bp, Medicago truncatula
  Intron number 1 from transcript Medtr3g017040.1 (locus Med tr3g017040) derived from phytozome v7.0 (chr-ID MtChr3; po s 3468867 to 3469363)
ctaggtttcagcaccgcagctttctccttcacaaggtaaccaacatccagtcaacgcttctttttcgtttctattcttatcatcgattcattcgtgcaatttaggtttatatgtgtgatcacataataattagatgttttggcttgaacctatgtgcatgtttaatcgcaattctaaaaacaaatggtgtgataatctttttcttttgatgaatcggtggttttattagcttgttatgaattctttgtgggttttgtaatagacatgaacatgcgattatatgattaaattaagttttctttactttttcttttgaaatacacttatgttaatttattgttgtatttctttttgaattattgacttggattgtgtttgtaattgcttctgtgtttgtgtgtcttctgtatcatcactgtcgaaattactgaactcaaatcaaatttttatttcattgtttaggctattaattcaatttctggtgtgcttgcggcaac

SEQ ID NO: 28946 - DNA, 402 bp, Medicago truncatula
  Intron number 1 from transcript Medtr2g025850.1 (locus Med tr2g025850) derived from phytozome v7.0 (chr-ID MtChr2; po s 6942304 to 6942705)
ggtcaaattgtaacttatttattaattttattaaggtaactttttgattaatgtggaaaaacaaattgtctctttttaattatcattagagcttaactattcattctctagcaatgatttaggtagggactaagatctcattttttctatttttcaaaaatgtccttttttttttttcttttaattgatcttcatcccatataatggctataagtacagttaatgaaatatattcagtttcctattgaagtctttctcattttatactgcatattagttgaacacaagagttttttgagtcagttgtattgaatcatcagagaatgttttcaatgaggttttggatgctagcttttgtgttgatcagatcatatcagaaatttttggagcttctttgaatat

SEQ ID NO: 28947 - DNA, 1021 bp, Medicago truncatula
  Intron number 2 from transcript Medtr2g025850.1 (locus Med tr2g025850) derived from phytozome v7.0 (chr-ID MtChr2; po s 6942780 to 6943800)
ttttgaagctcaatagattagaatttcaattagaggttagcaaaacaaaccaaattgaacattaataacacaagttgccttaattcactttttttttcttgtgttttttttaacccccagtttcaacgagaaggagctctgataacccagagttcggtcattaatgtttttttttttttcttttcttttttatcatgtttttgattgtgaactaacaaatattttctctttttaatttgttattggtgtgacaagtaccaccaactttgtcgattagtattcttggttaggaaccttactagtcatgtttagtagagtcttcccttccaaccatattttttccttttacaaggtttgaaccccaaaccttgtttaagggttccgagtctagttcactaataccaatataatgtttagtaatcatttatattttgaccgtaagagtgagtgttcatatccaaactaacctaaaataaaatcgtaaaccagtttaaagaacaaaaatcacacaaaattgaatattattggatacgtttagatgtcatttggatgttcaaatactacaactcaatttacaaaattacctctagccacttatcaataaactatgagtccataacaaacaaaatgcaataaattattatatcaactttttaaagcaaatcttactggtggggattgagtgattcaattctgtttctattgacttaatcaagaaaccaacatattgaataaaaagggtgtacttttttcctttttttaaataaagggtgtgttttaaaagttgtcaatagtattatactatttgtctcaaaatgtgttgtaaaaaccagacaatttgtatcttctgatgttgacattgcaatttggcttgaatatgttttgcattattattatcattatcattatcattattattattattattattattattattattattattattattattattattattattgttattttgtgttgcttttgagcatggtgtagggagtgactctgagtgcaa

SEQ ID NO: 28948 - DNA, 997 bp, Medicago truncatula
  Intron number 2 from transcript Medtr1g112270.1 (locus Med tr1g112270) derived from phytozome v7.0 (chr-ID MtChr1; po s 24106295 to 24107291 reverse strand)
atgtgatcctaagatgttctccctttacaagaataataaattcattatggaataaaagaatcaaattatttttggttcaaattgttattttcgtaggtcattatgtatctgtcttgtattcatcatatctagagctctgataccacttgatgaatgacaaaaaaaatcgtatttgaataaaaagtgaagaatggtggaaatagacagaaatgataaccaaacaaattcccaatccaaggaagatgtttaattcgatagaggatcgccacaagaaacgtggtttcttgataagatcaatgcatggttcaatccagaaccacaaagaagcaaagcttcacaacacacaaagtgtatttttttttatcaaaattctacctcctattcattattttcgccccctttatataggtaataggctagaatgctgaaaagcttacaattatatcaagattaatgaaataactcttatgtggctaattattgcaaggaaatgttacaaatttattggttttgatttaggtggctgttacttttggacaattttcagcgtcctctctcatccactttatgctcttcaactacattaattgtgtttcacctcttttgcttcagctccttcatttaatcacgtcctccagtttaatcccattttacaccatgatatatgccgattttgcttctgagtccagcatatgaaatgtagatgaatttgtaccctttccaacgcttcaaagatcacctcaatcggagttccagagctctagatatgatgaatacaagacagatacataatgacctacgaaaataacaatttgaaccaaaaataatttgattcttttattccataatgaatttattattcttgtaaagggagaacatcttaggatcacatcactacgaccctgctgtttccccgcttgtgagtcaatggaaacctccaagggcttttctaatccttgacactacagagctgccatcgattcgttggaccattcac

SEQ ID NO: 28949 - DNA, 604 bp, Medicago truncatula
  Intron number 1 from transcript Medtr1g024120.1 (locus Med tr1g024120) derived from phytozome v7.0 (chr-ID MtChr1; po s 5603075 to 5603678)
tggtacaatcagatacgagatctgtattatgtgagtccaaaaacaatcgcctcaagctcataataatttcttaattgtcaactttgatatgattatagctttgacatctggcatattcgtaataaagaaagaaaatggtttttttaaatcaaacattttctttttaaaaaaaaaaaaacatttttcacttttatttagtaacatgatcaaattcctaattaactttgtagagttcatgcaatagttttattgaatcttaaaggttattaagtatttacattgaatctaatttatttttacaatgcttaggtgcaaacgatgctttattctctgttgactttacgttgataagatgatttgctgcttaaattttgttctagactgattagaatctcaatcctatggtgacacgtggatacaaaactattataacgaggcatggtaacctgagtgaacacgctagtctctgtgcacgcaattacactgaagcatgcccctgtcttcctgcatcgttcatgtggcctccaacggctctcggatgaggcgccgcatttcacataatttgttagcgcctcctccccctatataagggcgattctgcgtc

SEQ ID NO: 28950 - DNA, 977 bp, Medicago truncatula
  Intron number 1 from transcript Medtr1g125310.1 (locus Med tr1g125310) derived from phytozome v7.0 (chr-ID MtChr1; po s 27599285 to 27600261 reverse strand)
aagtttcaaggttagtaaaaatttattttatgttttttgcatagattttttaaaatttagtttatttggtttgcttaatgtcattgaattcttacttctattcaactcaattcattttaattttgaagttttaagatattttagaaaaataaaataaaataaaattcatgtgatgtagagatctgggaattcaaagtttgcttcaacttcatcatttggtttttgcttctttttccggtttcttagtcttttgtatttttctctttaccttaaaatcctccttttgtttttattttttcattgcttttagttgtgtatatctttatcaacattaaattaataaaaaagaatttagatgtgaagtctatatgatttgggtttgatttacttttttctttctgacattcacactcactttgattcatgtccaattttccaaataagttaccaacttgaattgagttatcaaaagtaagattttctttcccccccccttttatttcggttaccaactctcatgggaaattgaagtttgaatatcatcaaatattcctaacttcagttcatgcatttttcatgggtcacatttcttttcatcaattcatgggaatttgttacacaaaataacaatagttttcatcaaagttaattagtagcatcatgttttctctcctttatctatttcagttactttcttttcctttgcatttccatgatgcaattaacactactttaaatatgagtactcaactcatttcaatttcaaaccatgtttttatttcttgtttattttgtaattttgttattatcttatgctaatttccatgccttttttatatcatgcatttgtcttgtagctgaatttgatgagataagataaagagtacacatactttttattatttttttggttatttgcttctcactttaattattaatcaggaagctagcagaacttgggtaccacagaagttcaa

SEQ ID NO: 28951 - DNA, 551 bp, Medicago truncatula
  Intron number 2 from transcript Medtr2g100150.1 (locus Med tr2g100150) derived from phytozome v7.0 (chr-ID MtChr2; po s 23289573 to 23290123)
gcacttgcatcacagctttgaagtcattgtaagagcactttgcttcttctgcttttaacttcaaatccaaattttctattttcattttctaaaatatgttagtttaaacttgctaataagaagatttgtcactctttaagtgaatcattttgatggagagaagatgaaatactattagggatgatgcgtttcaataaaacaaaagattatgtgttcgttgcttcttaactaatattttcgttatactatgtctgaattttgaattttactcgacctataatagcctgcagttttaaattcattgtttagttgtgctgagatttctcagcaaacaaaggattgacggaagtagtttatgatgttggttcttttttttgtttactttttcttgatacatgacacaatatagtaacgattgatcaacgcaccaatgtcctgttcgaacagatttctgttttttggtttttgtgttctttttaaattctgcttctataaggaatggtttttcttttgcaggagtttcagagcactagttttgccaaactcattga

SEQ ID NO: 28952 - DNA, 818 bp, Medicago truncatula
  Intron number 3 from transcript Medtr2g100150.1 (locus Med tr2g100150) derived from phytozome v7.0 (chr-ID MtChr2; po s 23290414 to 23291231)
caccttctttttagtgctaatcgttgggaaaagaggtttgtgcttttgtttttagtttcctaacatttatgttaatttgtataaagtagcatgggaagaacaaagaaaattcttgattcatgaattggaattttatatatggacattgataactgtctagctagaaattggatacagtattcctagattgtgacataaaacaggaaatggaaactatacccgcttaggcatttgagttctttgataaaaaaaaactctcgtttacgtaatgattttggcagccaagttatcttcatatatattatgaatgagaaattctctagtgcacgacgtattttagcaacaaaaccgcatgattatcactctctttgtttaaatcaaattttaattaaaataaatttaaaaaactgaaatagtgtgttggtggaacacacggtcatgtgtattttactacaacacatgtcgtgccattaagcattagtcattatgaatatatgctttatataatcagaagaagcaagctgtgttgcatcactgctttgatgacatgtagtgttgtaaggctgacatcggctctgactcttcgggaattagtattccatgagcttgcgacattgctccagttattaagttaatatggctgttatgactggtgataatttgactagttttatcctagaatgtggtgcttattagctgatgttgcatgcatgtttcttagcaaatataccacttggatatttttactggtacttgctcacgacaagtgaaatttcaagatttctttgattaatttgtgttgtctatgcaggtcattg

SEQ ID NO: 28953 - DNA, 242 bp, Medicago truncatula
  Intron number 1 from transcript Medtr2g026960.1 (locus Med tr2g026960) derived from phytozome v7.0 (chr-ID MtChr2; po s 7431733 to 7431974)
caagctgctagacaggtacttctgaattttctaatcttcatataaaaatacaagttgcttcgttgatttaagagaacatggaatttatataattacctgtttatgaaaacaatgttggttttttgtttgagttacacaattcgttgaatttcgcatgtggtggttcaaaccatttagcaatactcttgatttaatactaatctttatctgcaattttcaattttctgtgatataggttattg

SEQ ID NO: 28954 - DNA, 898 bp, Medicago truncatula
  Intron number 1 from transcript Medtr2g033110.1 (locus Med tr2g033110) derived from phytozome v7.0 (chr-ID MtChr2; po s 8964713 to 8965610)
acgaatatttacgtcccaacattgaacagaggagggtaagccaatgactttctccataccttgcaaccaaggaacttcaacaacgataatgtcctttagaagaagaagatgatgaagaagatgaaattgttttgaaatttaaatttttgtgttttattatgtttttaaaaataatataaaataaaataaaagtcaagtggacataaaaaatgcaacaaatcactaaaatatcttagtcatcatcacacaccatcaaagttaacatcacgtgaacgtttttgattaatttattaatagattctagatcaagggactattttgtgattttatctaagttagagactaatatgctagtgaggtgcacatccaatgatcaaaatgaccatttaccatttttgttaagaagaaagctttttaggttgatctaaacttttttagaaaaaataaaataaaatacaataaaatactgtagcaagcaactacaagttaaaaaacaaaaaaaaaaattatatgaacttccttcaacaaaaaaaaaattaaatgaattaaaaatgaaaagacgaagttacccttactcttagaggtaaatttctattttgtttcatttcatgccatttaattcatctcactcgcactgttgttctcttctgttctctctgcgcctgagctcactgaacacccttgacttccctttggtgagtaacccatcttcctgttcttccttaattccatgcatgtctcatcaaaatcgtttctttttgcaaaaaacgcaaaaaaaatctgaatttgaagtagtgaaacccttgaacaaaacttgtccttttgatcatttaggttgtttgtttttaactgcattgttgtctgtttgaaattttgcagacctaagcaagttttgaca

SEQ ID NO: 28955 - DNA, 752 bp, Medicago truncatula
  Intron number 8 from transcript Medtr3g142510.2 (locus Med tr3g142510) derived from phytozome v7.0 (chr-ID MtChr3; po s 36537915 to 36538666 reverse strand)
ctgcaatttctctggtaaattcatgtttgcgatatttataaagtttatttggaatttattgcatatgttgaaggatatattcaggaatctggttatgatgtatgtctgtttttaggtgataactagacatggaaaaagaggggctactgacattttaagtcagctcttatttctttagcttcataaatagcatatgcatgttcttcaaccattattcaaatgttttgctttaattatgtcataggaatcaagctgttgtaaactatttctgccttttagacttgtgattattggtctattgatagtttcctactatatttgaacgattgatgcattggtaataatttggctattttcccaaatgtctttattttgttagtcttgtaggtctcccgaaccacaaatcacttcattcccattcctactttaaaattagcccttttaattatggggcgtcttctcaccttatataacaatgaagtaagatcttgtatattaaaaactaaatgcatttttgtatgggtcatgctaactagtgcccccggggcactaagtaaggaaactaaaaaggtaagttttgcattgtaaacaacattttctacacttttaaatatttgattacacaagttccaagaaattcttactatacttgtttccttaactaatgcctcaggggcactagttagtattttcctttttgtattaacctttggtcctatgtactctgtaggtcgaaagtagctcttccggaa

SEQ ID NO: 28956 - DNA, 998 bp, Medicago truncatula
  Intron number 1 from transcript Medtr2g043270.1 (locus Med tr2g043270) derived from phytozome v7.0 (chr-ID MtChr2; po s 12347267 to 12348264)
tcggtggtgacactgctcgtaataatcttttcacttgtaaaaatgttcaatttcttatttcttttattaaagagtgataattgtgaattgggaagttgcaaaattaccaattgctgctagttttatagcttttttgttatcctgcaagttgtgtgaatattcttatatgcagtgtttgcattttcggtttagggttttctatgaatttgtttgtttttacttataaaatatagatgttggggtttgtttgattgtgtatgtatccacactaaactctaggcacccaatgatctataccatgagaacttgaggaacattggttgttgccgtgatttctagacaattctgcttgtgagcaccatgaggaagaacgattgttggacatcctgatatgtaattacaaaaacattgagaaatttggaggaaaaaaatgacactttcttattttgggaaaaccctatctctaagttatgtagggaaaaccattttgatttggggaagcaagggagaccagcgacccttgtcccccatgttcggatttgatcttccacatcagtaccgactaataatttttgtgtattttaacataatggaccaacttgtagtaacctggtcaagttaagggacccaactgacacttttaacagttaagggaccaacttgcgccaaaaatgtaagttaagggtcctaaatgatacgcaactcaatttttattcatagataaatgctagtaagttaatgactgttattttatggtgtctgaaccgtataccttttgattggaactttgttgatgttcctaagttcatcaacccagctggttgtttgtttagcactgattttcgctgaagttgaaaaccttttttttaactgaaattcagctagcacatgaccagagtataactaattagctagttctctattatttttgtttattgttgattttgaaatttttgtgaatggttgttctgacagggcttttctttgcaatactggga

SEQ ID NO: 28957 - DNA, 420 bp, Medicago truncatula
  Intron number 1 from transcript Medtr1g013490.1 (locus Med tr1g013490) derived from phytozome v7.0 (chr-ID MtChr1; po s 2486955 to 2487374 reverse strand)
tgcgttgtggtgccgcactttgataattgattgtttcaagagagttttttggaattatatttatttgattagataaaattcactgaaattgcttttggtctaccctctctgatgttagttaacccacaccgtctcattttggcattaaaatgaatatatgcttatcaattaggtacatttgcattgtagttctacacattgataactgattattggtatcctgtgttgattgtgtttctagaaccgtcttttttgtttagggatgtcttgagattagtgtgttatttacgttgacttgtgtagtattttttcggattctttcatttcatttctagtatcatgaataaggaataaaatttacatcttgccgtcttcttactttcaggaatctccctttttgagatttgtcaacactctatc

SEQ ID NO: 28958 - DNA, 877 bp, Medicago truncatula
  Intron number 1 from transcript Medtr2g107430.1 (locus Med tr2g107430) derived from phytozome v7.0 (chr-ID MtChr2; po s 25266945 to 25267821 reverse strand)
aaccttgggatttaccaggcaggtgtctctttcttttctatgtatttttgtttttaattttaaatatttggaacttatttttttattttttgctttcaatttcatgtgttgtgtgtcgttggttcttaaatacttggaatagtttatttggaaggtgttggattgtgaattattgggttgatttgcttagctggaattgttggtatgtgacatgagagtttattcaattcaattacacatcattttaatcacgcttttggaaattgaaaccctagcccgtgttggtatcacggtgtgataccataatcacgtcgttgtgattatgacatatccaccttgataccataccaagtttcaacatatgaaaaatgaaaccacgtgttttgagcattgaaaatgttatttggttccacacccaaaatatgtacgttggtggaacctggggtgattcttatttctatgttgtgtgtgaacaaataaatcactatataagtgtacaaacagaggactttcttggatacttgcatctaattactgcattgtatgaatttaatgtagggtccatttatgcctctcattattatgttgaccccccatggaaaacctacacatatgtgcctgagtagtttccttatcactaaatcccctcaccctaaatgcgttgacaccaacacattgacatagacacgatagtcatacattgacaccggtaataatttgagaaatgttgtttagaagataaacacaatttaaaattgctatgcatgtttgaagtttaaatttatccaattaactcagcagaaaatttgtaagctgactaaataatacttgtttcaaaccagccaaatcattcattcaatcagataacgagtggttc

SEQ ID NO: 28959 - DNA, 461 bp, Medicago truncatula
  Intron number 2 from transcript Medtr3g077170.1 (locus Med tr3g077170) derived from phytozome v7.0 (chr-ID MtChr3; po s 18154017 to 18154477 reverse strand)
gattctgaggtttttatttttcacttaccattttacattcaaattatgatgtttttttaaaactgttgtttttgaataagctaaatgttattagttttaattttataagctatcaaaaattaagttttgttttatgtttagtgctaatatttgttgagatatagttaaggattatgaggttcttctttttaattttacattttcactaattttgaaccttataagtaatgatttggttttacttatgttgttgatatataacattgtcactttaaaaaggtgtgttatatgttttgtgcttatattataaagatgatgattaaagttaaagaattagtaatttttataatgaatcagaaagctattgtattatgaagaatggtgaatgttagattatggttttagctatatcttgaaaactaattctaaatttttgaactttatataggggagtaggattc

SEQ ID NO: 28960 - DNA, 816 bp, Medicago truncatula
  Intron number 1 from transcript Medtr1g025430.2 (locus Med tr1g025430) derived from phytozome v7.0 (chr-ID MtChr1; po s 6292212 to 6293027)
aatttcttcaaaccactgatttccaacaacaacttgtaagtactctcttctttcttttttctctttttatttccttccatgttaataaaaattaaacctttataaggttttcatacttgggtgttaagtataatacatgcacttcaatatttgaacttgcccatcttttcaattttgtatatttttacaattcctttaactgcagttagttttttttaaagaaagttgagcttttgattatttgatatatgctgttgaagttttctttttttgccataggcattaatatgcttgtttttatattattggagtaatggcttaggaacattgacattacttgcagatctgttttgatacactttgttttgagcttggattacaataattaagtagattgtttaatagctgtttttcaagcaattaattatgtttagcttttaggtttattattcctttcctgtttttgaatgcactatctatgtaaatatgtactttttttaaaaaaaaaataaaaaactaaggggggaattttgattatggccattttcaaccgtcacgaggggatttgaaccttgaagcttgaggttacaatgctaagttcttaacactgagctagcacctcaagtgtatgtgaatcatgtacttgagatgattaatagctgtttttcaagcaaattattatggttagctattaggtattgtatattctaccaacatctgttacgctcttcagctcaatgtatcttttaatctcagatggaaatttatattttaactgcaggcacttcctaaaacattttcagacaatttaaaaaa

SEQ ID NO: 28961 - DNA, 537 bp, Medicago truncatula
  Intron number 1 from transcript Medtr1g059840.1 (locus Med tr1g059840) derived from phytozome v7.0 (chr-ID MtChr1; po s 11757032 to 11757568)
tttgagtttttttactcctgctgtaaactggatttatgcttttttagataattattagtgaaattatcttcactcttggcttgttagatttgtaagaagatgtattaagatctcaattcagaagggttaggatgaattcttgaagctgttgttagctttatgtggaatttttctacttaggtatcgtgttgtgtagtttggttttcacagttagaaaacaaacatgttacagttctttttgctttagatattgctgatgtattgatattagatgaaccccgaacatgagggttacatactattatatattattgatatttgatattatctcaaaatctaaggatgattggttggaacttatcggatgcatttgatatttactttgatagattattgttgcggtttacttttaaaaattagattttgttttgatagaaactttttattcactattttgttgatgcccttgttttatcttattcatgttagttagtacacacatctttgacatccctgaacttgttttctaaagggcat

SEQ ID NO: 28962 - DNA, 641 bp, Medicago truncatula
  Intron number 1 from transcript Medtr2g026050.1 (locus Med tr2g026050) derived from phytozome v7.0 (chr-ID MtChr2; po s 7027262 to 7027902)
ggtttttctcgtccccctcctccttcaacacacaggtacgttcatttcgaatttgaatcaattagctagcctctatttgttttcgattttattgcatatacttgattttgtgtttgatgtgtggtaagattatgattggaaatgagtcaaatcactagaggtagatgaagacctagaaattggttcttgtttttgttgtatgtggtttcatacaatcttcttgttaactttacatctatgtaacaacttcctcagtgagtttaaccctgaaaatactgctatggaaaaaaccagttatgtgctgtcatacaagaataggaagctaaaatagtgtggtgattggtcacaatgacattcaataattggggtaaaatcccagcaattatatgtaccctattgacgataatcattttggtgttcacttctgttttttctatttatacgaaaagaaagacgctccatgagttttgagaaaaaaggtgcatcttttagcaaccattttttcattgtaaataacttagttttaacctttgttcagcaaaattttgtctactcactgtttaccttgatagacatttcattgcgagtacattgattataggttgtattttcattcagctccattgaacctcctggttgga

SEQ ID NO: 28963 - DNA, 932 bp, Medicago truncatula
  Intron number 1 from transcript Medtr4g022490.2 (locus Med tr4g022490) derived from phytozome v7.0 (chr-ID MtChr4; po s 4610952 to 4611883)
aagaagaagagaaagaagaagatcacacctaccaagtaatatatattttcttttctttttgattcctcttgttgatctgttttagtttatcacttcttatttcattcttctcatgaacattaagattctagcataaatacatgttggaatgattgattaattaattaatttgattagcataactaagatctagcctccatgagtcatcataattaatatattaattatcaacaacaaccttaatcattacaatttgtgatatcattaccaataacatactacaacacatccccctaatttattttgttaagaaaccaaagtgagaaacacaacatgatgataaatagaacagaatggaagaggacaaatactaaagaacagtagcaaacaaggacctcctgtgctgtggatttttatgatcaaattcaaagccataatcaccattgttgtctcaagttaattaaagtttcttacaaaagattccatttcaattttaggtaccaaaatgtgccctaaatttaaaagtaaaatttcaaataaattgacatcttagctaccctaccattcaatttcaatctacattaatagcttgtggaaggccttttaagtctgagttactaaacaagtcttaatattgcattgaacttctttttttttttttgataaattaatgttgcattgaactttgtttatatcattatgtacttaatcatatgaaacatttaatcattttgatttatatactatgagtctgttattactatttggtccacagtttattgttttaagggatcacggtgtaagtatatatgtcacatgaagtcatgtttttgtttgccttccatgtatactgttattatttgtcctataacaacaatggtttttgcttgatttcagtgttgttttctacatattgtttggtcttagcacaa

SEQ ID NO: 28964 - DNA, 338 bp, Medicago truncatula
  Intron number 4 from transcript Medtr4g022490.2 (locus Med tr4g022490) derived from phytozome v7.0 (chr-ID MtChr4; po s 4618679 to 4619016)
catcaatcagccgaaatactggacatgtcagtcatataaaacaattatttcgctcttataatataatatgttgtattatttctttttaatccatttattcccagtggaatgctttagccacattgttatgttagctacgaactttttttcaaactcttgtatattgtctacttgttatgttagaactttcaggatggcaattaaattatatttttaaaactatcaatgttcttagtaagttctatatcctgcgtttcgaagaattcctttgtttttctttgaatttcgatacaatcttcaatttgggtggtcttattctggttattcctgtgctgcag

SEQ ID NO: 28965 - DNA, 768 bp, Medicago truncatula; identical to SEQ ID NO: 28143
  Intron number 3 from transcript Medtr2g014260.1 (locus Med tr2g014260) derived from phytozome v7.0 (chr-ID MtChr2; po s 3561931 to 3562698 reverse strand)

SEQ ID NO: 28966 - DNA, 660 bp, Medicago truncatula; identical to SEQ ID NO: 28142
  Intron number 1 from transcript Medtr2g014260.1 (locus Med tr2g014260) derived from phytozome v7.0 (chr-ID MtChr2; po s 3562931 to 3563590 reverse strand)

SEQ ID NO: 28967 - DNA, 787 bp, Medicago truncatula
  Intron number 2 from transcript Medtr3g123690.1 (locus Med tr3g123690) derived from phytozome v7.0 (chr-ID MtChr3; po s 31167838 to 31168624)
ttactcatcgacaaccttaaggtatattctatgttgtttgactactctgccccacattttcaagtacatgaaaaataacattactcatttttatttgtaccttagactaagtttttggtccataacccgccgggaatgataattagaaacataatatatagttgtctattatgtgtcattagctatgaaacacgtaaaactcttgaattagatgtgtcgcgatgtcctatatttagtatgatactctcacaacgtggttaaatatctcatacaaatctttaaaaaaaaattctttgtttcaacacttcttaaattggtgtctgacgcgtcacacaatcgaagacaagtgtttcaaaatattttattttttttctttacttcgacacattttatattctccttataaacatctcaaatacatctacaattgttaaaatttaaaaaaagtatcgacgcaacgatgaattcattacattaaatttgactgcaatatttttagcttcttcgaaagtagatggataaatatatatcaaattgtattgcatgttattttaattttttttaatgagtccaatgactcaatttaaatacacatcaatatattttgattctcaattatgattttatttttataattaatagattaatatacgcgtagcaggtgctgtctgtgtcttatgatttttacatgcttcatagttcattagttatttgttgtcaaatggtcaaagatttcatattgttttgttgtgtgatgcaggacaagggtttgactaaggaagttgca

SEQ ID NO: 28968 - DNA, 1004 bp, Medicago truncatula
  Intron number 1 from transcript Medtr1g124720.1 (locus Med tr1g124720) derived from phytozome v7.0 (chr-ID MtChr1; po s 27258413 to 27259416 reverse strand)
ccaccccaccttttctattcacacctccatccacggttagcttcatttccttccctttctctttcatttttcttaccacattctcaatccatgacatcacctttttcattttttttggattgattgaatcatcatttctgtttcccatttcaagaagagaaaaacaaaaatggaatctttcccaatactgtgtttgatctcactttttcttatttaatcttatatttcaatgccacccttatggatctgagacccctttcttggatctgtatgcattggatttgaaaaacaataacatcattttttacacttgtgttttcatattgtgaaatcttatgttgatgtatattagagcttaattttttttgaattttttaattgttttatgatgatgtgacatttttttgaatttactattttttatttgacaagcatcttcaaccaccaaatccactttactgtgtatgatctgaatagaattatacttttgattttgatgcaagatctattttgatcacagctatgattcactttcaccactcttgaattgagactattgtaactcttagtcaagtctttttatttctctctgatctgttcctatttgaatacaatagttcctcacaacttttgaattgtaaaatatataagaattattatcatgctggggtgaactggagagtgaatatcatactatatatgaatgtgagtatggtcaactgtgattgctagatgagagaataggagggtgattgtagctttagctcctgaatgaggatggtgtggttactttgaactatcatttaatgaaatttgaagtcttctgattcagtgattctatatgatgcatatcacattgttatgtcagtgattttatagcgctatttctctcatatatctctcagtctcttttatattcgcaaatgttacgtacatatgttttcttaatttcaaaaatgaaaattcacgaccttccattttaccaggcttctttgtttgtgtaa

SEQ ID NO: 28969 - DNA, 662 bp, Medicago truncatula
  Intron number 5 from transcript Medtr1g090150.2 (locus Med tr1g090150) derived from phytozome v7.0 (chr-ID MtChr1; po s 18153058 to 18153719 reverse strand)
gcttggttattgaaggtatgctcattctcattgttaaaattcttatcatatatgtatggtatagccttaatatgatattgtgaacaacaaattagaaaacatttatagaataaaaggtctaacgattcgtgtatccatcctaccttacaagttacaagtccttattttaatcttaaattgttttgttcaatttaatcttaacattgaatttaattcccggtggagagcaatataaggaactacttatgcttgcttgtgttacaacctagaagaaagtactagttctcattcgtaagaaaaacaaaaaactctagaaatcttcacaaggataacttgaaccaaactaaaacagtgaagggtctagaaaagataaaacgcataaacaaattatgtgtgtaagtttcttaccactcttgcatagtttaatcaaagagatacattgaatgatagacgctttttggaaagcatgcttcatatttgtctgatttttattcacagaatagcctcatgaaacaattccagcttattgataatacattatacatatgtcacataataaaagcatttttcaaacgaaatatactaaataattctccttcactgcatagtgctatgtaattaaagtgtgaggttggtttgcaggaagacctttgaatatagtc

SEQ ID NO: 28970 - DNA, 857 bp, Medicago truncatula
  Intron number 1 from transcript Medtr3g162180.1 (locus Med tr3g162180) derived from phytozome v7.0 (chr-ID MtChr3; po s 42307226 to 42308082 reverse strand)
aaggtgatgcctatgagcttctacttgctttaaaatgagttcatgatcttcaattgaaacgaggatacactcttttcatttgaattttttcttccatttttatctttgtatcaaattaattcttttagttttttagtttcaaattcgttcttaatcacttactcttaaagcttattaggtcttgctatcacttaatctaatttttttccctctaattctattgcattaattgctaatcactttaatcttaaaaaaatttccctctttctatttgttaaatttgaatttcaaattttgccttgtcatttgttattttccctctactttgtgtgcgttaattgaggcttgattttagcactattagttggcccttgaattgtaaaccaaagcaaaaattcagtctccatctttctctttctctttctcttctcatgtcctctccactacttaataattatcagctgtttccaatgcaaaactatcagcataccttacttaattatataaccacgttccaaaaaaatctgaaactgtactcttccatttctcttcttatcagtttgtgttcttttatttcttcaacttgcaaatgtctggatgcaacattcaaaccttgctggcctaccactccctgactggtgtgtatctcccgcgtattttttttgcaaacttctggttttgcttcgttcataactaattcctatttatagtgctctctttgccggctactggtgttgtttcagtttttttttttttttttcgttttgtttctgcatgcaagtcggttgtgattggcagttggtttttgccttctgtcaataggatctgaaagttgcagctgtgtttttttggttgtt

SEQ ID NO: 28971 - DNA, 425 bp, Medicago truncatula
  Intron number 2 from transcript Medtr1g111600.1 (locus Med tr1g111600) derived from phytozome v7.0 (chr-ID MtChr1; po s 23844196 to 23844620 reverse strand)
gtacctggtgtgtagtttgtttctgtttctctaatgcaatttttgttgttattttcttaaattcaatttctgtccctccttgagccaaaaataggaaatgatagtaaattagtaataacaaaattcacttcaaataaataatgataaaaaaaattatgataacaaatccttcatttaatttttttaaggatgacgggactgatcgtgtgcatgtggtgccactgattttgtattacctgctgaaggatcaaaatttgagccgtctgaaatatcgagctatctcgaagatgaaaaggtgagattgttaggtccaatctcttctgttccctgcaaacaacaaacaataaaagcactgatcatgcttattttgacatgaaatcatactttcagatccttggactcaagagaattgaacgggtacttct

SEQ ID NO: 28972 - DNA, 421 bp, Medicago truncatula
  Intron number 1 from transcript Medtr1g146010.1 (locus Med tr1g146010) derived from phytozome v7.0 (chr-ID MtChr1; po s 32171848 to 32172268 reverse strand)
agaagtcattaagacttggaagtagaacaactgttgcgtctcttgctgctcagattgcttatgaatagctctctcgttttgtcgaagtcaaattgcaaggtacctaaatctgcactacgcataaaacaactctcaagggatttaagaagagcttgcgatagagaattagactactaaaacaggatataaatatagtttttttggtttgttaaaaaaattgacaaaaatttaaaataaatttcaaagtattcttggtagctagcattcttccactcttttgaattagaagaagattaacataaaatttactaaagtactcatcactttaccttggaacaaaggaactaggaacggcggaaaataacaagaatatttattttgtcaagtagcatcgagcagcataccgaaacaacttcattat

SEQ ID NO: 28973 - DNA, 774 bp, Medicago truncatula
  Intron number 2 from transcript Medtr2g029710.1 (locus Med tr2g029710) derived from phytozome v7.0 (chr-ID MtChr2; po s 7983206 to 7983979 reverse strand)
tgttgccgtaggttttgaaggactactttcaacaggttcttctttaggttccttctgctttctagcagcgtagggttttttttttcaaaatttttttctttctctagactgagatcggtcaaaaaaaaaagaatcaaatcgcaccatctctgtaataaatgaatgcctctttttctcacatcaggaaccctgtcctatcttatatttcactcaagcccgggtgtaggaacacataacacaatcttctttaggttcttctttagacaaataaaattttccacatggcatgccacatcattttatgtgtctatgtgcaggggcggatggtagtagtaggcaggggtagcccttgctaccccaaaataatttttttttttgagcgagtaggtatatttttatatttagctacccctaataatatttatttggctaccccaagtttaattttaagtgaaataatttttactatctttatttaacttccggtcgaacttcaaatttatatgtggccacctcatagaattattgctagcttcaccgctgtctatgtggcagcccatgtgttcatctagttggcaattctgtttgctcagtcagcaagaaagtaacggcgaggaccaatttcgctaacaaaaaaaacattggggaccaaaagtttattaaaatttaagtatggactaatgttagaaacgagactatttacagagaccttaaacataattaactcatttaaaaatagcaataaagttggaactaatcagccacttcctcgta

SEQ ID NO: 28974 - DNA, 976 bp, Medicago truncatula
  Intron number 1 from transcript Medtr1g046680.1 (locus Med tr1g046680) derived from phytozome v7.0 (chr-ID MtChr1; po s 10959134 to 10960109)
aaggtactttaaaacattgtggttatttatgtgctaatgtatcttatctatatctattcaattcaaagaaatgtagtgtgtgagttttaaggtaatgtttgtcactttgtctacacactaaaggaaatcttttcttgatgacatgaggcgtgtttggatgaagtaattggaaatttagaattttaggtaatttaaatgattcaattgaatttcttttatttctaaatgtttttatttggagagtaataaaaaaaatgtattgttaacatttttgggttgcctttataaattttaaaagttttgagtcatacttgaaatttgaaaaataggtactaatttgcaatttttgaaaattttaggggttaatttatagttttttgaaaatttataggggttagtttgaaagttttaaaaaattgggaccaacttgcaaaattttaaaaaaaaagttaagaaccaatttgatattcacattgtatagagtaaggaagaaatttcaaatttctagcttttaggtgtcatttgacagatgtgacactcttcaacgaaggacgtgcaattttaaaatagtaaagcaatccaattggctgtctgtgttgcaaaaagtttgttagaaaactgatttggataggttctagcttttaggtatttgaaggaaaaatttagtgaataaaatttactcaagactaatggcgtgtttgtaacacatggtgaccattacttagcatttgataggttgaagctcgaaagagtaattttaattagctgcatagtgctgcggtgacttgaagatttcaaaacgcatgctaagtgtgtttggttttactttggaaatcattagaattgattctgccttgagataaaacaaactgtttctgtttttgtagaagtactgtttatttactgtaatgcagttcattattaaactcatttcaactttttttcacttacaaacaaacagggctggcttctccgg

SEQ ID NO: 28975 - DNA, 891 bp, Medicago truncatula
  Intron number 1 from transcript Medtr3g094510.1 (locus Med tr3g094510) derived from phytozome v7.0 (chr-ID MtChr3; po s 22649237 to 22650127)
gggctggtgcccgggctctgcttctactttgtttggtaaaagcccaacccaatagcccaattcctattaaaaaaaaaaaaaaaagggcagacttgtgttattgttcaggcgcgcgtagtaaaattaaactcttctcctttcatagtaactcgactctccctctcttctcagtcttttttttcactttcttctccttcagttcagaatagtagcacctctccatgctctcaactctcagtctcagactctcagtgattttcattccttatcctctttctcctctctagtctccactctcgtccaccaggtcaggtttgttctatgtttttttttatttgttctattttattgctgcttatttgttatttgttaatggatgaatcaatgagttgattattcaaatttcaaaccacaatttagaattgttgattatccccaattttgattttccaaaccctaatttagaattgtgcattttgtatgattgagtggagagtttatgaaagcatacttagtttagttacttacggttgtgattgtgaacttgtgatcaattgattatttgattataaggttcaaggttgtgattatcacaacttcaaaaaaaaattatatgaagaattatataatttcagagatgcagcttacggtttagttacttaggttgttaacattcattttcttacacaattatataaaacaattgattatttgattacttacggtttagttacttacggttcttaacattcattttcttcttgtttgttctactttgttttttatcagatcagtaaaaaattatatgaaatgatgagaattaaaattgtgaattgtgatgttttcaaactcttatatgtgatatattatcttctgtataaaatttcagag

SEQ ID NO: 28976 - DNA, 1050 bp, Medicago truncatula
  Intron number 1 from transcript Medtr1g108350.1 (locus Med tr1g108350) derived from phytozome v7.0 (chr-ID MtChr1; po s 23076822 to 23077871 reverse strand)
atcaccgttacctccgacagcaatttctctaaaaggtaatttcttcgtctttctttgttgcttaatgttattgatgtgttaggtcaaatatttctactttgagtagagtagatctagtatcctgtagatgaaatgttcatatgtttttgagtaattttgtggctttgaaatgttgattgggaattcgattgaatattgagatagtattggaatgaaatatactttatataattgtattattgattatgattatcatgtgcaatttaatatgtttttctgtttcttttttatatttatgttggtagttaaattactgcgttagactctttgaattttaagtatgtttggatgggtggtgaatttgcgtaagctccaaagtgtaggttttggcaaaattgtggtggctcactgtgattctgaaatttgactgtcaatccaaatatgcaatggatatgtgtggagtcaactctttaaaactgcgtttttcaatgtcaaatcaatatctacgtgtttcttttgttaacttttctaccgtgaaggatataactgtgtttctttaaagtgagggatacaactgtgtttctttaaaactgtgcttgttgtgaaagggatataagaaaatgccatcaccagtctttgcttgtgatgtttgcatgcattcctagtgccaacttaagattctcatgacattttttttattgagtgagtatgatttgtgtaaatggtcatgttcctgcatttcctggtttccactattggctggtattccttaatgttaatagaatttgacggtattttgattccagtccagttactgaactgaattcttgtcctgctctattttgctgttttttgtaactgtttcttcagttcaaatctgcatgcaatcaattggaatcatttttttttcttctttttctttatgtctcagttttctttggatacaagttcttctttggtttttctattgccttcatgtgattatatttgtcctaatcatcactacctttgccaggtatttgaagtacttgaccaagaagtacttgaaaa

SEQ ID NO: 28977 - DNA, 963 bp, Medicago truncatula
  Intron number 1 from transcript Medtr3g138530.1 (locus Med tr3g138530) derived from phytozome v7.0 (chr-ID MtChr3; po s 35424187 to 35425149)
gaacaagcctggttaatctctcaggttccaaatcaaatcttcaactccaattttatgtttttgttcctgttcaatttatttccagttttctgtttctgctaccgttatgccatcaattatccgttttgaaggttccttttttagggttttcacttgtccatggtttgttgtgttatggttgggcctaaacaagccttttactgcagtatagtttacatgtggtatacgtttaagcttaaaccttagggcctgtttggattgagcttatgcaaataaataagcttttaagttaatttataagatcttaccaacgaaaattgtatattcataagttgtttattcttaaactaccttaacaaaataatacagtaatgcttctttatttgcataagctctaaataagtcaatccaaatggacccttattgcattaggtttatgggtcctctcatttctcatttaaaaaaatttcaacatccatttttccatccaatgtgagactcttactcacttgatataccataaataagtgcttatgtgtaacctattcctataacaaaaattaaaaataaatttaaactattttaatataagctattagctgttttcataaattattttagagagcttatggacacatcgcaagttgtttccataagatctttcaaacagtcccacaagtggttatgcaaatagaaatgttaaaataagcctatccaaacaaaccctctatccctgtaactggcaacatattaactgatgttgtggacgaatgaataaagctgtatatcaaaatttaaaatttatctcttaattattcatgttctatagttgagtgcagcttaacagagtagtttagatttaaaatttgatacattttgataattatctgctggtccctgatttctcctacctgtatgatacttgcagcaaccaaggccagttgtgtgttcatcttgcagctc

SEQ ID NO: 28978 - DNA, 828 bp, Medicago truncatula
  Intron number 1 from transcript Medtr2g118020.1 (locus Med tr2g118020) derived from phytozome v7.0 (chr-ID MtChr2; po s 27888231 to 27889058 reverse strand)
gtttatataatctaataagtaaactacatttgagttttctaccataaaaaaataattaaaagtaacaaaatttattatttgttagtatgtgtaaatgattctaaaataacaacttgttctctcaatttttattataaataaatgagctagtgtaggaaatggggatatataaatataaaaaaatctatatatgcgtgaggagagcattattccaaagttttagactaacggatcacgatcaaaattgattcattgagacaatattctagtgtaatgctttgtctactatagattttaggtggattaatttaaaattagtgtgtggataactcaattatgatgctacaacgtgataggctaaactttgttgttccaccgtaataaaaattgttccactattataataactcacatgagtgtaggaatctcttttcttcttttcttcccttcttttaaatatgctaggggctaagtcacaaatattaaatgttaaaaaatgatgaattgagcatgtgaattcacgtccaatatatcaatttgcaaccatttactatctgaattgtacatacgagataatatgtctcttttttggccaaaaaaacataagaattctgctcattatccaaatagtatcactcatttttaaaataaatgtttaaaatgtcatgcgcatgttaacatgcgttagtgtattttttacctatgttaagtcacactacgtgacttaacatgcgctagtgtattttttttacctaagttaagtcacgtagtgtgactgaacttgcgctagtgtattctgagcgtgagttaactcgcgccagttggccg

SEQ ID NO: 28979 - DNA, 914 bp, Medicago truncatula
  Intron number 1 from transcript Medtr1g028360.1 (locus Med tr1g028360) derived from phytozome v7.0 (chr-ID MtChr1; po s 6877373 to 6878286)
agctgctggatcagcttagaactaaatgtgtgtcatctcactctgctatgctgaaaaagcttttggatgatatgcatgaagcagctaaggagaaagagctgaattttgtgcctctgctggacatcactcctttctatccagaagaagagtacatcactagggctgctagaattcaggctggatataaacgaagaatgagggaaaaggatgagctacttcagaagaaggatgatcagatcaagtatctcttagaacagttgtataagcaagcccaaccttagttgcacacccaactctagcttgttttttacttttgttcttcgtagctgtgtccttgtatcttaatcttctttatatatattatcattgtttctggatcttgtgctttttcaccttcaatatgttttacaagctttaactctgatgatatttactgtttaatgctgcttgctctgatactctttcttttgtttctattctttttgttgatgacaaaagggggagtaaatgtatagtatttattaaggcactgagccctactataaccacttctaaatttcttttaaatacttctgatttgattttataagtattttattgaaatttaattaataagaatagaacttagggggagcttacaaacctcaccttaaagaactattagactcagggggagcttacaaacctctgtcccagtagtcaacttattaattagatcaacaacaattgaacattttaaatactattgtttgtcatcatcaaaaagggggagattgttggaacaaaatgtgtttcacaatgaaccttattaagttttgatgataacaaggtattaaaaattgtcaattggttattactaataattgttcaagtgtacaggaccaaaggctactcaagttatttcaataggtctt

SEQ ID NO: 28980 - DNA, 588 bp, Medicago truncatula
  Intron number 1 from transcript Medtr3g039620.1 (locus Med tr3g039620) derived from phytozome v7.0 (chr-ID MtChr3; po s 10538351 to 10538938)
atttggaattaatattggggaacgtgaaggaaggagtagttttctttttttgttttgttttaagactttcaatgaaataaataattttatttttaataatttaaattaaaaaaagtttttaattcatttagggaagaaaaaaacgaaaaatattagagaggggatcgaacaagggaccaagagcttgttggtggttgttgtatgccactttgaaaatcaatttatttcataagaagcgctttttttaaatcaataaacgctatgtttgtagtatcaactatagcgctttaaaagcgctgtttaaaagtgaatcataaatagcgctttctatattaagcgctatctaaggttaattgttcaattattttatatttaatatttttttaagaattctacgttagcgcttttgacacaaaacgctataatcagtttgcctcataaatagcgttttttttataaaagcgctatctaagccctccgtgtttccttatatagcgctttagtgttataagcgctgctaaatgagcgctattttttccccattttgtagtagtgttcaaagaatttttctcaagaaaaaatattttg

SEQ ID NO: 28981 - DNA, 644 bp, Medicago truncatula
  Intron number 3 from transcript Medtr3g097920.1 (locus Med tr3g097920) derived from phytozome v7.0 (chr-ID MtChr3; po s 23575037 to 23575680 reverse strand)
atactattctttaccttgaccttccttctaatgtatgtcccctttcccatcttcattatttttatgtcttttgtttatgtgttgtggtgtgtttcacaaagataaatactgtttggccaggagcatagctattaaataatattgtaataacattcttaaaagcacaatatgtattaaattcaccatatctattgcttgtctaacaaatcagaaaaagattaacaccttctggatgtggatccaaatagaaattttctacatttagttagaggtttaagtatttagtcattccttttctcatgggccatgacagaaaaagattagccactttttcgattttgcacatcctaaatctttgatctattgcaggataaacaatagaaaaaaattgttttgcatctttctaaaatacagtttcactggcaaactttaaaaaatgacacgctttatttatctaaagatctcggttgtaaattagttctgaatcttgttttattataatcaatttagaagttttaaattgctgttggtgaaagtgaaacttaagcccgattttgaagtgcacacaaaaggaacctgattcagataacatgatgctaatgcactttttttcttacatttcatttcagatcggttcattttta

SEQ ID NO: 28982 - DNA, 811 bp, Medicago truncatula
  Intron number 1 from transcript Medtr3g067600.1 (locus Med tr3g067600) derived from phytozome v7.0 (chr-ID MtChr3; po s 15549419 to 15550229 reverse strand)
gaaaacaaaggaaagtctgtgaaagagaagcatgataagagaagttgaaaaaaaattgtattggcatgctattttcaatacataaccgaagcaaaaacaatgtgatttaatagatgaaccatatgtattggtattgccagtatgtattggtattgaaggatgattgaatttaattaattttggtattggtattgaaggatgattgaatttaattaattttggtattggtattgggagtaattatgaggtggggtaaataaatgtaaaatggaggaaatcaaagacaagggtataataggaacttttgtgtcaaactaacttgtccttggttactgcaatttctccaaaatgaacatgtattttgaaacggagggagtaaatatttaccataattattacataattttcctcaagcatatggccatctcaaaatatctaaagacttggaagatcaaagaatacaatactagtcaatacaatatctcacacgggaccatcaaaattaaatatagctactacaaggaaactcaatatgcaacaaaaccactatagaccgccacatattacaacatacattaccacaattttcggcttttaatagcacaattttaatgcagatcatagacatgttagagcacttttcataatacgctaaaaaaaacttgttaaaaattgggttagataacgcttttgtataagcgctattattctggttcatactaatagcgctttttagaaaacgctattgttgatggattggtgatgtccctcttcaggttcgttttcgtcgcttgtttgatttgttagaaaa

SEQ ID NO: 28983 - DNA, 749 bp, Medicago truncatula
  Intron number 1 from transcript Medtr3g128060.1 (locus Med tr3g128060) derived from phytozome v7.0 (chr-ID MtChr3; po s 32687863 to 32688611 reverse strand)
aaaagtgtggtaaattaattattcaatgaagtgttgataaagttcctttggtttttctcttgtcttttgttatttgcatgtcgtaatagtttgctctgtgcgggccgtggtaataactgtatgccattgcctgcagtttaagatttgtccctattatatgatatatgcaacttgtagtttctgaggaggctcaataaacgagatactcctacctagctgtgtctgtgtgtgtgtcttagtgaggtccttggttatgccctttctttctctcaaacgtccaacattgagaatccaccctttttgtagtcctgcctcatcaattgatagggaaataattgggatgggaggtaaaactttttaaagaaaggcgtatgacactgtaattctataattgctaggtggtaaactgtcctatatggtttatgataaagaatttataaacttcttagcaaaaaataaataaatacaatatattggaaatcaattgtgtctgattatgtctcacatcgattagaaatgtaagcaatgttggatatagaaaagagatgactcatatacctaatgtcttggagttttgggtggagatgtggtgtttaagtcttttagtggtcctagatgtttagcctattgccacacccaaactctctaacaagtgatatcagcccattgccactccctgaactccctaataagtggtataggaatcctgattaggctcggtgggggagcgggagcgagaacttagtgtg

SEQ ID NO: 28984 - DNA, 519 bp, Medicago truncatula
  Intron number 1 from transcript Medtr1g019670.1 (locus Med tr1g019670) derived from phytozome v7.0 (chr-ID MtChr1; po s 4071736 to 4072254)
tcaattcagtggaatcaggtgagtgttgtagttttactcttccaaggttgtttttcttattgttccctttttggaatggagagaacacaacaatattcaaagtttgaagctttgtcaacaagttgtgatttttatggttgtcattgttacaaagctgaatactccatgtgcttttttctttgttttttgatgaagggtattggacaaaacacttaaaagtttgaatttttaattattatttatattattttttacttggtttcttcatccacaaccaaatgggttattaccttaaccgttattagttagtcccaattttttatttgaaaaaaagtcagctccttttctttttctgttgaataacattaaacttggttatagtttggatcttgttaattttcttttaattatgtttccaacttcaacaatgttggcatgaagtatatattaacaagatgaagactatatggtatcaataatgctaaaatatgtttgaatgtctcaattgaagggtcaaca

SEQ ID NO: 28985 - DNA, 281 bp, Medicago truncatula
  Intron number 1 from transcript Medtr2g073970.1 (locus Med tr2g073970) derived from phytozome v7.0 (chr-ID MtChr2; po s 16794185 to 16794465)
ttgctctggctttaaacgggccccgcaagtgggcggtgggattggtcccctcggattagtcgattttttgattggataccgagttttcaaaaaataaaataaaatatgatatgattattattgtaatttattgtttttttctttcttcagaatagtccttggtaattgttgtaacttttgattgcttcaagataggtttagtatttgattggactgtatgtaagatagatacattttgtgggattgatttgtggttgtttaattttgtttgtagttaacaa

SEQ ID NO: 28986 - DNA, 326 bp, Medicago truncatula
  Intron number 2 from transcript Medtr2g073970.1 (locus Med tr2g073970) derived from phytozome v7.0 (chr-ID MtChr2; po s 16794659 to 16794984)
aattgggctgttttagtctgcacctctcgtttctggtaagctaagtttcatgtttcatttataagatattcttttatacaacaatggtttgtttttgtcttattctttgccgaagttccatgctaatgataaataagaatacaaataaggatgcatggtgataattattttttctttagttgttttctgagaacattgacaactaagtatggtataaagagaaaatttgtattgctgatggttctggtttatgactcaaaccaaaacatgacttgtttggtttactaaatatgttgtttccccgtttcaggtttaattaccgacat

SEQ ID NO: 28987 - DNA, 625 bp, Medicago truncatula
  Intron number 1 from transcript Medtr3g100890.1 (locus Med tr3g100890) derived from phytozome v7.0 (chr-ID MtChr3; po s 24344449 to 24345073)
cttccaaggtacctttcaatcgtggactaaaattattcctttgcgtatagtttcgaagattttaattaaatagtggtggtggacgagaacgattatgtcatgatatctgatgcatcctcaatcgcggttgcgctgaccacgttgacatatcaaaacactttatgctgtagtccaagttgcacacttgcagacatttgtttggaaaaaccatgtggtgtagagaaatgaaaaggacatgtagaggaaactagtaagaaaagtctagtagatggatgatataattgacctatggttaggaatttttctttttaattgtgatagagaataaatttccagaactactgaaaacaatgttttaacattttttagaattttcagaaatgttgaatttattttgaaaatgcattttcaaaactttccattatttgttctctactatttgtttatcaatggaaatgaaaacaggaaacaccagaaggaaacaggcccttaatttctcttcatttcaaacctcgaaattttctcttctcattaattttacagaaaaaattaacgctatagtgaatgaatttgtcgaaatcaatcttctatgccatatacatgatacatccattttttccaggat

SEQ ID NO: 28988 - DNA, 877 bp, Medicago truncatula
  Intron number 1 from transcript Medtr2g009940.1 (locus Med tr2g009940) derived from phytozome v7.0 (chr-ID MtChr2; po s 2279523 to 2280399)
caagttacagagacagggaggacatcctcctataggtaaataaaatcttgcaaaaccatctactagtactaggttgattgacctaatgcaaaatgtgcaatatactacaaacccatatctacatcaaataacgaatattgtaaatcacgttataatttggatgattagaaacacctatgttaatggactcgtcttaatcatgcaatatgcatggttcaatcagaaaattgccaaaaccacgtcttctatatattagaaacacctatgttaatggattcgtcataattaatagcaatgttacaccattatcaccatgcctgaagaagtagatcagaaattctgtcaaggtttttgttgtcttttatatttgaggtgttgtgaaatttttgagacttgagttgtattttatcattaattaatgaaacattatttttgtgtcaaataacgaaaacttcatatgttgtattgtattttcttatgccaactctacctgtatatgaaacacacctaagtgaaatagttatacagcgtatatattcggcgttggaaaaccaacaagtcttaacataacatttctcgttaaaaaatggtacaccacctaagtgacttttattttttctttcaaagaaccaccaaataagtgacttgtgcacattagaaattacattacaaatgtgtgttgattgaacgatcataacctcatcgatttgacggacagttctattttcatacattgaccatgatcaaaacttcacttatttgatctttaactttttactttttgaaaaatgaagttaagttgatggtttgatcaaaacttactcaagttttattttattcagttctcaatatccattagactactacaaacctaaat

SEQ ID NO: 28989 - DNA, 177 bp, Medicago truncatula
  Intron number 1 from transcript Medtr2g038660.1 (locus Med tr2g038660) derived from phytozome v7.0 (chr-ID MtChr2; po s 10842749 to 10842925 reverse strand)
cttgctcgagtttaatttttgtattcttataaactgtattaaggaagagttttcttctatcttgtacttttaaacttctttgatgttaatgccagaattcttttaagatggcttcactgctgatgcttaattttgtttgttttgcttctctaaacaatggatagatcaacttcttgc

SEQ ID NO: 28990 - DNA, 664 bp, Medicago truncatula
  Intron number 1 from transcript Medtr2g033640.1 (locus Med tr2g033640) derived from phytozome v7.0 (chr-ID MtChr2; po s 9227454 to 9228117 reverse strand)
gctgaaagggtaacaagttaaatgaattaaaaaaatgggacacatggctcattcctattgagtgtgttaaaagagtgtgctagtgggtgtgtccctagcatttctctttttcatttactagtagagatattcattaaattcaatgaactgttgatcataatccttgcaaaatcaagtcaggacttcttctccaaacacgaatggacacacaaatcttcctttagatcatatggcaccaagtaatcaactctgatcagaactccactacttttgcaaaatcgtatctacattctcttctccagtctaatgagtaaaaaaaaccctatttccacccataaaaataacatataaggacgagaatatgacctccacaaacgtttgttgaagtttaagtatcattaataaatcatttatgtttaacatgtaaggaaatgattactgaaagccttgtttttgtttatatttcctacaactttgtgatcaggtgtgaagtgtttcattgatcaatgaggtgtgaagtgtttcattaataaatatttccttaccatggggtgcatttcttcaaaacttattattatagccagatgaaccaatttccagagaaatcaaagatcaatgagaaaagctaatggcattccatagctggccagtaccttgctcttgt

SEQ ID NO: 28991 - DNA, 922 bp, Medicago truncatula
  Intron number 1 from transcript Medtr2g014040.1 (locus Med tr2g014040) derived from phytozome v7.0 (chr-ID MtChr2; po s 3442757 to 3443678 reverse strand)
ggtactaggtacatgattgagtgagggtatgtttgtaaatacatttgtttctgtttttggtagtttctttctttcttctgtctttttttttttctctttaaatttattttttatgttggtttatatattgttcttcttttggagatgaattggtttatttggtgaaagtttgcatatttttaaggtagaatattacaaattagtagtattattgagatcattaatgcttttagtttgtagcaagggaaaaagttttgagatatctgggtttgtttctttagttgtttggtttagtttctatgtacttttttggcatgggtgaaaattttacttaaactagagtttttacttgtttgtctttttctttccttaatttactcaataggtttcatcattcccaacctgtgacatggaaatatcaatgatcgaatttatcatcatgaatttagtgtggaaattaccaaagcctctaaatcattagttatacaatgattggcttgatattattagattactatgtttcacaaaaaaaaatcactagctctacagcttaggctttaggatgttccaatgcgacacaattttaaagagcaaacactcattttagttcttttggtgacactgaaattgtaaaagttattgagcatatgctgcattctagtttcccatgtcccaaattgacatgaatgaagctagataggataattcaattctacgttaaaaaaaaaaaaaacctagtttggtatattttcagcgagtgtgacatttataaaattacagtgacccattctcttaaagtgttacaatggtttctcaaagaagagaaatcatttaaatctttttaaatttttcatttaacgtcatttattttttatcaatcacactaagctgtcattatttttggcacaggcaatagttttcc

SEQ ID NO: 28992 - DNA, 688 bp, Medicago truncatula
  Intron number 1 from transcript Medtr3g073930.1 (locus Med tr3g073930) derived from phytozome v7.0 (chr-ID MtChr3; po s 17254642 to 17255329)
actaccttgcttgcaactcctattgaatcattttggtaaataccaattacttttaattttcttgtaaaacctcacatataacgatagcttgtcctatacttttattttttaattagcttagacgaagatgatataagccatacactacaaacatacattacatcttaaacaaaacaaaacatcaagccgaataacattatgaaatgatgcatatataattttggcactattattttcaagcagatcagattacaacttgtcaagatgcttaactttgactgcagtaataaacaaacgaattttttttagttgtggtcttttaaccgtgtgtttgttttaagagaagttggaaaaaaaaaaaaaaaagagaaaatagaagtaacatatcttgcttggtaagagatatgcaatgtaagaaccaaaccaatgataccatgattttttctcaaggataaagattagtatggtacatgtgttgcataaaaaatttcatctactgaggtacccacataaaagcttggtgggtttaaaaggagcgacaatttgcaagtctttaaagtggaccttaactttcaaaccagggtccgtaataatttaggaggtagaaatcattaattctgacgtgatttaaggcaaatataaaaggtatctaggcgtggagaaaagcgtgaccccattgtcactgctt

SEQ ID NO: 28993 - DNA, 881 bp, Medicago truncatula
  Intron number 1 from transcript Medtr3g094020.1 (locus Med tr3g094020) derived from phytozome v7.0 (chr-ID MtChr3; po s 22455011 to 22455891 reverse strand)
gcctgcttctccacaatcttgcaggtaatataagagagctttcttctcctacctctcatagtttttaaaaatcatccctccagatttgtcaatcctccaaacgcatgagaaaaatggtgttttttctctatctggattgacaaatcgagaggagtgcgatattctataaaaatccgtagtttacttagttaaattttgagaaccgcaatctagactttgttgggaggcccaattatagaactgttttgcatattgggctttaatagtttatactgacgttcattgttcaaaagatataaatctagggatcttctttttctataataatattgagtttctcgtgcactctatgtagtttggattataaaatccaaacagcatagacaacctataaaatcatctcaaacaagttaaaacatctctctcatattttaaaattcgaatagggtgtaagagaaattcatagaatgaaaaagcaactctcttaaatctattggactttcgcttcaccgtgcttataagtttttattttttagggaaccttataagttataaactatttttgtctcacattttattcgatatgccacttcatttttaaagacttgaattctcttctacctattttctgtccaacaagaacccaacgccaaatctctagttggacaaaccgtcaaagtaagagagaattcaattattagaaaatataattataattaaacgataaaaataatattttacttttggagaaaaaaagagactaaattatatttttcatttatgagcacatttactcttaattcaattgtctaaccataaaaccaggcatagaggatccaatttgattaattataggttaaatatgtgcagggaagtgtttg

SEQ ID NO: 28994 - DNA, 506 bp, Medicago truncatula
  Intron number 1 from transcript Medtr2g010780.1 (locus Med tr2g010780) derived from phytozome v7.0 (chr-ID MtChr2; po s 2673642 to 2674147 reverse strand)
tctccactcttctaagtggtgagtcctttgacttttggttagttctttttcaatttaagctatgactaccaatttgagactcactaggacacaatgttgtatatcttcaactgaaatatgtactcctctcgacttaattataagcagaaagtacatgtatctggtccacacatttggaccaaatacaattactttttgcttatatttatgttcggagtattatgtgtttggcttagtagaaagtagcttgtagcattattggtatttattagaaaagttaagatgttaacttatatgacaagctattgtttaaaagacttgaatattattggaaaaactttataacttttctaattatagatgcttgttgaaaattagctttgagatttattaatcatatggctagacttagtttccttgtgatatcttataaggaagagaatctaatataagcttttctttgtggtacagcttcttggaggctttcttcttgcagaagcttagta

SEQ ID NO: 28995 - DNA, 882 bp, Medicago truncatula
  Intron number 1 from transcript Medtr3g005670.1 (locus Med tr3g005670) derived from phytozome v7.0 (chr-ID MtChr3; po s 380547 to 381428)
aatcttcaggtgagttgtctaaaatgatgcttcatgttttctttttgtcattacattggtgagcattgcagctttaattattatattgtactttattctatatcccctgctgaataccatgtcatgcaattttagttttttcagaatttctaccgcgtataactggaaaaaaaaaaaaattattgagatcattgaacttagatcttgaaccaattgaactaaacatcaaatgaaaattgaccttgttaaataaactatatgaactttggatatgtatagtttgagtattttggttcataaactaacttggcgtgtgtgattaaattcagatgattaattttatacttaaattcatagtaaaaaaaaaaattatatgaaataaaaatgtctaggatctatcatcactcagttttgtttgggtcaaaaaaatacatgcataaaaaagggcaaaaatttgagaagaaatagcaaaaaatgaagaaatattcaatcaacaaaatattgatgaaatttgacttgagtgatcatgtgtccatgagagttcatgttggtttctgcgttatcatcacatatttactttctaaaaatattatcaatttattctaaacaatgttgacttgagtgaacaattgtgatagtgaaggctagctaggaagaatgcatttttagaaataatgaagaccgtgtttcggctcacgccatcgaaataaagattgttgtgggtgaaaataaatgaatctattgtattgtaacaatacactcgtgtgttgtttatgcttagcttctttagtatgtttgattcgtgtatatctgagaattgaaataaaatccaatttgtgtcggtttctctttccaggttagagtggagtttgcatccaagaa

SEQ ID NO: 28996 - DNA, 306 bp, Medicago truncatula
  Intron number 3 from transcript Medtr1g118320.1 (locus Med tr1g118320) derived from phytozome v7.0 (chr-ID MtChr1; po s 25686056 to 25686361 reverse strand)
ccccgaaagatctttataacacagtctgcaaacaggtccgtttttcgttcttttcatgtctatctacatatgtatggtagaaaatgatcttccattgtacgtcactataaagcattttccttgcatttttttggaaattgtgaaatgctatgttttgattcttttgaatccttaatgtttttcttgtttatttggaatgtaatgtctatactgctggtttttcaatcagttgtccagtttgtttgacctttttttatttttgttgcttcaggaggttgagattgttcttacagctcatcccacaca

SEQ ID NO: 28997 - DNA, 385 bp, Medicago truncatula
  Intron number 2 from transcript Medtr1g118320.1 (locus Med tr1g118320) derived from phytozome v7.0 (chr-ID MtChr1; po s 25686423 to 25686807 reverse strand)
ggtatagctgaaactcaccataggtaataaataatccatggctacactaactctgattatttgttggtaattaatattactttccaaatttcatttttgaattcacttattcaagcttatctagtgacataagcacttttataaccgtttatgagatcttacgaaaataacttattttcgtaagctctccaagatagcttatgaaaaaaaaacttacgactttattttatcttctgttatagaaataacttatagataagtgaatatcatgatgagtccttatgctatgaggctaattaagttgtttatccaaacagggcctacgtagggtaatggtaatctctaacagaaattacatgttcacagggttcgtaaaggagggaat

SEQ ID NO: 28998 - DNA, 230 bp, Medicago truncatula
  Intron number 1 from transcript Medtr1g118320.1 (locus Med tr1g118320) derived from phytozome v7.0 (chr-ID MtChr1; po s 25686944 to 25687173 reverse strand)
ttgacaaactcgaaagaattcgtgtccttgctcaggtaactaaaaattcaaacttttctctttctcttcataccccacttttttttttcatttgtttttcaatattcactacttttatgtgatttttcccccttgcttaatgtgaaaatctatgaagcactgacacgcctttcataagtgagtaatagtgaatgatgtttctatttttgtttttgtttttggcagagtgc

SEQ ID NO: 28999 - DNA, 912 bp, Medicago truncatula
  Intron number 1 from transcript Medtr2g046500.1 (locus Med tr2g046500) derived from phytozome v7.0 (chr-ID MtChr2; po s 13015225 to 13016136 reverse strand)
acgaaaacaacaaattctccatcaggtatcaattctataatccttttcctatttattttcgaccattccttcaatcaaattttatatgttttcttcttcttacaatatcatgctcattgacttttatttaatactcttattggcagaccgtaaattcggattatacgcattttggtcgttaaaattgcatgtgtctagtcaattaaactgaacgttatatgtaagaggattgattttgccatccataaagattagcggcgagttttccttccatttatgtataaattataagtgaaatgttagaagttaaattagccaaaaaaaacatagtccttcaaatttgcaaaataattcatataagagtcaataaaagttcatgtatctcgcttcttaaaaaaaaattgatgtatctcgtccaaatgtttgtgaaaatctattaacatggtctttttcttaaatttttcaccaaaatttttgagattccttgcttgttttgatgcatgggttaagaaaatgtccaagttgaatgatatttttcaacttaaatgaccaagttactatttcgcaaatttgagggattaaattgacaaaagtttataatttcattgactacaatggctaagtttttattttttatgtggtagggggaaaatcgtattttctatgaaacattgacaaacgatacgtatagagctttggtaatttgaaaaatagaactgaaacccatgtgtcgtttttgtgtcgatgccagacaccaaacacacctttaatctaaagtgtaggtgctacatatgtttgctttttgtagtgtgtgtgtgtgtgtgtggaagttatggaaactatgagatgattttgtcatgatgttttatgcaattagttaaagaagcaagaggacccgatttggttgaaaga

SEQ ID NO: 29000 - DNA, 699 bp, Medicago truncatula
  Intron number 1 from transcript Medtr1g127220.1 (locus Med tr1g127220) derived from phytozome v7.0 (chr-ID MtChr1; po s 28585881 to 28586579)
ttgctgttatcctttttttaatgctagcttgcttgttttgtttctttttattggcttaatttggttatgttgattgttttgggccttcaggaatttgttcatcttctcagcattatgttccaaagaaattagaacgcttctttcctgaattgttcaggctctgtttttgataacttaattcgccttcattactggacattgttttttttaggctcaataataatttattttctagttgagtgtgctttggatttttgtagaagattcatcatgcatttgactgagatgtgaatttggatcgaacaagcttgtgataggtagactgaacttgtattcttttgggtcaaatgtattggaacttttgagttttgtgctattggccttctggtgatcaagttcaaaccacaaatttattttgttttgtgtagcttatatgatgaggctctgtaagataactgattatatattagtagcaactaacaatggtaatgacaccattctttacctacctcttataagcattagctaaataccaatactgcaagttacatgctttttttatgattttatttgggcagttcatagttctattcttgggcatttgatttgtaagttcacatgtatttagtgtaagatgcttccttttcaactgaacttgattggagtgggaaatatcgattcttgttcaggttgtatttg

SEQ ID NO: 29001 - DNA, 894 bp, Medicago truncatula
  Intron number 2 from transcript Medtr1g031730.1 (locus Med tr1g031730) derived from phytozome v7.0 (chr-ID MtChr1; po s 7752145 to 7753038 reverse strand)
aattggatatcatcctgcttgaggatacctctagggtattttggcagcggattggctagtttgtttttcctgtcttttaatttcctcttcataaaaaaaaaaaaaaacctacacattggttgaaatgtcatgtttaccttttttttttaacttttcatttttcactcctactttcaacatttccgactcgaaaatgagtcattgagtcatccccttcatatcatttttggtatgctaaaatattcctagtttgttaaatattccattaatatataattaacatttttgtgtgtgcgagtttataatggctttgccatttcgtctatctacaaaaaaaaaaacatttttggtttacattttatttacagaaaactatgaaaactttttcgataataaaaaaagtttccataaaacaattattaataatttccgaaaataaaactgaatttggaatatcatctttttttttttttttgaaattctgttataacataaggttgggtatgggggttggcctctaccacatgtaacccgctccacataaactcggactttaaactaaccgatttggtccgtctgcaaatgataacagttttgatctgttggcctaagtctagcccgcattggtatacaagttaaaaaggttaatcacccatccataataatgatttttaaaaaagaaattttgtccaattaccactattgttgctgctgtttgagtttgtagcagaatttaactcagcaaactgtgcaaatccaattaagaatgtgagagagagccctgccagcagttgagaacctccagagcaattcaaatataaagtcaacattgatgcgggatgtttcttaaatgacagcacaggttagggttttatcatgagaaatcagcttgga

SEQ ID NO: 29002 - DNA, 704 bp, Medicago truncatula
  Intron number 3 from transcript Medtr2g080160.1 (locus Med tr2g080160) derived from phytozome v7.0 (chr-ID MtChr2; po s 18392537 to 18393240)
catttgccacagtatttgttggtgaactggtatttaattcatttttcttttcttttcacaccggggaaatacttatatgtttctgtcactaaaaacattaacctttacttaatcttgtcatcttttataacattggtaacagatcttttaatttggagatcaagccgagtttacctgatgatttataactacatggtatcatcttataaaaccttaatgcaataattaggtaaggtgatactatgtagttagaaatcatcaggtaaactcagcttaaactccaaaataaaagatattgtataatcatccctaataccgttgaaaattaagctgagtctgccgagtcttccaagtacccgatgtaatcttataaaacaataactattgcataaacttaactatcccataaaatagttgtcacttaaattcctaaattttatcattgaaatacccttatattaaattttcgcgagttttcacatttagtttaaatataacttgaagtcaaagtcattcctgtggtatcatggtaatctagtattcgtttcttatgattttaagaaacttaaaattttgctgccttgtctacttttggtgcttcttttttcccttatcttattttgtgttttcagaccttattttgatagaaatgcttaatcccgttatcttacttgatagatagacagatttggacatttcaagat

SEQ ID NO: 29003 - DNA, 900 bp, Medicago truncatula
  Intron number 3 from transcript Medtr3g149450.1 (locus Med tr3g149450) derived from phytozome v7.0 (chr-ID MtChr3; po s 39088522 to 39089421 reverse strand)
gcactcataaaatctgctagtgttcttttaacaaggtcggcctctcactttttcctgttaattcagaaaagtttccacaatttagtttgtatgtttatatatatggttttgtaattcttgtgtttttcttttttatcttttcactatgaaatcgtgtttgctaggacgtgcgcctttgattttcttgtaacaaaattttagttttccgaattcgtgataatggttttactataatcaacttgtagttgtggtttggagttgttggttccacatcggataataattggctaaatgatacacacacacacacaaacatacactaagtgccttaaggttttaggtgaagatgtggttttaaagtctcttaatgattctggtcattacccattagctcgttgttgctctcgttctccccaagactccccatgtatggtatttcaatgatattttctttggtatggtatctttctcgatttaaatttactcatctttaaaccacctgctacttactagtcattcgtgcagtgtcaaactaagttgtatggttactctcagcgtacccctatccaacttttggtatctatttattggcaggttgacatatattctggagcaacttaaatccgtgcatttgtttcctttttctctgaggagtgaatatagattggctttgagtagagccactgagattatgttaaacagcatatgaacttgtaaaagtagtttgcaagatgatattgtgatacatttaatttgtatctttgtgtatttctgaaggaggaagactgatatcaattgttgttaagtttttattgtttcttgttgcatctcttcctttgtaacctattattcaatgcataatctacgaaaaacttatttttagatatttatgtaggtcat

SEQ ID NO: 29004 - DNA, 636 bp, Medicago truncatula
  Intron number 3 from transcript Medtr2g008480.1 (locus Med tr2g008480) derived from phytozome v7.0 (chr-ID MtChr2; po s 1606613 to 1607248)
cgcaccactttctccaccagcaccaacttcttcaggttcattgatgtctgtttttaattgaattattttcaagtgttaaagaataaccctttccaaaaaattgttaaagaataacttgaactgaaagcttcaattcagaatataaccctagcttgctcacaactctcttgaattcaagttagactcaactttttccaaaaatttgatttaagacggaaaaataatcaaactagatcaacttgaaatcgatgttatgttaaaaaaccacttgacctaaaagtttgagctgtaaaacaaaagctaaggatggttttctacaactcttaaaattgaggctatacgaaacaagttttctatttcacttgtactttgccactgtttcttttagaatccacctctaaccttttttcttatcttacctaccattatctcttttgccccttttcctccaaagaacaaggataaatgatgttataattgatagtcattgactatgtggctttttcgaaacacaattgtattaaacatttttattttttattctgtgacaatttattgtttcaagttatatttattattaaacttttaatcctttttgcaggtggtagtaatactggagctattgctggaggagtt

SEQ ID NO: 29005 - DNA, 566 bp, Medicago truncatula
  Intron number 4 from transcript Medtr1g093690.1 (locus Med tr1g093690) derived from phytozome v7.0 (chr-ID MtChr1; po s 19147086 to 19147651 reverse strand)
tattcggtgcgaggtatagaagccacaatgattcctcttatcttgtggtgtttcttataaagcttcttctgagcaggagtatgtatttttctatctatagcagctccttcttcatccaaatccaggtcatcaactccatcttccagtatgtcccataactcttcatccaatcccatgataaagctgtacatattagttttccaccaagaaaactcttctggatctccattaaaccttggagcttttccagagtctgttttcttgtcagcagtatcatagtcatgcttgacccttgtgtattttggagtaactgattcctcatctccagacatgtttttctaatagatcttgaactgtaacacggttaagtgctgtgataacagagcaagctctgataccaattgaaggtgaaaaacacaagaagggggggggttgaattgtgttttcttttctcttaaaaaatacttcttctgataaaacttcataatcagtttgattgcttctgataaaatgatcagagtcagattgcagcggaaaagaacagagcagagaaaagaaagacaaag

SEQ ID NO: 29006 - DNA, 806 bp, Medicago truncatula
  Intron number 4 from transcript Medtr3g114670.1 (locus Med tr3g114670) derived from phytozome v7.0 (chr-ID MtChr3; po s 29091559 to 29092364)
aattttggagacttaatcctatttcttatctaactgttgattcttagcttgcttcctttcctttccttgttttactttcgtctctttgctcattgtattataacttggtttcttatcaagttgttttcggtacttcttgtgttgaatcaacttgtttttggtgattaatatatatctctttttggccttttaaaaaatattgaactacttttatacaatgaaagtaaaataaatactgaattaaaaatagatgtgtaggcattcttgcatttcttttaatactttttttttttttttttgtaacaagcaagaatatatgataggatccttttatgagaagttctactctaatctaacaatatctagctaggacaataaaagaacaagatacaagtactttaaaaggaaatcattgttattttggtaagtgaaggtccttttcccttgccccccatggcattggcggccaactgaaggataaagataattattattttgaatttatgtccaccacctcaatgttcaagctttgtcaatgccgcgatataatggtgttacgtacggcctcctactacgtatttcttgataattaaacaataccaatcgtaacattctttgcaataattaaacaaaaagggtatcaaaagaatacgtatttcttgtcaaaagagaaagaagtatttagccatactttaatcaagaaatgtatgtattgttctattttacgctttttcatatcagtttgtttaaatgttttattacaccatgaagaacaagaagaagaaaaggaaaataagcttaacatt

SEQ ID NO: 29007 - DNA, 952 bp, Medicago truncatula
  Intron number 1 from transcript Medtr2g088000.1 (locus Med tr2g088000) derived from phytozome v7.0 (chr-ID MtChr2; po s 19796909 to 19797860 reverse strand)
ctttacaggtttgatatattgaatataagattgaagtacatattcatttttcgtaagtataactcaaatgataaaagactacaaagacatttgatatatcgatacgcgtgttggaaacaatgtttttccacttcttaacatttcgcgtctttgaatatcgttgaaaggcttctgaaaattacaaaacaaaaaggttttttctaaattacttttgaagaatggtggataatttacccaccaactaatgaaaatgagcaatttatttctggggtcaagatagttcatgaatatgtgcttatgtgactaatgtgtattggttgaggtaaattactcatcattctttcatgggtagcctagttgccatcaaacaaaaaatatacgtaacttcaaattttaaaagcatgtttggaagaaagaattttacaaagtaatataattttagaagataattcaaattttttaatataaattagtttgtttggatagtattaaacttgttgacatataactcatttgatgggttgcacttggtgggctcctataatataaatatatcattttacatatagaaccatgaatatgtactagtgaactatggtaatatagataccaattactacctcagttcttaaatataggactcttttgtcaaaattacggagattaagaaagttaattgtagtattaaatttgtatataattagtattgtttttacaattttatccttaagagagagagttaatttatgttttcagcataatatttattgttgattgaagaaaaagattcaaaataaataagagtatgttagtaaataaataattaatgtatttgaaaataccaaatgagtcttataaaaaggaacaattttttttctcaaaagggtcttataattagggacggaggtagtactaataacccttttgctattttaatttaagatactaagca

SEQ ID NO: 29008 - DNA, 669 bp, Medicago truncatula
  Intron number 1 from transcript Medtr2g006560.1 (locus Med tr2g006560) derived from phytozome v7.0 (chr-ID MtChr2; po s 692938 to 693606)
gcgtgtaacaacttgaaacagggtactcttattatgtattaaaaaacaaatatatatcctgactaatacctttgttgactcgcataatttactttgcttgattaaaaataacatgaaaaatattatttttcatctattgaatgtcaaagggtatattaataattttgacatttattcctgggattatacattttaaataaaacatatttttagtattcccaaaaatttagaaagaaagttccaaagaattcaaattggtaaccaaacactttttaaaaatattcctaaaaatataattccaaagaatatattcgaaaataatttttgcatccgtgagacaaacatcctattgttggtttgaggttaaagtgtaacggaaagatgaaattctaataatcattccaccttttaagctgtagcgacccacgaaaattatttcctcccacaattggaaagaaagctcgcattataccaataaatttgatcaatttcccgtttatgcccttttataaaatctttggtagaaccaattttcgttaatttgttttttgtttgccctcttttgtgttagttttggattagactttgtttgggttcttttcagctctttctttgtttgtctcattggattcaggcgttagtcctccctcccaattatctcacttccat

SEQ ID NO: 29009 - DNA, 466 bp, Medicago truncatula
  Intron number 2 from transcript Medtr3g148150.1 (locus Med tr3g148150) derived from phytozome v7.0 (chr-ID MtChr3; po s 38509530 to 38509995)
gtggaactgaaattcctttccgtctcagtagataggtagttttggccactgctattgattttacatggatttcttttagcataatgtttcttcaatttttcaattcaaactatttaaattggggatcctttgattttgtttatcccacaacaagtttggctgttttcattttttcttttgttctaacttatctctcttttgttctctgtttatgcgactacgccacttagaccagaagtctcttccttcacagattttgtactgataaaaaatctaatgtggatttactatgatatgacattaatttgatgttaatttgctatgtccatgactaagtcatgatttagcttcattaattttcttcttatttcttgagtttttttaagatgcttcttagttattgaattagttgtaaagaattggacattaattatgtagtgatttttttagattcttggcaacagat

SEQ ID NO: 29010 - DNA, 860 bp, Medicago truncatula
  Intron number 1 from transcript Medtr1g093040.1 (locus Med tr1g093040) derived from phytozome v7.0 (chr-ID MtChr1; po s 18801002 to 18801861 reverse strand)
actgatcctgttatcttggccataggacaggtaatttcttctttcactctctcatcaacataaagatcatttcttgaatgctttctttaccatggattttcaacatttgcataataatatttagatacctattaggtcttcaaaactttttctccctttctttctaatttttttgattttgattgtgttcagataaggtgattgtgtgttttctcttgctgcatgattagttgttttttatttgggggagattttggagttgtactttctttgtagattgagagttagttattatgattccaaggttttaaattgtggttagcatattcgtgattctgcgaagaattgcgtgtatattgatgtgattgatgcggtctcaattgcagttgcgttgttattgcagaggtgttaaaaattatgatgtcacggatcagattactgtggtggacttttttaaaaacccttaggatggggtgtcaattttctcgaggttttacacttagtagggttcaaaatcgaaggattttccatttggttgtttttcttttttagaattttggattggtacttgtttgtagattgagagttggttatattaatggcaaggttttaaatcacggtagaagtcacgattctctggagaattgcggctaaatgtgattaatgcgcctcaatcgtggtcttattgtggttgcatagacataaaaaatctcgactttgtggttaattgtttaaaggttttacacctagtaggatttcaattttcaatatgggaaggaagaaagggcgggaatgttacactgttattcaatgctcatgattgcattattcgttaattaatttattgatgctgcagactt

SEQ ID NO: 29011 - DNA, 603 bp, Medicago truncatula
  Intron number 2 from transcript Medtr2g122460.1 (locus Med tr2g122460) derived from phytozome v7.0 (chr-ID MtChr2; po s 29394540 to 29395142)
ctggggaggtaagtttattgcgtctatgaatttttatatgttatatcataaagaactcagcacctgttaggattgacttatttgagtttacttaccggcatgaagacttgtgagattgtctgagagatctcatgaaagcaatttatgacatattaagcattgacactgacaccggacacatgacacagataataatttgtgaaaataacataattgaatgcaatcacatgtttcggtgtcaggtattgacatgtttccaacaccggtcacacctatccaacaccagtcacatgcacaccttcaatttgaagtgttgtcgctgcagagtttatgacatgtctataactcgtcagcttatttccacaagctcttcgggatagcttatgaaaacagttatagattatcaaaaaaaccccgacttttatcttggcttttgttttagaaatagtttatgcgtaagtgcttgtataataagggcttatgctctaagcgtttgattaagctgtttatcaaaacatgactttaatatatgacttgacttacaagatttattaaccttgtatcttatttcaattcagggactgcaaagattttgcactgagc

SEQ ID NO: 29012 - DNA, 817 bp, Medicago truncatula
  Intron number 1 from transcript Medtr3g136950.1 (locus Med tr3g136950) derived from phytozome v7.0 (chr-ID MtChr3; po s 34650392 to 34651208 reverse strand)
tttcaaggaagaggtattctgcaagaaagaaccaggttaccatttaactaatatttcaatatcactttgttcatgcatcttccctctcatgctatgagtactgattggagttgactcatgggaattggtcctttggtaaaataaccaataaacatattgtcatattgaaattgcttacgcttttctatacaacattaacaataaaatgactcacaattactctttcgacggagggtgtaattaggagtcaaaaacaataaaattggagggttttttttttttttggcaaaagacatcgtaaaaaattacgcccatatcacaatacaacactcaacgtagaacttctttttggtgcaatatcattcgtacgtaccaaaatatacacattgcaatttgcattcaccatcaccttctttttgtaaaacttgtctattacgcacctctataaatatcatgctatcaattacgttttgctccaattctcaccaggatcgcatctcgattgtcaattgtagatcaaacggttgaaattaataaagttaaaagattgatataaacgatctcggtcgctgacttgagatcgaaaggcgtataactcttaaagcgtctggtgttacatcaaagaaaatcaaaatccaagtaagttagcctactataggatcgaaaacactttaaactgtgaaattagggttaggttaacctactacacaccttctttttgtgttatcaaggccgataattcgacaaaaggtaaataaagtggtgtcaaaaaattgttgcaggtgaaactaagattttgttacaacacatatttggt

SEQ ID NO: 29013 - DNA, 259 bp, Medicago truncatula
  Intron number 1 from transcript Medtr3g034400.1 (locus Med tr3g034400) derived from phytozome v7.0 (chr-ID MtChr3; po s 9455756 to 9456014)
caaaactcagaggtaactccaccattgtttgccaggtaatttcctctcttctcttatatatatacacacacacacacactctctcgaatataagaaagaaaaaagtcaaacaaaatagtgtattggttcaagtttttaaccaatacatcaactttgtttgatttttttttgtttgtttatatttgagagcggagtagtatattatatatgatttaattaattaattaatttgggtttggtgattgatgagaattgcagc

SEQ ID NO: 29014 - DNA, 732 bp, Medicago truncatula
  Intron number 1 from transcript Medtr1g028710.1 (locus Med tr1g028710) derived from phytozome v7.0 (chr-ID MtChr1; po s 7082099 to 7082830)
tttccctccctcctcctctctctctatcctgaaaggtactatttctctttctctttcttcttctttttattattattattcttctttttctgttattttttcttattatgatgatatattaaaactgaaaaatgaggaaaaatattaattattgctaaaaaaagattgtggtgatgatggtgaagtactgttgtttgtttgtagtacacaaactctgtttcaaagggtttttgagaatttttttttatgattaaaataaaaagctgaaattttgaatgttgaaaaagttactgtgtacttgaagaacaaaaaaaaaagttaacttttgcttgtaaaaaaaatggctttagatttttttttttcaactcatgattgtgttctgtttttttatttattgttgtttttctttttagagattttgtttcagttttatgtttcatcttgatgttgtggcttcaaaaactacaatagggttttgagttgaattctgtgaattttttgtttttgtgtttttttgtttgtttgtatagttttctgctacctcgtacctccattttgtctctgtgtgtgtttttctgatgttgcatatgatgttgtgtttttgcttcataatgacatgattgagtgattattttattaattttcctaattaaggtctttaatagcattttcctcactttggattattttaattcagattaggtttaaagcaacaaggtgtttattttagta

SEQ ID NO: 29015 - DNA, 412 bp, Medicago truncatula
  Intron number 2 from transcript Medtr1g028710.1 (locus Med tr1g028710) derived from phytozome v7.0 (chr-ID MtChr1; po s 7083714 to 7084125)
aggtaaacctttacactgtattattggattacaaggttttccatacatataaaaacataaatttcaagtctcaacttaagcttatgggacaattagttacactttgcacttctttttaattgtgttctatatggtatctatgtcaatagttagtgtgttaaaatcaactgttagtctaatacatattctgaagaggaacagttgattttaacacatttggatgtgtttgaattgaatgattttacctccagagttgattataacttgaagctagaagttgaagcttttgcctcaatagttgacttttaacctcaaattaattgttagtagtgatggttatgatgttttagactaacacttattctttgtttttgtagttagacaaaagataccgacaatactgtcatcaaat

SEQ ID NO: 29016 - DNA, 1038 bp, Medicago truncatula
  Intron number 2 from transcript Medtr2g018930.1 (locus Med tr2g018930) derived from phytozome v7.0 (chr-ID MtChr2; po s 5091180 to 5092217 reverse strand)
aggagaacctttgctccattgtctccttcttcaaggtaacgcatactcgtacagagtttgaataaaattagagtttaatgggtatgcacacaatgagggattgacacagattattaggtaaaagacgtattgtgttttgttctttagaggcacagaaggaggcttttttctttaaaaaaaattgtggttttgagtttgatagccgtgctttggtcgcgtatatattgcatgttaaagaaagaataattatttgtcatttggtggtttgtcgttgttatgatgatttaagtatagccttgcatactctactaatgttgcacggcacaagaactatttcaactgttagatctagagaatgaaaagtttctctctaggtgtataatggttgtcaagttgtggcacagtgcacggcagtaggactagggatgcactcacatggccttgtgggatttcgggaattgggaggttaatagaataggtgatgtcaaatggggactctggctattcgccactactgtatgatcaataatttcgctctccaaaaggtttgattccatgcttttctgtgggaatggagttcgcacgagatgcttgtgtaaaggtccacttttctattgaattgagtctagcgttgttttgacaaacctaaacattgtgccttctttctgtgtcagtcattacttggtgcctgtgcaattatgttatcagttggtttggtctcatgtgagctgtgagctgttaagtataggcatgcatgttagaaatgggggaaaaccaacctctactttaggagtggaagaatggtccctctctttaaggatcaagatgtctgtttataacattttaaaggaaagtttttttacacttgcgtggcccataagttgatcaactttgatgcttctattaagaaagctgttgtcctttatatgtatatgtaagtatacaagttgacgcttcaatatttttaatttcaattctaggcctcttgtataaatggtataattggacactgcaaatttcctttgaatttcagaagcg

SEQ ID NO: 29017 - DNA, 717 bp, Medicago truncatula; identical to SEQ ID NO: 27803
  Intron number 2 from transcript AC235748_13.1 (locus AC235 748_13) derived from phytozome v7.0 (chr-ID AC235748; pos 46083 to 46799 reverse strand)

SEQ ID NO: 29018 - DNA, 931 bp, Medicago truncatula
  Intron number 1 from transcript Medtr1g106080.3 (locus Med tr1g106080) derived from phytozome v7.0 (chr-ID MtChr1; po s 22016463 to 22017393 reverse strand)
aatcagtttctgctgagttacttactacaaaagaagttagttttttcagatacccttttgagaatttcttctgattttgtgttgttggatgatgtagatgctaattgggtttgatgggtttcgttctttctcttcgtttgtgatgtttcatcatgtgatgtgaattctttgacttctattttgggatcgaggttctaacataaatagaaagaaaaacaaatttggaaacttttggatcactaatctgtttataggttgaattattgaatttgattgatcttagaaggagatacctgaattttgataatttagttagattttcatttagcttaagaaattggacttatatatagtttagtccaatttatttgtgatgatccaattttttttttagaacaagagaatctctctctatccggttgaaattgagtttctttgtgaggtttgatatgtgtgtgatggatcttaaagtagttgatacctagatggatgacatatctgctagcaagtatatgttgttgatcaagtcctccatgaagatattagtaatttaacacttgattttcaaaattgtgattgtaatttgattggtagtttataaccttcattgttgaggttatctgcagtcaacaaatatttgtagccattattagtattaaatgatccatgcctagaaaactaacttctcttcaatgtgactgaagaacttagggatagccattattagtatttaattaagaaccgtgtgtgttaattgtataaattgcagcatattttttttctcatttctcatgtggtaatttgaagcatttttttcttcttctgtgtatctagactagtctagtctcaagttacactaaatattgcatctagtcttttgatacattatgattctcattttctcatttgcgtttaattattctggtgtagg

SEQ ID NO: 29019 - DNA, 957 bp, Medicago truncatula
  Intron number 3 from transcript Medtr1g106530.1 (locus Med tr1g106530) derived from phytozome v7.0 (chr-ID MtChr1; po s 22257089 to 22258045)
aaggcactacaaactccgataccatagaagctacggtaattttctctttcaaaatctcgataacatgtaataataataatatttcacttcagaagtgttccttacaaaccaaaatcatggtttcaaaaggtttatattcaagtccgttaatgcaatgcacgtttagattgcattatttgagcttatcgactgacttaaattttgtgtgactgtctgtttatgagaagttatgaaaacagattatcaaattgttcataaggtgttttcaacttattttcataagttctctagagagcttatgaaaacaacttatattttatacaaagacaatttagcgttatttatcttttgctatagaaatagcttatgtacaagcacttaccataataagcacttgtgagtagtgtatgtgtatccaaacagggccttagaaagagaaagtaaatcttttggttcaagttaataaaaaaatcattagatgatataaatggaaacttatttcgtgtagacttttatttgaaaaaatgatgagataagaatttgatgttttgggggatggatggcgaagaactccaccattttggttttaagagtttggtatagaccaggtatgtttgggttggtggctagagtggaatggaataagctagttatctttgtgaaaaaatggactttacttcattcaattctattccgttttattccaatccactccattgattcaactctataccacaattccagacataccgtaatacaatgttacttattctggtcatacatgtacgtgtttcaacttttcacatcactgcaaagtaagtcataacatttgtgatatagtaattcaccttatatgattgttctaaattttgaatggtcatttgtccagagcaagtttgttagcccttatgtcttgttacaggtacgaattttgaggtctttgtttcctccattcct

SEQ ID NO: 29020 - DNA, 775 bp, Medicago truncatula
  Intron number 1 from transcript Medtr1g117890.1 (locus Med tr1g117890) derived from phytozome v7.0 (chr-ID MtChr1; po s 25432909 to 25433683 reverse strand)
ctagttctttttttatccagaaacaacaaggtcatatattcttttcatttattactgatatatgctttagtttttagtttatttttaacgatcttgcttattttgttgttatcctttaatggttttaatttgtgataccataccattttgtatttaagatttattcaactgaaatagaaataattagggctcaagaacaattgtttcatgcattattttctttagggtgtgaacttttgtttgtcatgcattcttcgttcaccaagattttatcctattggattttcatgttctttatgcccttggatttgctttgagttttggcctaatccctcaatatttgcatgtaacttctctttattttgattaaacatatataaaaaattaaacaaacttgcatatagttaccgattaagattgattaaaagataaaatgctttccccattgtttaagtttcagtgtttcagttttatgttattgtatttttttccctattgtttgagtatccttcgcctttttttgttttttttttattgtatcatttgtatacatgcacaattactgcacagtgatatgatgtcatgctttaccaagttttaccccttttcatctcaaatcagatcattattgtttgactctttcagttttatgttattatcaaaatttggtaatttcccttttattttcttgttatattgttatccttggaatctatgagcgtgctcctttgtaagtctaggttcgtatcccacgagtaccaacaattcctgtgtt

SEQ ID NO: 29021 - DNA, 283 bp, Medicago truncatula
  Intron number 1 from transcript Medtr3g068250.1 (locus Med tr3g068250) derived from phytozome v7.0 (chr-ID MtChr3; po s 15835895 to 15836177 reverse strand)
tgaatttgggtaatattttttttaatttaatgtaaatgatgatgaagatgatcaacatatgaagaagaagatgaatattgctttttttttttttagtttttttaatgacaacattattaacaaataaagttgttacgaataatcatatgtggtaagctatctcatcaactttttaagaagtctatggttttttctcgtggaggaataagtctatgctgctaagaaatcaaatcattgatttcgtgtgcatctttttttttttgtaatgttgtaagcataggct

SEQ ID NO: 29022 - DNA, 583 bp, Medicago truncatula
  Intron number 1 from transcript Medtr3g139650.1 (locus Med tr3g139650) derived from phytozome v7.0 (chr-ID MtChr3; po s 35971010 to 35971592 reverse strand)
ttctaactctcaacaacacccactcacccacccaggtattaattaccatatcatagagtatatgaaataaaaataaataaaaaagagtacatcaaagctattatttttgttcttttgtttatttaataatgtttagaaaattaaggaaaacccatatgttgtgttttttgttgattctctgttaataaaaaaaaaaagagggtctcaggtataaaatttagtgagaataagtgaagataaagaagaagcaaaattaggtaatgaaatagtttttctttcttgaatttcctttcattcgttgaataattgctatcactggacaagacaaatatgtgttacctcagatccaggtaactggtggtcgtatgtgaaaaaatatgtttgattttttattttatttttttcatttattagaggcttctctttgatttgatttgatttgattcttgagactttttcatgacccttttttgttcccttttgattttgtgtttagtgaatgttggtctctataattgttttaggatttaatcattttttttgtacagataaacatttgtttcaactttcaagcctctagaat

SEQ ID NO: 29023 - DNA, 527 bp, Medicago truncatula
  Intron number 1 from transcript Medtr1g073560.1 (locus Med tr1g073560) derived from phytozome v7.0 (chr-ID MtChr1; po s 14696498 to 14697024 reverse strand)
actgtggtacacatcgtagcgcgacgaggtcgatggcgatgacttgataactgggtttgtgacgtttcttgttctctttcattgtttctaatttttcgaaagaagtgatttcttccccttgaatttgttttacggtgttgtttttgaatctgctatggggtttgtgttgttcgacacttcagctgttgatgaaagtttttgtaatgtggggatttatgctgttacagcgctgatttcttccattttgctgtatttttttcctacatagtcccttgttgctgcacttgttagagtatgcagcagcttcattttgttgtatcagcttgctagtttgcaattctgtttttccccttcccttgctgcttctgattttgttataggtttgaatttgtaagaagatgaattggatttaaatttgagagaaatataggtttaatgaatgaaagaatgatgaattttggattgttgaagatgaatattttgattattcttcctagtttttttatttttgttgttacaggaagaag

SEQ ID NO: 29024 - DNA, 754 bp, Medicago truncatula
  Intron number 1 from transcript Medtr3g058740.1 (locus Med tr3g058740) derived from phytozome v7.0 (chr-ID MtChr3; po s 12932522 to 12933275 reverse strand)
gtttattggaaggtgtgtattacatttaatctttaactttttaatgaattgaatgcacacataatttttcttttgggtttcttaacatgtgcccgttaacactacacttatattatttgcataccacataatattggatagcattgtgtagagttaaaatcttcagaatgatttacgaagttgtaagaattatcaagtagatttgttcactagttaagcatcattgtaatcaatccagaaatggtattcccaagttaagcatcatctataggacgttggaaccgaaagggtttgaattccggttttagtccctgtaaataaaaagattatagggacgaaaagaggtatttaccctataatataaatattgtactcctttgtaatgaaatataagcaaatcttaaccacttcgatcttatttaacaatagtatctctatattacccctcatttaatttaactttttatattttcaatgacccaatttattaatcatggagggtagtttagacaacagacttgattttttttatttattggattgcatcaattaaatttgatcaattacatttctcaataggcttaataacattttgaccccttaagtattacgaagtgtgatcaatttatgtttataatttatagataatgtctattgtaaattttgattggtcatgtccttgtattatttgcatattctttcaatatcacaacgatcttgacttgtttttgtttcccttgctagtgtcttaact

SEQ ID NO: 29025 - DNA, 1042 bp, Medicago truncatula
  Intron number 1 from transcript Medtr2g008880.1 (locus Med tr2g008880) derived from phytozome v7.0 (chr-ID MtChr2; po s 1820949 to 1821990)
tgcaaagtctctgctctctctctctaattgcggatgtgagtttttttttttttttttttatttctttatcccctgtttgagttttctcagatttgtatccctagttttattttttagggtattattttttactataaatttggattacttgatctggtacatgctccctctctctctaatgatggggtacatgatctgatgatgtagaaatatcaacttcgataaaataataaatttccttaaaagcttctttaaaaaatgttatatcatcatattttagaccaaatatttgatgaagcaattaaaactatcaaattttaaaatagaaaatctaattccacaagatagtgaaaatgagatcaaaattacagttaaacctatcttttagtttgacaaatataagaaataaataaaatcaaacgatttactttgaaaaatacaaaaccaaaatctttagagaatttattttcacactaacatctcacacatccttcacatttcagtttttcacatattcaaattatataatccaaattatatatatcagcagaactagacaccctcaatcatttcaacaattacaaatttttccccgaatttatcccaaaccaccacacattgtgtggttcttgaagtatttttggtcatattcatcacattttaagccttttcgaccaccgaacataaggtaaggtcacatttcttcagtcatttgttccttaatttaattttttcttatgtgggtcttgaactaattcaaattatataatgcaaaacaatttattcatcatttcgaattatataattcgaaccagtttaggatgtgcctaaaacatttttttaaaacttttgtgtatttttgttgatttgtatatgtgattttgattattttatatatggaccaacgttcagacgtgttagaggcggcaatactacaatgactgcatcaaccagacgagagcggttatagcaagcatatgcggagggttggatctggatcatctcaggggccacgggcctgagtcaaaaccctaagtttagg

SEQ ID NO: 29026 - DNA, 895 bp, Medicago truncatula
  Intron number 1 from transcript Medtr3g083630.1 (locus Med tr3g083630) derived from phytozome v7.0 (chr-ID MtChr3; po s 19698364 to 19699258)
ttgctttcgcgagaacccttcttctctcttctaaggtaactcaacggattctccaatttcttcttccttctccaattgttttagggttttagaattgggaattggaaaattgctttgtaaatctgtgatattaattatgataattaagccaaatttgaacatttactcgtgctttgtgatgtgaatgtcgattagatgaattatgcttggtttggtaaaagtttggttatagagaaaggattaaaaaaattgaaaatttgtttttttttttttgtcatctttatgcaaccagatcgaaatttgctcaagtaaaaaacccagggatttcagttatgatcatgtagaatcgcacaatttcgtatcgcttttccgacttcaggccgatttcatgtgattttgctcaattcttgactatatgcacgatcaggatctttaggggtgaatgcaatcctaaaatcatacgattttatgatctggatcacaattctgttgacaatggttacagcctaatgaaacctgatgcctgcttgtactagtcctaaatgggtaggcatcctggtttgacagttctacaatttggtaatagtcttaacaggtttgagtacatggctgaatttgaaacttgctatttgaagtgtcccactttttttgtgtgtgaattgtcccacttgaaacttgcgttgtaaataaattgcaagaacatattagccttagtgattgtgacttacaaggattcatgtgaagtttatttcatcttgttcttatccttttgtttgatagcaaaatctttctcttaattatttagtagattttgggttttagttttaactttgtcaaattgtctggttcatgggaagcagcaaggccgagacatctgaggagaaatattcgtctt

SEQ ID NO: 29027 - DNA, 578 bp, Medicago truncatula
  Intron number 2 from transcript Medtr2g018920.3 (locus Med tr2g018920) derived from phytozome v7.0 (chr-ID MtChr2; po s 5082137 to 5082714 reverse strand)
aggacaaccttcgctccattgtctccttttttaaggtaacttatgtcggtagtaacaagttcggatttcttcaattatttatttttgtttattactgttcattcataagagagataaacataaatgaagagttaacaagaccatcttttaaaatttatttttgtttattattgttcattcataagagagataagcataaatgaagagttaacgagaccatcttttaaaataagagttaacaatcctgaggggcttcctgaatggacaaatgaagctgctggtgaatatgctaaagcatgcattctgtggccaatgagtgtcaaattcctttcattgatctctggactaaaatgcaacggttccttggatgggaaaaagtttacttaaggtttaatttccaaaaaatttaccttctttatttatcttctcttacaatactttggaatcttgatattagcatttaccatttaatttaaagtaccaattaatcaaatattgtgatactagtctatggtattatagttttggttttgatatgattattatacttaaatgcagtgacggtttgcatctcacta

SEQ ID NO: 29028 - DNA, 609 bp, Medicago truncatula
  Intron number 1 from transcript Medtr3g124030.1 (locus Med tr3g124030) derived from phytozome v7.0 (chr-ID MtChr3; po s 31329128 to 31329736)
ccgtcttcctacctgactttcttcttcgcttctctgtaagaagattcgttttacggattctcttttgctttaattccaaaatcattatttcgatttcttctcataaattattatattcatgtttctttttctgtgcttcgattaacatgcaatttctctgtttacctggatatgaaattaacttaatctgattcaatgtttcctaatccatgtgaaattaaacgcgacatttactgatgaattttttattttattttatttttataaagttaccgatgaaattcctgaatttaatattatatttcaacagaggttaatttttatgtagtgactgtgtagaacttttttacacatgcattcgatcaaatcatgacaaatatatatttgtagaggaactaacctaaaaaagtggcaacaacatgaagtgatttgattggatgcatgtgtaaaaaaaaagttttacactttaggtgtatgcaaaattacaaatttaatccatttcaaaattagaatttcaaattctgtctttgaatttcatcttctccatctgaaagtttccttgcttgttttgtaggataaccggactcctgtttgcaagaaatatattgt

SEQ ID NO: 29029 - DNA, 669 bp, Medicago truncatula
  Intron number 1 from transcript Medtr2g006340.1 (locus Med tr2g006340) derived from phytozome v7.0 (chr-ID MtChr2; po s 610873 to 611541)
attggttttcaggttttgatcagtttcgagtaagttttatttgatttcttggtcaattaaatagttcgtgttctactgtcaaaaagtacaaagaacttagacaagctattcaagaagctaagaataaacatccaaacattaagagaagaattacatgaaatgctgaagcatttgtacatgaaagaaataaaatgtagctaaaaagagaaaggagcttatatatttatcgagagggaagtgggttggtggtaacatattcaggaaaaaaacagctttgcatttgcgacaggtttccgtccactggtttgcatttgcatgggccgaaaattcgccacaaatgtttgcgagggcaatatttgcatgggagctttgtccaccgcaaatttgcatttgcgtgggctttttgtgtgggattttgatacacgctaattccatacattcttgcagtggtactactacaacaaatgctgaagaaatatgggtgcaaagaagaacttgtataatgtcatacttttgtaagcaaatcaaaagtttttcagaaacatcttgttctttccttcttgattttctttgcttatgtaaaaaaaaaatcatttattttgtgtagatgccagctgagagctcttgtagtaggtcatttttttatagaaacattgctccagctgcaac

SEQ ID NO: 29030 - DNA, 839 bp, Medicago truncatula
  Intron number 1 from transcript Medtr3g009520.1 (locus Med tr3g009520) derived from phytozome v7.0 (chr-ID MtChr3; po s 1406493 to 1407331)
atataggaatttcaggtgaatctcataccattaatgaacttcattatcttttcttacaattattaaatcacactttgcttttttgaaacacacaccacaatcaaataaagatttaagtgacatttgtactataatttttttaactaatatagttgagttatttctattataatgagatttaacatatttttttagttaatcttatgattacaatagtttaaatgaaatacataattagaagaacgaaaagatcagtccaatattttcgatcccttatatagttatcatagatactagcgtgcaagtggataacttttgtccatttttctcaataaaaatcatgaaaattacgaaatgttatgcgattatttaaaaaatgttaaatggtgtttacctcatagtcatttggacgaattttgatttatcctctataaaaaagttgtggatttcaaccttgtaatttgaatattctttgattttggaccttcgtgaattttaactatacaaaataaatgatatgatatgagggtaaaccaaaatccattcaaattacatggagcgaaaacaccttaaatttttaaatttaaagttataaaagtccaaaaaccaaataatcttcaaattacgaggttgtaatccaaagtttttttcacataggatagataaatcaaaacttgcccaaatggcagaggataaacaccatttaactcaaaagaatgttatttgattaagtaaagatagatgaaattgtaaataaaaataaaagaaaaagaaaaaatgaatacatcaacacttagaaccttcaatttatttctctttttgcaggtggtgtaacatca

SEQ ID NO: 29031 - DNA, 362 bp, Medicago truncatula
  Intron number 1 from transcript Medtr3g132890.1 (locus Med tr3g132890) derived from phytozome v7.0 (chr-ID MtChr3; po s 33529693 to 33530054 reverse strand)
aggtcggtgtattcggatcttcaatatgattggtttttttttttttttttttaaagtagtttagtggttagagttcaaacaatttaattgtgaagaaatgaggtgtcgaaccccgacacctgcatataatatgcaatatctctaccaactgagctaagctcacggggatgattgtgattcttttatttggtctaatatttttatattgaaaattagtaaattaagataaagaattaaatgaatttcctctttattaaaaaaaataattaaatcaaatcttgacgaaaataaaaagaaaatcaaatataagacgggactgtaatccagcagaacccaatttcttttgaagaagtccaccgtta

SEQ ID NO: 29032 - DNA, 960 bp, Medicago truncatula
  Intron number 1 from transcript Medtr2g074310.1 (locus Med tr2g074310) derived from phytozome v7.0 (chr-ID MtChr2; po s 17044318 to 17045277 reverse strand)
tgtggatcactccgttaaactctacaaatttccaggtatcgtgttgttgttttcttgttttgatttttaggatgtttaattgaaattctgaaataaaattggggtttttttgtttgtatttttaaccatcgttgttaagggttgttatgaaatttatttaattttaatttatttattgttgtttattgaatgctattttgatgattttatgtgcttgatttttaattatttacattggtgaagtgtttttgtcaagcgccatgttaattttactgtttatcaaggaatatatgttttaattttacttctttattgttaatattacttgttaattttagtcaactctgtatatttcagcaatgaaattcagtaattgtatgtgtttaattctaattctttacacttttcatagttattttgtgaaagttagctaaattgattgggtttagcacagaattttcctcggtcttcttttcactgaagtgttttggatcagtactatgccaattgttatatctgaagttagagattaatttctttctatgcactgacagtgtaaagttttttttacacatgcattcaatcaaattacaccaaagtgtcacttttatagggtagttttttttaaatatctccacaaatatctctgtgatttgattggaggcatgtgtaaaaaagtttaacaccatcggtttatacaaattaagtcccgcaagttaatggccatgttttttcttgtcaatgttttgaagtttaagagacacatgtttcaatcatcatttagattttttgatttttgattacatgccaaacacaattaactattggacaaagcctaattggtgaagaatttgctgttgttgagttgttgatgtatatttttcaagttgatttgatcttatgatttattgatggcacttgacaggtggagagttcgagacaaatattacaaggtttaca

SEQ ID NO: 29033 - DNA, 883 bp, Medicago truncatula
  Intron number 1 from transcript Medtr1g093570.1 (locus Med tr1g093570) derived from phytozome v7.0 (chr-ID MtChr1; po s 19074977 to 19075859 reverse strand)
caaacacttaaacctgggctgttgtcttcatcaaggtcaagttctttacatattttgtttccattacatgcaacaacaacaatacaaatatgaaattggatgtgattttgttttatttctagagatgtaaaaatttcttttgtagatgaatcttttttagttccgatgctactgataaaaaagtctgttttttcaatgaatctttgatagaacagattttatttttttttagtataatttagttcttagttcttttttccttcatattttagctgcaccaatatgtaatgtctgcatccgcccctagttgtaagcatgtggtagtagtgctatttttggctttgttcgaagattatcttccatgcatttccgcattcttcctcttccttgttccggtgtctataataatcccactccaaatacatatgtcaggttatatctaatctctatggcttgcatctgacagcagaagaacatgcttgtatcgtatgtttgttacatgtcagttactcttcgattgcattctattttgaaacagtatgtgtacttgcatgtctgctgcagttgaaatttagattttactaatactttttttggtgttaaaaagcagattctatccatacttgaacggagcatctgtttttaaccttgacgatagttttcctgttaattattaatgtgattcttttcaacaaattaaaacaaagaagtcttgaaatgaaaaaaaaatatgaaagaattaacctctgtgtatcaagtacctgaattcctttaatatgtgggacattacctattctgtcattgttttttcctttctgttcgtaggaaactgatttatcatttatgtgcttgattttaaacccacttatcagatgattgaaga

SEQ ID NO: 29034 - DNA, 780 bp, Medicago truncatula
  Intron number 1 from transcript Medtr1g009880.1 (locus Med tr1g009880) derived from phytozome v7.0 (chr-ID MtChr1; po s 1469534 to 1470313 reverse strand)
acttcgcaacctcttcctccttggttcttctgcaggtaacttctaacatcattcattggtttcttcatctcaaatctatatttccgtatttgtgatttaggttatcaaattgaaaaaagaattgttctttttttcttgttctttttttattattattttcttcaatttttccctttaatttgttcaattttggtatgtattcagatggcaagagaggaatatagtctgggactctcatatgtggaccttctaattacaaaggaaaaaaatccagatgtttgaaatttttgatatttcacaatttttttttgttgatatactttttctaatcaaaattctttgatgcttttccttttctatttttcattatgtatgaatcttattcaatactaattattatagttttgattattcatcatttttcctccttggcgtattgtgtttatgagttttcaagttttttctatgttgcattctatattagctaaccgtattgttgttttaatacctctttcatctgttttagtgattccctttgagttataatgttttgaaggaatgaaaataatatatgattgtttagggtttagaaatgcatttgtaaaatctcattggtcattttgctgctattgatttttattgtccattaagcattggttttaaaaggatgttatgtgttcacccttaatattaagatttgaccatttgatttcagaattttgttcccaacttttaatttcacaatggtatacattcttgcatttttgtttttagatttct

SEQ ID NO: 29035 - DNA, 1011 bp, Medicago truncatula
  Intron number 1 from transcript Medtr3g157160.1 (locus Med tr3g157160) derived from phytozome v7.0 (chr-ID MtChr3; po s 41372051 to 41373061 reverse strand)
ctcatcaatcggaaggatcaaaatttcaaagattggtattctgaggtggaaccaacttcaattcaaacctttctaaaatattcccaatttcataactcatgtttattcatttgcctttgaacgatactacattgtttattcggataaatatcttattattaacgcgtataatcttacataacctatttttatagtaaaaggtaaaattaaattacattgtttttatatatgctaaagttgttttcattcatataactcataagataagctgtaaaaagcttatgaaaaatgtcattagtggggttttacaagttctcccaaacaatcttgcaaaacttatgtaattagataagctcaaacaaatcaatccaaacaggctctaagtgtgcaatgtacatgtcccttttgcttttgttacaatcaatccaaacagtcttgcaaatttctcaccatgcaagattaattacttttagagaacaagatgtgcactaccatgtcatagcatattgtcgtttgatgtacataaattatatccatcaatcataatcacatatccaggtagtttaagtgggtgagatgaaaagatagaacaatcactacacttaatttgtgaatggacagttgaacgtaatttgtcattccaacagcaagaattatgttctttggtcttctaattcaaactctgcaatattaagagaattagaaatccaagtatagatagtcagacttaatacacttttattattattcttgataaaattgagaaaagagtgatcatttatatgattttatttagtgtctcgcgtactatagcttcaggaaactaagcaatacaatatttattgttctcccctagaaaatattttatattttgttctctatatctttgacgatatactctctctgctcttatactaatatttaaaaaaaaaaaaagataaatccgacttgtttgactttggctttcgattgctctgacaggttgttgtagtgcggaattgattgagcact

SEQ ID NO: 29036 - DNA, 760 bp, Medicago truncatula
  Intron number 1 from transcript Medtr1g086480.1 (locus Med tr1g086480) derived from phytozome v7.0 (chr-ID MtChr1; po s 17129282 to 17130041 reverse strand)
tatagcctcttctggcaactttgcccacaacaactgtacgtcatcattttcttttcctcttcctcactcactatatattcttcttctaatgcttccaactttttactttgtcttataaaaatacacacatactttgtcttcttctaacctttgataatattatgtcaaaatttaggtaattattgaggtcgtgatgttgcatagacatgttaaacctttatatgccttttgcaatttttgatgtttcaatttttggcacaaacccaataattaagagtgtgtatatataaaaaaaaaaaaattatgtatgtcatcgttttaatttcaatttttagttacgctgcaaacttttatattgcaaaaaaaacataaaaatgcagctgatgcggttgaaattgcaactttgatgccgttgaggtgacttgtattgtgactgcaatttaaaatcatcgatcatgtatatcgccgctggttatttttctagtatattagttgtattctccaaaaaaataaaaacagttcgattcaacttctctgggtttatgtatattttattaatcgaaaaaaaagtaaaattttattattaatcattttacagtcattcttaaagacattagacctccttctattaaagttacaaggtgaaactcttactgaactcacacttctcgaacatattcactttgactagtaatagcttatgtgataaagaattttataattttctctaacacaatgatttgatatacaggattctagt

SEQ ID NO: 29037 - DNA, 414 bp, Medicago truncatula
  Intron number 2 from transcript Medtr3g101870.1 (locus Med tr3g101870) derived from phytozome v7.0 (chr-ID MtChr3; po s 24735486 to 24735899 reverse strand)
gtgttcttttgcacttcctcagcttgatttacaaggtaccatcttatcttcttatgttaattgcaattttgatttatttcaatttcattatctctataaggttctggatttcagtttaacagtagtaaatcgagacttctttcgcaatttgattcaataattttgtttattttttatttctgattctctgtagtcttttgttattttgcttctcaactagttaatttcctctttattaattaaagtgatactaatggtcattttacaacgtccttgggaggatttgaactctgtaccgtaaagttacaagactaagctcttaccactggtgtagggaaatatattgataagagtgttttctaatagaatctgatgatgacctgttttcatatttttactagattgcagtagaaa

SEQ ID NO: 29038 - DNA, 564 bp, Medicago truncatula
  Intron number 1 from transcript Medtr3g101870.1 (locus Med tr3g101870) derived from phytozome v7.0 (chr-ID MtChr3; po s 24735847 to 24736410 reverse strand)
aagggacaaaagcttctgtttcagatttgctgtacgtaagtttcggctatgttttttcttctataagctgtatgtgttgtactatttatttactgttgttttcccgtcaatattcaatcatgtttattcaactgtcctcttcacttccacaccgaaccaccctttttatttttttattttttttatttttaccaacaaaaactgccaaactaaaactaactttaactgtttacttcaaaataatatttcatttttgtcttcttaatgattcaattatgaattttgtttcttctcttcaaccctttataattatatgaaaagaaaaataccattttattaaattaattattcttattgcagcttaattaaagggttggttcattcttatgcactgctgtaatgaagattattgatatgctgctaattgattatgattatgcatattccggaagtggttgatgtttgtggaaatgaacttgctgtttcttctattgttacttttggtttgtgtgtgttcttttgcacttcctcagcttgatttacaaggtaccatcttatcttctt

SEQ ID NO: 29039 - DNA, 891 bp, Medicago truncatula
  Intron number 2 from transcript Medtr3g148890.1 (locus Med tr3g148890) derived from phytozome v7.0 (chr-ID MtChr3; po s 38817063 to 38817953)
tggcaacactgtatgtatcatcaatcctaatttttttttacttccaattattgaaattcatttaagctattccaataaatatttcttggttctttttacatgcactgttgttgattatttattaggtttcttcatattggaaatttttactttgtatgcttgtgctggagtttttgttatgaattttcctttttcattgtgatcaagagaagatagaggctaattagagaggatgtgtttgcatttctggaaatactcaaaacaatatctttacatttttcgtaatactgctcaagctgtaatacctgcagtgttgtatgtgaaggagtgttggacggtaatgaaccaacacgagaataaaataagtgtagtagagatgaggatgttgtgttggatatgtgtggtaagactaaacattataggattagagagaattgaggtggcacatattgcagaaaagatgttagtaactaggcttaggtgctttggaggttagacatgtagagagaagacctctaaattttgtagtaattagaatatatcaaatgaagccattcaaaacactagagagagagacagtggaagacctaaaaaaattataagagaaactattaaaaaaaaatctagagatgaatgagttggataaggatatgatatatgatagaacattatgacgtcgtttgatccatgtagcctaccccacttaattggataaagcttggttgttgtatttttgaaaacatctataatgtcttttgtaatgttttgtttttaattttctagctggaaatggaaacagaaaacacgaaagtaaactggtctaaacaattacattcatttgagctattttgactttccatgaaacagtgaaaacgggtcctagttttgctg

SEQ ID NO: 29040 - DNA, 484 bp, Medicago truncatula
  Intron number 1 from transcript Medtr2g114480.1 (locus Med tr2g114480) derived from phytozome v7.0 (chr-ID MtChr2; po s 27076594 to 27077077)
aagcagaagagaagtctctaaggtacgcatctctctctattgacatggtttgatactctttctcttctcccccattcatatcatatattaatatgtccctcatcacttcacttgttaacacattgtgttaaaccaatctaacatatcttaatgttgttattgttgatgctgcttgattttttcatcacttactttataaccttaaccttgtttttcttcctttttttttctctcactatagttgtctccttatttgcatgctaccattgttcttattgttataacatcaaacatatatgtaacggtccatcattctctaggtttgtgttgtttgacttataagtgttgtcttattactctatatatgtatatatattatgaatttatgatagtgatgaatcgtgttttggttttcttttgtatttgaccctttgaattctttcttgtagactttgttgccccttcaaaattcttgattcaatta

SEQ ID NO: 29041 - DNA, 520 bp, Medicago truncatula
  Intron number 1 from transcript Medtr3g016810.1 (locus Med tr3g016810) derived from phytozome v7.0 (chr-ID MtChr3; po s 3361619 to 3362138)
atcatcatagcttgtaaagtctcaaacggcaagtcgttttttcaaatctcacctttttgtttaatttcactttctctctcttctttcaacattttctgcattagattttattttcagatttatcaaatcactgatcatgatcatgatacagcttcacaactgttggatttatgaaatcattaactgagatttttttatttttttttgggtatattttatgtattttttaagaattcatgtagcattagttttgattaatcagcttgataatgataattctagtagttagcatatttttcatcattaaggaaaatgtaatttaagttactgttttcttctaaatcaatttaattaattactttatttgtatatgttagtctctggagtagtgatttatgaacaaatttgctgtgaattttatttatttatttttatgtaatttggagaattcatgaaggaatttggtgtggattttacttatttgtttgtttgtatgttgtagattttggagcagctacta

SEQ ID NO: 29042 - DNA, 493 bp, Medicago truncatula
  Intron number 2 from transcript Medtr3g156750.1 (locus Med tr3g156750) derived from phytozome v7.0 (chr-ID MtChr3; po s 41228171 to 41228663)
caggggtatgcgtttggtgcgtcaaatgtatatgtcagcttcttagctcttttgattgtttttttttgttttggggtggtttttaaggggtttttgtttgagccggtgtttgtgcggcaaccgattttcccttgtatgtttaattttcccacccaagtttattagtgcttcttgcatgagcttgttggttaataatttttgtcatttcaaaaaaaagaatttgctaatagattgttgcatattacacgaagaactacttaataagtgttaggatttgaaagaaagcaaatggaaaccaaatgttatgaatctatagaacaggaagcatagtttactgataaaaagaaaataacatcattataagattaacttatgaagaaaatgaaagtacaaccacatgaattattccttttcaaattgagaaaattttatacattgctcaaaaatgcaaattaaagtggaagtttgcgaccaaagatacaaaggcatcagt

SEQ ID NO: 29043 - DNA, 840 bp, Medicago truncatula
  Intron number 2 from transcript Medtr1g023040.1 (locus Med tr1g023040) derived from phytozome v7.0 (chr-ID MtChr1; po s 4999645 to 5000484 reverse strand)
gactaaggtttacagcattaatacttcagtcagtcttttcagcaattatggtttatgtttttggccggtaaaacactttgaagagggtgctgccatattgctatatcattcctgcaactgttttgtcttaccatgaaccggagaaatatagatacaaagtttttcgaattcatgggacttgttcaaaaaagattgaagtaattccacatatttcaagtctaatttcactaaaggatattgtgaaaggagacaatattgaggtgctgaatattcactcaaggtaagtggcttctaaaattttatttacccaaatgaatctgatgctccccgaccccacttaatgagatatggcttggttgttgttgttgttgaatctgaggcttccttaaaaatcaatcgtaattagtttgattcataagacatgtgtgagtttcctacattactgtaccgcctgtgctttgattttcatttttggcatcctatttggaaaaatgaaggcattattatctatatatcttctcacttaaggttgtgattttcatcaatcaattgctttcacaactaatctattgatggtgttgtttatatttgttataactttagttctgatatctaccgccttgaattattatatgttggcttcgactgttaatgaaaataagttcaggtggacccaatttttgttattaattacatcttataaatctcctttagttgctaagtagtcaatagtttcacaacacaatccctcccctgcaaattgcagttttagctagtattacataaatattgtttttatttatttatacaggtgtgcaaagtttaaattgcgggaagaaa

SEQ ID NO: 29044 - DNA, 812 bp, Medicago truncatula
  Intron number 2 from transcript Medtr1g111290.2 (locus Med tr1g111290) derived from phytozome v7.0 (chr-ID MtChr1; po s 23624449 to 23625260 reverse strand)
agaggtggtgacttgttctttttttctttttagtagactggccatcttggcatgtcaatcatgttgtgctattttcatgcgagtttacgacaacatttagattattaaaattgattgactatgattcgtgatgcaatcaaaacagacttttggcaaagacattaagaaacaatatgatgatcatttagagacatttttggaaagaacttttgttacgaaggataattcctacagggtagaacaatatgatgccatttgatttgatcatcattaagaaacaatatgctggccttagttttgtgtgattaaaaattattggttttcaacttcgttgttggcatatgcaccctaactggcttgctctatcatgtcgtagatgaacaggtttctgtattccgcagcttaaatcatgctttctgtgttccccttcgaagagagaaaccatctattcttttcaatttttctgtagtgttatttcaaatcttgaacggaatttgacttgcacacttttagcaaaattagactgacaaagaaatacattagtattatcaaatgttgcaattgtctctgcatggtcattatttgtgttcatccatattttagcattttctgctttaaaggaatttgtggggaactattacctcaacgagttaggtataatgtcttacaaatttcatagcttatcactttgagacatttcttgtggtcttggtttatctgcgatcatcagtagtcctttatttcaccatatgcttacttggctgtttgactcagaagccttccagagggaaaatatttgcggcccgtatctc

SEQ ID NO: 29045 - DNA, 523 bp, Medicago truncatula
  Intron number 1 from transcript Medtr1g099380.1 (locus Med tr1g099380) derived from phytozome v7.0 (chr-ID MtChr1; po s 20295021 to 20295543 reverse strand)
cttgccctgactacaagccatcaaacaaacttcaagtatatattcaccattttgaatcaccttatttacaaaatgtgaaaattattcttaatttgaaagatttctttttccatttgaggattttgtatttgttgcttataattttgagtatcaaaataatcatttatttgatttactattatatgaccaggttcatagacctattttaatagtaactttgaggatcatcattgggttgattaattttattttatttttataatatttggattggtaattatttgagttaaaataaaattatttgagaatgtttatataaacaacttatgatatgtcctggacatcttctaataaaaaaaatccataattaattagaaaattaaaaaatatcaaattattttacaaaaaatagtttatacataaatacatgtacataaacacttaattaatttgtttatacatgttatttttcttgtgttaaatttcagggtaaggtagctgtaataacaggaggtgactctgg

SEQ ID NO: 29046 - DNA, 417 bp, Medicago truncatula
  Intron number 3 from transcript Medtr3g110400.1 (locus Med tr3g110400) derived from phytozome v7.0 (chr-ID MtChr3; po s 27817962 to 27818378)
ctacatcatccggttgttgagaagtttaagacttggtaagtttgcattatgatttcaaaatacagtgttagagtaacttattatttcacaatctgatttgattgttgtttgaccatgtttcttgaattgttgtcgtgaccttaacacttctcaagctcagagtcaaagcttcagtcataacttaagttagagttcgacttcttctcaacgtacttcgtacaacaatttttcaaatctgtctcaagttaggccaattattgaatttttaaacttagtcaaggtttgcttttttttatgcacaaacatgctttgaatttttttaagcacaaaatacaaattcatattgcattattctttatttcatgtgcataatttgtgttaggaaacatattgcatcactatttggaaaacaactaa

SEQ ID NO: 29047 - DNA, 236 bp, Medicago truncatula; identical to SEQ ID NO: 28627
  Intron number 1 from transcript Medtr1g117910.1 (locus Med tr1g117910) derived from phytozome v7.0 (chr-ID MtChr1; po s 25447826 to 25448061 reverse strand)

SEQ ID NO: 29048 - DNA, 467 bp, Medicago truncatula
  Intron number 1 from transcript Medtr2g085590.1 (locus Med tr2g085590) derived from phytozome v7.0 (chr-ID MtChr2; po s 19319825 to 19320291 reverse strand)
tgtgaaatgcccaaaacgtcatacaatttgggacggagggagtagttgttttgttttttccattgaattaaattgggtaaaaaaaatttggcgaccatggtctgatctttttggtcattctctcttctaaatttgttgtgtactataactgcaagaggaagaaattggtgcttttctgtcatacttgagcacagtagtacatttcagcttatttcggccattttggcatgtcattgcttattattaatagagggaactatttattataatgtataaataaataattacatgctgtggtttgtgaagatctgctgtaagaaagcttgttattgataatatctgaagttttgatgaagtgtagtgttaccgtgttagtagtattcagcacaacaacactgaatgatttttgatttcaccatttgcttgatgcagctgcctctgttcctgaatcttctgattctgattac

SEQ ID NO: 29049 - DNA, 921 bp, Medicago truncatula
  Intron number 1 from transcript Medtr2g122590.1 (locus Med tr2g122590) derived from phytozome v7.0 (chr-ID MtChr2; po s 29479068 to 29479988)
acgggttcacatactttatttcattcacagagcaattgataataaatacacaaagactaaaaaataggagaaaaccactcgggaaaattcacccattttcttattgtatgcctcttaattgataataagttgactcttatttctagtattgttttaagagtaatgcttgatggtgcgggaaaaaacacaacgaattttgacgaacacaaagccacccttgtatttggctgacttgaagtgttgtattcttattttttattattgaaaaaaataaattatttccaaccatccatgtattccggcaagtgggaattatgtgattacttttctattgaaacaatgcaacttaaatgcttcaatttcacttttgttaattttcatacatgcatgttccataccatatagcaatactcttgttttaatggtgtcgctgctcacattcctcgcaaccacgtttatctcataaacaatgtgacctaacctcgcgataacttgtagtagattgtttccttcaccatggcagtaaggtcagcacacataatttgtacacaatttgaaaacgaaggagttcataaaaatgtgaaactgaaaatcacaagacggaatgcagtagtcattgtgtaaatttgttggagaagagtcggaagacgacggtaaaatagttacaaatgcaacagtgaaggtgagcatatggatttgagaaatagagttgtaaccgtagcatagaatatgttgaattgatgtgggagttagaaaatggaacacgatgtaacggatgtgggagtgagtttccattgtgcaataaaagcaaattaagaagaaaacagaaatcaaattatggaaggatggacataactttttttctttggaacaaaatggatatgagctagcaatagagctagaagagtggtagttaggtgc

SEQ ID NO: 29050 - DNA, 638 bp, Medicago truncatula
  Intron number 2 from transcript Medtr3g144140.1 (locus Med tr3g144140) derived from phytozome v7.0 (chr-ID MtChr3; po s 37310684 to 37311321)
cttacggtgcatcgctgtatctgattctgatctgttacatactggatctggaatctatttcaactgatcttgtatcgtctttagattccattttttggttttacttcgaaaatgtttcggttttgttgatttgttgactggatttagggtctgatctgtgttttcatgtgtgaattgtttcgttttttattaggaaattttagtaagccgagtcatagcaaattgaagatttaattacacatttgcaatgagaaactttagtttacatcttgcacatgttttcatcaggtttattctatgacattttgaatatgttaaattttctgattcgttgcactatgtacatgctcttctgttttttttttttttttttgaaaagtcggagttatctaatctaagttcttaatgaagaaaattagacattactgtgttatttcatttctctgttttatcgctattgataattgtgattcttatatacaatgtgagctttttatggggaaccgttttatgtagaacaggatagtattttcagtgaaactaatcttttaaatttgtaactggttgaactttgtttgtggtccatttgaattgttattaacgataatcttattgtgcaaactgtagtttagcaaaag

SEQ ID NO: 29051 - DNA, 618 bp, Medicago truncatula
  Intron number 1 from transcript Medtr3g089980.1 (locus Med tr3g089980) derived from phytozome v7.0 (chr-ID MtChr3; po s 21325357 to 21325974)
ttcaaaagggagagtagattgaagcttggggtaaggtaagaagaaagtttatattcaccatttagtgattaagagtgatatatagtggttatgggttatgtttaattatgtgactttcatgatatttgtgttatgttaagttgattttcgttctaattgattatgctaattatgggtatgatgaactttgtgaatttaagttgtttttgtgcttaaactcatacttgatgaataagttgtacttgagattttgacttaaatgtgtgaaaatcatgatgttgttgttgaacgttgttggattcatgataaatgttcttgataaatggttggctatatgtgggtgctgtttgtatggaaattaagtgataagttgatggattaaaagtgatttttgagttttgaaaaattgagtgaagaatcatgaatttagagatgtaatttgtgctttgatgtgttttaaatgttccttttaattgtattaaccttgggtgatgtttatacaacgattttgggacaaatgcgatcaaaaattggtttttggggaagttttgggagggtttcccgagagaaagcccattttctgggttcctaggagcagggagctcgctgggcgaacag

SEQ ID NO: 29052 - DNA, 945 bp, Medicago truncatula
  Intron number 1 from transcript Medtr2g010600.1 (locus Med tr2g010600) derived from phytozome v7.0 (chr-ID MtChr2; po s 2614677 to 2615621)
atagtaacttcagatctctgagatctatcaatctggtaacttacttttttccacttcttctcattctcttgctactttctatgcattcttcaaaatcatttcatttcatcaattctacatctttagttgattttaactaaacccttttcttgatttcatttgcttaataaacccattattttgatttttttttttatttttaagttctgaaatagatgatgtagtgcatttctttgtttttgcttatgcttagtgcatttcttgttaggaacttagattaaatgagtgatgtgtttcatggtattgtgaaaacttaaaagttctgaatgaattatttgggaattttactgttactttgtatcttgctgtaaatcatggctttatttggcggactatggagggatgtggcttttattgatcttggtcgttcaatcttaaatcaacggtgtagattatttaatgatggcttagtaataatataagaatgtaaacataccgatcttgaatctactgagttaggttgatgtccctcagttttttgtttgtcttctttcataaatgaatttctagcttaaaaaaaccgatcttgaatcgatgactgtgatctattaatgcgtgtcaaagtatgtagtctcttgagttaatgaccgattgtgcaatgagctgtgcatccttttatatttattatgcatttcttattaattacatctcaactactattgattttgtggcattggttggcattggctataagagaaatttaactataataagacaacttaggcagcagagatatttacaatgacagagctgcaagtcaaagtaactagtggaaaacacctgatgaaatataaaagtagaaactgttttattttgttttcgaattagctcagtttaacttattgctaaaacttgtgctaggtctgaagtctcattgctgttatc

SEQ ID NO: 29053 - DNA, 380 bp, Medicago truncatula
  Intron number 1 from transcript Medtr3g123490.1 (locus Med tr3g123490) derived from phytozome v7.0 (chr-ID MtChr3; po s 31022234 to 31022613)
ttcaaaaagtacactctttctcactctactctctatattctaattcatccattcaccatttgcttctatattatttttttcattttatttaatttatttttcggagttaattctgtcagcaattgcaccattgttggtggtggtactctaaaccctaaaaaattgatttaatttgttattgttatttccaatgcccacttttttttagtacctctttaccacaataactcattatttctattgtatatatttttgcttcaatctacaattgtttattcaaataatgatttttcaattcgtatctttagattcaaatgtcaaaaaatgttttttttttcttttcagattttcatctgaagaggtgtctgcacagaatcaag

SEQ ID NO: 29054 - DNA, 860 bp, Medicago truncatula
  Intron number 1 from transcript Medtr3g105470.1 (locus Med tr3g105470) derived from phytozome v7.0 (chr-ID MtChr3; po s 26410674 to 26411533)
aaacgcttgtcacataccatctaatatatctgaatgtgtaggcaagtatatttttctcatgatcttatctatctatcagtttagttttgcttttatgtattaagggcctgattggactatatccatgtgctgttttaagctgatgttcataaactcttcaaatagcttatgaaaacaacttatagattatacgaaaataattggactttattttatcttttgttataaaataacttatacataaacacttgtatgatatacgctataatataagtgtttactaaaatgtttatataaataaggactaatcagggccggtccaataatcttcaaagtaagttaggcataaagcgaaattcaatatatgtctcctcttctgtcacgtgagacatttatcttgtaaaatctaatttttgagaaatgatatttgaacagccaattttaaacaattttagtgataacattttttcctctctcctcaatgcacaataacaatagagagaacccacttgggttggcccagtggtattgacttggaacctaggagtgtgctcctcctcaaggtctcaggttcgattctctctagtgccaatttgaggggttaatttagcttcttaaaaaaaaaacaatagagagaaaaatgagagagaaaattgttacaaagttgtttaaaaatggttgttcaaatatcaactttctatttttttttaattggtcggccaaaaaacaagggttttagtagccttgcttttggacctgtcccgtgcctaattcaattcgatggaatgtttaatttatacttttgtgtttttttttttcttccagatcttctacatttgtcacctaaatcccctgaagct

SEQ ID NO: 29055 - DNA, 792 bp, Medicago truncatula
  Intron number 1 from transcript Medtr1g028790.1 (locus Med tr1g028790) derived from phytozome v7.0 (chr-ID MtChr1; po s 7102158 to 7102949)
tcctcaaagtattgtgttatatttaaacatagtaagtaagcttaatttgttgaccctttgggttattttataattttagtatatcaatgtttacatcttaattttttttttttttaaggatacatcttaaaatggttatcatgttagtcgaaaatcagtatataggagattaattgtaaggagcgatgagtaagtaagcacgttttagggaaggttgcgcacattggacttagtcaactaatcatgccgagaaaaggaagccgacagccatatgtgggggcgccacacacccccttcaacaaggaaaaaccaacacattgcccacacaaatagtcgagcaaggcttaacactataggtcatgtggttttggtcggttggaatagttttgcctataaatgctcatcttgtatgattttctaaacacacaagtgaagagagaaaaaaaaacgttttgtgtgtttgggtattttgctttttggatcctcatttttttcttatattcatgtctattcaaacgatttgttgcttgtggctttgtcttgtgttggtgagtttcattgaacaacacatcatctaatgtatgttcaaaccaatcattataccccttaacaaacaaaaatagaccaatattaatggcattgaagatacattgttgtgtatatgccacgccaaacaataacgtattcgtcttgtgtaatatatttgacctctacgtgcacgattgcatggctaatggaagcttagacatgtacttgtttaatgaggcagattaggtgatttcaaggctagca

SEQ ID NO: 29056 - DNA, 356 bp, Medicago truncatula
  Intron number 4 from transcript Medtr4g022060.1 (locus Med tr4g022060) derived from phytozome v7.0 (chr-ID MtChr4; po s 4368074 to 4368429)
tgtaaggtaaaactctgacatcataattttctaatcttatgtatagcatgtgcaaaagttgcaatcttttgtttttcttctgagtcaaatggctctagctgaattgaatgagactagaatgttgattttcaaacttatctgctacctaccatggaaaattttgtgagaagaaggaaagaaacctgcttcatgacccacatatgtgttatgaaatgaagactaggttgaaaatacataaattgtcaattcaactagtctacaatattcaaacatcaagtttttttattgtctttatctacattttttctcattccaatgcaggtaatagaagagtttgggtcctttgacagctacat

SEQ ID NO: 29057 - DNA, 532 bp, Medicago truncatula
  Intron number 3 from transcript Medtr3g117440.2 (locus Med tr3g117440) derived from phytozome v7.0 (chr-ID MtChr3; po s 29589280 to 29589811)
ctgttcgttggtaaggtaaaaaaacaaaaacaaagcttatttgtagcttataccgataagcgcttatgtatgccttgtgtttttataagctattttggagaacttgtgaaaataagctgaaaaaaggttatggacatgttatatgtaagttgtttccacaggtgcttatgctactagataaactcaaataaaccaaccccgatggcctttttttgcattaagtttgtgtgactttataccctattacatttatgctatagcaattttcggtaataattatgaagcctcaacttacagtacttgaatgttgattcttctgggctggcccactttttatgctgatattcatggtgtacttgataacaaggactgatgagttattgcagtttttttatttataccaaaaaatagtttatcttcttcttttcctgctgatcttgtcagtgtgggctgagaatggtgtcaattcgtttttaatgatatatcaaattttgcaggctgataaaggcatatcttggcaggaccgttattg

SEQ ID NO: 29058 - DNA, 421 bp, Medicago truncatula
  Intron number 1 from transcript Medtr2g111450.1 (locus Med tr2g111450) derived from phytozome v7.0 (chr-ID MtChr2; po s 26429546 to 26429966 reverse strand)
gcgtggtggttggataagtttccctttcttcattggtatctcttcttcctttcatctttgaactctcatcaacattatgcactcactttacacatcaaaagttttttttcttcttccgttttaacctcgatatcatgatttttacaagaaagagatcataataatctgaaatttgattaaaaggtaaatagactatgattaataatgattatttcagttatgattcatactcatattctcatgaaatattagtctattttgtttgttttaaagagggtatgtatcgtcgaaactcatatacactactaaatacacgtcacaacgtatcaaatgttcttgcaaacaatttgagtccatcaactaggtataaatgttaaaaggatgatcatattttttttatgttgttgattaaattataggt

SEQ ID NO: 29059 - DNA, 902 bp, Medicago truncatula
  Intron number 1 from transcript Medtr2g117450.1 (locus Med tr2g117450) derived from phytozome v7.0 (chr-ID MtChr2; po s 27597236 to 27598137 reverse strand)
ctcatcatccatttccattctctacttggaaacaggtccatcaataatattcttctctacttattcatccatcttaaacaataaattcaatttatacatctttgattaacattagggtggcattgtgattttgttaaattatattggcacactgtgacactactaaactcaccataattcaaatatgtaaaataacttataatattataataactagtaaaatctgcatagaactcaggtagtggaaaatttagtgtgaagggagaacatatacatatgtaaaatctaggttatatccttaattagctattattttttcttggaggagtggtaggtgtttaactaagtgttaattaattagtaaagaagagaattagttctaaattaatgagtactgttccaatatatgtttgcatgttaacatgcatatatatatatatatatatatatatatatatatatatatatatatatatatatatatatatatatatatgtatgaaagaattaatacaagctttctaattaagatagctagtaagatacgaaaacatgatattccatgagacaatcccgcactattatccatctaataagtcatacaataatcaataattttaattgcaaatcatttttatttttatatataaatcacctttttatatagaataaatgaaacacatttttcattaattatattttttatgtatattgtttgggagtccctggatatgcatattaactaaataagctaacaaaaggacttggagttaaagacactccatatctgaaggttttttattagcttacatgcaaagtattcttttgttatgtttcaaattaattaacttcttctataatatgcattgacctgacatttgaatacatttgactttttgaag

SEQ ID NO: 29060 - DNA, 472 bp, Medicago truncatula
  Intron number 1 from transcript Medtr3g132640.1 (locus Med tr3g132640) derived from phytozome v7.0 (chr-ID MtChr3; po s 33376722 to 33377193 reverse strand)
tctaatcgatctccttcgccgtcgcaaccgtccgggtccgttccctcactcatctctccatctcactaattttttatctatatgatctacaatttcaatttggactcatcgatagaacaaattttattgcaattgccgctttttggatctttgcaaacacgaaattgcatctaattttgtttttacatcacaacacgctttcgcttatattcatatacgcaaattctaggttttcatgaacattggagatccaatgccattgaattttaactttaacgagttcgtgcatttagcctttactaattttatattatgtttttttttttacatatgaaatgtgttacccattattgatatcgcaattatcttatgttcatgtaattatctcatatagttatagttcttcgagttctgacctaacatttaattttaaccaggaagagtgaagtatctgatctaaaattacagctac

SEQ ID NO: 29061 - DNA, 436 bp, Medicago truncatula
  Intron number 2 from transcript Medtr2g126300.1 (locus Med tr2g126300) derived from phytozome v7.0 (chr-ID MtChr2; po s 30572537 to 30572972 reverse strand)
gctatcaggttacttccattttcgtttatgtatatgttttctttctttaccaagttaatcaatcataatttcttacattttttaaattgaatgttatatgataaagattaaaaatgagatcacaatcttatataaaaactgtttatgctgtccattaagttaattttatatgatttagtcattcacctatgtttctacataaaggacattgttatatgaaattaagttaaggactacatgcgtaactttgtctaaaataaatcactttaaccttgtcgaattgtatattgtaatgactattataatatgatttcgatgaattgaagatgtcatttggctttttgaattgttaagtaagataatttgtaattgattgatgtttcatatcaatgaaattttattaatatattggttaattggataatgaattaggttt

SEQ ID NO: 29062 - DNA, 912 bp, Medicago truncatula
  Intron number 1 from transcript Medtr1g129470.1 (locus Med tr1g129470) derived from phytozome v7.0 (chr-ID MtChr1; po s 28928076 to 28928987 reverse strand)
tgcaggtgggtatcaggaaaacatgtatatgagagaatttgagtggggattcaccattgtgcgattggagaccgagagcttttatgatgggaccagctgcccttaaagccatgtcaaacaaatgaccaaacatgaaaaaacgtaacatgcttttatattatttgtgtttgacacatttatctctataacaccagatgtagttaaccttctacgagagttcaaatggccatgcacaacaatgtcatgtctctcaaatctatgaatgttgtgtttaaaagattaattttgccatctaaagaagtttaaggggcgcaacttattgttagattatcatcttccactcattttgtaatttattgtatatatacacatcatttatgaagaaatttttttttgaagaaagaattccttctaaggttctggaattttatttttaatcagtctcgaactctatgccaacaaactccagtaatagaaaactggaagttctaaagcgctagagatgctcttacgtttgtttgacaacacaatttgtttgagacaacacatgtaacttataactcatgtactcatctgactaaaataaacatgtttgatttcaaaaaatttctaacaagtttatgttttttattagcttatagtgttttttataagtcacttcaatcagtgtttgagcttataattttttttttcaatttaaactttaatatctcaattggaaaaaataaatattattaatttttttatatcatttcatattcatccgatagttcaaccgttaattatactcgatattataatctcaatcagttaatatattcactatctttcatgttttctcttgcgtaacatatgccataaaacaactcctttaaaggtctatactttgtgtgagtggttgtggagcggaag

SEQ ID NO: 29063 - DNA, 775 bp, Medicago truncatula
  Intron number 1 from transcript Medtr3g164150.1 (locus Med tr3g164150) derived from phytozome v7.0 (chr-ID MtChr3; po s 43260135 to 43260909)
ggcagaaggagtaagtctacgctacggtgttggcaagaaaagcactcaacgatgatagacttgcgaaggacgaaaatagaatcatcttgaacacgaggcagacatgaatggactcagcgcgaacaggctaaaggagtaccgatagatttgggagtggggaaatgcaacatgcttaaataaggtagcataaacttacacccggtaactgtagagactaagactagtagtgataaccctattggggctgggtgttccaacatctatggaattaaaagactaaatcatttttagtttgtccctcaattgttccaatatatataaacctttgatcattggttgacgttaacaagcttcacatgtagagttagtgatatagttcaaatacactgataaaattgtatttagtgtgtgctgcctatcaaggaataggaatgaagatggaggaaaatctcaacaaaggctgagattcccatgtatcacactttatattatttgagaactgttttgacattagagtccaaagacacaactatagaggctctggcagcagctgatgagtgattcttctttttttttttttttgaacaaagatgagtaattcctctatgaattgcattgttatgcaatcctcagacagctaatatattttatgtctctgttgaaaattatttatattaatttacaaacaaactcatggtatagaaaattatacaatttgtaatgctggcttatcatgccaggaggacctgaaaagaactagagagcactcaagggt

SEQ ID NO: 29064 - DNA, 515 bp, Medicago truncatula
  Intron number 1 from transcript Medtr2g103920.1 (locus Med tr2g103920) derived from phytozome v7.0 (chr-ID MtChr2; po s 24381193 to 24381707 reverse strand)
tacaaattgcagtggatttattggaacagttgaaggtatttgtcaaaaactttaattcttaatgttcaatttcagtttcaggtttagttttggggaggaatacacacacatacacatacatatatcatattcatatatttaaattttgaatggttggtgtctttatttatcaagagtaagttatacacttccttattttttttgtttttctattacttatttctggtaatttttggtcttaaacctccggtttctcgggggaaataagttaagcctgaccaatgattgtttcagttagggctcgaactcgagtactccccgttcaattagaacttaactagaactcattaaccaccatccatttctagtataagactagtaagtatataatcttcctcttatataggatatatttagagaagaatttcttatggcaccctatttgcaagtctctgtgtttgaaaaagaagtgaacaagcttcattaatttttttgatgatgtagctttgcagttg

SEQ ID NO: 29065 - DNA, 286 bp, Medicago truncatula
  Intron number 1 from transcript Medtr3g068370.1 (locus Med tr3g068370) derived from phytozome v7.0 (chr-ID MtChr3; po s 15932597 to 15932882)
gaacgtgtcaagagatatttgaaacgactcaaagaaagcccagaagagaattgatacgattcatacagaaaattaatcgatccagacaaggtcagagagattgatgaatcgattcactctaaagatgaatgcctatatttatgaatgcctgatcctccagggtgcttttacacaactaatgagcctatccaaacaacaataaaagataatctaaaataaacatcatcaaaacaacttattaactaagctagaggcttcaactacaagagtttgatctttatatccg

SEQ ID NO: 29066 - DNA, 754 bp, Medicago truncatula
  Intron number 1 from transcript Medtr3g125320.1 (locus Med tr3g125320) derived from phytozome v7.0 (chr-ID MtChr3; po s 32121336 to 32122089 reverse strand)
aggaggaggaggaagaagaagtcgaagacggtacattttgttttattttatcgcattttttgttcttcaattaatttcacttaagattagagagaaatcgatatgattaggttttggttgaaattagggttgaaactgggctggtttcagttttgatttcagtttcataagattgaaaattcattatatgctaattagtagatgcacattattatcggtttttgcttgaagttatattgatttcagtctatagtgcttatttttgtttaaaaattgggattataaaaaactggtatttatgtggtaatctgcaaatcaatcaagtgaatgtgaatttgaagcagcattttctttggatctgttcattgaaacactggtaattttcatctacaatgtcttccgagtgtttataactctattagagtatcatactaggctatataataattgatttgtacgatctctctctctctctctatatatatatatatatatctatctatgtccagtaacttgtttgatacacatattttttctttttacaatgcggggttcttatttttatgtgttactaaatgctgggaaatgattgaatttcatgcgtttctactgttttgcacaccattggactggtctataatattgttcggctcaggctctaagctatgctgtataaagtatgtctcttatctatattgatcaattaataaactagaaaacatctaaacacatgcaggcttcattgttgggcctg

SEQ ID NO: 29067 - DNA, 441 bp, Medicago truncatula
  Intron number 1 from transcript Medtr1g140290.1 (locus Med tr1g140290) derived from phytozome v7.0 (chr-ID MtChr1; po s 30986475 to 30986915)
gccagttttattgtaaacaaggtaaggtaccatctcaaattactcaaattattatactctattcttgccacaaattcaatccagattaatgttgttgggaatttttgtttcgtttcatttctgttgttgacttttatcaaacaaaaaaaacctggttgacttgttattttttatttaaagatgataaataagtagaaaatgaaaattttgaatttattaaggcctcccattcgaccaactaccactttacaacgtttacgcaatgttctttgagattaaaagtcttaacattttttatttttttttgacaagaaaagtctaacatgttaacactgattctgagttgacatctcttcagaaattatgttgttatattgctgaatctttattttattttatttggcagagaaatctaaaaagacccgtcttaaagtgacagca

SEQ ID NO: 29068 - DNA, 878 bp, Medicago truncatula
  Intron number 2 from transcript Medtr2g085150.1 (locus Med tr2g085150) derived from phytozome v7.0 (chr-ID MtChr2; po s 19120211 to 19121088 reverse strand)
tgctttggttggatcatctgagcctgatcctgctggtatgttcttttcttgtttgtgtctctcttttcaattatgatggttggtttaaactttgtgttatgttatggttcctggaaatgttcaataaaccactattgttaccaaagttttcaatagtggtcgaggtcgcgtcaattattttgcgattttagctgttacgggtgttgcgtaacggattgcagtcaacgtagtgtgaattcatcacaacattgtacaaatcttattaaaattattcatactatcataaggaattagaattttggagtaatgtataataacttaatttctcattgtttcttcatattgtataactgttgctctttttcataattttgtaatgactttgtttcttctaaacaccaaattaaccactgataaattcaggttttaatgtttttagaagagacaagagtataaaagaaaaaaatgtgacaataattttgttttctatgttcactgtattaaaaaaggagagaaacggtattggacactacctaaacctttttgtggccggctgttttcatggtaacagaccgtttttgagaaccttgattgttacacaatatgtggtttcatacaaactgttgtcaaatagcagctataggatagtagctctgtggaattcaaacaaactgctatttccctcgatatgcaattgacaatactgaatttatgtttaagtagggggaatttcctttgttttacttcggcaatgtcttttgtaagtatgaggcaaatagagagttgccagcttttcttgtttaagttttgtttcagaagagtttttgcctaaaatatattacctgttgcagtacaagctgttgcttatcaaggtggat

SEQ ID NO: 29069 - DNA, 579 bp, Medicago truncatula
  Intron number 2 from transcript Medtr3g036990.1 (locus Med tr3g036990) derived from phytozome v7.0 (chr-ID MtChr3; po s 9912679 to 9913257)
cctacgattgtccaaacgtatgtgttgactttttgatttcacgatgcattaacaacaaatgttattgcatgtgagaataacaataaagttgaaatgtaattaagtattattttcaagcatatagttttagtgtaatgtacctggatacttttgtaatttatctcacatttcgatataagtttatgagatattttagtatctttgacaagctcaaaaacatattgtcatattatgcaactattgttacctttttttgtaaaggtcgttagtctttgttctctcttaaatgataacaataaccacatcaatatttctgtatagctactttcgacaataaatgattttgtagaataataatgtattacacttctacaattagtttaatattgctgaatttttttcttgataagccaaaatttatttcgaagagtacaaggggtacactgactcatgtacaagtccttacaaaggaatagatggccctcctcaaatgttggccctcgtcaaatgttcaagtcttctctagaatctcctccatgagtagattccggctaaagtgaatctccaaggctgtcgtcg

SEQ ID NO: 29070 - DNA, 652 bp, Medicago truncatula
  Intron number 2 from transcript Medtr3g028610.1 (locus Med tr3g028610) derived from phytozome v7.0 (chr-ID MtChr3; po s 7408925 to 7409576 reverse strand)
attcacaggaagctggaatagtgttccttacccaggtttgcttgttacaaaacttatgtgttttttttttgttttcttttgtgtgtgtagaatatgcgttcttttaattgtttaaaaacaaaattccacctacaaggctacatgtacttgacattaaaattcttaaaccaatttgctttgcgtttgttggaattagtagcagttagtattaattagtattagaaattgtagcaatcatgtacctaggtagtcatgtatctaggaaatatcattcatgaaactaggaagtaggatcattattaatctctttgttaatttaaattgtatttacatctatgagtgtatagaaatgaaggatcagctgagtgcaaatcactcaagcatttcacaaatcccttagttttctctctaaatctttcaatagcgtttttaccgcaacaagataaaatataccactcttcaaataatcaaaataatactggttggctacttgtctactactatcacagctaccggtgtcacgactctcacataacgaaggctgcttctgcggccgttgtattgtacatggtcgtgagttacatgctaatgatagttataatttacaattgcaatttcttgcttttcaggagttgattgctgctcttcttgc

SEQ ID NO: 29071 - DNA, 967 bp, Medicago truncatula
  Intron number 1 from transcript Medtr3g143570.1 (locus Med tr3g143570) derived from phytozome v7.0 (chr-ID MtChr3; po s 37071662 to 37072628)
tgtacgcctggctcttaatattacttggatgtatgtagtttgagttatttgaaaagatcataataggcgtatttttcaacacaagtgtaaactatttacagtacttatgtgaagaagttaagtttcagaccctttggtggttaaagtcaaaatacacaatttttgattttgactatataaaagtcaaaatacccttacttagtttttgtatctgttttgctcttttgttgttttgaaactttttgtaatgtaactttgttatcttaataagtccttttggtacatcttgtgctgtgaagacttatttttgatttctaatatatttcattttaatatttttaaaaaagggtaaaaaaaaacatgcctaatgaatacttaactatagataaaaataaacattaatttgatcctctagtcccaaggaaaagggaccatgttgatttggagttttatgaggaggtataagtaaattttaccatgaactattttaacgaggattcaagttttcttgatcacttgaaaatatgagagctttcaaatttgttattgttgcacataaaaataagggttaaatatgtttttgatccttataaatataccaactttttgttttaattcctctaaaaaaattcttcaacttttagtccctataaaattttcaatcactactttttgttcctaattttagtatttttttaatgaaattgtacaaaaatgcgtggaatattgtaaaagatacatgaatggtacccatttttcatatagcaatttttttaaactagaatcatatgtagtaattctctgaatggaaaatcaaccaaaatatcacgggtaaaaatcaacacatgttcttatgcttccatacatgattataaattatacaacttcttgttggcttaagcatattggagtctaacaaaacaaacatatcagagatacttagatcctagattactacaacaacaat

SEQ ID NO: 29072 - DNA, 997 bp, Medicago truncatula
  Intron number 1 from transcript Medtr2g123620.1 (locus Med tr2g123620) derived from phytozome v7.0 (chr-ID MtChr2; po s 30058917 to 30059913)
tttcaaagagcatttgaatcgttactcttttaagagtttcttgaaaaatatttctctcgtttttattgtatgatccttcatcatcatccgtatgattatgtttttatcatttttgtcactttgtgttaggagtctcacatcaaatagatcatagtgtatgatgtggtacttaaaccatgaggttctcccacctattggagtagtctttttgggttgggctctcctcacgggtttaagtcctaacaattggtgctttcattgagagttggaccacggaaagggttacctatatgttgaattaaggtgttccaccgaatactggtaggtgagtgaagccgtcaaaaaggaaagggctatcatcgggtcagtgacgatagagtgaaagtcgtcgtagacgtctgctcctaaagggcgtggcaatgttaggagtcccacatcaagtagatcaaagtgtttgatgcggtacttaaaccttgaggttctcccacctattagactaatcttttgggttgggctctcctcacgagcttaagtcctaacactttgtttgatgaattttacttgcggtgttatatgatttgacgattaaccaatacttgtgatagaaggtgtgtttgatgtttaacaagtgtcggtgtcagacaccaacacaacattgtcttctacatcttgtttagtcttccaaattggaatcaaacattaataatgattaaataaatgaaattaaataacaggatttcattcttaagtgtgcagttatttttgcttatatatgagttgagagagtagactaacatatacattcttgagtagactaacattaacattctttttcttaagtgtattggatactaaaatatctcgttcatttaaattaaagcaagtgtacgattcattattgttcaagcacttcaaggtaaaaatgttcactagtttgtttatgtttttgctttctgttgcagaggtattcagtcacattttctggtttgaaagtttt

SEQ ID NO: 29073 - DNA, 715 bp, Medicago truncatula
  Intron number 1 from transcript Medtr1g020290.1 (locus Med tr1g020290) derived from phytozome v7.0 (chr-ID MtChr1; po s 4399622 to 4400336 reverse strand)
atcatcatcatcatcaggtaagatcatatatgatcccttttgttttttacttttttttattttattttttattatagcttattaccaatatattctccatactttgcttttttctctttttatcatgacacttatactaaactgtgtgtttgaatgaaagaaagaaagaaaaaaaaagatccccttatatagatgttctaatatatatgatctatatatccaccatagtaattgtgttcttttgaaacaagacaacgtttggtgggtgatgatcatgataacagaacctcagcagcaagctgacagcgcccaaacagaaaaaaaaaaaaaaaacatataccagaaaacaccaaaacagacactgacagagcaagctataatccatgttttaattatatatagatttgatgaattaatatgaaattaatttgatctttatataatgatataatttggcctatgatctgattgttaatctattttttaagctatacaagtacaagtatgccttttctcttctatatattttttttaaatcatataatataattgattaatttgatgtgtattttgtttttaacaagctttgatgtgtatgttattatttgatcttttttttgctgaaaaaaaaacaaataaatgaaaattcttaattaaaatctaatgtgtatagttttgttttgatctctttaggatcataagctggcatttcatc

SEQ ID NO: 29074 - DNA, 644 bp, Medicago truncatula
  Intron number 2 from transcript Medtr3g144230.1 (locus Med tr3g144230) derived from phytozome v7.0 (chr-ID MtChr3; po s 37337652 to 37338295 reverse strand)
accttctgcaagattttccttctttctttcttcgggtatatacatccaaatactaaagtttatactttattatacaggtcgactaatcatgtattagggcctaagactggttttaatatgagacatttttatatttttttgttgtgaatcgggtatcctctgcgcgcaactacagagactaatccctcgagcatttgtgagacttaaatgggaggcaagctctccctaaaagttttaacgttgctgcatacccaaagtttggattcgaacccaaaaaaccttggttaaactagaagaatatacaataattcgctaaaactacctttcacaacaaaaatcattcgctcttaaaaaaaaaaaaaaaaccatttgctaaactaatgtagtcaatttctttcaatactttgtttttaaattattaataaaatcaatcaatttcttgacaaaaaataaataaattaatcgatttaatctttgttttctatttttagagaagtaagacgattgtcttagtggccttatccataactcgatatttgagtatacatgtcaacatattaatttacatgacatcattaattaattaggtatatatgatttaaacgtagtgggttgttgtgtttgaattaaatttcaggattact

SEQ ID NO: 29075 - DNA, 997 bp, Medicago truncatula
  Intron number 2 from transcript Medtr3g013300.1 (locus Med tr3g013300) derived from phytozome v7.0 (chr-ID MtChr3; po s 2517859 to 2518855 reverse strand)
aattgtccttgttcttggtggttcaggcggtgttggtaaccattcatttattcttcttccttctgtttcttttgtaattagtttgattttgaatttgctttaggcccgccctgtttggataaacaaattaatttgcagcttaaattataagtgtttgtcgtgataagtccttatgaataagctgttttcgtatgagtaataagttgttttcagaagttatcttcaagagcttataaaaaaaagttgaaaacatcttatgaacatgagctattttcataagttctccaaaacagtctcaaaaatgttgaaggtcaatccaaacaagttcttaatgtttcataaatatttacatattgtttaactaaatagaaaaaatataatgattagtcactctagatgcatttacgatcgcggccaattcatagagtagttgctgacttatgggttttgtttattaagttgactctatgttagatctgctatatcaaaaaaaaaaaaaaaattaaaagtagatcagttatacagttagtagttactggctagcaatctgtcacagttggttagatttctgttacggtttgtttgttttggttcaacttttttatcttgtaaataagacatgtttgactcaatattcaataattccgttgagatcaatgacaaatgtttcgctcattttctcgcattgtttactttcatatggtattagagtctagttacgatccaaggacatgtgagttatactagcttatgtgacatagagtcaacctatattgttgatgaatagtattaacaaccttgttgttggtaatatgtaattgtggaataaggaattcctttgcaatgttattttacgcattcagaaaacaaccgtaaaatgtagaagtgcatattaatccatgccaatagttttgattcggggagtttgtaaattaattgacttgacttaatattcagggcagctagttgtagcatcactgcttcagcggaatattaa

SEQ ID NO: 29076 - DNA, 970 bp, Medicago truncatula
  Intron number 1 from transcript Medtr1g013510.1 (locus Med tr1g013510) derived from phytozome v7.0 (chr-ID MtChr1; po s 2496095 to 2497064 reverse strand)
aatcccctcaagttcaagtatacttcatttcttaattaattaattaactcttcctctttttctatcaagatcagattcttatgttgtttgtctgtctttatgtttcgaatctaatcaatatatatgtcatttattgttgtttcgaattacatttgctttcgatgaaatttctgtctaccttaaagttgttgtcatgtcactgaaaaaacaagctaaggctgtgaacagtgggaccccttcacagatatgcgggagctttatactcgggttgccttttttttttttttggattcatcaaacaacattgtctcattttttccgcgtgaaaatgaatataaggttatcaattaggtaagtcttaatcaatgttgtccattgtggattgcaaaaaatcgcattttgtttgaattctattgttacagcgccgctatttgacaacgcattgtacaaaacaccatttctcagaacaatagcggtttgttcagattctgctacactatagccactatgtgacagcgttgtgttaatggactttagaggatttatgcacttatgcggtggtgttgcactttgataattgattgttgtaagagacttgtttgaaattatatttgtttgattggataaaattcactacgattgcttttggtctaccctctcttatgttaattatctcacactgtcccatttttacatttaaataaatatatgcttatcaattaggcacatttgcattgcagtgctacacattgataaccaattattggtatcttgtgttgattgtgttttctagaaccatcttttttgtttagggatgtcttgagactagtgtgttattttggttgacttgtgtagtatttttcagattctttcatttcatttctagtatcaccaataaggaatgaaatttacatcttgtcgtcttcttactttaggaatctccctttttgagatttgtcaacactctatc

SEQ ID NO: 29077 - DNA, 584 bp, Medicago truncatula
  Intron number 2 from transcript Medtr4g015330.1 (locus Med tr4g015330) derived from phytozome v7.0 (chr-ID MtChr4; po s 2803119 to 2803702 reverse strand)
aagctactgtcacacgccttcgcccatcatctcaggtacttttctcagtactacaatattttaatttcatttcttggtattttcttgcatatacgaattgctatttgcataattggccatcttaatggtgcaaagttatcaaatatagggtattgttgctgcctttatttttttagattgactagaattcaacgttttatgtattttgttatttatgaaatttgttatatgtcaaccttatatttgtgtttgttttagtcaaatttgccaataaatgcaactaaggaattagactatttgtatgttttttaaatttgtgtcattcacctttctcttatgccttgtctaagcatagttcttctttctacttgctatcctccttactcttttatgtctccaatccatgcatattaatatgctgtgaaatccttgtggtgctgagtgaaaactgttaagaattgggatactttctgattgaagcataagaacaagttattattgttagtattgtgaaattttttgcattaaaaattctaaattggactaaaattctgtcttttttcagggcctgaaggaattcataa

SEQ ID NO: 29078 - DNA, 835 bp, Medicago truncatula
  Intron number 3 from transcript Medtr3g113800.1 (locus Med tr3g113800) derived from phytozome v7.0 (chr-ID MtChr3; po s 28672814 to 28673648 reverse strand)
ccgagtacatttatttgacaatcatcagactccaggtaccagtttatccaaattctaggtcgttaacacgaaatctattgccactatatctatgctctattgttatagttgatattgggtgataagttgaagttatcgggttcacataaaaaatagtaaactttgaattggttttggttttatttttattttgatgttctagaaagactaagcagtaaatcaatcataattaaaagaaaggaaatcaatcatttcatgcaaataaatcttcaggtcttgtcaaatcccatctaccttatcccccttatccccctttttacccctactactgatacacactcactatgggtttatcattatagcagctttcttcctgtggaatgtgttttcttgtttatttttttgccaacagaataatttgtagaattgcttgaaaacgtgagtataaattcttgataattttttatggagtttttctaattacaccctttttaatcctggttgcaccccaaaatgacaaaattacccttccataaaatttaattttcaaaaagcatcttccttttttcttggttacaccctaaaatctctcttcagtttaagtaggtcatgtaaacttagtttcagcaggtcatgtaaaccgagtttaagtgtacatttaaaagttcaaccttgttcaatgattctacgtaatctcagtttaagtatgtacatgtaaacttattttaagaatatttatcttaaaaagaatatttgatccgtatatttatttaaacaaataaaactaaaactaatgaggctgttttcgtgttcttccatatgatcattttgacag

SEQ ID NO: 29079 - DNA, 407 bp, Medicago truncatula
  Intron number 1 from transcript Medtr3g113800.1 (locus Med tr3g113800) derived from phytozome v7.0 (chr-ID MtChr3; po s 28673791 to 28674197 reverse strand)
gcaatagttgagtgtataggttgctggtcatgagtgattaattttgatagtatggcttattccttatctttgaattttattttttttcttctgtcctcttaatatattaaaattgaatttttgcagtagaagacgtttagaaacatcattatctatccatattctgtatctcttttttggtgttaataaatgtatgtgtatcgggtaacttgcagaaatatgtagggcacactactatatctctctagatctaacagtccccacaaccgctgcactgtgcagcggctgtaattttcaatgaaagtcaatttctaattttctatcattagaatttttttcatgcacagcgtgtctaatactttttaaattcagttgtttaagggcactccaggaaggtgatttaattg

SEQ ID NO: 29080 - DNA, 702 bp, Medicago truncatula
  Intron number 3 from transcript Medtr2g005410.1 (locus Med tr2g005410) derived from phytozome v7.0 (chr-ID MtChr2; po s 222250 to 222951 reverse strand)
gatttcgactggccccatagagaggtaatgcattgcacactcttaattattattcactcaagcattaaaaatggcccgtatatgaagcagggatgcaggtcttctaaggacctgtatgagaagcatcagaatacacaagtgtaacttgtttttgttggacatttcatcacgaaaaacatccaggatactagaagtatgctgcgttgtccttagaagaactaggaactcagcacttcaattaccatttttcaaaattgatcttaggttttagacctgccttcttgatcttaagttctgaacaagtcttaagaggaaaatgctatatatcttaacttccttaaaacaagtcaatatgcttcttaaatagctctgtaatcctacggaaacctagtgctataaagatcctgtaatagcaagatcacgaaagggccaaacccgttgtggctttattttaggcagtcttactgttcttgtagctagttgttgctagacttgggctctttgggggcattgaaattgtgagtgtcttagcatatgcattgatagactaaatgctcacacatgggcaatataccaggcgtgataaaaaaaactctattgtgttgtgaggaaaattggtggcaagagagtttgagttttgatcacaacttatgtttatagaaggggagttttatacaataccaatgttccctatgcaggaca

SEQ ID NO: 29081 - DNA, 939 bp, Medicago truncatula
  Intron number 1 from transcript Medtr3g102990.1 (locus Med tr3g102990) derived from phytozome v7.0 (chr-ID MtChr3; po s 25254895 to 25255833)
aaggtttgtttgattcaacacactgcagcctcttttgttatatgctaattaagttacatgcagtattaagttgatgtactatactactaaggatcttcaaaattgacttagatttttcttgtactgttgcttattgctttgctatctatgttcatttgtttccaaattttaatgtgcttgattataaaatgtctcttggcaacaaagcaagagaaacaaaattcttccaaaattcatataagcatataaaaaaattgatggcatttaagtagttacaagctaatgttatttggatgctttttgtaacatttttttgtaataattttttttgctatgtccttaccttccaaatttttttgtagcattaaaagttttcgaagtatgatcctttccaatcttcaagaagaaaaacttgaataatttttcttttgaagggggaaaaacttgaattagtgcaggagggttacaaacaaaattttagcttcaagatttgtgttgccatgtctgctacttttaaagacaaaaaagggaaaaaaggagttcccttgctgaattttgattctagctaatctaaatttattgttttttggcattgtttatggtatctttggaaataacataccaatggtggtaatcaattggtaacatgtactagcatcaatgtcagagtatagttgagacactagcagtggcatctaagactcagggaaaagctagagctcaacaatttgacactaagagtagtaataataaaaaagcagcttattgttcaatcaaaattgtaggattccaatcccttttctgttacttttttcattttttttcttctaatactgttaatataatataagtgatgtcacagaattaacaaatttaggaatgaaaacacatcttcagtcaacattctgactctattcagttatttgtttcagtgaccac

SEQ ID NO: 29082 - DNA, 552 bp, Medicago truncatula
  Intron number 1 from transcript Medtr3g142970.1 (locus Med tr3g142970) derived from phytozome v7.0 (chr-ID MtChr3; po s 36775865 to 36776416 reverse strand)
ggtcgtggatcctatcttcctaccaaggtagtaactactttcaatcattttcttcaatttgcatttttttttttgtttcttactatgttttcataaattgtaattgtgatcttgttatgttcaaatttaccatgacagagttgttcttattttaatgcgattatgtttttttttttaatcttttgcgtttttgtgttgaaatgggatttgtagacaaactttccttgtttaaagaaaagttgaagcacataattgtattactacgaagcacctcaccagacatgacacttagtcacttacactttgatatcggtaataatttgagaaaatgaaccaatcgaatgtaatcatatttgttgatgttgtgttagtatcggacatcagacactatttcaatctgaagtgtcggtgctacattacatttactttagtagatgacatatggggaaaagtatcctcttatatagaagatacttcggtttgtactgagttggtttttgttaactttttaatgtagtccgaaggagattgtacattggctgtagattactt

SEQ ID NO: 29083 - DNA, 700 bp, Medicago truncatula
  Intron number 1 from transcript Medtr1g106890.1 (locus Med tr1g106890) derived from phytozome v7.0 (chr-ID MtChr1; po s 22420020 to 22420719 reverse strand)
gctacacaccggaggcaacactgtttggccaataggtaatatacacatccaatcaaacaagcttattatcacaaatttatctttttatatttgtgcttttatttatgcatttcttattgtaacataaacccaaaacaattgtacctaaaactccactggagtagttagataacccacaaccgaaggacaaagttcatccctcaacatgatcgcttgaagtaaagagaatcacagttgagaaaattcagccaaccttaattaatttcagtttccagcaataacacctaagaaatatatggttgaattgtatgtagctaatgaaaaaaatgtagttttgcatttctcacaattttagataggacaaccagtgtgcaaacaaaattacttctattggcctctaacatgatagactgctttgaatggattctactacgatgtgcattttttattgtataaatgataatagattagagtttactaaatttagatattttgttaactttgatctttgtcaattgttctcttcattgttatttatattgtttgctctgtactcttttttccttgtcaatttcatctctttgtattttcttgggaaagattttaatgagacatatgttgatttttccttgttattctatctttggtttttgtctagtttgtatctttagtttttattttaataatatttttagagtga

SEQ ID NO: 29084 - DNA, 834 bp, Medicago truncatula
  Intron number 3 from transcript Medtr2g046150.1 (locus Med tr2g046150) derived from phytozome v7.0 (chr-ID MtChr2; po s 12876667 to 12877500 reverse strand)
ggtatgtttatttatgatgatgatgcataacacgacaatattgagttaatattcaattttactatgtttggatgtatagagatggatgatgcaatttgtgttatttgattccatttattgattttaattgatccatgtgcagtcaaaatgtttgtgaaattgaactatactacaaatagatacatgtattctcttgctacaaaagctgagaaatatagaaaatggaccatgccatctatgtttggacggatacatgtattctcaggatcattaggatttcatgtagtgtataactttgaacttgcgcccttctggtgtgcttaaaacatatacctgtgttgacattcacattgactcattgatacggataataattgagaaaatagaattattgaatgtagcaatttgtgccaggtgtctgaacatgccttcaatagatggatgaatatgagtcatatgattgcatgataattgaaatagtgtgtttctggctgtttgatgcgatttctttggttgcatatgttatacttgttaatcataaataaataatgttgaagaaattactcttacaatagtggttgttagtttagaattgttggtttagttgtacaactagtttatcttcagtaactcaatttccttatattaattttattttggtattagatggtaacgttataagagtgacttgattctgtcactatttcttgcctggtgctgaagtttctgaactctgatactttgtcttcattgttagctatgcttcattctttgctttctcttaactttagcttgtgggtttaccttccagggaaagcgaaggttcgttccagt

SEQ ID NO: 29085 - DNA, 358 bp, Medicago truncatula
  Intron number 2 from transcript Medtr2g122940.1 (locus Med tr2g122940) derived from phytozome v7.0 (chr-ID MtChr2; po s 29663906 to 29664263)
ctttcatagctgagtttgtcactccaataattagagtaagtatggttaattttgtatttgatttgataaagaaaaaatttagcactccattattttgaaataaaatatcctttttaaaattattatctaaattctttttctctgtaggctttttctctgtggcaatatccttatgaagtgtggaaatatgatatgagcataaatttaacagagtagaagataaagtattataaagtttgttgttgttataatggcaaaatccatattatttttagaattcttccttttcatgttcgcttattttgtgtttaatgtttatgtagggattgggttcaagtactgccctagaagggactga

SEQ ID NO: 29086 - DNA, 609 bp, Medicago truncatula
  Intron number 1 from transcript Medtr1g146240.1 (locus Med tr1g146240) derived from phytozome v7.0 (chr-ID MtChr1; po s 32262867 to 32263475 reverse strand)
gtgattccaaagacagcattgattcactgcataacgtgagattcttttatgcctctaacttggttttatttcattaaatttatagttttttctgttcttatgattactttgttggaatgtttgattttgattccatagtattggtgttgatttagaatatcacttcaaattgtagttattttttactaactgtttcctggatttgaacgggaatactgatatcttctaatcaaaggcatgtctggtgttgcgcacaccggcacctgcacggcacttaacacacatgattgcaatcaattttgtgtctgacactggcacaacacttaactacgtgattacattcaattttgttattttctcaaatcattattggttgatgggtcagtgttatgtccagtgtatgtggcaatgctttataggtgatatgcctgagcagagagatatgtaccgttgttgtttctatccaatttaatttacttggtgttacttaattccttcattctcatgtattatttattttgggatatttgaagagagaaatacattcattggtgtttgatgtgtgctgtttcagggcgttgccgtgggatcacctgctgtggtgcctgc

SEQ ID NO: 29087 - DNA, 476 bp, Medicago truncatula
  Intron number 1 from transcript Medtr2g107700.1 (locus Med tr2g107700) derived from phytozome v7.0 (chr-ID MtChr2; po s 25391809 to 25392284 reverse strand)
gaacctgattttcccagaaggcctcctagtgctaggtatatttaatacaaatttgagacagaaaaaaaagaaatttgtctcaaatttcgtcgtcaaatgttagagacggaaaaatttgagaccggttttattttttttccatctgatttttgttaataattcaatttttttagtagtgtatataattcatttttatgatgttctattccattttttattattacaaaacatagtttacttctttaccatttatatgtcataatttggattgaataagggtgacaatgcattactaatttggatgcttggttttgattaatttcaagagaagatttgtttatttagatgccgcctttaattagcgaatgaatcattttcatttgatctaatatgtcctttttgttttacctttttctctctttttttgtttgattttcacatgtagtgcaactgtttttggagtttcaacagaatcc

SEQ ID NO: 29088 - DNA, 422 bp, Medicago truncatula
  Intron number 4 from transcript Medtr3g016180.1 (locus Med tr3g016180) derived from phytozome v7.0 (chr-ID MtChr3; po s 3072364 to 3072785 reverse strand)
cgaaaacctgttgtgataataggaattatttctgtgtaagttgcaactgaggtggatactttttcttttgagatacactaagagttaatttgagcttatttactagtataagaacttttaatattgtttgggagaatttacagaaactgcttatgacgtgtctctaagccattttcaacttattttcataagctgtacagaatagcttgtgaaaacagctcgtaacttatacaagaaaacaatgactttatttattttgtatttaaatagcataaacataagtacttatattataagtgtttatgcaataagcatttcattaagttgtttatccaaaaagggcttcaatgtcttcttaaaatatcaatggtgctgatttgatttcagtataattttcaacacactatttggcctttgcacaa

SEQ ID NO: 29089 - DNA, 463 bp, Medicago truncatula
  Intron number 2 from transcript Medtr2g046210.1 (locus Med tr2g046210) derived from phytozome v7.0 (chr-ID MtChr2; po s 12921484 to 12921946 reverse strand)
ttgatatagcgctaggaattttcggtcttcccaaggtatattcacatcttttaattttgtagcacctgaaccaacattggacccttttgtttttaaatataagttgctctcactgatgattaaagtttttatttttggctcagtttgttaagattcatcccacacttctaatttatctaatccataaaaaaagatggttattactgttttgtatggccatcacttgttaatcttcttgactgagtgtctgggttttgaattttgatagtttactccaaatattttgtctggttatgagatggtacttgcatttttgctttcaagtataatttgatatatgcactgagcaagagtgaagagaagatgaatcgtttgtttcattatgcaacatatatgcattaattattaaacacaactgatgtctgtagggacgtgttgtggaaatattcggtccagaggcttc

SEQ ID NO: 29090 - DNA, 517 bp, Medicago truncatula
  Intron number 1 from transcript Medtr2g046210.1 (locus Med tr2g046210) derived from phytozome v7.0 (chr-ID MtChr2; po s 12922109 to 12922625 reverse strand)
ggtcggtgcttcattatcagtgtcgatgtgtcaatgtcgtgtctgatgttcttgtctgtgcagtgcttcatagccggtgtctgacacgtgtcgattgtcaatgtttgataccaacacatgtagttacattcaatcatttccattttcataaattgttgctagtgtatgtggtgtgtgaggtgtccgcatcttggtttgtgattcataggttgacttaatggtctaatgtctctaatgtaacactgtgacatgagtcagtgattcttattcattttgttgtgtttaatctagaatttggtagatatttgttgctgttttagtattatgtgaaccaaactggaattgaaaattttggactttttgattttgctagttttgttgtgtattatagtcatggtattacaaatattgaattaggtgtttgtactctttccctttgttgtgctgattttaagttagtaacatgtttttgttttcatatctgatatatgggaaggtaagaagcgctctaaatcag

SEQ ID NO: 29091 - DNA, 798 bp, Medicago truncatula
  Intron number 2 from transcript Medtr3g122820.1 (locus Med tr3g122820) derived from phytozome v7.0 (chr-ID MtChr3; po s 30648198 to 30648995)
gcagcctagttttgacgctagaagcaattatactggtaatatattttgacttaaatttcttagctttctattagggagacatgcgacgaccagaagtgtgctatttaggcttgtaattttgtcggtatggcattaaaagtaaaagtttgtcgaagtgttcctatcttacatcttggtgattagccttttttttcttttgaatttataaatttcattttaaatgaagtcatatatttattcagcattgccaatatcttacctagtaaccagattctagattgttgtgaaaaaaaggtatcatggagatgattaacagaagctgttaatttgtgtattgaattacaaattgagaggaatgatggatatcgtataaaaattgctaaactatagatgctgcattcatgacaatttaaagtacaattcatagtatttgctcttatttgaatgtaattgataaacaagagatactctttatgaaaattagacaaatggaagtttttttcctccattgaaatgatttttaaatgaaatttcgattatctaattttgatttttttttgttgatgagtgtcatgtctttaagttggctgtaactgttgccttttctctagtttgactaagaatgtacataactgagctactattatttggtgatcatgatgtttgacaattttttacaatgagtaaaccgtattaaatattatgtatatttcctcattgtgccattttcatccgtcctctacattttccatttcaagtttgtgtttctttccttcccaggtccaaaggaaaagaata

SEQ ID NO: 29092 - DNA, 856 bp, Medicago truncatula
  Intron number 1 from transcript Medtr1g043220.1 (locus Med tr1g043220) derived from phytozome v7.0 (chr-ID MtChr1; po s 10152931 to 10153786 reverse strand)
gcatcttctccaagtggtggtatctcctttcatgttctacgcttatgaaccttgtgtcatcataatttggaggcctctgtgatgcagttgcagtggcgtttctttgaggcctcggtctgtacttgttttcttagtcccatctgaaatgcaaacacacaaattataccaataattatatgctcatcatggtgcattgtatttatactgtaaatgagttataacgtttgcgacattaatctggtttttttttcaaaaaaaaactatgtaaatggcttagccattcattctggcctatgagattttacccagaaaatggtttcgtgctattcctattctttaattgcaaaatagacaataagaaattaattgcaaatgaaattttagcacttgattaatgaaaactgcacaacagtggaagttttggatgatttttgagtaagagagagggtggctcaagtttgagagaaggaatgagagattaaagtgaattttagggtttgaaagagtcttctaggcagggtagaattcaaaattattttgattatattttagattgaattactgacaaattggtgggttgaaaaactaatcttttaagcagggttgatcatgtttctcttgctaaatatccaagaaaaagttagtagtatttatctgaatcatgatattatagtttagggagtttcctcatcaggtgtctattcaaccaagagtggctctatatttggctttcttctcattatgtggatttgcatgatgatactagctaaatgtggatgtggatgcttaagatttcataaaacttgaagcattttctgtagttaattttacatcatattctcccaaccaattacac

SEQ ID NO: 29093 - DNA, 342 bp, Medicago truncatula
  Intron number 1 from transcript Medtr3g097240.3 (locus Med tr3g097240) derived from phytozome v7.0 (chr-ID MtChr3; po s 23191961 to 23192302)
cgctcaagtttgtgttataatcactaactttgggggtttagttctcttcctaattatcattggttagaacttagaaccaatttaatctctttcttttattcttaattaaattctaaatcattaattaagagagctaaatattcaccttttgggttaatttttttgtttatgaaagtttgaatttgggatttggtttgtgagcaaaaccaagttgattggtgaagttttacactttaaagtttggtttttttatgtttgtgatgttgaaaagatatgtttttgaatgatgggtagttgcttgttttcatttgttgatgtttgtgtgtgatggaacaacagggg

SEQ ID NO: 29094 - DNA, 388 bp, Medicago truncatula
  Intron number 2 from transcript Medtr3g097240.3 (locus Med tr3g097240) derived from phytozome v7.0 (chr-ID MtChr3; po s 23192425 to 23192812)
cttcctttggtcttgtacaagcgtgtaggtcagtgttctaatgttcttccatgatttcttaattcttagtgcttgtttggtatgacaggggctctgtcggagtcacagtgagtcaccgtgataattccatgttcggattggcagtggatttgttagaatcacggtgtgccaatgttattttgataaaagatatactttgaagtttcatctaaatcatgtgccattgtgattttatcatattctgcgtaattccaaacatgctcttttttcgttttgagttgaggagattaagtggcagagattgatgatatttgttattgttttttgttttatgctgttttgaaatttgtcagaatctttgaagtacagttctggaatatcaactctt

SEQ ID NO: 29095 - DNA, 809 bp, Medicago truncatula
  Intron number 1 from transcript Medtr2g123440.1 (locus Med tr2g123440) derived from phytozome v7.0 (chr-ID MtChr2; po s 29951770 to 29952578 reverse strand)
gaactggtgaagtttgcagcatagatctcaggtcattttttcgtacccaaatctatcaaagcaaagacacattttttatcaactttattctgggtgggtttctgggttattctgatttgggtttgtgataaaatgagcttaaaagataaaaaaataataaaaaaaaaagttaaagtttgaaactttaatctttgatacatattttaaaataggaaacttggacaacattttaaggaacaaaaaaaaatattctttttgtttcccatttttatgttgctgaaatgaagagacgaccatgtatgtatgttgtaattgtttgtcttgtcttggtttttttgttattatttttggcaatgtttgttgtgttctttccaaaatttgacatccaaacatttttttgtcatgttttatggtttgtcaatttcatgtttcatcatttttaattaacataaagttcaagggtttctattgttctatgtgcatttggaaacatggttttgtattgtgattgcttcaaacatcaaggtttttattaaaattgatgaatgcattaaggatagtgtgtttctttgatgttactattgttgggttcttgatcagcttaaaaatgttgtcactgattgcagatagtaacataaaaatggcccttttatatttaatttttaattttctttgttaaattttattgttgttggttcctttccattttctgtgtttaaatttagttatgtacacttttgttttcaagtttcatgattttctcttgtgttgcagaatttaagcaccaagattaagtatccaaagttctt

SEQ ID NO: 29096 - DNA, 995 bp, Medicago truncatula
  Intron number 1 from transcript Medtr1g083930.1 (locus Med tr1g083930) derived from phytozome v7.0 (chr-ID MtChr1; po s 16714746 to 16715740)
caaacttgccaacctccctccaattcttggactatgtgagttctattagtattaatttgttacttaattatcatataaatatatactattttttttggttttactaaatgaaataggattaattactaaaattagtaacaaggtgttttcaaaatcaaattggacattgaaccggtgaatcatccgaatcatagttcacttgctcgaattaggatgaaattgtatatatgatcaaactactcaaacaactaaattgtaaagaatatcggctcacgaatcatcctgttcacaattcaactgtacaattagactatttaatttgattcgatttctcaaacattaaaaataaaattcatataaatattttgttgctaaaaagtttattgagggaatcaaagactggtttatatatttctttttgggacattgatatggacctcaaaaaagagtctataccaattaccaaaataatatactctctctagtcctatttaaaataaatatttaggttaacaaacgttaatggatctggtccaattatttaactagatacatcaacttttattgatttaaatgtctttttataaaaaggaccggatggagtattttatagtaagagaataagattcaataatttattaaaaaatactaaaaatggtaattgtaaactttgaacatatttttaagcaccattttggtccatatacttttcttgctgattaccgaggcactaggcactagttaaggcctttaaatagtaacttatcataaaaatatgtgtaatcaatgcatcgagaatcgaaatatttgactttattataaaataatttattcttttagaatctttaaagagtgcctcggaggcactagttaacaagacaattaacttttttattaactcaacactgttcttgtcataattaaatatttatgttatgacatgttttattgatttacatattttgcagattcaagctttataccaccgttaattt

SEQ ID NO: 29097 - DNA, 608 bp, Medicago truncatula
  Intron number 5 from transcript Medtr3g061370.1 (locus Med tr3g061370) derived from phytozome v7.0 (chr-ID MtChr3; po s 13583244 to 13583851)
cagttcaaaggttagtactgcaatttatgagcaacaactattaagttttcatatatcatataacttgactataattctttacaacttcatgtaactagatttaagttgcatgttcaagtaatgtatacaacatgatccactagttttatcctgtttgatcgtaatgtccaaaattttgttgggaaaagtgtgtaagagttgatcgatgctccaccacaggcaaatataaattatggtggctgaatattggaatagttggcacacttgctgtagttagaacatttatttttatgacataaagttgtaatgttgttttttttttgtcagaataataataataatagcggttatccatctgatctcgagatctttcagcgaaaacagatgttgtttaaggttgagataactgatggcaaccttaaacacaactagcgcaactatacagtgaaacgtacatttgacaaccttgatttgattaagaaatttgttgctttacataagatcagggtagttttgttattactatccatataatagtcaactgtttcacttcttcgaagcattatcatctgaatccggttaatatgttgtattgtaggtgtgttccg

SEQ ID NO: 29098 - DNA, 995 bp, Medicago truncatula
  Intron number 1 from transcript Medtr3g110880.1 (locus Med tr3g110880) derived from phytozome v7.0 (chr-ID MtChr3; po s 28011790 to 28012784 reverse strand)
cacatgtatgatatggtatactaccagtacaaaccaagaggggaataaagtcagaaaacaacattcagattttctcaaatagtcattgattattttctcaacatcataatgattagttaacaggtgttggacaaagaacattctgatagagcaaggaaataagatgcttcagaatatataaaaatagataaagtagaagaaaaaaggagcgaaaatctgaacttacaaaatttgttgacatgtttcagcagggaagtctccttgtaatttcttacgtgattccaaattggcattttttttggataatttctgatcaatcaaatccataaatagatgttggaggttagatattaagagggaatttaatctcatttgacctattagcagtttatttattattataaaagcctctttcgtaaacattgtgaactaggccttgttaaactttcaaaaagcccttaagaaggggcctatcgcaggtaatatattgaagattgcttacatctagatccataaaagaggcagaacatgatgctgaaaagattgcttacattaccttaaaagagtgtaagttcatttacttggtttggcattcgtgcttaagaatcactttgaggaagaattttgatataaccaaacaagtttggcctctattattacgttgaaatgaaagtgattgagtgtaaccacatattccagtgtcacacagaaaacacacctaaaatttgtagtgtatgtggttaggtggacgtcatacgtatgctgatttttttccctcaatttgagaaaatcaacgactcgacaatcagacattgttaaatctaaactgaaactcaaccctgtccctgaaggtatgttaatttcttcatcttcatccaataacatatctgactaattatcaatcacatttttaaaccatcgtaaaactagtttacttttttcaaaggtgtaatatgccgaccattgaacatgtttataacaatgtgttttaacag

SEQ ID NO: 29099 - DNA, 395 bp, Medicago truncatula
  Intron number 2 from transcript Medtr1g132520.1 (locus Med tr1g132520) derived from phytozome v7.0 (chr-ID MtChr1; po s 29588818 to 29589212)
gagagaaagtattgttactggtataataattcttcttctgcaagttgttctttgttgttcctttaactagaaaagttttttacccgttgtgaaaaccacgccgacttctctttttgtgttctctctctctctctcactcaccaaagaatcttgctttttcttcttcctttgaattaagctttaaaagtaacaatatacacaccactccctatactatactatactatactagtagttgtaatcattattccactctcttcatacctctgaaaccccacaaagaataatatcttttctttttctttttttattgaaataatgttagcagtatgttatgtaatttttaatgatgggtttttgtttttttgaaaaataaacagatcaattgatagcag

SEQ ID NO: 29100 - DNA, 433 bp, Medicago truncatula
  Intron number 1 from transcript AC235757_20.1 (locus AC235 757_20) derived from phytozome v7.0 (chr-ID AC235757; pos 58938 to 59370)
ggcaggagttgctggctgcttgtttttcaagttattttagttgaaaatcctatttttcttctcttaacctatacataatgttgtcctataaatagaaacacccgcacactcttttgttcattcagaaagcttacagtacaaggcaagggccaaccatcagaactttaaggtagaggatctccatccttcttttgttcactctacggtatatttttcttgttttgcaatgatgtcggttgtcatgagcaactaaacctatttgattaaggttccacgatgaaccccttattatttgttggattcaattaataaatatttttattcaatttatgattcaagtgtgtgatttaattagtatatgtctgtttctataccatatcttatataatgcatattaggattgacatccttgattccggagcgtgttctcggg

SEQ ID NO: 29101 - DNA, 1027 bp, Medicago truncatula
  Intron number 1 from transcript Medtr3g113960.1 (locus Med tr3g113960) derived from phytozome v7.0 (chr-ID MtChr3; po s 28747828 to 28748854 reverse strand)
atttgtctcatcttgctcttgatattggaggtatttattactatttcttacctttcatctttcattcttattattgctcatgcctcatgtgatgtaatgttctctcttggtgttttgttttttcttttcttaaattgcttgtctttcttaccattatgtattttgtcgttttgttttgtttttctttccttttttaggtggggggttagagttagcattttgggttagtaaaatatgtgaaatgtaaaccaggtgattgagcttcggtggttaacgagctccctctacccgagttcgattcctaatgggaacaattattgaccagactttacttacctcccagccgaactccaacttactatggcacctttcccctaggaaccggagggttaactccaaaaatataatatgtgcaatgtataaaacatccaccatcttttaaccaactttactatcaatgtatcagtctgatgatttgtctcacctcgcacttgtcatgttgtcttttgctgttttgtttttcttttgttaagatgtttgtctttgttacttctttcttaccattattatgtattagagtattactatagagtatagactatgcatcaggaaacccgcggatgcttacgtactgttgttttaaaagattggtcaagccggaaaacacgggagggtagagatgaatttgttttaaccaactttcctttttcagcttaagagattctttgttctcttttcttgttttttatgtcattctcttacagcctagccgtgtcccttatttttgacatcttttatagagtttgagcactctctaacaatactaatagcaatttgaccttttactcttttttggattttcacggttatattcatattcaaggacttgtcattagtctattgtatcaaaatttagttaatttttaagagaataaggaacttgtagagtctgaaatgtgtccgaaacctgatttgtttcttcatatgggcaggatcactgataaagttggtgtacttttcaagacac

SEQ ID NO: 29102 - DNA, 374 bp, Medicago truncatula; identical to SEQ ID NO: 28870
  Intron number 1 from transcript Medtr1g137420.1 (locus Med tr1g137420) derived from phytozome v7.0 (chr-ID MtChr1; po s 30469232 to 30469605)

SEQ ID NO: 29103 - DNA, 858 bp, Medicago truncatula
  Intron number 1 from transcript Medtr2g026470.1 (locus Med tr2g026470) derived from phytozome v7.0 (chr-ID MtChr2; po s 7229062 to 7229919 reverse strand)
atcagagaaaaaaggtaaactttctcaactcttatgtattagattaatatttgttttgagagttttgcatacgtaggatatagatataatatttagtttactattcattattgaaagtttgatcttttatataatctatcatgggactgtaaatctaaactcttccatgtttcctggaactgttttttcttttacttttgttctctgttttagttgtggtttgaacatgaacctgtttctggttaagaaaatataacgtgtacgtataatgcagtgttgtcaatcacggaagatagtggaaattctgccacactacaatgttttagtgccatatacccgctatttgacaactttgtactaaatagcttatcaagttatcttggaataacagtgatttgtttaaattttgttatgctataacgccactatatagccgctatttgacaacactggcataatgtagtgttggtttgtaggagatcttgcagacagtttttcattgctgttattggatttaaaacctcctaaagtgtacttactttgttaatgtaggagatagagagcgatcaaaatctgatttactatttggcatttgtacattaactttgttgataccaaattaccaatcatttaaaacattcaagctactttttagcatcccttgttcatggttagatgcaagcatcaaactctgatctttcaaaagtttagtaaaaaaagtagtatcattctgttttgcttctcgttacaatatgtatatatgtagcagatgatttagaatatttgtggctttaggtttgcttagtgtctttgtttgttaaatagtgtgcttttctatgtttatgcagtcatctgtgg

SEQ ID NO: 29104 - DNA, 499 bp, Medicago truncatula
  Intron number 4 from transcript Medtr1g076510.2 (locus Med tr1g076510) derived from phytozome v7.0 (chr-ID MtChr1; po s 15282251 to 15282749 reverse strand)
tctcaacagcggtaaggccattttttttcatctctgatttcatatattaattcactatttacatatatgaagatgtgataagcaagagagtaatttggtatgagaataggaacctgaatctaagggtatgtttgaatggaggattttggaagggaaaacttatttttctaagaatatgatcatttatcatgttattgttattctttcaactttttaacatatcaaatatatacacaaatatagacttagcccttcaaaaagaattcatttaccgtgccataaaagaatactcaaacaatgtttctctattttgtttcactgctgttattttaacatgtcttatttaatggttaaattacacttctataggcaaagcatacatcatagtacacccctaatacagttatcaatcatttatagcatctagtgaatcaagtatcaacacacaattaatgttcatatggctggtgtataatgtattcatcaggttgtaggaaca

SEQ ID NO: 29105 - DNA, 526 bp, Medicago truncatula
  Intron number 3 from transcript Medtr1g020190.1 (locus Med tr1g020190) derived from phytozome v7.0 (chr-ID MtChr1; po s 4360400 to 4360925 reverse strand)
ctcatctacagggagcgtaagttaaaaaggtatttgatgatgaacctattcgatggactttttggttccttgtgaaatttggtttcataaattgtcctggttattctgcttctacatgtttttttgagtgaatcctgaagttggttttccaaattcaaacatccacaacattagtttttcaaaaatttgaaatgtcaccccgttagtttttacaaaagctgttgcctaattatagtttgtttgtttaggcttttgagaccaccaggagtcaattttgtacactagtagctccctctcacatgctgtgctgaaaatcgatattgacctcaccattttggagatttatctttcaccaaaattgacctcacctaattatagtcggttttccaaattcaaacatccacaacatcagtccttcaagaatttgaaatgtcaccccattagttttttttctttcttcaaaagtagttgccaaattatagtttgtctaggcttttgagaccatcaggaattgattttgatcaaa

SEQ ID NO: 29106 - DNA, 781 bp, Medicago truncatula
  Intron number 1 from transcript Medtr3g133560.1 (locus Med tr3g133560) derived from phytozome v7.0 (chr-ID MtChr3; po s 33855327 to 33856107)
aaagaagcagctcaggtttaattgattcgggtcaggtcattagggttatactcaaataaattttttggaccaactagctaacctataaggcccactacacattcaaagttgtttgctctttgtaagacaacgttcagttttagttcacatgtgagtaattaatttagtcgtgctttcatgattttttttttggaacaataattaacttattttgtttgttcattagcttgtaaacatttggaaataaaattatataattttaaaattttaaaggcactataagaaactaaaagagtttttttaagaagaaactaaaagagttgtatgtattaattcacatgattattcgtaaaaaatattatatcattttaatttttaataagtatgggaaattgttgaatgagtttaagtttcagtactgtaaaatatgaataatatataattttgtatgttattgttttatataatgataaaaaaaaaatacatatttaactaaaaccggttcaacccggttgaatccttaaacctcgaacccataggtataccggttttatgtccggtccggttttgattaccttgttatttccataagctctccagggtaacttatgaaaaccacccataggttatttgaaaacaattgaactttatttttgtttatataattagcttgtatataagagcttatgctataagcacttagttaagttgtccaccgaaataggaaatggcttttgttgctactcatgctgctactgaatttgcagactgctgaagcgaa

SEQ ID NO: 29107 - DNA, 448 bp, Medicago truncatula
  Intron number 1 from transcript Medtr2g005650.1 (locus Med tr2g005650) derived from phytozome v7.0 (chr-ID MtChr2; po s 380311 to 380758 reverse strand)
tctagccttataactgttgctgttactcaattctgtacactgtctatttggtggtatgggattttaggttgagtactagctgtcagtatgtagcttaaagtcttcaacttcaatatcaagcccatgcgtttcattaaaagaaaaatgctttgtttgtgtacgttggttagaattcaaaagttctgcgtttttctgtatgtgtaggattatggttattgagtctggtctaaaagatcagagtaagcttaatattgacacaagaaatgggacaagaatgtagtcttctgtgctatcttttcaagtcattattatataaagattatcatcgttatcagcctagtttataaagagcgcatatttatgtatatttatctgaaacatttgcagagtttaatatgtagagactgtttcaggttctagaggaattaaggccgtacctggtaggggc

SEQ ID NO: 29108 - DNA, 979 bp, Medicago truncatula
  Intron number 1 from transcript Medtr3g109790.1 (locus Med tr3g109790) derived from phytozome v7.0 (chr-ID MtChr3; po s 27574068 to 27575046)
gtggcgcgtagtctccacagcttcaccttcatcaggtatcaggttcattctttggcgattgagtttttctctctgatcgaattttattatcatttcaaacaagattcgatgcgatcgccgagcaaaaaaatttctatcatttattttgttagtacgagttcttacataacccgtttctttcgattttgcggattcatcacacttactttcacgattcttcaacttcaatttcgattttgttttgtcagtgttaatctctgcaactctaattttcacactaaatgtctattattattattctatttaatgtcagtgtaatcttttttactctgtcagcaaatcacaatcaatcaaatgaatgtcttaaaaaaaaaaatgaggagtgttatttgaacaaccatttggtttgacaacttatgggacaaccataatttacaaagaaagaatatgtatttgcacgaaaatcaaagcaatagagaaataaagtaaataataatgtgattatgagagaaaaaatttcacaaaatggatgttcaaatatcatttctttaaaaaaaaaaaagtagagaaaataaaagatgcatggtcgttgtaaaatggttttacatgaaaatccaatgaacatcttgtattccttcaaattacaatgatattttaaaattagttgtatcattgtatgacatgacattgatggtttcttattagatgatagtgtaaaactattttacactgtcattgtccactaaactcttaaaaattatgattaaagttaaacgtatttttatttttatgatttgatggttataattgattgacagtgtaaaacaactttacactaacaatgtttacaaattaaatatgcataattacgtagattttgttgggcaatatttgtatgcaaagtcagtaatactatgttgatgggtgatatttagtttctttaggttctttatccgccgagctttcagattttgattgg

SEQ ID NO: 29109 - DNA, 432 bp, Medicago truncatula
  Intron number 2 from transcript Medtr3g109790.1 (locus Med tr3g109790) derived from phytozome v7.0 (chr-ID MtChr3; po s 27575177 to 27575608)
cattaaagtatgtgtcattttctgtcttaaaggaacaagttatactgatccaagttgattgtttctgtgttacttattttggaaatatattacctatgttcccttgtttatcgattaatgcaaacatagggaaaatttattacaaacatagggaaaatttcctttgtttgttctttgtttagttgggttctctttcagttatgcttaatgcaatcaaactttaagagggtttcaaatattttcttaaatggtaaagggattggatgtcaaagtgaagattctatatagtattattaagattgcatttctttttcgagttgtatcacgtggaatcaggtgaattacatttttggtatttggattgggtgaatatttaaatttaatgcctgggttgctaacctaaattttatgtgaattatgctcaggaagttc

SEQ ID NO: 29110 - DNA, 226 bp, Medicago truncatula
  Intron number 2 from transcript Medtr3g128160.1 (locus Med tr3g128160) derived from phytozome v7.0 (chr-ID MtChr3; po s 32749455 to 32749680 reverse strand)
actgggaaccacttgcacccaccaaagaagctcaggtacgtttctaactccaaatcattttcttagttaaccattttttacagcttaggttataaaagttatgattatttatgcactaaattgcttaatcttcatgcatgttttgatcgtgcgttttttagatgatccaaacttaatatagtgttttttattttctttcaggaatttcatctttctcagacttatc

SEQ ID NO: 29111 - DNA, 764 bp, Medicago truncatula
  Intron number 1 from transcript Medtr2g025220.1 (locus Med tr2g025220) derived from phytozome v7.0 (chr-ID MtChr2; po s 6646989 to 6647752)
ctttcaggtttctctttttacacatttcgtttactctttcacgtttcttcatttcatatttgaattcctctatttgtgatttaggttagcatattgaaaaacgaaacgaatatatggtgattgatatttagatcatcacaggggagagagatccgtagcggagagcggtgtcggtattggaagctactaatctttggtgattgagattttttcttcaatttgcttgatgaaatttattaaaaaatgattttcatttttagaaaagatggaaaaaatgattttcactttatttaatgttgtagcttcagattttttttagttttcaacttaaaattttgatatctatttgtttttttaatgatttatagtaatttggagctttgcatgttgtttgtgatatgtgaattgctgaatacttgaattaaaaaatttcttccgttgattgtttgcaatatacttttcagagattttcagtagtttaacccttaattttaatttcaacttttaggctattaaataatgaagaacaagcttgaatgctctgaaggtggtgtcatgcgataactaacaggtgtagataatgtatatatctctctgcatcagtttgttgttattttctccataattatcctcttccatgatttacatattttcgttacagctattgttataattctttttccccttcattggtttctcttctgcagtgaaaatcaatttagttagcaatgcataatgttgttggtgatctcatctgcgttcag

SEQ ID NO: 29112 - DNA, 321 bp, Medicago truncatula
  Intron number 2 from transcript Medtr1g043580.1 (locus Med tr1g043580) derived from phytozome v7.0 (chr-ID MtChr1; po s 10282689 to 10283009 reverse strand)
gagtctgctgtaaaatcatagtatcaaacttcatcaatgggcgctagagtttactttcttcatgataaagaaaagacgtagaccattaagtatcccgcaatcgtatcaattgtaaatatcgataaggtatatactttcctattaaattttcaaatggttttcatgctgtggtttttcttggtttttacctatatgctctttgatatccgatttataaagttccatgtgttattttgatttttaaccttgtgtatcatttcattttccaggccttttaattaccaaaaacacacagaagctgtgtttcatttcttaggaagt

SEQ ID NO: 29113 - DNA, 920 bp, Medicago truncatula
  Intron number 1 from transcript Medtr1g099450.2 (locus Med tr1g099450) derived from phytozome v7.0 (chr-ID MtChr1; po s 20314278 to 20315197)
ttaaggtaaattggttgaagctgaattgaatgatggaaagtagtataaatttagcgtttatattaattttgattgatttgtgctcttgtaacttcaaataatgtggatacatattttttatgacttgttaaatggaatctagtgtttccgtgagcatagttagttggtagagactctgcaatatgcagggtccttaaagggtaaaattttagccaccaggctaattgacaaaaaaaaaaatggaaactagttttaggaaagctttacattgttgttcatattcattaattttcatttggaggaaaaaggacgagttgattaaattgtagtgaaatgagaagaaaagggttggaaagaaatgcatgtgggtagtgatcaattcactgtttggataaacaactcaactaatccttagaggaaaagcatttatcatttaagcacttatatttgagctaattatatattcggagagaaagtatggttaaattgatttcatgtaagttatacgccgttttcttaagctattatgaaaagcttattgaaattagctaaaactagctatggacatgtcggaagatgtttacatgaactccctcaaacacaatgttattaagtacttatgacagataagcccatgttcataagtcaatccaaatgtagcccaattttataaatgctttatgctttactttttgtgctggtgtggtaacatttatcttttagtaatatatttggaagctatgcattttggcaagagattcatttcaggattcatcacagtaacacatgtttgcttaatcatacagaccttttgttttttcacgtaatgggtttcatttaacttataatatgtatttatttttaaaggttgaatcgccaaagcagggtaatagtgtggttggtgttggtgctttgttgga

SEQ ID NO: 29114 - DNA, 665 bp, Medicago truncatula
  Intron number 1 from transcript Medtr2g120560.1 (locus Med tr2g120560) derived from phytozome v7.0 (chr-ID MtChr2; po s 28381748 to 28382412)
ttcaagggtatgttttttttttcttctttaaattagttccttgtaaaaatattattttttcttaattttacccccccaaaaaaaaaaggcatttcatgaatgttcatgatctcgagaattatgctgcccgatttgttgattagtttatcatcggatataggaaaaacctattaaaaaagttgatttttttaacactaagatcaatgattatgaatgattattatgttgtgtgttagataaatgataattaacccccaattttcatctgatctgtgtaatcaaattggatgattttttctttgtgttgtgcataattgttatgaaatgtggtgataattgaagttagaagagtatgaatgattgagccctgtttcagttcttaacattttttgattgctgttagaattggagatgatataaaaaatatgtttttagtgaattagttatttgttattcttctagagaactttttatgtatcatggattttcaaagttggtacttcatgtttttatttttcttcctctttagtgagttgattgatgaacaataatttgttttgtttatagatttatatgtttcagagagatagtttgtaccttaaacaatttatatgttgtttctttgtcaaggttactcaagggtcgtagcattcctggtaaaatat

SEQ ID NO: 29115 - DNA, 215 bp, Medicago truncatula
  Intron number 2 from transcript Medtr1g120440.1 (locus Med tr1g120440) derived from phytozome v7.0 (chr-ID MtChr1; po s 25908607 to 25908821)
aaaccaaaccaattccctgcagtacttgtagcgtacaccaaagatcaatttgagtcattgtttatagttctgaatgaatgactctagattttgaatatatgatgttacataagtttttttattttctaccgaagaataattctctttctgaatctatctaatacaatgtataattttttctctctctcgtagtttcggagtttgtaccttactat

SEQ ID NO: 29116 - DNA, 593 bp, Medicago truncatula
  Intron number 1 from transcript Medtr3g064560.1 (locus Med tr3g064560) derived from phytozome v7.0 (chr-ID MtChr3; po s 14759237 to 14759829)
tcctacgtgcatttgcaaacttacatcgaagcttagttctattttatctctttttctttgaccaaagaaaacttagctcatatcattattaaaaaatattgactacaaaggtatgagcaattaaaaaataacaagattttaatttaatagaaacgaattcactaacatcacatttgttgctaagattgaatccacatgttacctttttttttgttgttaaaatgacattctaacttcactgttcttcatgaaagttagatacattatttaaggatagttcgtaaatttccttttctcttttgattatgtgattaatgatgtttaattattgtcaaaggatgtgtggcggattagagtatttaaaatgttgttgtaacaactaacaaccataatagtccattcaaggtagctacccatcacaatcacaattcaatgagaatgagaatgaaaggtatttaaagtattaactatagtttgacagttggaccctttcctcattggtaaggaaaagtgtcggtttgcttacaaccatacgataataaattttctcttggcaagtaattcctggtaaactcccgacttgctcaaattta

SEQ ID NO: 29117 - DNA, 202 bp, Medicago truncatula
  Intron number 1 from transcript Medtr2g033190.1 (locus Med tr2g033190) derived from phytozome v7.0 (chr-ID MtChr2; po s 8997122 to 8997323)
tggaacaagaaaactcaattggtatctacaatttcagtttttattttatttttcttgcaccaatctctatcttattactactaccatcttcacgttatttacttgtatcataaatttttataatattatttccttatatcaaaattgaaaacctattgcatgtgttgttatatatccaaattcattatttttcttttaggtg

SEQ ID NO: 29118 - DNA, 845 bp, Medicago truncatula
  Intron number 2 from transcript Medtr2g052520.1 (locus Med tr2g052520) derived from phytozome v7.0 (chr-ID MtChr2; po s 14261271 to 14262115)
tggtgtttttggtagcagtagtgaatttgcacaaggtttgtttctttttttattacatttatattatatttgctacataattagttaggactttataataaacaattcatatttgtgatgcattaacacatacacgagcacgacactcacacgtcaacactgataataatttgagaaaatgaatttatcttgtgtaatcacatgtgttagtattgtgtcggtgtcagacatcggaaacaccttcaataaaaaagcgtgtgtgttgcagagtttcataagctattattgtttattaatgtgttagtatgtggatcgattaatttgagtttatctactgacataggttttatgagactgtttgcgagaacttataaacacagcttatgacattcttcataagctattttgagcttattttcacaagatagcctatgaaaatagtttatagcttacatgaaaaaaaaattaacttctatttatcttttgctgtaaaaatagcttatacataagtgcttatcatggtatgtgcttgtgctataagctgcaaatatgctgtatatccaaacagggccctggtcttaaatttccactctctcctattttgaaaagtaactagtggactaacttgatgaattgagaataatttagggactattcattatatgtctatagtttatgaccaaattagagagagtgatattcgatggaccaaattaaatgtttacacaactttgttctatctgatgatatgcttagatttttggttttgtaaaaattaattaattgaggtgatttttttgcatgaaaaagaaggacgggagatctctggtccaaaattgattgtg

SEQ ID NO: 29119 - DNA, 707 bp, Medicago truncatula
  Intron number 1 from transcript Medtr3g115090.1 (locus Med tr3g115090) derived from phytozome v7.0 (chr-ID MtChr3; po s 29248567 to 29249273)
ataagagtacttcggaggaagaaaaaggttgtttttctttaatttgattttagtaatctgtgtgtgtgaaaaaatgagttcttttgcttaacagtagcataacataagtaggaaaaaataaatatgttggtaccttacagaattaataggttatgtttgatctatgaatgttattgtgctatctcttaaccgaacattggatattttgctgaatagaattgattgatacatcatatgtcaagtctttagtttaggtgatgaatttcattgtcttgctgagtgttgatttcatatgccatgaagatttgttgtaaatttggatggtagagaaaggaggaaaagggaggtgaaaatttgaatcttgtcattgttgtgaaattttctaaactgatggggattatcatcgattacacctctaaacgtaatcctttttaaaaaaagagctgcaaaaacaaattttcccctaattaagagaatttttttttatgatttcattcacacatattttcccctaattgcaaaaacaacttatttctcagctttagcaccattaatttttgttgcttgttggtagtttgcgagcttgtgcatctgtatcagtgtatgtcatgcaaaatggagttattttgatagaaaaaacttgcttatgatgttccattttgaacctaacagaaggtgatacaatcttcaatcccattgatcttgat

SEQ ID NO: 29120 - DNA, 818 bp, Medicago truncatula
  Intron number 1 from transcript Medtr3g166440.1 (locus Med tr3g166440) derived from phytozome v7.0 (chr-ID MtChr3; po s 43569792 to 43570609)
ggatcgtccagtactgtggtcctcttcaagaggtcaaagtcgttgagtgtcttccacgacatccatcggtgattggttatggacatcctaacctcaagtgattggtcattttccacaatatcttccggtactatgtgctacttcattgtcatcatgattattatgatgatactccttagtgatataattcgagttttatgaataactaatagttgaattagaattttattctcaatttagctgttaccgcaaggcaaacttatatattgagttagacataactatttatccaaatttcagtttttattttacttgctgcaatgttttgttttgtatgttcctataacacattccttcttttgtttgttaggtttcttcatcaatatccagtaactttcacaattacattttttaatacagccagacattaagcagcataataccatttattatttctttaggcttgaagagcataaaaagtaaaaatgatacagaatctttaaataatgctccttagatgcaaattgaatgtaaagcggaatttaagttggaagtatattttaattggacttcatctgaatacatttgatgaggattggtttggtttaaacgactctttgcattttgtttgagtttcacactatagaaacttgttttagggaagcacggttatcttcctgtatctgaaccaaaaggaaaatactttagctgtgaagtgtgaataacgcaattggtgaagaagttattgatgagaaaatggagagtaagaaaactagcaatcattttgacaaagaggtaccagttgcagggaatcgaga

SEQ ID NO: 29121 - DNA, 616 bp, Medicago truncatula
  Intron number 1 from transcript Medtr1g143650.1 (locus Med tr1g143650) derived from phytozome v7.0 (chr-ID MtChr1; po s 31763898 to 31764513)
aaaaaaagagtaccaatgtaaaatactgcttgttgttcaagtttcctgatttaatatgtccatttgttttgtctgatcattgttaatgaaacaaaacattttcatcttcgaaacaacgaaaactcctcccggaaagattttggctgttgtcttcttggataattgtatttcaactttatcagtcttcatattctgttgttcacttcatgatagggtgcatttaaggagatactccagacttaaaaaaaaaaaagtgtattcctaggttattattactttaggttttagtctgactccataagatacgtgagacgtgaacattattcaggatgcaagcttgtgtctataccttttttttaaaatactaactaagttttcttaaccaaagtatagatctgaggttcgaagttgaaacctaaaaacaaattctgctggtttttattccacgaggactttagaagtctatgatgggtttttttgctgtcttatttatttttgtccccctcagaaaacaaaaattcaaataaaacacataaatgctgattttggtcatgggaattagtactagtataactatgttgtgggttgtgacttcattagtgtctgtcttgcaggc

SEQ ID NO: 29122 - DNA, 620 bp, Medicago truncatula
  Intron number 1 from transcript Medtr1g012800.1 (locus Med tr1g012800) derived from phytozome v7.0 (chr-ID MtChr1; po s 2076433 to 2077052)
gggtttcatcatttttctctatctgcttcgctttggttagttctctctcccttcaaatcgctgctgttttattcattcatcgttgcaattcaaaattttacaatcaaatcatcattgaaattttttaaaagtagaagaaaattatatacaaaaaattcgtttattttttttttttttttttttactgttttgttcgatttaatggtttgattttgtgaatttcttgatcactacaattttttattttgtaaatttgattaaagttttgatttttgtttatcttgatcttggaaatgttcaaagggggttagggaaaaaagtcaattttctaatttttttttattgtgattttagatttttaattttcataataaattcttgatatgatttcatgcctaaagttataatctttgtaaatgggttgcaagaatttataataattgatagcaccatgttgtagctattgatttttgcatacatgaatattttggctttgaatctttggtttgtttcttgaatatgtgcttttgattgattgaattgaagtagaatgttgactaattttttatattttgattttcttaggaagaacaagactagaagggttgtttgtctctgat

SEQ ID NO: 29123 - DNA, 671 bp, Medicago truncatula
  Intron number 1 from transcript Medtr3g030470.1 (locus Med tr3g030470) derived from phytozome v7.0 (chr-ID MtChr3; po s 8250481 to 8251151 reverse strand)
acgttatacctaaaaaagtatagaaataataactaattaatttatcctaaattcttctattttcaaaataaaattaactaatatatgttataaaataaagtaaaagcacgggatcaaaggagaagaggaaggagaggatgaaatcactttgtattattctcttcaagactgtgtctttgcaatacaatatgaaccctatttatagtacacaagatgagtaagtgagtgatcaaggcagcggcgaagctcgcaaaaaatttatgcagggaccaactataaaaagattttttatttttttttttaaaacgaacatatatttttaaggataaaatatatttttagtcacataaataattataattttttatgtttagtccttaataaaaattattcaatttttatctcagttttttaaaattttactaaaacaaagtatttttagtcttgaatttaatctttaacaaaaaattaaggactaaaattaacaaatcttagaaacttaacaataaaatcgctatttagaaacgttgggcaaaatcgctaagttttccttcccaaacaccaacaaatccaacagacaccgcctcaaccatcgtgaaacccattttaattccatgaccttgtttgtgttcttagacacctacaccttcaccatcatcatccaaacctag

SEQ ID NO: 29124 - DNA, 606 bp, Medicago truncatula
  Intron number 2 from transcript Medtr1g025070.1 (locus Med tr1g025070) derived from phytozome v7.0 (chr-ID MtChr1; po s 6123306 to 6123911)
gaaacagtgacttgggttataaggtccattactttttctcccccttattaactttgggaatattgttggatttggaaacattattgttttatttttaaaattgtagcggtgacattttgataaatttctttatgaaagaacaaattaatagttaaaatcgaaggttgttaatcgatttaatctctctatgtggagttactatattgttcaatgcatgatcagttgaagcctgtttgcaaaattttgtttatggttttcgttggtctttgatctctattttgcggtctatagtcgtagagttgattgactgagagactatattgattgatagtcttcaatttgatgattaatttgtcatttcgtgaattaggtgaatcgagttgtttgatgtctacaatctccatgacagaaattcttattcactaactaattacattatcaaaatgaaatataatatgtacacactattagtagatcattgcttacacttaaagtgtaaattccaagtttagttattttggtatgcaatacatcatgtgcgtgtaaagctttggcttctttattttgtcttttgtataaatttgatgtttaatttgtgtacagctc

SEQ ID NO: 29125 - DNA, 709 bp, Medicago truncatula
  Intron number 1 from transcript Medtr2g029060.1 (locus Med tr2g029060) derived from phytozome v7.0 (chr-ID MtChr2; po s 7631309 to 7632017 reverse strand)
caaaaatcattggtaaagtttactttaaatcattttaattgattaaatactgttttagtttttattttaaattttaattgtttacagttaattatacatggtacaaataccgatgtcgtcttattttagtacaatccttcattttgtcgcacaatcaattcacaaatgtctcttacaatttaatttgattcatgtaagaaacacaggcgtgaaattatcttgcaagcctaatgtttttcacaattgtatatgacttaatatgtttcaggtaattttttatagaggtatttttttaatttcatcgttaaattataatacactacaaatagttataattattggagaaatgtttttctatataatttagttatagttttagtcgtaccaatgcaattaaatgttgatgaaaaactcataaccatcatattatcatgatggtgggaaaaaattgaaatgttgtactatatgtgtttccaaatagtttttatctactctagaataggcacgggattacactattgcactctttctctgcgttgttctctctctttctctttgattggagatgataaagaaaagacggatgctcagatcgattcgtctttgaaaacttgaccttttaaagagggaagaaattttgaaagagtgaggaaagcttctgaagcgagaaggaggtttgaagttgatatgtagctaaaccaacaaaaat

SEQ ID NO: 29126 - DNA, 620 bp, Medicago truncatula
  Intron number 1 from transcript Medtr3g044100.1 (locus Med tr3g044100) derived from phytozome v7.0 (chr-ID MtChr3; po s 12231411 to 12232030)
cttgagaaagaggtgatcttgattggtactaggaacccacttttcgaaatttatttttgaagttctttgaaggtacacctgcaacctattagacttgatagtttattttgttgtaattggttgatcaaaaagtagtgtaagaattaaatctaaatttcccatgggtttctataaaccctagtttttataattgggggtttctataactgggattattgtgttatctttttatcatcgtagttgatagtaactaatttaattggtgataattttatgcaaatatatttttaattgcaatcatccctcaagaataatattgtaaattttttagcatatagtttttgtaaacttgcattggcttgaaatttgtgaatatttgagatgaaatgtaattgctgttatgatcgaaatatttaacgaggtgttatactttggtctttctgtttgaattaatattgtgaatgttatgaatagatgaatagaaacagttcgctgcaacgaagagagaatgcggcctatgagtaacgtgctcatagtcattttttattttattttttataatttttgtttgctgcaacgaaaagattatgcagcttttgagttacaaactcatagtaatt

SEQ ID NO: 29127 - DNA, 840 bp, Medicago truncatula
  Intron number 2 from transcript Medtr4g021900.1 (locus Med tr4g021900) derived from phytozome v7.0 (chr-ID MtChr4; po s 4298021 to 4298860 reverse strand)
ttgttctatcagaggtgcaccttagttttaatttgtctatcatgaaaggtagatctgacatggtagactaccaggtttctaatttcttcaacattccttttaagactaaaagggccattattgctaagatggttgtgtggacacctccaacaggagaggttgtgaaaataaattgtgatggttcttcatatggtactaacccatgtggggctattggttttgtgcttcggggatcctcctctatctttctgggtgccttagctagcaatattgattttgcatcctctcttgaagcggaattctgtgctttcatgttggctattgacaaagccaaagatcatggtttgacttctatttggatggaaaccgactctatggcagttgtcaatgcttttcacaaagatattgggattccttggaaaatgagaaggagatggcataattgtatgcacttttgtaatttgattagttgtacttgcactcacatactccgagaaggcaatatggcagccgatgctcttgctaaaaatgctcagggtttagctctctactcctcacagtggtggtcatcccctcccccttttatttcttctttttcttttgagagatagtctaggtttacctttctctcgcattaccatgaactgattttgtatatggttaggcctctcctggtttttttttttttcatctacctttatcaaaaaaaagagaaaaaagaagttgtcacaaaagttgtttaaaatggttgttcaaatatcactactcttgtcatttattgtttttttatgcacaatatttcaatttctaggattgaaacaagttagaattctcaattct

SEQ ID NO: 29128 - DNA, 952 bp, Medicago truncatula
  Intron number 1 from transcript Medtr2g052270.1 (locus Med tr2g052270) derived from phytozome v7.0 (chr-ID MtChr2; po s 14128455 to 14129406)
gaccactttcagatctgcaactttaggtgaagttttctttacccttttttcttggtttgtctttttactttcttggatttttctgtgctttgtcttttaaaaatgaataagtgtagctgatgcaatagattctataatattaaatcaaatttgtcaatgaactaattatagggtgtttgatttcacaagagtttcaaaattgattttgttttggatcttatgtgattttaacaaaatattgatgtttatgattgtttattggacagaaatcattttgtttcccaatctttatttgatggtaggttgtaaaattaatttatgtctagttaaaaaaattgtctttcaaataaaaaatcaacatataaatttcttaatttcaggctaattttattcaaattaattttacataatcaatttcaatcaaaattgatttttctaaaactaattcttagaatttggtttggattttttacaaggttgatctttgtttaaggtgagacttggatggaactcacctttacaaaattagttattgtatttagtcctatatttaatccaatttaagactcgtatatctacgacgtgacctgactgacccatattacatgggccaatagattttggatagacaaatacaatcttagaatttgggtcgagtttagctcaatgctaaagaatcattgtaactcgaaaaatgtcattaacattttttttgtcattatctcttcaatttgggtcttggatttctatcaataataatgttcataattagttaaaaaaaactaaagattatgggccaccaatttcatactatggatttttgtcattagggatactccattgtccagtgagtcagattcttaatttttccaaataaattaatgtaccatgtttccaaattgacaatcacgtgataataaatgctcatttcatttttcagctgtatctggag

SEQ ID NO: 29129 - DNA, 646 bp, Medicago truncatula
  Intron number 1 from transcript Medtr1g020180.1 (locus Med tr1g020180) derived from phytozome v7.0 (chr-ID MtChr1; po s 4357405 to 4358050)
cagtaagttattttcttggttcatgttctttagccacaccacaatcttcatatccttgtgctgatgtggacacatacaatacaagtgttttattggtatccatgtttttatagagcaactagaggttgtaacttcttgttacaggttaggtaattggacactgattgatatgctttttacattgtgtcagcttaataattgcatttagacaaggatatgtgctcttttgagggcagcccatgtattctggttgtgtcaagacaactttgaattcggattgctatgttcggcaatcccacacattcatgcagtctgctcatcagtggttgttgttaaatcgagaccgaacaatctatatttctaactgtcttagtttttttattttattttgaaagaaactgtattttagtttaaaaatataaacaaaccaaatcttcattaaaatcttaaattgtgttatctcgattaacaatcactttgcatgaataagtagaactgcctacctaaacaatccgaattcggcaaatttagatagaaatctcaacatcatctacttctagggtgcaagtttgtgataatgacacaccctttttctaacttgtcataaatatctcatgctcttcatggcacatgtgaccaaggtgag

SEQ ID NO: 29130 - DNA, 979 bp, Medicago truncatula
  Intron number 2 from transcript Medtr3g159920.1 (locus Med tr3g159920) derived from phytozome v7.0 (chr-ID MtChr3; po s 41981117 to 41982095)
ctaccattgctggtatattatattatactctttttttcttcttcttcttcttcttcttgatttatcataatttaatgtttattcttcttgattatattagattactgatggatggatgcaaaacttttcgtaaaatgattttgaattttgatactcatgcttgatcttaagtccataagattaattgatttaatttgcggctattgtatccactcaatcagatctatcacctgtttggatcaacttattttagtttatttactcatataaacacttgtgagattgtttgactaagcttatcaaaataacttatgacatgtttatcaactggtttggtttcagctaaaagggttaaagaaattgaaggactcggttcaaactctggtgaaagagaaaaaatactaacataatggttaattactaacaattgccttttcaaaaaaaataaaattgtgacgtgttcataagtttttttttttttaaatggcaaatgttagtatgttaattgttatgttagttttctccttaacaggacttgaaccctgaacgtaaatatgttagttttctccttaccaacacttgaaccttgaaccttcaactcctcgactcctttaatctcttggctcaaatcagttgacctatccaaccccccaccccacgtgttcataagttgattgaagtttatttccataacctctctagacagtttaagaaaacaacttgcagataatatgaaaacattttgacttcattttatcttttatcaaagatatatcttatacaaaatcaaatatatgataaatgtatatgctataaatgattaattaagctgcttgtccaaacaagtccctagtattgttcaagttaactaccatactgttttgggcaggcatcgtatcagatcaattggttattggacactcattcttcatgtttttttgcaggatccattctttacattaagaaagaccttgctttg

SEQ ID NO: 29131 - DNA, 1006 bp, Medicago truncatula
  Intron number 1 from transcript Medtr1g074050.1 (locus Med tr1g074050) derived from phytozome v7.0 (chr-ID MtChr1; po s 14903518 to 14904523)
cttgctgaggtaaactttttcagtctaaataggcttacgtacaagtacagccattctatctttcattaattaagtattcggagaattagttataccctgattgggttattgaatagatgactacagttaattaagtattcggagaattagttataccctgattgggttattgaatagatgactacagcgtagacctgtgcgacgagcaattgagttatgattcaggaattattaattgaagaaactaagcaatgaatgaattattatttgatttctaatttgctgcaactagtaaatgagtttttttttttattaaaaaaaaagagtaaatgagttttttttttttaattaaaaaaaaagtcaatgagtttttttaaccttgcaaatagttgcaacaacaacaatagaagcactcttcatcgatgagagttccttttcaattcattaatgtttgcaatgaatcgattgatttgatctttcaaactaaacttactcagtaccatttggtgctaatactcttatggactatggaaaggtgctgacattaagagctgatgttgcattgctaaagggcgtttaatctgcatataggtttaccacttatgaaacagcttaaaacttatttgtgattggttatttgttgggtggaccactgggagaatgacttgaatgccctttgcagaaatggcatgaaaaatgcctaaagaccaagtgcttttatagatattaagattaagatgactctccccttgtgatgggtaaagggaagaggttgctatcaaacacatcttcttatatgtagttctagccagtaattacttccaagttaatcaaaaacttcaaagtaaatatacaggacatacttggatccagtttttggttcagggaattgttttggtttaatttgtcatgcgttttttccttttctttatttttagcaggatttagttgctaaatataacgtgccttcatttgcttaataactgtaaaactgtgctgttgcagg

SEQ ID NO: 29132 - DNA, 472 bp, Medicago truncatula
  Intron number 1 from transcript Medtr3g092290.1 (locus Med tr3g092290) derived from phytozome v7.0 (chr-ID MtChr3; po s 21656732 to 21657203)
aattcatcaaattctccaaactagaggtaaggggggagtctctattcaccataagggttgtatgaacatatgggtagggaagaacttttgttttccattgaattgcatgatcttttagtgaatttaggttaaatttgcacttaaattggcgctgtaattttgggtatattcttgtctctaaattcattatattcatgtgctaaatttgtgattcaattatggttgtgttgtgtttttttttagttttcgatatattgcaatcgtgatttcgaaagaaagtctgaaatatgtttttgatttaatctgtgatttcaaaatattgcactgtattacgattttctaagcacaattattatttcgacatgatactgtacgatatatgtattactataactataactactttttttgtgctcaaatatgcatgcataatcgttcttttctatactttcaggggacccttctcaaatag

SEQ ID NO: 29133 - DNA, 666 bp, Medicago truncatula
  Intron number 3 from transcript Medtr3g098170.1 (locus Med tr3g098170) derived from phytozome v7.0 (chr-ID MtChr3; po s 23701389 to 23702054)
aagctgcctcatccaaagacacagcaattcacgatgtaagttttcctcatttctatgttgatattgctttagtctcatttcaaggaatttggcattttacttaaatttcataaaatcattattttgtgaatgtgttgatacttgatagagtttatgatagaatattatggcgtaattttcctaaaaacaaaacattacaaatctatcataaactttttagcatttctcttttcaaaatcagaaaacatatcaattctctcataattgtattagttccttattaattactcctacaaataaaataagagattgagagggtgtagagttgaaaggaaaagaaatacaaatcctgaatggtgggatggatgattgatgaatgggtgaaagagatcatattaaattatgtgtaaaaagtctcttcttttagcaaaaaaatcagaagggactggagctcctactacttattatgtccctctgcccctgccccaattcaaaaactgttggcattctcttgtatctcccaagtctaaatacttttccataggtttctgtttacattttttagacatttagtgacccaagtgctttggagtataagattttcctagcttaggccacctgcaagatgtcaaaactaaatggtatgcttacctgtttgcatacagg

SEQ ID NO: 29134 - DNA, 829 bp, Medicago truncatula
  Intron number 1 from transcript Medtr2g098080.1 (locus Med tr2g098080) derived from phytozome v7.0 (chr-ID MtChr2; po s 23146751 to 23147579)
attgctttgtaaatgtaagtcttattaccatgttcaaaatatgatttaattttactttatctcacattctatcaatcatctttatcactccataacttatataatttagatgagatgagtttcttgagatttaatgtagaagagaaatgtttttttttacgtcaaaactttgatagaattggtgttgtttgattagagttatgtttaaaggtttggtggataaaattggtgtagtcgtgaatcgtgttaaaatattgtcttggggtgtggtttattcgtagataagagagaaatgtaaggattgatttctttgggtttcttaagtttgtaactcgttttgttgtatgaagggttagagcaatccttgtcctcttattataaatcttcttgcggtgctctcgtttagatcatattgacatatcatatatcatctttgattcattgcatattcaattaatgactctgacgtcaatgttacagattaggagacaagattatctcaatcattttaatttttcaatattttttgttgacatcttatcgttttatgttattagcttgtatgttgtaagtttgatcacaattttttgtagtaaacaaattcaaaaagcaatgaatattactatcatgcatgtgtttttaacatcacataataaactactcctgctccatagtgaagttacagtaataaatattatattcttttttcaaaacaaaaaaaaatcacgggctagacttcagttactattttagtcacgggttatctttattttctgtaaaaaaaattacattaacatgtgtgagttttatttttgtttatttggtaggg

SEQ ID NO: 29135 - DNA, 405 bp, Medicago truncatula
  Intron number 2 from transcript Medtr2g104260.1 (locus Med tr2g104260) derived from phytozome v7.0 (chr-ID MtChr2; po s 24520727 to 24521131)
tgggatttcactgtctgattatcttggttctttaggttcgttttccacttttattgataaaaattataagtatagttgtaaattttattcaattagtttaactaaagtataaaaaattagaagaaaaattattccactaaatttaagtattatttttctataaaactgtatatttttttgaagaaatatataaaactatatgcgtgttttattatcttttaaagatactttgtagtattcaagtgggtctaaaatataaaaaataaaaaaaaataaaaaaaaatactcatatttgattgtcccaaataaaaacaaataatttaaaatgaggtttgtgtttaaggataatttttttaaaaagaaaaatattaactaaataattgcaggagtacctgggtttgcagc

SEQ ID NO: 29136 - DNA, 308 bp, Medicago truncatula
  Intron number 1 from transcript Medtr1g025490.1 (locus Med tr1g025490) derived from phytozome v7.0 (chr-ID MtChr1; po s 6327275 to 6327582)
aaagtaagcaatattatcctagataagcacttttatacgataagtgtttattctataagcgtttacttaagttctttattcaaatagaatcaatatatacatgattattttgatatgaaatattatcatttcttcttcattatggaaagaacatgaacatgtccataacaaaatataacgaaaaaacaagattaatgtatttttttgcttatcttttattacaaggaagtataatataagtatggatcatgttagttaattgtgtaattaaacttgcaggagcaacaccaaaatctgtgttagagtta

SEQ ID NO: 29137 - DNA, 703 bp, Medicago truncatula
  Intron number 3 from transcript Medtr1g099680.1 (locus Med tr1g099680) derived from phytozome v7.0 (chr-ID MtChr1; po s 20471613 to 20472315 reverse strand)
cttgctactgacttggttcgttatgctctttatgatttttgttattgtaaatgttacttactaaggggtagctttaggcgctgagctaggaatttaacgtcatgaggggccatgattagcaccccaatttggattagaaatggtgaatatgagacaatgttgatcgaattaggccctagattaaaatgtcttggaaaaaaaaataattctaaaaatggctaatttgactcacttgtaaaaattataaagaccaaattggtattttgcgtttcttagcgatcaagccacactcagtatcttttatgatggatcagtttgagtatttactccatcactattaaataaaaaacacgagagaaaaagatgaactgcacatttcaactgtgtgcatcagtgcgaaagattttttgagcaaacttacatgtaatttataagtttgttaccttgttaagttacatggctgtgagaacttccttcacttttatcttatccccccccccccccacccccaccatgcgtaaatattagatttagagctgtatttactatagagctggaagggatacaagtgtctccagctctgagtaggttcaaatatgaatgtcaatactatgaattctatttattttagaatacggtttgatgattgttctaatggtctaaaatttgtgtttgcagcaagcagcattggttgggcctcccg

SEQ ID NO: 29138 - DNA, 706 bp, Medicago truncatula
  Intron number 1 from transcript Medtr2g026990.1 (locus Med tr2g026990) derived from phytozome v7.0 (chr-ID MtChr2; po s 7439901 to 7440606)
ctaacactagcaagacattcaaggtaagtttaaggctctttacatggtgttttgtgttctggatatgcttttcttttttgctacaatcttagttttttattactcaattagttcattttttttataagtatatgactgaattcatgaagacatttataataacctacaattatagctgttgtaattaagttctgcctttggaagaataaataacaaagatataccaaatgatgggatctcttggtattaatttaacctcagattatcctctttttttcgaggggttttaccctcagattatccatttctgactagtccatggattcaagtctctaacacagtgcatggattcaaattcttgcttgatacttcccactagcaatgttgactattttttcaagaaacttgtcctactgaaaagtttctatttaactatacatttaatattatcctgttgcatatccaggtcttgccccctcattttgtactttctttttatctaaaatattgtttcaccaaagactagtactagttttagcttttaccagtttaatgaggcatgaaaaacaattgtaaacaatatgcagtggtgtgcacttgtaagataattttcatgtctgtgctttcatttattgcattttgagacttgtgattttgatgctgaagcctttcttctctacaaatgcagattcctgattcgattcag

SEQ ID NO: 29139 - DNA, 850 bp, Medicago truncatula
  Intron number 1 from transcript Medtr2g132340.1 (locus Med tr2g132340) derived from phytozome v7.0 (chr-ID MtChr2; po s 31952150 to 31952999 reverse strand)
tttctggtgttgttttcttctctgaaaccatcgcccctgttattttcacttccatccttaacaaaattcaataaaatttttacaaatacccattaaagtacgatcaaaacccaggttatgaattgtgttttgatttcatcgacggcggcggacagcagagaaaaaagttgatggtggtggtgggttgaagtgttgtgtataaacgcaggctaggaggaggatgggtaaagaaggccaacgctcttcttctgttctctctctttcacagattttctgtttgttttttttcaataaaattatttgcagatccagataactatctctcttccactgatcacagattgatcagtttcactatattctcttcctctatattttctggattatattttgaaagaataggtttgtaagattgatccagataactaatactttttattggatgcagatcaatccaaatatgtattgtgttttgttggtactgtgacgagaagtagttttgtaggattgatccaataaccgatacttcttttagcaataagtgtcatagaggctggctgttgagaatttgcatttgagttaattattcgtgttctccatcgctagaagagacagaggaaaaagaattgacatgaacgatgaattgacatgtgagtacctaaaagaagcaaccacaaaaggaattgacatgtgagtacctttcattaatacctgaatttgcaggtccaaactataaaatttgcatgattaagcgatgtgcataacttacatcttggttgataatgccttctcatccatttcccttctctaatatctttatgttttcaaatttggcagcgatattctggct

SEQ ID NO: 29140 - DNA, 318 bp, Medicago truncatula
  Intron number 1 from transcript Medtr1g007490.1 (locus Med tr1g007490) derived from phytozome v7.0 (chr-ID MtChr1; po s 469727 to 470044)
cttgctatcttcttcattacctcactggtggattagtaagtgtcattttttatattcattctatcaattttgacaagaatttaacaattgaaattgttttactttactttcatttattcaattgatacttacatttcttctattcaaacgtaattgagatgtatatgtctatgtataaatcgttagtgaaaaaacttagttttttttcaatttttttttttgtacaaaaaaaaaaaaattagtgtatattatttgatatttttctcaataacaaacatttgtgtatatttccttaaaaaaacatttatgtaaagggtc

SEQ ID NO: 29141 - DNA, 882 bp, Medicago truncatula
  Intron number 1 from transcript Medtr1g106290.1 (locus Med tr1g106290) derived from phytozome v7.0 (chr-ID MtChr1; po s 22119724 to 22120605 reverse strand)
ggtaaataattgaattaattgcaatccccaactgaaatgacatatggttacaggagacattcttccatcgtcacaagaccaaatcaataattttggacacacacccataaatagattctcctcaaaatattcaatcatctttgttttcaatttcctcaaaaatatttctctctcaaaaaaaaaaaaacactttttctttggccgtgtgaccatattaaaatttctctggttacggttcttcctgttttaattcttatagagagaagtagtaacttaagtagaggaaacatattcaagatatttttcagaaactaaaagacattcaaattataccttgtttttgctatagcattcaattttttttagaggctgcagtattcgctttttaaagattgctctttttctttttatataacacaatagtaatcaacaacccctgcagaatcacatgctgtttaatttagttaaaaaaaaaaagcatcaattatacattgttcttgtataatgttatgatgagaagaaatttgggaagactgcagaatccaaacttatgataaatctcatcaaatcaggcaactcaaattcattaggttcaacttgttttaattgatataattatagttctttggattgctaacttacaccactcattttttaggggatataaatttgcaagttatgactaaaaatttataaaatgcaatttaaggtgtaacttactaatttacacgcactaaactaattaatttattttccgttttggattagattaacgtttatttcgggtcatgactcaggtctatttgcttgttgtaccatcatatagacacgtcctaaaaccccctaaattatgatataaatagttaattgggaccattcagt

SEQ ID NO: 29142 - DNA, 570 bp, Medicago truncatula
  Intron number 1 from transcript Medtr1g111750.1 (locus Med tr1g111750) derived from phytozome v7.0 (chr-ID MtChr1; po s 23895369 to 23895938 reverse strand)
aattggtacatatttccaacacttaatcatcatatttgtatttatttatttttacttttaatcttttcacaatacattttctgctcattttatatgcaaattaatcatttatatttaaaaatatttacaccattcactcaactttcattcctagtaaacttttattgtcattgtgtacaagatcattgaatgatatactactaagaattaagaatgtttcactctaattttaataatcactatgatgtaatttagatgtcatcttgattatttgaagatgtaatttaacttgatgaatggttagttaaaacttttggttcaatagtgttaacgtttctaaacataaataaccaactttaacacgaaaaacaaaaatgacattttcaaatctttaaattgagttaaatggtgcatggtgtagtgtagttttgcctattcattttaccttgtttcttataaacattcaccttatatgttctaacgatacaatcttcttgattcaaactaataacaacattaaaatcaatccttgaagatttcggcaattgaaccgttcctcaatagcataag

SEQ ID NO: 29143 - DNA, 985 bp, Medicago truncatula
  Intron number 1 from transcript AC235756_2.1 (locus AC2357 56_2) derived from phytozome v7.0 (chr-ID AC235756; pos 15 259 to 16243)
tggagaaggattaaggtaaacatgcggattatttttttgttttgttttgcagaatatggttatttagttaggataaaacttatctgcatctagttaagtgttttttcgtataatttttaacttgaaatatatattatgtggttaattataataaattttgaaaagaatatgatttttgagaaaattatgtggttaatcatgaatatttttaaagagatttgaatttgtcccttgaagttactagatatgagttataaatattttaagttaagaacaatgcgaaaaatatctcagaacctaagttttgtccataaagtctttgacaatgactatgaagtccaagttttgatatttctgggagcacggattttagaaacggaaaatgttagtggcgatagtagagatcgaattgacattccttatgaactccgtcacctcagccacgaagtcatatcccctctgcgaacacaattgagtttgcatcagccgccccgctatgatacaatattaaggattgtgccatctcgttttaaagcactggttatatcatactatgtaccatatagacttagattcaactaagttttaagtttttggtgcacttaagtgcttgcttttaaatgaaataggttttctggacaaactatatgttggtccgagtagtaagggactcgagtagtttaagctagtgatcaaaagtttgattttgaaatcacgtataggaagaaaatccggctgggaggtgagaataaaacccacattgtgtgtcaaatatgttctcaaacaaggattagtcattgttaaactgtgttagaaagtgcagtgtgcaataaaattgatttgaagctttactagcatatatctttttcatttgtatatgtgattcaccccaatttacaatataaaagcattattagcatatagaaaaagtttattattatgacaatgaagcaaaatattgattggtgagtgactattcaggtca

SEQ ID NO: 29144 - DNA, 549 bp, Medicago truncatula
  Intron number 1 from transcript Medtr1g120860.1 (locus Med tr1g120860) derived from phytozome v7.0 (chr-ID MtChr1; po s 26162578 to 26163126)
aattctcttttcttactccctctcaatcaggtaactttttcaactttaaaacttaccatatttgattttttaaggaatttagtagatgggtttgttgaatttgtggtcaaactgtttaattttgttatttgacttgaatatgtgaaatttatccaattcttgctagctgatgatgatgtctgtgaaatttgaaagcattgatcaacttttcttctgagaatgtggggaaaatgaattaaattcgaagggaggtaggtttgattgaaaaatgaaatgtcgaaaaactatttatttactacaattggcaatgctactgttggatatgactcatagttcctgataagtggataggtttagctaggtagtattgtaaactggatcgtagtattcaaatacaagttgtacgcataactctaagttctaacccctctcaattttacgctagccatctatgtaagttaatgagtaaaatggatatttggggtgctgaagaatttcctaatttgtgatgttaaggaacttaaagttatggtgtttggatgtaggatt

SEQ ID NO: 29145 - DNA, 474 bp, Medicago truncatula
  Intron number 3 from transcript Medtr3g094600.2 (locus Med tr3g094600) derived from phytozome v7.0 (chr-ID MtChr3; po s 22703457 to 22703930 reverse strand)
ttgtcttacaggttaattttctttttaaaattttagatgcatgtcgcaaatacaataccaccgacacattgggtctgactgtttcatcccaagttatcaaaaagagttgtcatttgatccatacagatttgctagtaattgatatgcatagtaagatggccaaaacatattatcttctccaaaaaaacatgaccttttagttacggaacacttaattttctaaattttgacacgaagctttccctcctagctcgtaaaaactcactatgttacagtttttaaacaatcaaaccgacctagtagtcacctctgtaagaatattgtaaagctgcagtctcataacaaagacgtttatctctcttttaattattttacctaaaaataaataaaataatttttgttagtaaattattgcgaatatttcgtataaactaaaaaatatttttattgtcgttttaccgatacagggaaatc

SEQ ID NO: 29146 - DNA, 748 bp, Medicago truncatula
  Intron number 1 from transcript Medtr3g147850.1 (locus Med tr3g147850) derived from phytozome v7.0 (chr-ID MtChr3; po s 38393834 to 38394581)
gaggagaaagtccctccaacggtagtttgtggtagtgaatggggatcatatcacctgcgcccccgctgagaccctctgagtagtttatttaagtgggtgaatgattaactcattagttaggtgtataaatattgaaagaaaaaaaaaacaagaaaagtgtttttactctctcttcctctattatttatggagcattgctctacgcacaaaaatatacgaaatttagcggatcatgtatttacgcttcattttatttatttattaaacaattttatgtacgtactaatacctgatagtgaggcagatagagtatattactatatagatacttaagaaaatatttattaaacaattatttgtgtacattatcggtatatagatcttattaaactccaaaaatactatcaataataaatacattgcttcaagtaaaattgcactcaaattccttaaataatgtctccgactttaaaccttgtgaatgagaaaaatgtgatcgggatagaagatcctataaaagatggtcatcaccgaagattaatcataaaaaaaactaacagttaacataattacccgacaaaagaaatataaaaataaccgttaacaattaactcctgaagaaatatatctcatgtttcaaacaatatttttgtataatattgatttgatgtttagctctaacctctaaagttggattttcttttctttttcagaaacattcaagctaagagtagaacagggaaggaca

SEQ ID NO: 29147 - DNA, 559 bp, Medicago truncatula
  Intron number 1 from transcript Medtr3g109700.1 (locus Med tr3g109700) derived from phytozome v7.0 (chr-ID MtChr3; po s 27537557 to 27538115 reverse strand)
aaatttgcttgactagtgaggggtggggaacaaaagtatgacacaatccattttatagtttcattgataagctcattatttggaatccatttaagacccgtaacaatataggataatctcatcattttcatcaaacacaaatgcagtaactaaatagtctgtgtaagaggtactcttgctgaaattgtaatgaatatgcatgttgggggagattacaaagctcacaaaaggtgattatccatttctgattcaccgtgagtgttgttcaatcccaccgtttagtactcttttaggaaatacgcaaaacatattatactcagtttgaagaacagtgcaaccattaaatgttagtatgataacaaggcaaatgcttccattctcttatttgatctgtggccatgtttgctttgtccttgacaattatacttttttggcaactccgtaattgagatgcgtgtctgtctaatacctttctcatttgttattgggtttagtttatgttaatcattcagcaatttttggctggcaggcctttgggtggactccacaagaagctcaa

SEQ ID NO: 29148 - DNA, 933 bp, Medicago truncatula
  Intron number 1 from transcript Medtr2g009150.1 (locus Med tr2g009150) derived from phytozome v7.0 (chr-ID MtChr2; po s 1946869 to 1947801 reverse strand)
cctgttatcaaggtttcttctttatcctctttatctctttctttctttcatgatgaaattatattataatagagactcttttgatgtttattgtattggaatttgagattagattcttgctattagctattggatagttttatgtcttaccctttgttggtttagaattgagaaatgttttttgtacaactgagggccggtttggattaggtgtattattcataagtttgtaaatgtattttatgatacaattttcgttactcagaacttataaattaacctaaaaacttatttatttgcataagctgttttgcataaactcaaaataagcctaattcaaacgggctctaagtgcatatttggattcacggcgtggttagtagaatcacggcgaatcaatacgattttggcaaaagctacacagaggttcaacaaaattgacactgttattttgccaaactcacctcccatccaaacgtacacgaagtttagacaacttttgccacatttttaagtggttaacacatttggaatatatgattaattaagtttagtagataatggatatataaggtgttgaaatgaatttcccaccaacataatttcattaaccacaactttagacgtgattaatgattaatcataattttctgtttcgtggttgacatgaaaattatgtttaatcatgttaaaatttgtcattaatgaagttacgtggatagttggtgagttttgacacccagaatatccattaatcatcaattgaatgtaattaactacctatttgaattgtgtaattgttgtcagaaaagttgtcaaattttagctattcaaatgacattgttgtttagaattttatgtatggtcaatgagatgccatacttctactgatgtgttggattggatatatgctgaatgaattaggtgggtagg

SEQ ID NO: 29149 - DNA, 586 bp, Medicago truncatula
  Intron number 2 from transcript Medtr1g125670.1 (locus Med tr1g125670) derived from phytozome v7.0 (chr-ID MtChr1; po s 27828889 to 27829474 reverse strand)
ctgatttctgtgctaaatcaaacgtatgtgcctctcaaaaaccctattctttgttgcactttcacataacaggaactaaacatcacagtggagatgttatctaaatgcaaacgtgagtgtagaatagattatagtcagttgtgacaaacctccatccttttacgtgtgtaacttttcattctatttcatacaaacgaatcaaattacagtagcagcaatcatgagattaattatattgtttaaagttgtggcaatgataaaacaatttttgccctatttttaaaatataaattgtggcgttgccgcaactttgatagcaattcttcctaataatataaccatgaagagttctgaaattatgttagcaatatcaagatatgcatcagaacatgaacgtgtttaaaaatatattagcaatttgttgtttgctttcattttctaatttaaattgtggtgttgccgcaactttgaacaatattaatgttcttaatgctattaacaatttacaattcttgagttgtgttacaaccacttcatataaaatgtccaggtgaagagccaccaaaacatcaagtgccaacaattg

SEQ ID NO: 29150 - DNA, 917 bp, Medicago truncatula
  Intron number 1 from transcript Medtr2g041570.1 (locus Med tr2g041570) derived from phytozome v7.0 (chr-ID MtChr2; po s 11428044 to 11428960 reverse strand)
aattatcaaaaacaatttcttctgaaaacctgagggttaacatcattttttttttaactattttactcctttattcttttctgtaaatgagatatcttctaatcacgttgagattaatatttcatgttgaatagattttttattcttttttcacttgtgttttattttagttgttgttttgagttattttattaatattaaaacaaataataatttttgttgatttaaatataacactatcctttttatgtaatactcttaatcattttaaaagtaatatatgattccatgaatatacttcattgaatgagattggtagcttatttccaatttccaagtcagtcatgaacataaatatgaacaaaatctatagctacaaatacacaatgattaaatcaaacaactatgcttaaatgatttaaaaagctttgcgtccccgtaaacttaactcatttgataagagataatgcatattatatataagggtcagcgttagaacccgggacacctcacttatgctaggctacttgacaaaaaatgatttagctgttagactacttgactaaaaaacgattaataagcttcgtcgaaagaaaaattatttaaaaaaaatctaagtttgatttatgtgttgaataattcttgattacactttacttattttatgattgaatttcgtcttgttgatggataaatatgtgttgaataattcttgattacactttacttattttatgattgaacttcgtcttgttttgttgatgaatagataaaaatttgccataatttttccaacaaatgtgacaattaaatataatgaaggtattaacaaatattggtttcctcacttttgatttggtaatgacttcacatgtgcaatagaatctcatctttcttgaatatatctaagatttgac

SEQ ID NO: 29151 - DNA, 725 bp, Medicago truncatula
  Intron number 1 from transcript Medtr3g068320.1 (locus Med tr3g068320) derived from phytozome v7.0 (chr-ID MtChr3; po s 15881051 to 15881775 reverse strand)
taattcatcaaatccaatctgcacctcccaacactgtaatctcttctttcccttttcatcaattatctaattttttgcatgtttttttttttttagcgttttagatcaaacccatatcagggatttttctggggtcgttttctatttttaataaatttgggaaaaggaagaaaaaatataatttttcatgggaaaaattagatttttaatttgttgtgggaaattttaaaccctaggattgtgtttttttttttaaaggatggagaggtttctatgaaactcgtattagggtttttttttcattgattttaatgctgcagtgggaagaattggatttttattttgttatgggaaatttaaaacccataacataactgttttttaaagggaagagaggtttctatgaaattcatattagtttttttttttctttccaagatgaatttttgattggtttgagaaagtaaaaaattatttaatgtatttttttgaagtttaaaccctagaattttcggtgtatgggttattaattagaagggagtgtttaatacttcggggttgttttaatgttgttttaggttttaatgtttttttagggtaggttttaatgttttatgagaatgtgttggtgataattgatatgttcttgatgtttatctggaattagtcttttatttatcattgatttgttttttaaactgttgcaggtatttgttttgcagcca

SEQ ID NO: 29152 - DNA, 749 bp, Medicago truncatula
  Intron number 3 from transcript Medtr2g095530.1 (locus Med tr2g095530) derived from phytozome v7.0 (chr-ID MtChr2; po s 21837471 to 21838219)
ccttctcagttgatcggtttttggaaaacctatatgtaggtgtcaatttactccgaattttaagttatggttaaatatgtttgttatcgctattaaatcgttgcagaattttcaaatttattgatctcaaacatttatttgtttttagactctcatggaagactaaaaatcgataaaattgtatataactactcaacaataacaccaattttctaaactctaatttatggttgtatagcaatttatgaaagaacggtgaattggtactcgtacaatacttagtttttacagactgagccaattgttaaatctttagttgttttcgaaattaggagattcggttttgttaggtctgatataaaattttgcttgaattgttaaattctgaagtaatggctgcactgttaagctctttttctttagaatgtggaaatgctttcattccacatactactgcattgaagtattagcctattaggtacaatttttttttattgaattgttaaatttacatagtaaagtagtaatattactgagttaatgttagttataggatcaatccttgctgtctatgcatatatgtgactatagttatactaattattgaagctgtggttggtttttccctaagagacgatggaaaagaaacatttgggttcctaaaactaaataaatttgtttccaatgactatgttatagagcattgtttttaaattcactaaatgaactcactggttgcacagagggac

SEQ ID NO: 29153 - DNA, 841 bp, Medicago truncatula
  Intron number 3 from transcript Medtr3g127940.1 (locus Med tr3g127940) derived from phytozome v7.0 (chr-ID MtChr3; po s 32635956 to 32636796 reverse strand)
attcggtattccagctagagttgttcaatacgaaggtaaatttttattttttatttttatttaaagtttatttatttatatatttgaagcaatcaaactcccttatatcctgtaccttggctaggaagtaatattacaacatgacaccgtagtgaaatattaaccctccggttcttaggggaaggggccctaggaatgaagtaaagtctgaccaataattgtttcaaccaaaaatcaaactcgggttctcccgaacgattgatctttacatgtagctcattaaccacttgagctcaatcacttggttatcaccaccatagtcaaatatgattgagcgagtgcgtaaaaacaatagagaacaataacatcaacgcattgttgaaaggggtctgcacctttagcttctatcacccaacgaagaatacctcacctcatggtctgtaagttgagaaatataagagtaaagagatacaatgattgattggagtagtaggttttgttaactctggacttcgcgagctgaacctaggtatgctcactgggtggtgaaagttgaaacttgaggcccaaagttgtcgaaaaagaaatgagagttatgctgtaaatcaggatttttttcgtgcttccaaagtatgtttcatatctatgtatggaaatgtggaattcttctttgattacttttgacactattgtctgtaatctttctctctttttctttagtttgtggatattcaattttcttcaactgagatttctcagtgaagcttttctcatgcaaaatttacatctgaggtagaattttttggttctgcagctcctgatctggaccaaagcagtattt

SEQ ID NO: 29154 - DNA, 691 bp, Medicago truncatula
  Intron number 1 from transcript Medtr3g127940.1 (locus Med tr3g127940) derived from phytozome v7.0 (chr-ID MtChr3; po s 32636963 to 32637653 reverse strand)
atcaaacaatcgagaacaaggtgacgagaactctctcctcaaagtttgagtacattggagaggtaattgaaggatcaaaggacttgacagatatgaaggttgaagaatacaagtatacaacgttctttgaaagctcgtgaacaatgtatcttggagtagatatgtatttttactatttttgacaaagctcgtgaacagcatttgtcctctaagctaggatttctagacaaatcgatgtagatttgttaaacttggatatttatttattttttactaaaaaccgaaccattaaaccccctgtccaagtaatggatatggagggattaactgtgaaccaaaatgaatgatagagatgaggtaaatatagaaaattgacagtagtacattgaatttaacacacgtaggttagaaaaaaaaattcgttggaattccaaccaaaatgggacatgcaattggagattggttcaacccacactatgcattctcaattccaattttgttacattctcataataattagaatagaaccccttccagattttcattttttcctttcataatttctaatcaaattcattattgctgagttttgttcgaatgttgaatcttaaaaaggttgctcaatgtgatgtaatgtaatgttggaaactgttcaggaaattgccgtatatcttcatagatttcacaatct

SEQ ID NO: 29155 - DNA, 698 bp, Medicago truncatula
  Intron number 1 from transcript Medtr1g059870.1 (locus Med tr1g059870) derived from phytozome v7.0 (chr-ID MtChr1; po s 11776728 to 11777425 reverse strand)
gcgatcacaacatcaaaatcgtcgactatcccaaagtgagattttttctctaacttttcagattttgtttctaaattttttttggtatgatcttcaattttatttcacgatttttttttactttttaatgttgattttgagaatggtgtttagtttttgttttgatatctttctactttttattgcttgatcgaatactacgtctaggatgttttgtcgtttgatgtattcacaagctcccaagtcccaacacatgttgattctattagagcaatttaatccctaaatttatatgtatccaataatctatctatcaaacaaattttttggatccatccatttaaaactatagataaattgaattcttccttcttattttaaaaatgcctcaaataataatacatgtttattcgataaaataaaaaattatttatttataaaattaatttaatacaaaactgaaagaaaaaacaagcaaacaaaacaacaaaaaaagtaaatttaaaaatctaacttaattattatttttaataataaaatacttttatttaatatgtttttgtatgaattgggtgtcctctggacgcgtaactccagagactaatcctttgagtcgtgtgaaatttaaatggacgacaaactcttcataatatataaattaatatatttaaaattactttactatttagttattatag

SEQ ID NO: 29156 - DNA, 655 bp, Medicago truncatula
  Intron number 2 from transcript Medtr3g083740.1 (locus Med tr3g083740) derived from phytozome v7.0 (chr-ID MtChr3; po s 19752796 to 19753450)
ttactgaattgtatgacttctatatttttttagggggtattatattcctgttttgttgacatatagtattaacatttacaatttgatacaatttttatgtaaaaaaataacaaacttgcccatcaaagtatatctattatcttgcgtatatacttatcgattacaaaaaaattgtaccatagattagatttaaacacacaccaagatgtctattatacaatcccaacttatttttctcattaactttttggcacaaggaggatgtataggtgttcggattctaaaattcaaaacgccccttatacatgctttgaagtagggatcttcaaattataaaatacgaagtatttttttattattattttgcattttagaatccaaattggtgaaaaaagaatttctccacaaaaaatattggggaaacgtcatttcgtattatataatatgaaaatccaagaacatttttaagatttcggaaaacgtatgagaagctagtagggtggggaaaaaaatatcttctctttaatgcttataaaaattattctaccagatctttgactagctatcaatacttatattcatcattctatattaagtttgtttgtttttgttaaccatagggaactactgaaattgaacttgtctggagaattgg

SEQ ID NO: 29157 - DNA, 731 bp, Medicago truncatula
  Intron number 2 from transcript Medtr3g024270.1 (locus Med tr3g024270) derived from phytozome v7.0 (chr-ID MtChr3; po s 5936785 to 5937515 reverse strand)
tttctactgcttggttggccgaggcttcaactgtacttaactgcaaaacaggaatcatccttttcacattaagtatagattttcatacaggaagagaaattttttacctatgggggccgcttggttctcctaaagtttctcatatcatctttatcgttctattttgtttccttcttctactaggctcccacaggaattatctatttttaattgttttcttttgcgggggttggaggggggggggggggggggggggattttaggaaaataatttagatcaaatgggacactatgtgcatgaaaaaggagtatagaggattgaggattcgggaatttaatgtggctcttttggaaatgtgatgttggaggttgagggatgaaagggatgggttgtgatatagagtttcggtggagtgttgtggggaggtaggatcgttgtaggtggaaggctcgacacggtttggtgaaaaaaatatttatggcatttatgaaggggatgggttgaaggctcaactcgttttggtaattggttcttgaataatttaggttattgcgtcggggatgagtcgtctacgttattttggtgggacccttggcgggaggggcagtcttgaaggatagatttagtggactctttgatttagcaaaaaacaaaattatgtcagttttagaaatgaatcaattaggtcggggtagggtggtgaggcgtggaagtggcgtagacgtctatt

SEQ ID NO: 29158 - DNA, 503 bp, Medicago truncatula
  Intron number 2 from transcript Medtr1g019820.1 (locus Med tr1g019820) derived from phytozome v7.0 (chr-ID MtChr1; po s 4170058 to 4170560)
tggagagcagaatattgaatagcttcatcgtgagttttgtttagttgtagtttatgcaataagcttcattcaattgattttatgcccatttggtaacctaaacctgtaagccctgattatatcttgctcatttgaatatatgctcatttgatgattgaatgacagatgcagaaacaggggaagtgtgatttcttaccgagggataatcatatttactctttaaatctataaagtaagtcaaatgcgaaattaaaacattaaattatgtttaaagtatttgttgttattctctttcttttgttacggcgatttctacttgaaggctacaatatcaaatacctatttttaagtgatgacagtaaggcattttcttcatttcattaatgatctgaggtctggtctgcacttttctttattgcagtgttttaaattacagtgatacatatcctaacattaatattgctttcaattctcggaaactttgatgcagcagcagcatcgta

SEQ ID NO: 29159 - DNA, 728 bp, Medicago truncatula
  Intron number 3 from transcript Medtr3g067120.1 (locus Med tr3g067120) derived from phytozome v7.0 (chr-ID MtChr3; po s 15312771 to 15313498 reverse strand)
tggctgctcgtgtaagaatctattctacaagaactgaagtttatttcttcttatcactttgaatctagtattaatatattttattctatattcccaacacaagataatgatagtgaaactaggttagcttaagagaaacataaatttgttaagggcctgtttggctcaaatgaatagaggaatttaaatggaagggagataaaggattggatgagatattgtgtttggttgggagaagggagggattttaatggaggaattactttttacctttatatgatatgaaatttcatatcaaggatatttgagtcaatcatccaaaattttataaacacgtcttctctccccttcgatattggaggggttctataattgagtcgaaactcaagtgattttgctcccatcccctcccctagaaaaaaagaacaaacaatattactacctccattccttattacaggagacaattcacttttattaactgatgtatctgggttatattatagaccaaatacaacaattattcaatgaacctaaaaagtgaattgtcttttataataaggtaaggcggtagtaagtttgaaataatccctccagtccaaccaaacactacccaagtttactcctaatcctattagcatttgctttttccatttcggatatagatttaacagtcacttaattttacttcagggacttgacatcataggtgttcaaacagttatcaa

SEQ ID NO: 29160 - DNA, 390 bp, Medicago truncatula
  Intron number 1 from transcript Medtr3g067120.1 (locus Med tr3g067120) derived from phytozome v7.0 (chr-ID MtChr3; po s 15313828 to 15314217 reverse strand)
tccaaaacttttacttctaaagtgatcattttcaggtttcattttataattatttactatgcttacatgcagcttgtgacggttgatttcttgagttgttagtgaaatcttttggatagctatagtttactatttatgaatatgaatttgaatacaaggttgattttactacgatagttgcagatttctagttagttacatgcaaccttcctataattgtaacaaacggaaaatcttctgtctttatttcagattttgaatttacatttttatttgcactgcttgtgaattattaacttctttttcgtgttctgctgcctctaactacttaataatttctcattttgatatgcagtggaacgaagcaagctgcacatagattgaggatta

SEQ ID NO: 29161 - DNA, 786 bp, Medicago truncatula
  Intron number 1 from transcript Medtr3g127620.1 (locus Med tr3g127620) derived from phytozome v7.0 (chr-ID MtChr3; po s 32405902 to 32406687 reverse strand)
gtcagtgacgtgggagttttccaccgactgtgaaggtacacggcggtgtttagggtgggagatctttataggtctcctaccgtacatgacctcttttattttttttttattttttttttttacctttggacatttcctaaccgttagattggttaaacataccatagatcaaatacacttgattatcttttcatttgtcttctttcctctcaactctcatgagctttcacctttctctatatacctctctgtttattctccctttgccaattacactatttctttgttccttataatacgaacatcggatttgatctagattttccaaccatctaaatatccatttttttccttcattgttctattcttaattgttcaaaaaagtaatactcagatctggaataaatttgaaaaagaatggtactcaaatgctaatcaattttccttcattgttctactcttaatatttcaaacaagcccaataaataaaatgttaaaactttcatattcatcaaagataaaaaaaaaaaactgcagatttaatcaattttttgacaattccttttaaaatgctaatcaaattggaattcaaattcatctttcaataatactttggctttgttttgttttgatcgttcaataatttcctttggggacatccgaagttgaaattgaagcatttttcatgcaaattgaaattaaatatagcagcagatctgtgttgatgaagtttgagaagcaatctcaagttatttaagtgaaatataatcacgaggagcaagcaac

SEQ ID NO: 29162 - DNA, 488 bp, Medicago truncatula
  Intron number 2 from transcript Medtr2g034020.1 (locus Med tr2g034020) derived from phytozome v7.0 (chr-ID MtChr2; po s 9431845 to 9432332 reverse strand)
gatttgaggtcatcatattttcatatgttgttaatcccgtataaaatcctataacggtatagcgggatagccactattgcggagactaaaatatagtgtatgaagtagcaaaaattccaacaagatacataaatgctcaaaagtagaagaatacacaaaattaaaaggatagtcatacttaagaattatattcaacttcaaaataagttctaaacgtaatcaaaatgacatcaagattaggacattgttctcatagaaaacccaaccaaacagagcaaaaagaacacgaacataacctaaagtacagagaaagaaaacttaaacagggatagattctattttgcgtgcaatcacgctgcttcaagttcaaattgctattgataacatgaattttgtagttttattgctatgcttagtttataaagataacttcagtaatatcattaaaaaaagggcaacccggtgcactaaagctcccgcatacgcag

SEQ ID NO: 29163 - DNA, 341 bp, Medicago truncatula
  Intron number 1 from transcript Medtr2g088460.1 (locus Med tr2g088460) derived from phytozome v7.0 (chr-ID MtChr2; po s 20014578 to 20014918 reverse strand)
ctcttgttgttaatgttggtgatcttctacaggcaagttcttcttcttttctattctacttctgtagtatattttattggagattaaatctgcgactataaagcatctatagttccgtttgtgccattcaaaaaataaaaaaaaactatagttccgtttgtattactgtaataaattagggttcagtgttgcaagtaatatatatagttccactccttgccttctttaatgtcatgattctaattattccccctacacgttcttattgtgtgtgtaaggaacttatatatacgaatgtagctaattaatattgttgtaatttgagttacagctggtaacaa

SEQ ID NO: 29164 - DNA, 371 bp, Medicago truncatula
  Intron number 2 from transcript Medtr1g102890.1 (locus Med tr1g102890) derived from phytozome v7.0 (chr-ID MtChr1; po s 21230225 to 21230595 reverse strand)
ttgtagtcttgtaagtactaagtgattttgctatatgttgtgttgactcttgtgtggagtgtagatcaagaaaaaagaagaagaaaggaatatgcatttttttttatcaatttccttttttttccccttgtttcttttttatccccccgtttgttacacttatatcatcaaaaccatatgttcacttatcatggcaccaactatatagaaagtggcatttatcatttcaatttttgattattttagtctcctgtattaaatgaaaaatcactactgttcatgctgttgagctagagagctttctctcttataaagagaaattgtttattttcttaggaatttgaaagatctttgccttgaaggaactctag

SEQ ID NO: 29165 - DNA, 943 bp, Medicago truncatula
  Intron number 4 from transcript Medtr1g111950.1 (locus Med tr1g111950) derived from phytozome v7.0 (chr-ID MtChr1; po s 23973380 to 23974322)
caggtattacaaaaacagattgcagagaagggaaggtaatccaaatgttgctctcttaatttattatctcctgtttattttcttggtaaataacaaatgtatttttttttttcaaatttagtcattgatagaagtttgtatatgatagaatattagcatcttattagactttatagtcaactatattcatgttaattttattagaataatgaattattaggctggagatcagttttttatcagctgagattgccctagcacataattctctcaactagtctctttctcaacattgcaccagacttgtaccattgtctataacccaatctgttctgcttcaaggttcccaaaacatggaatccccattattgctccctctgtttaccctgctctattttctggtggcagtttcattttctagcgcttttcctagtcagttatccattgttaagagatgtaataaaccaaatgttggcattattttctagtgtcttctcctggtaactgaagcttttgggggattgttaattcatgagatgttacatagccttatcaactggaattgatgagctagttcactaatgctcagacttagacctatttgatggtctcattttcatccctcaaattgatggggagttttcacatttagattagaatattagctttaatctcagaatatacagctaattatgtctttgatgatttgatgagaataatcaattactggttattagggtagagattagtacttagtcagctaggctatgttattaatagtcaactctttatgttcttttactttatttatatatttatatataaattgttatcggcaatcagcccacatacttcttttggaaacccggcaatcagccccacatactaactgaatgctttgttaacagtcactgagaatttctcctgcccatactgttatcta

SEQ ID NO: 29166 - DNA, 1004 bp, Medicago truncatula
  Intron number 2 from transcript Medtr1g117730.1 (locus Med tr1g117730) derived from phytozome v7.0 (chr-ID MtChr1; po s 25349857 to 25350860)
aggttagttggcttttctttcaatgtgtcaatttgtggattgatggtgaatgaaattttatgtttttcttgacatagtatgataaaaattcactgtattgctgtataacctcactttgtatttgcatcttaaaagtaactacaagtgtcgtatgcgcacattaaataatcaagtatagtattgtctattcatggaatttgtctattcaaatccttaaaagttttaaaaattgttctttttaatacaaactttcaattttttgatttgctagcatgttctgttacggtacttgttagccgaaacctttatttaaagcatgttacaatgaagaaaaataggttgagaatcactctgttaatgcttaatgtcactgtctccacttttgaaggagcgggatttgaaacactatggcttcctatcctttatatcttggaaagaaaaaactttgaaactgtttgtcaagaaaaaaaaaaaacttcgaaactgtataactttaataaggaacaagctgtttttggttactaatagttgaaaagcttaccttctcaaaaataaaagttgaaaagcttatactgattgagcattgaggtgtgagcagtagaggaacggtagatgaggtatgctcttagtatcttatctgatccatgcagtttacgacacatatacttggaacacattaaaataactacttgttattagtaagaaataagtacaagggacaataacctacttgttggcttgtttttcatgttatagtatctaagtttttatttaatgtgatggcactaatcttaaccgttttttacaagaatataataagtacctaatactttagagttggactcaataggttttactctgttctcttaaccgttttgtatatttgtgaatctctgttcaaacctttggaatgcataattgttcgtagagactgagatggcttttacttccgcattataactgtaactaagttgtggtataggtattgctgcgagatccaacag

SEQ ID NO: 29167 - DNA, 625 bp, Medicago truncatula
  Intron number 1 from transcript Medtr2g116670.1 (locus Med tr2g116670) derived from phytozome v7.0 (chr-ID MtChr2; po s 27264048 to 27264672)
tagtagtaccaatacagtctttggccagttatgtatacagatgagacaaatcttgcataatgtataagtttatttttacatattagttcgttttataattgaatcaaatgtgatatgatgtaatttattaatcgtatgatcaaaaataaatttgtgcacattagacaaaactacaatttttagcaatatacttaatcaacttattaggtaggaaatgagatgagtgcataagcacaccaaccatttcctgactttacattaattcactttaagctttggtgacatatttttgctttagacaaccaccataatttttgcataaaaaaacataattctcacaaagtcacaacaaggtggaataaagaaagacttgagagtgagaatggaagcatttggttcccactcccacctatttaggcttgattgttggaggcgtaaaccacgaattttgatttaatgggtcattctcattcattactcaacttgtctccccttttaaatcaaagagaagatctaattggctctaattatttgcattctctttaactaaaataaattacgacttttgaatgtgcgttgaaaaaagttagtcaacaaagaactctcaactccacgtaggccgtaa

SEQ ID NO: 29168 - DNA, 927 bp, Medicago truncatula
  Intron number 1 from transcript Medtr1g099260.1 (locus Med tr1g099260) derived from phytozome v7.0 (chr-ID MtChr1; po s 20239818 to 20240744 reverse strand)
tagagtccggaaaaaggtcatattattattggatcaacaatcaaaagaaataacttttatatttttactttatgtgtttaaattacatttttaagatgaattttcctattaaaggatctttaaataatatttttaagacaattgtgaatataacctttaaaattttaagtgaaaattgtctcctctcttatcagtcctgaatcattttttcttttctttttaactcattcaaaattaaaaatttacgtaaaagatatctgtataatcttgaaaagaagaaccccaccaccacaatgggaaacacattccataaaaatccaaagttaatcaaaatgcttttaattttatatgatacaggtttggtattatatcatttctttcacttttctcagctctcctttctttttctaacacacctttacttgactgactattcagctactgtataagctaatcaatcttcgtttttgtagcgcaacaaatgtattatatgaattgtagtttgtcttttttcctttcatgtggacaactccttttcattgtttgaacatgaacaaattgtatgaaaggaatagaagattcggggatcaaaagcaatctatttccgtgggtagctatacaatttgcctcttgatcatcctttaattagggctgctgccactccaccaagacatacaaacttctttttgagttttttatttaactcatgtctttggatagccaatgattgaacttagtatatatttattttcatcggtatgtatcatgaaaattaggatcaagctaacttttgtacttgtgcttgttctttagttgttaggacacaagttaaggatctaaaagaggaattagaacataattttcatataaaattgcatcaagtaaaatagtccaacataagaacaactctaaattttgacaatcaac

SEQ ID NO: 29169 - DNA, 346 bp, Medicago truncatula
  Intron number 1 from transcript Medtr3g067000.1 (locus Med tr3g067000) derived from phytozome v7.0 (chr-ID MtChr3; po s 15255681 to 15256026)
cattgcgttggttctagcttcgggtaagaaacatatatatgaccattcaaccataagtcatatttcttctaactttcaattaacacataaagtaatactattttcttatttctttttcttgcatttaggtttttgtaactttttttaggaaaattattttcttagttgaatagtttgttatatttgatctggacaaaagtttgatataatcttgttgattgttgttaacattttacaaatatatatatatatatatatatatatatattaaaatatgagtattgaatttgtgaattttatttttgtggcaggaccaacaccagttttgagtttctgctttaataat

SEQ ID NO: 29170 - DNA, 463 bp, Medicago truncatula
  Intron number 1 from transcript Medtr1g013110.1 (locus Med tr1g013110) derived from phytozome v7.0 (chr-ID MtChr1; po s 2240855 to 2241317 reverse strand)
tctcagactaactgggaagctgataagatgtaagtttcctgtgttcttcagttttatattttttttttcagtttttaaaaatgggttttttattcatgctaaattttgttttttgatgatttaggttatgggtttttatgttttaatgatttggggttggtttatttcattgtttatggttctatatgtgttgtttctttatgaatgtgtgaaaatattttgatgggtatgttagggttttttagattatgcaagtaaaagggttttttttattttattttatattttatttagattgaatgaaattgttacatttggttgttgaaatgtttgtttcttgcattagggttgttgatattgatgtttatgtgatatacttgatgtaaagatctaagctttggttctcaaagttgaagttgattttgtaacttttgtttgcttgtgttgtgatatttcaggttgg

SEQ ID NO: 29171 - DNA, 373 bp, Medicago truncatula
  Intron number 2 from transcript Medtr3g009860.1 (locus Med tr3g009860) derived from phytozome v7.0 (chr-ID MtChr3; po s 1580603 to 1580975)
tgctgttttttctgcacaattgctgttttggcaccgtatagctgctgttttttctttgctttttgccttgttcgctgttagttgcattttagtgacttccttttgatgcagtgttgtttagcaggcggtggtttggctatgggcctgaattttggtagtttttatcggatttcagtgtcatagcttacgccatagacccatagtgcttcggggttttgttttggatgttacgtatataggcggcatctttgttattcgcttccaccgtctctacgcgtcttgcgagagtttcggttttaataatattttgctgattaaaaaaaaaaatgttgttttagttgataagcagtggactaagtaaagttggattcaa

SEQ ID NO: 29172 - DNA, 654 bp, Medicago truncatula; identical to SEQ ID NO: 27952
  Intron number 2 from transcript Medtr3g166870.1 (locus Med tr3g166870) derived from phytozome v7.0 (chr-ID MtChr3; po s 43772576 to 43773229)

SEQ ID NO: 29173 - DNA, 944 bp, Medicago truncatula; identical to SEQ ID NO: 28547
  Intron number 4 from transcript Medtr3g142850.1 (locus Med tr3g142850) derived from phytozome v7.0 (chr-ID MtChr3; po s 36711408 to 36712351)

SEQ ID NO: 29174 - DNA, 706 bp, Medicago truncatula
  Intron number 1 from transcript Medtr1g108320.1 (locus Med tr1g108320) derived from phytozome v7.0 (chr-ID MtChr1; po s 23060287 to 23060992)
tcacaggtgtttttcttttttgtttaatgatttcgtgttcaatttgttgtttgttttatgctgcattgactcattcttggatggtatagttgtgattataatattttcatggttctttttgctttgaattgacacgtcgacaccagtaatgatctgagaaaataattgaatataacaataattacatgtaccaacacgtgtcgggacactggacacgccttttatgagaagtgttggtggtaaagagcttttagcaacgtctattagttaatactttatattaattttatctttgattagattgtatattgtcttagaaacgatcaagtgttgtggaattccgttttaatggagggaggcatgaaatagttctagttttgcatcttcagaaagttttagcttttagatgctgtaaaaagctttcctttcacaatggctgatataccaggctacctatcagcttgattgagtaatgagagatgatattagtatactaccttgaggtttgaatctgttgatgaaaagtaggataacattatcaagtaataagtacttgatagatatctgtgtgtgggaaattatgtcctgcttgtttctgctgcatgctattactatctgagttttgttacctaagttccatttttcaagcattgctagaagtattgtcgtcaacaattaatctatactgattgtaacctcgtgcagg

SEQ ID NO: 29175 - DNA, 1027 bp, Medicago truncatula
  Intron number 2 from transcript Medtr2g110900.1 (locus Med tr2g110900) derived from phytozome v7.0 (chr-ID MtChr2; po s 26175320 to 26176346)
aaagacaatatcgaaatcttggaaattcactgaaggtaagtgtcctcttgtttcatattcaacttggtcttgaatagttgttataacttatatatgcttcatatgtgttatattttgaatctacttaaaaaattatcgtattcaattattgtatatataacttatacgaagcctatgattttccctttgtataacttgaatttagagggtgccattaagatttactagcgttggaaagtcactgtgtcaccatgtttgcgtatacttgagggcaagtgcaattcgttggcagtattaaaatttaggacaaatttttcagatatttgtgctcaaataattaaaagttttttttttaaggaacaaataattaaaagttgaagttaataattactaagttactcgaatccctatgttattagtcaatagaagttataatataattgagagtatagagtcaaaattgtttaccaatatattcctatttaaaaatgtttttgaagatgtttggtctattatttataaataattagcaatatcaaaagtttagttgctcaatatttgttcgtaaaaaaagttgctcaatcgatcatgtcccttaaaaaaattgtacaaccgtgttcttgtataatgttaaagttaataggacaagttcatatgtttgaatatgcatacatcaaacattaaccctttttgtacttggtgatctacctgtaatcaaaatcattaacatggttgacattgttttgtttcaaaccaaacacctaatatatggttgtaatcaatcattaacctatattatgaatgacttattgctcatgtcgtttgtatccattgacacactcattcaacccctttcaatctagcaatatggagtattatttcacttttcagttctttaatttaatgacaattgacaaaagaaaagtatagagtcactcaattcattcaattattatgaagttctgagtaagtatatgcactgcttgaattcaattattatgtttacaaactaattcttcttaagggt

SEQ ID NO: 29176 - DNA, 561 bp, Medicago truncatula
  Intron number 1 from transcript Medtr2g021320.1 (locus Med tr2g021320) derived from phytozome v7.0 (chr-ID MtChr2; po s 5409295 to 5409855)
aaattgtttgaggtataaggtattctctcataaagaaaatcattatctcttgatattcttttatgggttagtcttcaaaagatttaaaacaaaacttaagtatgaaatagcgtttcatttcggaggataacacattttatgtagttcaaaactttgttgtatataatttgttgaataaactaagggatcttattgcaatgtttagaacttggttgtctttgtattatttgtgttatggtatttcactctacactttaaggtcctgtttgttttgggtgatagttgaaggaaagattgaggaaaggatagaaagtggaaggatttgcaatctttccaaagcatgtattaagccttttttttatataataattaagaagtaaatgatttgttatatactatgtaacatataacactttagattgaaaggttgttcagtttccaacaaatcaaaacatatgtttctattcaataaattaatttttttctcgagttattaatcgtgttgatatgtgtccgcatcaatattttgtgtttatgttagtgtttcatagattatattat

SEQ ID NO: 29177 - DNA, 757 bp, Medicago truncatula
  Intron number 2 from transcript Medtr3g103770.1 (locus Med tr3g103770) derived from phytozome v7.0 (chr-ID MtChr3; po s 25624206 to 25624962)
aagctgaaatcaccgagcaggattcacttcttctggtgattaactaacgcttcgttttcattttcatctcatagcactaaaatcatacggatctgagtttttcttcgttttttgtgtattttatttttgttgaacttctgcattttcacttcatcttcatcgttttcagtgaatttttttatttcttcacttaatttagttttcaaaattgtataaacttcataattatttttttaatttaattcagttttcgctaattttatttgtgttgaactactgcataagttcatcgtttatagctttcactgcattttgtgatttcttcagttaatttaggtttcaaaattgtagaaatgtcatagttaatttgttaatcaaattctacgcacttcatttgctaatatgagcaatcaccaaaccttttttcatgagtaaaaatgttttgatctattttgacatgaattcacaattaagcttcgtttatgttcggtaaaatcagagatctagaagttggagttctcgatcttaaatttcattacattgctattttaagtatttctgagaatatgtaatctctgctttttgaagtttggtttgagtcacatggagacatgttgatttcatggatcaagtttcttcaatttcagatgcattaatttaacactgaacatggaattcgaattttgaaatttcataatctaatttgaattttcgtgtaccagacaaggaatctgctccgaattgctatattcaacat

SEQ ID NO: 29178 - DNA, 301 bp, Medicago truncatula
  Intron number 3 from transcript Medtr3g103770.1 (locus Med tr3g103770) derived from phytozome v7.0 (chr-ID MtChr3; po s 25625004 to 25625304)
acaagtctgttcccgcgttaggtaaaatcactattcagtcctccagttgtttgcgttttttactgtttaatgtttacactgaatcttctagtatttgtccttgaatttaacctataactatgctttaataacagagatgaagatcaaaaagcttttaccggtcgatgcggagtctcggagactgattgattggatggagaaaggcacgtttaagctatattatctgattgaacttatagaaaatgagttttaattgcttgttttgatttgacttattgtatttcttttccaggtgtttacg

SEQ ID NO: 29179 - DNA, 747 bp, Medicago truncatula
  Intron number 1 from transcript Medtr2g033460.1 (locus Med tr2g033460) derived from phytozome v7.0 (chr-ID MtChr2; po s 9124180 to 9124926 reverse strand)
aacttcaacattcaaagaaacaactacccaaagtacatattactaggagatggactggagttttatagatgagtcctctacattgttttaaaaactcccgatgtgggactgttttcattgattcctttataagcgtaataaacttaaactaatgagaccatactactgagttaaaggaattttttattttttatttttaaatctaaaataaacgggccctttatttttttactatgatgctttgtatacatgattcaatcaagaaaccttgtaaagtgggtgatctgatcgagttataaaattccaatagtttacactttgagaaggaatttttgtgctgtatgaactttgttcaaagtatattttataataatagagttttgattttgtgacattattacattttgagtcttctttcttcggggttcaattttattttcgtttctatcggttgataagtttttaattacaattaaaggatgtttttgaactctctcatgtttgttttggtcctgtttctcccaaagtggtaatgttgtatcagttttcaattattaattttcttttgatgcttattaattgttcactcaattaattttgttttgtttctctactaagtactactcccaggaacacaacaatttatacaaaatatgctcaagtataatttttttttatttcttaggagtttccttcttattgttgactgtcattgcgacatcagaggacaccttttaaaggtcctcc

SEQ ID NO: 29180 - DNA, 809 bp, Medicago truncatula
  Intron number 1 from transcript Medtr3g151830.1 (locus Med tr3g151830) derived from phytozome v7.0 (chr-ID MtChr3; po s 40336046 to 40336854)
tcaacgttcgtatttatctatctatttttatcttatgttcttctaaaatgcatatttatatcaataaaagatgaccaatatagtgtgtgacaatgacaagtcctggatatttgagtctcttaactatttagtttaaaatttgatctctagccaatgcatggaaaaatatttgttgagagatgtcaactcttaaaagatccaagttttctcaaagggattagtctttgcatacctttcgtcagttcattgacgatcgttggatagttcacaaaataaacaattttttatttttcttttttgaaagtcagtccaacataccaaacttcaaatctaaatcatttgattttgatttttgatccaacataccaagacaaaactctttttttatgctttttttttttggtttaacactgcttatttagtctgaagtgagggagtggaaagacaagacataattgaaagagtgaatgtgctaaatccattggtcattcattgaaagttagatacaagtatgtacaatagatagctgccaagtccaactaagctaacagaatcattcactaacataactgaaagtaactagtcatagctgattaaccaacagaaagcaaatcattaatgctactttgaacttttgacaataacatcgattttatttgtgatatcaaatacataatttgaggaataggagattcttttcctggtttcctatattggatctgtgtgaattgtgatgaatatatcacagttagtttatttttaaaaaaattccctatgacttgtgtaattgtaggaggagattgagatcg

SEQ ID NO: 29181 - DNA, 512 bp, Medicago truncatula
  Intron number 1 from transcript Medtr3g107030.1 (locus Med tr3g107030) derived from phytozome v7.0 (chr-ID MtChr3; po s 27079540 to 27080051)
gctaaggtaacgaataattaaactcctcctaagtagtgtgacctcctttattcaataaatatatatatatatagttagtacatttgttacatatataatataaattcatttcacgtactttcaattatatatcctttgtttggaaattgagtgggaaagagggagaagaatgtttatgagttatgatttgatatttttgtttttgtttgtatcattattataagtgaagaatgatttgaaaaacttaacaaagtccaccaaacaaaaatttcaaaaaaggattagtatattaattttttttattagttcatatgatatgttagtttctatgacttgattagctagagttggtgatgactttcaaaactatatatatatatatatatatatatatatatatatatatatatatattaagtgaatgtgtgtatttcattaaaaaaatgttaattatatatcgatctttgattgtgaaatgcttgcagcaaaagatagtgatcaaggtgtcaatt

SEQ ID NO: 29182 - DNA, 702 bp, Medicago truncatula
  Intron number 1 from transcript Medtr3g160130.1 (locus Med tr3g160130) derived from phytozome v7.0 (chr-ID MtChr3; po s 42082764 to 42083465)
ctttctctctcaactgcattattgcagacgttgttgtaagtattccttttcattctttagatttccgttatttaaccgcaaactattttgcttttccatttcgaatctctcttttttttcttattaacctctaattaaattaataattctatcaattttcctttttgttctgtctaggtatggattactcacactcattcatttacactgatttacctttttgttattattgttatgaacataatgtctcgtttcatttaatatttccaatttcaccatttctatcaatttcccctcaggatctggattcattcattgcttttgccacaataaaataataccttttttccagcatcacttgtttacatttttttattttaatattctatggggtttagatgtgaaaatcataaccaaaacattgatattttattgatttaatcacatgcacagacggtgtaaatattttttacactgtcagtgtatcactcaatcatattcatatttaactttaacttagcattcatacaaatgatgatttcgtattgattgttagtgtagaaaaatatattgagagtgtatcaaaattattctcttcttttatttgaaaatactcaaatctgatttcctgtgtttcctttttgtttggatgaatgattcatagaaggcgagcttgtgttctattctaggtgcatattgcaa

SEQ ID NO: 29183 - DNA, 1012 bp, Medicago truncatula
  Intron number 2 from transcript Medtr1g120720.1 (locus Med tr1g120720) derived from phytozome v7.0 (chr-ID MtChr1; po s 26056103 to 26057114)
attctcacataattaaggtctacttgacattgaaggtaatgcatcctctacgctgttactcttttgatagtaactcaatctttgatggcattagctgatgcataatagtatcttcaattacttgatttataatgttgttgatgaaatatttatctggaaattaggattgagttgggaaacaataagaagaaaatgtatgcaagtaattaagttttggtgtcataaacactttttggaccttccacctcaacgttaaatggtcatgtaagcacttttgaacaaagttggatgaaaaaagggaccagtttcttacccaaaaaaaaataaaattgatggactaacttgtttacaatttgaaactaaaaaaactatgtatttggcctataattaatgaaattagatacgaagaaaaacacaattcatccaatgtgtaaggaatgtatgtatggatgttctctccttgttggaggacgtggagattctgtctgtatggagtgaagagattatggagtgaagagatggagagatcattccatgccttattttctactgagtaagaatactcttcctacagagttggaatggaatggccggagccagaatattcgtataagaggggaccaaactaagcatatataacatgaaagagctatgcgacactttaattaactctaatagggacatcaactaagtatatgactgagtacgtgagaaaagcacaaacttgggggtgagggggggcggggcatgacaatgttccctttcctccaggctctgccactgaacatttcaagtgtgctccagtttattgagcttcataacttgttttggattcgtaaaccaacaaatcagtatttgttttggccaaacttttcccttaaatttagtttttgttttctttcttttcaatgagtttaactgttaaaacatctactacaattagtgagatattgtgtttcatagagctttcatttcaggttgaaaactcgggcactactcctgcttcagaagt

SEQ ID NO: 29184 - DNA, 569 bp, Medicago truncatula
  Intron number 4 from transcript Medtr3g136520.1 (locus Med tr3g136520) derived from phytozome v7.0 (chr-ID MtChr3; po s 34477363 to 34477931)
gatactagtaagtctcctcttcatttcgttgaatatcgttacctcgctcttgtttagttgtgctctcaattttttttgtctgatcttttggtaatctggttagcaaattcattgtcacgcaacatttatttatacctaacaatcatgatatcttcttcagtcacttaatgctgatcactcgaatgcgttgtttctaactctaaaaatcaatttcagtttacttctgctgtttgcatgttgttagatttggaacatatgagattttagttcttttgacatcaaaaaagtgtactgtaacttggccttgatgtcgcgttgttgatcacttcagtagttcactgtactgtagttttgcatgtcctttgtgtgtctttattcctgtgctgatgagttagtattcccttaagagggaatttttgcattgaagaatgtaatgaagtatatttttttttccttagaacagtttgtccaaggcttttagtcttctttgatacacacttttatttgtatgtctgcattgattcctttcgaattgcttttaacatgcttcgccttattttacagtatcc

SEQ ID NO: 29185 - DNA, 779 bp, Medicago truncatula
  Intron number 2 from transcript Medtr2g025430.1 (locus Med tr2g025430) derived from phytozome v7.0 (chr-ID MtChr2; po s 6746600 to 6747378)
cgcggtaagattttaagccataaatctttattgagttgtataattgatcttgacatgtttggatgttgtgtaaaattgaaattgacatgtttgaattatgttgtggaaaattgattttgacatgtttggttgttgtcatgtaaaatctattttgacatgtttggtcattgtcgaataaatttgattttgaatctatataagtattgattctaacttgaagctagaatttggagcttttgcttctacaattgaattttagcttcaaatttgttgtttaaccctctcttacatggatgtatataaacgtaaatcactttacattcaactcatttttaatcacaatcaattttacaaaatcagtttattcaaaatcatttttataaccgcagaagcaaccatacacttagttttatcatctctatttctttcgttatagtatctttatgcttagcctgggttttggattgttgagagttcatatttcgtctttaatttctggtaatgaaagtccttagttgtacctagttatctgcatttcaaaatctcatgttgctgttatctgttgaagattttcatttgtgttggagttatcaatgatgccttatgcttataataactattggcgatgtgcttagaattgcagaaaaccaaaacaaaattatcgggcagttctaatgtggactgatgctgtacttttgtgatatttaaaatgatataacaagaatggactttaattttgtgcaggctaaaccagagactgtgcagaaggtgtgtgacat

SEQ ID NO: 29186 - DNA, 799 bp, Medicago truncatula
  Intron number 2 from transcript Medtr3g137110.1 (locus Med tr3g137110) derived from phytozome v7.0 (chr-ID MtChr3; po s 34718486 to 34719284)
ccgtaagcacctaatcatatttctgtattaattaattaaatctatattataatcatgatcacaagttagcttagtacaatgcctaaaattataatcaccctttcatttcattcatgttttagggcctatttggattgacttatttcagtttatttactaccataagcacttgtgatattgtttcggagaacttatgaaaacagcttattacatgttcattaggttttttaagcttatttccataagttctccagtatagcttatgaaaacaacatttagctatacgaaaaaaattaactttattttatcttttgttataaaaatagcttacacataagcgtttctcatgataagtgattatgctataaactgcaaattaagttatttgtccacatagcgccttaaattgttttatttgagcttatccattagcataaacacttgtgagagttttgtgagagcttatagaaacaacttatgacatgtccatgaactattttcaacttatttccataaactctttaggatagattaaggatgcaatcttttattttattttattttatgataagcacttttgctataagcgcttaattctaaacaaatggttttctaaaattcattctttttttagtttattttattggggcattgtgttactattggattggagggagtgagaagaagatagttgagttcaattttgctataattgacatgctgtttggtgtactgtttgtgtcctgcttttacccattatgaagaccaggtacaaaagaatatcttctgattaaagaag

SEQ ID NO: 29187 - DNA, 906 bp, Medicago truncatula
  Intron number 1 from transcript Medtr1g035030.1 (locus Med tr1g035030) derived from phytozome v7.0 (chr-ID MtChr1; po s 8503431 to 8504336)
gctggaagcttcagagacggtgaacctgacttcaagtatgctctacttcctcttccttctgtatttactttctcttttcattgcagaatagagcttgtgagtttctcagtttgttcaagacacttctaaattatcataacataatgtataagaatctaagactataagttatttcttgaacaaaagataaaattaagtcaaactactttcgtataatatataggttgttttcgtaaactattttggagagcttatggaaataaaccgaaaacagcttacgagtacttatgctagaagaagctatcctgaaatgcttatgaaaataaactgaaaacaacttatgtacatattatagactattctcataatctcttccatacggtctcataagtatttgtaccaatagataaactcaaataagtcggttcaaacatacccttgatttgtaacagtaagtatcaagtgacttttacggttaggttatcagcttagtaaagtctaacaaactgttatgttggtctaaaccctattctgtgtgtcttaatttagagttcggtctggaactaagtaaaatttggataataattattccaagtagatataaggtgctatctgaacgattcgacctttgttgaattaacttgagtacagtagggttgtgttactgagttttactagagttagtttggtgtcagttgtaactatttcggttctgctagctagctagattcaaatgtaattgagttggttcatacacttgatattgtgattacatatttgtgtctatgattttctcacactttcatagtactacaattctatcagaatttctatggttttttaatcactttttataaaagtgctccaatttcattctgcattttgatttttgttgttttttaaaga

SEQ ID NO: 29188 - DNA, 896 bp, Medicago truncatula
  Intron number 1 from transcript Medtr1g042330.1 (locus Med tr1g042330) derived from phytozome v7.0 (chr-ID MtChr1; po s 9661612 to 9662507)
atcatagagtaccatcaaatcttgtaggtccaagagtctctattgcaagcttttttggcacactcactactagaacctctcgattttcctgcggattttgttaaatttaccgcaggaaaccagtttcctgcgggttttgccaaggctttaggtttccaggtaatacctttggtcccatcgaagaactattatgtgtagacgactctgcaagatataaagaaacatcaattcaagaatttatagtcagctgtataacaagcattaatagtacttctcctaggccgaatttgatgaactagttagcacattgcaagtgaaagtgactatgtaaccttttattttcgatgtgaaattgctcaaattcaggaagtcttactggccaaattactacagacagattgagaaataatatgtgcgaaaaaaaactaatgtggcggctttgtcagtagaataaggatatggattgaattatacatgagttacttcagatttattgttgaactagccttattactaacgtttagactgactacgtgcccgtttgtcctatctttttgttacgatgatcctaatacattacaaacatagtttttatgaaattttgattttgattaaaattataggaactagcgaaaagtctccttcaaagacaaaaacataaaactagcgaaaacatgggcacatctactctttttattgcgctagcgtgtgtagattatcaacattttatagaaatttggtgtaaataacaactgatattttatataaattcttgcgtgtaaattacaaccgatattttatataaattcatatggtggcatccatgataaaaatagaatattattactaaaaacgttgcagtttaaagtagttttttcgtttcacattcttgaaga

SEQ ID NO: 29189 - DNA, 431 bp, Medicago truncatula
  Intron number 1 from transcript Medtr2g034050.1 (locus Med tr2g034050) derived from phytozome v7.0 (chr-ID MtChr2; po s 9450530 to 9450960 reverse strand)
tgtgcgctgagcgtgcccttcaccgccttggaaaggtaaatcatctcatattttcacatttctgtcaccttcatgatccaattctattcttctgcattatggtttcaattcatggaagcaagcataagtactggattttaattgctttggatatgctaacgccacaagtgctagaacattgactcctatttgatatttgagttataattactttggcatgaacacaaatatagtaatgtttaggcttgataagctggcgagagcgtcttcttttgtggttcaattcagtttttgccaatttgaatgaaacattttaatactgtagctatctaatttccttattttaatgacttattttgttcatgatgagtttttttgttggattgaattttacagtacttaaagaggaaaaagcagaaagcattatatag

SEQ ID NO: 29190 - DNA, 284 bp, Medicago truncatula
  Intron number 1 from transcript Medtr3g026500.1 (locus Med tr3g026500) derived from phytozome v7.0 (chr-ID MtChr3; po s 7148577 to 7148860 reverse strand)
agtaatacgaactcgttaggagagcaagggaagaacaatgcactatctagcatcaaataatagagatcgtggttgaagcccaaaaccacttcaaaggaaccaagatgcagtaagacatgacagcatgggcggatctactgttaaacatggtgtggtagatatacgttaagtatatatataatataagtcatcaatgtattgaagtttttttgttagtctaacggtatacctttgatggttggcttgcagatcctgtgttcaactctcggcgagttgcacaggga

SEQ ID NO: 29191 - DNA, 471 bp, Medicago truncatula
  Intron number 1 from transcript Medtr3g025380.1 (locus Med tr3g025380) derived from phytozome v7.0 (chr-ID MtChr3; po s 6544687 to 6545157)
atcagaagaatctcaaggctcagaaacaattattggtacgtatgccttctttagaaattttaaccaagataggtttttctcaatttttaatttcctctacaaaatgttttgaaaatgttgaggaacatcctttcattgttcacttcattcctcatcggttgattgtctctttccatgcttttgtttgttcctatattcaatattggatcgttgttgacatgtatacagtagaggaataatctgcaaaactctataaaaagagagggtggtataaaaattgaaccaattagagaagagtgactgttgaaacaccctctcacttaatcttttatggacccaatttgataatatgtatcaaaataaaggaattttaattttattgaattgcattgaatcacccttaagttatgaaggtttaaaactttggatctttatgttataaatattaagacattttgatttttgatagga

SEQ ID NO: 29192 - DNA, 517 bp, Medicago truncatula
  Intron number 1 from transcript Medtr1g008570.1 (locus Med tr1g008570) derived from phytozome v7.0 (chr-ID MtChr1; po s 814607 to 815123 reverse strand)
tcatcactcacactctcttgttcattgttgcaaaggtacgatgatgtttgtaatatttataagaggtttcacatttcaacaactttttcttttctttttacttgtcttctgctattacaatgctattagaatttcaatcttatcaaagagttctgaaaaactaattttggaattatctctcatgatcaaattgagtttgacatgtttagatgttttttagttgaattgattttacctcaagaattgattttaacttgaagcttgaatatttagcttttggcttctacatttaattttcagtcttaattttattcttcaacctacttttacttgtccaaacatttatgcaatcacttttgcatgatcaattcaactcactcttagtcgcaatcaattttacataatcaattcatttaaaatcaattcatgtctggcaaaataaatttcgctatgctaactataatatttattctactttctttgaagattgactcacttattagaagcagaggatttg

SEQ ID NO: 29193 - DNA, 426 bp, Medicago truncatula
  Intron number 1 from transcript Medtr1g069050.1 (locus Med tr1g069050) derived from phytozome v7.0 (chr-ID MtChr1; po s 13964343 to 13964768 reverse strand)
gacgacaaccacattgaaattgaaaataccctttggttaaaactagaattgcagaagagtaccaattcagtaccaattgaattggagaagagtaacaattccacagtacacttttattattctctaactttggtttttagatttggtttttggatgaatttggtttttggatgaatttgaagagataagttctgttttgttcatgggagaggaagatttatgaggtccattttcttatgttcttgctttctcaagtgaaactatgataaaaaaagactacaatgacaaaatattcaataatgatgagtttgtttgatttgatacaaatgggtttgctgcaaccaagattagattgaggggtggtagaagaagagtgagaaggagagaagagaaaacagttacggtggtgggagtggtcttaagggg

SEQ ID NO: 29194 - DNA, 797 bp, Medicago truncatula
  Intron number 2 from transcript Medtr1g076760.1 (locus Med tr1g076760) derived from phytozome v7.0 (chr-ID MtChr1; po s 15436464 to 15437260 reverse strand)
atcgttgcactactaaaaaaacaaaaattagtgagggaaaacgtaaaatccctctctaattccatcactaaattttgcgaccaaggaatttgtgaggaatttcattttttccgtcactaatttccctcgctaattttgctttttctagtagtgttgctagaggtatgaaatgttctaacctctattgtcacatgcaaaaattaataaagataaacatgtcgttgaatcaactgagaagttgatttgtggcataagaggttatgtcacatgagtgagaaagacatggttaaactaaggaatctaaatatgttgtttgacatgagaaatccacacatgaagagatcactgtcttgttaaaaataagagcaaagtttcttttaggattcactcacctagaagaccataaattttttatttggtgcattgtcctttatgcggtcctttgaagacaataataattggcagaagttcatattttctgacttttgttgatgatcattcaaaaaaagacttgggtttaaaccttgaagagtaaaattgatgttttgggcatcttcaagaagtttaaggtcttaatttgacgtgaaactgagaagctgaagcgcataagcacaggagacttttgacaaaaatttatgcttattgtagagagaattggattagacatcagatgtctctatgtttaaatggtgttgttgagagcattaatataacattggtggaaagggttaaatgctttttgttcgagacaaatcttccaaaatcgttttagggtgaagcattgagcacaattgtgc

SEQ ID NO: 29195 - DNA, 776 bp, Medicago truncatula
  Intron number 2 from transcript Medtr1g108250.1 (locus Med tr1g108250) derived from phytozome v7.0 (chr-ID MtChr1; po s 23029530 to 23030305)
aacgattcctcaggatccgcatcacgttgaacaaggtatgttgaatgatcttaatttctaattttatttattcaaatagacggatatacattttttcgtaggcaaatgtttaaaagttagtgattaggttagtcgttagagttcaaatcctcgttggagctagctaaaactccatattagttattaccatctccttaacctaaatatatataggaattaagaaagttagtggtattaaattggttgacaaatgatattgtcctatagcttcaattcaattttcatgcattgtcagagtgcccattacgaccactcatatgagtaacttcataggtggttgagttaaaataatatcgtttttaaagatctgttggttatgattaactaatactgttaaacatctttatactgtcagggcatatgaattaaatccttgtattataaggttatccttcaagagacaaaatcagtttatgctttcatcgtagtattataatgacgtatatgttgataaagaaataattaatgtagttagatagaaatttgaacaaggtcacataataagagacaaggaaaaacttaagaaagttctatatatttgaacgaatataatattatatatttacattacaaaatagatgctcgatattgggtgcctccggtttgattttggagcatagacattttgtattgtgtcttcccatttttctcatttgaatgaattgtttgtgatggctgcagaggagcaggtaatagaagaagaaaagatagtgact

SEQ ID NO: 29196 - DNA, 661 bp, Medicago truncatula
  Intron number 2 from transcript Medtr2g042150.1 (locus Med tr2g042150) derived from phytozome v7.0 (chr-ID MtChr2; po s 11770122 to 11770782)
gagtcttgtctagtggtgctctaattaggatagtttggggttttttatgttattatcgtattgttgatggacctttgtgttcattttgatgatgtatcttgtgatatgatatttgactctatgtggttgagattttattttctgctgtgacgtattatttacatgatgaactatgtatgaaatgatttaacgaagagtaacaccttgaagtatttgatatatgtcgcattttatatttaaatattatatgtagggtttagggtgttatatgttttatttttaatttcttttttttatgctttttctaataaaaaaatttaacagttttttgttccttactttttaaggggtttagatgaatatctaggtatttattgaatgaagatggaaaacaaagagaaagaaagatggtgattgattttgttcttattttttatataaattttaatcataaaacaaataaatataattaaataattaaatatgtcctagttagtatgacgcgtaagcatattttgataatctaagctggaattgcggaaacaaatacttccttagactaaatacaatggtggtgttgaaaggctcattcaacacttacttagttggtgtgcaatgtagagttgaaaattattgaaagttgatgtggaggagagaggtg

SEQ ID NO: 29197 - DNA, 521 bp, Medicago truncatula
  Intron number 1 from transcript Medtr3g068060.1 (locus Med tr3g068060) derived from phytozome v7.0 (chr-ID MtChr3; po s 15769369 to 15769889 reverse strand)
tgggacatcaagtggtataaggtacgtacgttcctacatacacacatccatactagatcaaatgtcaatgaatttttttaaaacgactaaaactaaaagtttgtatatctagaggggttaaaaacatatttaagtagcacccagtggttaatagaaaaacttagaagacgtgttgtaataaatatgaattgtacttatcatacatttaaaaaatatagactaagattacactaagaatatttaattaatttatatattgattatgtaaaaaaaaggttaaatattaatgaaaaactcagtatatattgagtttttagatagagcagcaattatatcaatatatttttggtaaattagagtagtctcagatccagcatttaacctttacttatccatctaataaataatatctattcatgtatctctttaaactagctagcgttaacatttttatgttttatctatgtgaatggtaattgtacatagtacattaaaggactagcaccagatcatttcaatca

SEQ ID NO: 29198 - DNA, 292 bp, Medicago truncatula
  Intron number 1 from transcript Medtr1g039670.1 (locus Med tr1g039670) derived from phytozome v7.0 (chr-ID MtChr1; po s 9107377 to 9107668)
aagaaaaggagaaaccaacctggaacaccaagcaagtttcttcatataatttatcagaaatatttaatttataaatacttttttttttttggtttcatgtcttacaaataatattttgttttgtgtttgaccaccttacaaataatattttatactaatttttttatttttcttgtcttaaccctaattcaaaaacatgtataagtttatgattgttaaattaaatattataaattgaagagctgtgtctttattaggttttgtcaatttaattaaattattaattattttg

SEQ ID NO: 29199 - DNA, 484 bp, Medicago truncatula
  Intron number 1 from transcript Medtr2g009920.3 (locus Med tr2g009920) derived from phytozome v7.0 (chr-ID MtChr2; po s 2276462 to 2276945 reverse strand)
agctgtttttgttttgtctgtcttcttctccgaaggtacgttgactctctattctccttgccaaagccaaacaatgaatgaactttttagattaaatcaacaaatcatttctcaattacaattacaattcactcattctccattgctattaaacttcgaagaggaaaattatcacatattttagtttaatcgaatttcagaattcatttattttgtttttgtaaattctcttttatttatattatgatttcacatgttcgttgtattatgtgtttgattttttgttttgttggatctattgtatcattctctgattgtttcatatcaaagtctcacacaattgtgtacaaaaaatgaaataatcatttcatctatagctatgatattgatgatttttgggggctacattatccttgcatgaatccataatttgtttgatttattagaaattaattatatgaaatgaattgaggactaattaatt

SEQ ID NO: 29200 - DNA, 607 bp, Medicago truncatula
  Intron number 1 from transcript Medtr3g150600.1 (locus Med tr3g150600) derived from phytozome v7.0 (chr-ID MtChr3; po s 39723995 to 39724601)
ttgagaggtttttatactgtttttcattcactttctttatgttttttttttttttatataattaaaatgggtatattttttcatttatttcatttgacttaattataatatttaatgtgttaatgtaaaaatatatatttactagtttactagatgtataaaaaaaactagattcaatgaattaaattggcttctagtaaaaacctttaatgtgttcttatcaacaaaaaaaatctttaaaaaggtgtgtaattactattaaaatttaatactattttacaatattatacagttactacttgaccacaatttttttttttttttaaggattacttgaccatattaaatatgtattttattaaagttttacatacgttaatggaatatattcaaaccaaaagattgtatattatacataagtaactatatctatcaataagccttgtttttaaaacgatgggttgcattgcttcaatgggttgcatcgcttcaatgaagttaataatgcaatttagtaaaagcaatcattctgtgggatatttttgtgttatatttttctcttttgtgaaaaggtgccataaagaacgtatcgaaaaagagagattca

SEQ ID NO: 29201 - DNA, 637 bp, Medicago truncatula
  Intron number 3 from transcript Medtr1g117780.1 (locus Med tr1g117780) derived from phytozome v7.0 (chr-ID MtChr1; po s 25383763 to 25384399)
aaactccggagaaggaaggctattgttctctccaggtgtgttctgcttcattctcgggatcaaattcaatatccctaatgagtttcatgtggattaactcagttcagagttacttattgaataacttaagttactgcgacagtaccttttagtttagttactccgcattattcattataaacattgaatttccgaaatccaatcaactacacaaattttcgaaagaaattaaaactatttgaaagttcattaaagaacttcaaatgaacgtatagttatatttttttttaaatgcatgtaaacatcgtctgctagattgcatagatacaaattctaattatatgaaactatgtgtacttgatctttaacatagtatggcgataatatctggttagattggtgaaataatacagaaaaaaaagcataatatggtgatagtatccgattagattggtgaaattcaatgtttataatgagttattaaatggaataattcagctttgagttactcctggagtacctagatatgtcttctatatatatgtatataaagttaaatgtgtatctaattatagacatgtttgatgctttgttttagttagattggttgtggacagaagaaggaaaaacacttgac

SEQ ID NO: 29202 - DNA, 665 bp, Medicago truncatula
  Intron number 1 from transcript Medtr3g012840.1 (locus Med tr3g012840) derived from phytozome v7.0 (chr-ID MtChr3; po s 2264654 to 2265318 reverse strand)
gtgttgctcaactcaaacaactctacaaagataaggttgtatctctctctaaaaatactttctttactatgttctgtttttgggtttttcctccatttatacctactcattgtgtaggtagtatttaaatctatttaggggttgtaactcattttatcaagttgttatactaataccaagaataaatcttcattttagtcattaagctgtgtttgcaagttggtttttggagggctaagtctgtaatatcaaaactatattaaaaaaaaaacatcattcagtatgtcgtttgttagtaatttcttgaaaggacaaattcaaggaccaaaatgacaagcggaagatgctttaggacattgtttaagcaatcaaagtagtaacttaaacatagaagattgtgtaattttgacttttactttcaagataaaatttatctatgttccttaaacaattcccttagggcacttgttatcacaaccctttgtaatattggtacgttcatgaattacagcgacatggcctaacatattcaaagacccaaatgactgtttgctataatatcaatgttcaatccatttgattttctaatacaaagtggaagaatgttatactgaaagttttgacctttttgttgggtgcagttcattggcaaatcaagtgatcaa

SEQ ID NO: 29203 - DNA, 859 bp, Medicago truncatula
  Intron number 1 from transcript Medtr1g083400.1 (locus Med tr1g083400) derived from phytozome v7.0 (chr-ID MtChr1; po s 16392663 to 16393521)
ctgtcacaatcaaagccgtcgattcgtggtccctagtatttagtacaattggctgtgcttgttgctcaaatgttcccttttcctcttacaacttgctttttcatgtagttaaagtcaccgacaatcgtatctgtacttagaaatcgtactccacgcgcttcttcaaccgtgtgccatcactctcatatctatttagtggtggtgaaaatctgtcaaaagtacaagcttgattagatgtgtttaccgacacaagtgaatctcatcactcaaactaacttaaaatgcaatttaactcaacctatcaagttgggttcaactccaaccaacctacttcaacctaatgtgtttgattgcacttgtgtcctataatattagatgacattgatagatttaaatatgatcatttttttaaatataaaatatgtggaagaaaaaatagttgaatggatttatgtatcacaattagattagtcaatttcagtgacatttctgtttaattggtacataaatggagtctgatttagattatatgtttgacattttgaatatgtgaaccatataacatttatattgtacctttaaaaaaaaacatatatattgtaaaataatttttaaaaaaaagtatcaccctagcacaacataaatcaaattattttagaagttaaagatttttatgattgtacaaattaatgtttaaattataatatgtattttttgtttgacttgatttgaattgtggataaacttttaagtatttatcaaaattaagtgtcggaaatttttttttttttaattgttcaagcaccacagtgtattcatttaactttattttttaaatttaatagattttctcttttgc

SEQ ID NO: 29204 - DNA, 315 bp, Medicago truncatula
  Intron number 1 from transcript Medtr2g007820.1 (locus Med tr2g007820) derived from phytozome v7.0 (chr-ID MtChr2; po s 1258089 to 1258403)
ccatcatcagtcatcgctgcaaatccatccatcaggtgtgactctgcatgtacctctctttttctctctctacatttcaagttttttcttttattcttttataattttgtactgattttaatgattttcgattagtttttttctatgatagaagatgtttatgaaactgattactagatgtatattcttttgattgaattctgaatcatctttgcatgtgtttttttcttctgaacattgcaaatgattaatagtttaatactcattttttctatgaattgatagaaatcgtgaaagataagtgaaaactgaatt

SEQ ID NO: 29205 - DNA, 595 bp, Medicago truncatula
  Intron number 1 from transcript Medtr2g033230.1 (locus Med tr2g033230) derived from phytozome v7.0 (chr-ID MtChr2; po s 9016484 to 9017078)
ataccttttcaaatacatcatcatcggcgatactggtaattatatcaattaaccctttctaatctctttttcttaatcttaattaatctcaattttttattattattattattcaattctcttaatcatgcgtcttccaacagttccaccttcgatttccgatcggatttattctttttttcagggtttttgttttgtttcagaattatttgatatacatgtattatatgatattgattctcttgtgttattttaacaagctaacaattttgtttattaataaatcatcatcataagtatttagtagttaattataaagaatcgatcagaagcaccagagttcgatcagggactaaattggagtcaaaatgatagtttagggactaaattgatggtttattcaattttgtttttctgatggatcctttattgttagttttgtttcattaactaaaaatgaaaacagctgattgcgttattgtttgatttgtattttgttaattatgtagtttaagttttgatggtggcagttcatgccaagatgacttcgttttttaacctttttttgaaaaaattgtgtaggagttggaaagtc

SEQ ID NO: 29206 - DNA, 985 bp, Medicago truncatula
  Intron number 2 from transcript Medtr2g033230.1 (locus Med tr2g033230) derived from phytozome v7.0 (chr-ID MtChr2; po s 9017199 to 9018183)
ggatactgtatgtttctcgactcattcatagtacttgtttataaatccttccaacttgttcaatgttcatgcttcattactgatttacaaatctgtgaaatattattgctgattcccgtttctaggaattggtaattggttgtgaagatcatttcaatccaggcccttttagtttcaccctgaagatttttatttggttgaaaatgatatttcatattattatcattttatgttgattcgtttgctgattatcatatgaagagctatgcagataggagctatattgggtattaggcttaggtttgatgctgccgtttgtcatatcagtagtctgtcgctataattttgatatccatgccattttgtttcatagaatactctgttaagtgtgatctatagtgtccttggggctaatccatttacattgttgggaatgagaacctaattatttggggatgaaagtatttgaatttatctgtaaaagttactatatatatgaaataaatttatggctttgtagatgtaagataggtttctaaactcatcttctcaagtggtcatggggtatgtatgaatggaaagatttttatctattagatgggagtgtagggtgtgatatgggatttggtaatggtgacccttaaggtaccttccagttttcaaatggttagttttacaagattgacaacagaaataggtcctctcattgaaatttatgtcgccttgttattttgaaattttgtgtctataactctctttataatgttaaaaaatcttcagtgttccacttaatatataaacagagataaaaacaaaatttgacccagatgaggttctgtgaaatttcaacatgattatccagatttcagtggtggaaacattattcatttgttggttgagtttaataaattgtgaagctgaaggtactgaacttattcactatatttcaggcgggtcaagaatccttcagatctatcacaaggtc

SEQ ID NO: 29207 - DNA, 637 bp, Medicago truncatula; identical to SEQ ID NO: 29201
  Intron number 3 from transcript Medtr1g117430.1 (locus Med tr1g117430) derived from phytozome v7.0 (chr-ID MtChr1; po s 25161401 to 25162037 reverse strand)

SEQ ID NO: 29208 - DNA, 695 bp, Medicago truncatula
  Intron number 2 from transcript Medtr1g008470.1 (locus Med tr1g008470) derived from phytozome v7.0 (chr-ID MtChr1; po s 768098 to 768792)
atattcaaaatacatttatctataaactttgtaaggtaaggaagatgttctacaaagatttggaacaaatggacatgggcataagctcaaagacttcaattaattgaataactcattttcatatgtgattgttcttgtagaccacacttttatattataagcatttattatgctttttcttgcataccgatatggatattgaatccaagtcgttaattaataatgtgttcaaataacatttgcttgtattttataacatcaaatgatgttgatgttttgaaatctggaaaatatggtcaacacaatgacttaaattgacaattttcgcaagtgtatcctataaaaagtgagtcaatggcaaccagcaccatgttttgaattatgtttcagaagttggtgttttgatgtcaaatggctgtttttgttacaaatcatgcaactgaatgtatgcattgactcttagttcatggaagcagctaatacactatccttggtggtttgatttaatttttgactttgaaagttgagggttcccttcaccaaagttccaaagaggacttgttttttaataaaaggcccctgatcattcatatataatatggagtttaattaatttgctgaagttctaatatggttattttcttttcttccttttttcagcagaagaccttggatcattttaggcatataatttt

SEQ ID NO: 29209 - DNA, 847 bp, Medicago truncatula
  Intron number 4 from transcript Medtr4g018090.1 (locus Med tr4g018090) derived from phytozome v7.0 (chr-ID MtChr4; po s 3312428 to 3313274 reverse strand)
tgggcttctcttgccccatacaaccacactcgaaggtgatttcagctgttaggctatccatttagtttattcttagtacaattgaatgcttatgttaatgtagtgggtcattgtttgtcaaaacatattcactcccccttccaccatgaaacaaatcacccaattgtttaggtcactaaagaacctaaactgttctttatggttgatttttggatttcttccatcgacaacactattgaaagcacaccaattaaaacgtagcaccgactaagtcactcctatgtaccacatatttggtaaaagataccatttttatttgcactgaagaatattttgagctaggaaactttggtttagtgttattagcaccagagaggtgaacaattatacactacctagactatttttatggcttttggacagttgtcaacagaaaaacataaatataccagattgtttaaaatacttttttaacaaaagggtgtttcatgatgattgtctagactcagagttatctgactatcaagtatccaaaagatactgtaagttttgtctgcatgcaagtatctgggatcttttatcagcagtcttggcctttcacattttgtttcttccatttttttgttggggcgtgatctgcttatttgtctttatcagaacacaaaaatactcagaagtgttgcctttccttaattatcacttattactttctttatatatggcttttatatatactgtttcatctttgttgtggaatagaactccacaccgtttgtgataatgcagtacttgatatttttgccatggttatctaaagaattgctgcatataaaaagaagtctgcctg

SEQ ID NO: 29210 - DNA, 735 bp, Medicago truncatula
  Intron number 2 from transcript Medtr2g038870.1 (locus Med tr2g038870) derived from phytozome v7.0 (chr-ID MtChr2; po s 10954315 to 10955049)
ataaatatgtaagcactatatcctcctgtaatgtttctacttttctttgaatcaagaatgaatagtcaaattggtcatcaaatctcttaataacagaaatggtcatcaaattgtatacattgatcaaaatagtacctcaaattttaaattggccaatagataacaagtcctgaattataaaatattttttaaaaaaaaatccatatataaattttgttagatgttatgatgtgacacgttaattagacatgttacattgcgcacgttagttcaacatcaatgtcctttcgttagactattttgcttacgaaacttagatcatctctaggactaatttgtggataataattacaattatcaattgtgtatagattagttatcggcaaattagtctataaaaatttaaatttcgtagataaaatagtttatgttatcgtagtattgatgtgcgatcaatttgcacgctagtttgaccgatgcttacaatttccataactaaatttcatattcactcttcaatatgatgcactcttataattcaggctcaaaatatgatgtctaaactctacattttcgagtctgttcattcgggccggttaattttaacagcactacttacaatagctaggagtagtgtactctagcaaggaattttaaagtgaggatgttgaatgtgtgtattattttggaaatgtgacagatttaccaaagctgtgaagagtcatacagattaac

SEQ ID NO: 29211 - DNA, 481 bp, Medicago truncatula
  Intron number 2 from transcript Medtr2g018430.2 (locus Med tr2g018430) derived from phytozome v7.0 (chr-ID MtChr2; po s 4856594 to 4857074)
agacactcttgcaccctaagtttgggaagtctttgtggattgaagatatattctgccattaaaattcaaaaatagaactttgtttgctagcaaagttttagaagttaatttatttatatcattgactatgtacagacctatagtttttatactagaatcttctatgttgctaataatgttcattaggaaatgcttaggggtgagagaaatggattgttagtttgtttattgtgtttcgcgcagcacttcattaggcggtttgacatggctgaattaatcattaaaaagttaaaagcaggttttactaaaatagatgaacatcatctcttgtaataggttttgtttttgttacttacatatttattttcttgaaatatcatcatgaatcgagagtttagtctctttatgacaaaaaaagtttcctaatagaagttgttattctgcagttactgctctttcttctctcacacaatcctggaac

SEQ ID NO: 29212 - DNA, 942 bp, Medicago truncatula
  Intron number 1 from transcript Medtr3g164100.1 (locus Med tr3g164100) derived from phytozome v7.0 (chr-ID MtChr3; po s 43231891 to 43232832 reverse strand)
gctagtgtgtgaattgaggatgttggtatagattaatactagatgccatataaaaagaatgttacttttacgtgtgcatggtttaaaaaccaaaccaaatattggttttggtttgattcctgaaacaacaatccaattttaaactaatttttttattcaaatccagttttagcccagtttcctttttttttttttttttttgtaaatactaaatttcattccacaacatatatctaggcaaggtcatggttatcttggattgttccaaactaaaacttttgtacacttaaaaaaacagcaatatatagatcatagatcatgtcagtaatgatcctaaatgaaatcatccataagtttttcaagtcacagctaaatcattgtataataatagtaattacaatcatccaaaaaaagaaagaaaaaaaaactaaataaatcttgactttaaagacaatgtcaagggcatttgactccagcctttgattaatttctccaacgatatgaacttagatccatacccattaactctgtcataactgcatgataggaagaaaggttttagtacaaagaaaaagggcattgtgaaaaagattgaagcttacatactcaaatgaaaaaagattgatgcacaattacgatgcatcaacttcttataaattaagtttcccaaagtaattagctttggctcagcagtaagtgttcaagtacacaggaatcaaatgcacataagtctaagtttcaatcacgcatgttaggtattaatcagttacactaaaactttctggcctgctcagattaatcgttgagatctaacagttttactaatatacattaagacaaaaaatggatgagagaaataccttcaatcatcatcaagcctcacataagccgaatagccatcaagatttaatttttggttgtgaaattttttagggtgagggg

SEQ ID NO: 29213 - DNA, 661 bp, Medicago truncatula
  Intron number 2 from transcript Medtr3g092220.1 (locus Med tr3g092220) derived from phytozome v7.0 (chr-ID MtChr3; po s 21631598 to 21632258 reverse strand)
ggtgtccactgatttttgtctgttttgctgttgtttttattggcttatagtgtctgtaaactttgattggtggtgttctttgcactccttctgcatggggcttcccgttgttgattatatatataacattttgatttctccaaaaaaaaaaataataataattctttgaaataaatgattcagtttattaatgttaaaaataaaaaccagttggaacgcttattataatataaataattcattattttattttttgagggatataaataattcatttttgacatgattaatgttccgttgttgtaatgatatatattcgtttaattgaattactagacatcaacttgtctgggtggtgtagtcggttatcacgctagtctcacacactagaggtccccggttcgaacccgggctcagacatttttttttcttctttttttgtacttcataactgacatcacgaggcccgtgggcccaatatgaatgaaatcatcgtttattcagtttcacctgctgaactaacctgaaaagtcaagggtttatagcgattctactgttttccaattaacgaatttcaatttctaatttttttgattactcgtagcgattatttggtttctatggaggaagattctcgtaccagtagcagcaataccagcca

SEQ ID NO: 29214 - DNA, 471 bp, Medicago truncatula
  Intron number 2 from transcript Medtr3g138320.1 (locus Med tr3g138320) derived from phytozome v7.0 (chr-ID MtChr3; po s 35350887 to 35351357 reverse strand)
tggcattgccgctttggtataattcagataacgtaagtgtaatttttttaaatgttttttctttatgtttaattattttctttatatgtgtgtttgtttaattattatatcaacttttatatgtgttttttttttaattcttttctttatgtttaattattttctttatattttgtttatttcaacttttattgttttctttatgtttaattatgatttaaattgtttttgttatgtgttttttttaagttttacatgggttatgtcttaaattgaaaatatgtgcggcaatttaaatttttgatttttatttttgcatttgttaagttttattttgattacttaaatgtttacattgtttaaactatgtttatttttctattatttcagtgtcataagaagcgttatataaaaccgaattaatcatggggctaagattttaagtctcggacgtccaaacgggaatcaaga

SEQ ID NO: 29215 - DNA, 781 bp, Medicago truncatula
  Intron number 2 from transcript Medtr2g022170.1 (locus Med tr2g022170) derived from phytozome v7.0 (chr-ID MtChr2; po s 5848521 to 5849301)
cttgaaattggtaattccaacttcttttccaaattgttcacttttagatagttttacaataagtatttgaaattgttgttagtaaaattatgcttagaaacaattaaatgatatgtttcgtatggaattatcttttctaaaatgcaaagtcaacgaataactctttgattctaatactaattgttaatttattggtttagagagcaaatgtatcaaaactcttcaatttatgaatgtacatgctctcaatgttcgtaatttatgttagtttctagggtttgaattcttacatccttgttattattctctccgtgatcctcctcaactcaccaactgagctacgatctacaagaaataaaaaacaaattgaaaataatgtgatagttccataattaatattgattgtagaaaatgaaaacagaaccatttattcaaaggctaattcttgatattttctcaatattgttcatagacctttttctttgttactaaatgttcatggacttatcccaacttctttcttcatgtagcctagcctaattaaccattatatagttggtgaagatttgtagttataattcatctttgtaggaaagaaattcaaattaaaattaggaagatcaatagacactgcaatgatactaattgaagtgtcaatgtaaggaactttactgatgtggtaaaatgatactaattgacttaagtttcaatgctataaactcagtgaataattgaaccgttaatgttacaggtcctcttgagttaaaaaaggaggaataca

SEQ ID NO: 29216 - DNA, 833 bp, Medicago truncatula
  Intron number 2 from transcript Medtr3g109510.1 (locus Med tr3g109510) derived from phytozome v7.0 (chr-ID MtChr3; po s 27437001 to 27437833 reverse strand)
tttttcttaggttatccgtaattgtgtttttggactgttggctaaaaagtgttaaatttagatcagtggtagtctgaacatccttttcctgtcaaattagcctttgttccttttgcttaaacatttatgataagtatttatgctattagcaattagttaagttgtttatcaaaaaagagcttgaatgtcttctcataatatcaatggtgctgatttaatttcagtgtaattttcaacacactatttggcctttgcacaagcttttgggtggctgtgatttgtttttggaggtttaaatggtttgcttggactaatgaatgtatcactcaaaacactctatactaaatgtttggcttagtattcttgaatatcttaatttatttttatagtttgtttatcataaccttcttcattaataggcttattcttctaaaatctgtagagaagaatacttgtgtatatgccttaaacttttgctcgttgttttgttcttcgtaaacactctcatttgattatattattcaattcaatttactctaacatgttactctcctttgtgttttggtttctagtaactcaaaaattcattctttttttgattagttgaatcattatataaggcctttttcatacttgaaatatgatcattgcctttggattagaaagttacaatcaatgtatactatgatcagatgcattgtctttcatggtcaattctttgtctgtgcttcaatttttattttttatttttttgctttgtgtcactgaatgcatacaaactattttatgagaaaaatgaaacttgtttcttttgtaattggctttttaggtaa

SEQ ID NO: 29217 - DNA, 906 bp, Medicago truncatula
  Intron number 1 from transcript Medtr4g018960.1 (locus Med tr4g018960) derived from phytozome v7.0 (chr-ID MtChr4; po s 3760045 to 3760950 reverse strand)
aacctcttgtggcctcaaggaaatccaacttttaggtaattaattgttttttattttattactatccatcatatatatatatatatatatatatatatatatatatatatatatatatatatatatatattatgcgtcgtttgatccttgtagatgatcccgcttagtgggataaagcttcgttgttgttgtacatatgtgtatgcatgtgtgtgtgtcccatttatatgaaaaatgggaaagaacaaaataaagaagggttatgttgagggtgaacacaagctctcctttttaattgatgcttaattgtttttctaaccaaattcaaacaatcgttaatatgactaaagacaaatccagtagaagaaattacagagcaattgttattccctaaacatagactacgaccaatatctttatttagagtcaaatttcttttcaatcttgtttgacgttttttatcctcaaaaattgaaggttgcctttgatatgaattaattatcatataaattacaaaaatctgaacgattcgtggtggttccagaatcattgttgacagacgttggcgaacgctctgctgaatccgactttttttaagtatttttagttttctcgtgaaatggtttaaaccgtaggattaattagtaatcacagctgaggtttgtaaggaaaagcacttacatgtgtcaacggatcctatctcttactagacatgtacggtcaaaattatactcttgatttcagccataacatgcataaatatgtaactatttaattttgatttatattttttatgcaaccttttgatttatatcgaagaaagtttacattagtaatttttgtttcaaattattttattatttggtaacttttgatttatatatatgcagtaagtcattaacttcc

SEQ ID NO: 29218 - DNA, 544 bp, Medicago truncatula
  Intron number 1 from transcript Medtr3g086430.1 (locus Med tr3g086430) derived from phytozome v7.0 (chr-ID MtChr3; po s 20205874 to 20206417)
ggagttcttgcttacaagtatatattaacatctataactctcacacaacatataactatagttagattttttagcaaacaatttatcattctccaatgtaggacttgactttcttcttccatataatgtttataattggaaatccacataatttttatatattatacacatgttattatttactttatgaattcatcttcatgtaacatatttttcgtttgcaaaaaaaacaaaactaacattcgagaaacataaagggtgttcaaggaacaaaagtgtatttttttcaactaccattttttctttcttctagacacggacaaagacaaaacggtcaaacacactattgaaactccacttaaaatgtaaaaattggtcataagaccgaggaacagatttcctcttgtgaatactttctgcagttttctacggtttaacatctaaaccattaagtacattatctctattcattttgatatttaattcctcacatgtaattattatttaatggctaggattacactggacttttcgatcacaagag

SEQ ID NO: 29219 - DNA, 564 bp, Medicago truncatula
  Intron number 4 from transcript AC235678_17.1 (locus AC235 678_17) derived from phytozome v7.0 (chr-ID AC235678; pos 89135 to 89698 reverse strand)
accgacgaggaggattcaactttgaagaatttgaggttgatagcatttaagtcttaatagaattttttagctgccaaatttttgttttttgctattgctttgtttgtttacttaacactcctaggtttaaccagttaaaccgaccacgattcaactggttcagatccagttcaatcagactacaatgtaatctaaatcaaacaaattggaaaactgatcgatttccggttcaacatgttgaactgtccggtttggctcagtttttaaaacattgctacagagagatatgataataaaaataatatgctcataaaggctattaatgcatttatacacatgctcttatattaacaatgtgtgttgggtgaaggaaatgattttagtcttttttaaataattaagcctattcttggttttgaaactttaccaatttaagttatactacgcatactttcttatcattatgctgatgtgcttatattctttatttaccatacaatttcttataagatgtttatcatttgtatagattgaagaagcaggagcttgccgcttttgctgaat

SEQ ID NO: 29220 - DNA, 951 bp, Medicago truncatula
  Intron number 1 from transcript Medtr2g026570.1 (locus Med tr2g026570) derived from phytozome v7.0 (chr-ID MtChr2; po s 7289107 to 7290057 reverse strand)
aaagatctcttcagcctgtgagttatcaatccatctcgccgatgggttgctgtttcttcctcctttcaaaattccacatcgtaagactactgttgtaccatcggtaagtcccattgtgttgttgtttgttctgctgaaaccacaacgcttagagaagcttggatcaaagcagatcccaggttatatattttactcacgatatctagtatctatttatgctgcttctgcataccacacggtttctatatatataaattaaaaataagacttctggtgatatataacaaaaggtaatggtagtttttgatatagtttccaagcacttttctcatggacatattttttgaagtcgtatttgatggcataattgttttatcctgttgtaagttccattatcaaatattgacctatatgtgcctttgatttagtttccaaattaaaaccactcatgagatctttaatttttgctatttgtgttactatctactgttccatttgcgctaccatatgtttttaaacctttctgctattcattaatgaaatttccaccacatgttgttaatctactttatattcattaatttaactaatagtattggaaagatttataacgttatattcaccttgttagtaacttattcatcataatatgcacactcctgaatgtatagttttaatattgctgcttcttggttataataaagcttgcctatagtgaacctatagtgagcttattcagttactatttacatacgctgttagttttcttctagaaatcatcataatttatggaacttgaaatatcaacataatactggagattctcagttatttatttaactatttatgatgtgtatttgatttggccggtttcgatatattgcacaaagcgcccctggaaaagacaaaaatgcagtgagcgtggaaccggtaaaactgacccgggccaca

SEQ ID NO: 29221 - DNA, 827 bp, Medicago truncatula
  Intron number 1 from transcript Medtr3g097500.1 (locus Med tr3g097500) derived from phytozome v7.0 (chr-ID MtChr3; po s 23351327 to 23352153)
ctctgctggtgatattcttgctattcctattcctggtaatttcattttcatgctttagcttttcagtttctgtttgttttttgctttgtttttactttatccacttgcattacgcttgtgtgagtgtttcagagtttatgtaaatggtttaggatgtatataagctgatttcaacttatttccctaaattatagcttataggaaaatagtttgatttcatcggtaaagcctagctcaattgacaatgcataagttgtgtgtataagtttcatgtgatgttttgtgttttttgtcactttgtctacttaccaacaaaattggtttaatttcattttatcttttgtcataaaagtaacttgtacataaaactcatttgattagcacttatgctacaagtgcttaatttcatcttcaccattaaacctttcaaattgtgtttgttttttgttttgtttttctttgtactttctgtaatttagggtctgtttgtattaacttgtctgatattatccacgagatcttacgaaacaacttacgacatatataagttgtttttagcttacttccataatcttccaggataactcatgaaaacaacttatagcttataggaaaataatttgactttattttatcttttgttgtaataattgcttatacatgagtgcttatacaataagcacttaatgctataagcgcttgattaagttgtttatccaaatagtgtcttattcagtctatgctgtgaatgtaatgctcttttattgctaacatttgttcttcattttgtagcctgtgcatcaaagtttccgaaagattctgctgat

SEQ ID NO: 29222 - DNA, 863 bp, Medicago truncatula
  Intron number 2 from transcript Medtr4g022280.1 (locus Med tr4g022280) derived from phytozome v7.0 (chr-ID MtChr4; po s 4487603 to 4488465)
gttagcttccacgaatttcacccttgcattttcaggtaatcagtaaattgtatttaggttttgattcaaatttcagcaatcttttatggtttctgtttatagaactatgctctgttagtatgtttggaatatttcagcacttcacttcaaattccttgaccaatctaaatttgaattattgtgaattataatattttggatcaatggaacatttaatgatgtgtttgtgtatcctcttctacatgctctctgcatctttatgttgaaatttgtctactatgaggttttccctaagatcttagctaagtcttttattaggtggatgataaatcatataggttgatctgggtgtagccttttttggaaatatttgttgttgtagcttgtttccttttgctgatcatgattgtcagatgctatgcataaaaaacaattttttggtttttgtgcaataaaatccttataagtgtgtgttttattatctgtctaagaaaaaatgtacaatttgggtctgagtctacatttattattacactataagcacctacttaaatgtgcaagcacagcctatatgggcatggctcaccataatgaccttttttctgatgacatttgcatgagttgtatttgaacctagggttccttcattcaaatcctgctataaatcctttttgagtatgtgatttgcattggggtaatccttctatcatcctaaactttttgagtatttgatttgcatttgccttgtgactaaataagtagtgaagtttgaattttgatgctctttttgattttattttgtttactatctaaaatgatacgctttgtgcagggaacaaggtcaaacagggggaggcactggt

SEQ ID NO: 29223 - DNA, 700 bp, Medicago truncatula
  Intron number 1 from transcript Medtr3g135980.1 (locus Med tr3g135980) derived from phytozome v7.0 (chr-ID MtChr3; po s 34167739 to 34168438)
aaacaacagtagaagcgaatcgaaacgaaatcgacgtatgttattcacaatattttcttgaatgtttttttgccacgtgtcctgcattcatgcaaccgaaatagagtgaatagatgaaaagggaaattaaactctacttctatctataactctcatattttattttctctcgcatcctttctctccatatttttctacactctcattttttagcctaaaatcgtaacaaatcgcaaaaagataaagacccgtttgttttgatatttttttgagaaaaaaaaaagtattttcttaaccaaaaaatcactttatttttatttttatagtgtttgtttcaaatttaaaaaaaaaatacattttattaaaaaaatcatttttagaatcaaaatgaaaattttatttttagtagcttttccaaaatatatatatattttttcttctaaaaacaaggaactcacgtgtaagaacttcaaatcttaaccaaaggacctttaaaaatctctaaaacaaaatctttaaattttttaacccaaaatctatttatggtttaagctgaaacaaacacattcaaagaatcattgcgttttgagaaccatagtagtagttgtatgtactacgtagtgcttacacatttttttctttccatatactgattgatgtctctgggttaataccactttgaagaatatatctttccatt

SEQ ID NO: 29224 - DNA, 1029 bp, Medicago truncatula
  Intron number 2 from transcript Medtr1g022850.1 (locus Med tr1g022850) derived from phytozome v7.0 (chr-ID MtChr1; po s 4916207 to 4917235)
ccttggttttaagactcctagggaagccattgaaggtttctttctcattatttctaatttgtcttttatgaatttacttaatgttctgttagtgatgtaatagagtaattatgtactggtaaactctcatttaaatccagtgtgtttttagaatcataggtagattgatttatccataggtttgtatataagaaattgtaggtactgagattgtgtgaaatagttgggaaatagtgatttattgtactaaaaaagacccaattggtgacagtcacttttttcaggagcttatagactatgtttatgagtttatagcagtttgtgataaactagtttaagtagcttatagcttgtcactttatttcaattctacccttgcaatcttaattgagtaacttatagcggtttgtgataagctagtttaagtagcttatagttcattttactaaatgcacacttttttaataagctacttcaaccgttaatttttaccaaacagagccataagcttttttcataagctatcatgaagagcttatggaaataagctgaaaacagcgtatgaatatgtccttaactgttttaattagtcgtcgcaaatcatgtcacaagtgcctatgtcaatagataagctcaaataagccaattcagacagtccctaatcttctttaaaatccaaactttggtgtgttactagaataaggatcctctccatttgactatgaatggaaaatgcaatttggagagagattgatgcataaaatagataatggatcctaccactatgtgggtcccaccatcattaattattttatattttttcaaacttttttgtgcctttatctctctaaatggaagaaatggagatagtaataaatggagaggatcttaactcacttgtattatacaattccatgtcatgtttatgttaccaatttatttatataaggtcctttgtttttgttatctaatacctttttttttaatcttataggaacctatattgacaagaagtgtcccttcactggt

SEQ ID NO: 29225 - DNA, 673 bp, Medicago truncatula
  Intron number 1 from transcript Medtr1g083520.1 (locus Med tr1g083520) derived from phytozome v7.0 (chr-ID MtChr1; po s 16460211 to 16460883)
tggtgaaacggagggctgctctccccccagactaggtcaatttggactgaactagatcaacaaattcttttgtgttctctcttattttctctctccctgttttctacttttgacttgtgtttataattgtttcatacactttattttggttgcttgattatctcttgctccacacatcaagtttgtattggtgtgatttttcatcgaattcgcaacaaatagtggtagtttttacattcataaaatgtgttgatggaaaaaaaaattgtgaagatgagcgatatatgattcaagtgagaccttaacggttctttgtttattggtttaatgttccaagtttttgaagagaaaatttgatgaaaaaattgctataaaaatgtaaataggcgagcatgtaatcataagagagtggaaatgtaacgataaaggtaaaacaatattgtattattaaacacacatgattgagttacatacattgttcatataaaatagtcggtaagatatcttatcatatgtgaatggatgtgtaagaaagttttacaaaatgaaaatggactccttcgtatgaggaaataattttaatatttgcaaatgcaatgaggacatcctaaaggatattgttagtttgatggcctcagttgaagggctgaatttcttggatctcgaagttcta

SEQ ID NO: 29226 - DNA, 855 bp, Medicago truncatula
  Intron number 2 from transcript Medtr3g077220.1 (locus Med tr3g077220) derived from phytozome v7.0 (chr-ID MtChr3; po s 18168198 to 18169052)
gattctgaggtttttatttttcacttaccattttacattcaaattatgatgtttttttaaaactgttgtttttgaataagctaaatgttattagttttaattttataagctatcaaaaattaagttttgttttatgtttagtgctaatatttgttgagatatagttaaggattatgaggttcttctttttaattttacattttcactaattttgaaccttataagtaatgatttggttttacttatgttgttgatatataacattgtcactttaaaaaggtgtgttatatgttttgtgcttatattataaagatgatgattaaagttaaagaattagtaatttttataatgaatcagaaagctattgtattatgaagaatggtgaatgttagattatggttttagctatatcttgaaaactaattctaaatttttgaactttatataggggagtaggattcatgcctcaatcaaaaaaactctatggtataagtttcaatctgaaattcgcgaaggcaaagtttattcatttgaaaacatgggtgttgctgctaatggggggagctataagaccacccatcatccatataagctgaacttccaatttggaacaaaatgtttgccattgtttggtgcattagtgagtggttctgattttaagtttgttccaatttctgacatagtaggtggttcttatgattgtgactacttggttggtgagtatatatgcaaattttctgaagtttttgaagagtattgtctttatcttacattcttagcatttaatttttttttttatgtatgtcaaattagatgttattggaatgttgacgggtgttggcacagagagagaat

SEQ ID NO: 29227 - DNA, 689 bp, Medicago truncatula
  Intron number 3 from transcript Medtr3g077220.1 (locus Med tr3g077220) derived from phytozome v7.0 (chr-ID MtChr3; po s 18169107 to 18169795)
ggtagggaagtttaaagttttcttatgattctgactaagcaatattttatatatcttacattcttatattttttttacccatcttatagatacaagcttcagtgcactttgtttgggacttatgtagataagttgaacacgtttttggcaactggtgaaactgctaatgttgtagtgtctattcaactagctaaggtgaaggtttttcaaggtattataacttatcacattaataatgtttttgtttttgttgaaatattatcttttatcttttattatgtgaacttattgaaaactaattctaaatttttgaactttatataggggagtaagattcatgcctcaatcaaaaaaactctatggtataagtttcaatctgaaattcgcgaaggcaaagtttattcatttgaaaacatgggtgttgctgctaatggggggagctataagaccacccatcatccatataagctgaacgtccaatttggaacaaaatgtttgccattgtgtggtgcattagtgagtggttctgattttaagtttgttccaatttttgacatagtaggtggttcttatgattgtgactacttggttggtgagtatatatgcaaattttctgaagtttttgaagagtattgtctttatcttacattcttagcatttaattattttttttatgtatgtcaaattag

SEQ ID NO: 29228 - DNA, 446 bp, Medicago truncatula
  Intron number 2 from transcript Medtr1g094100.1 (locus Med tr1g094100) derived from phytozome v7.0 (chr-ID MtChr1; po s 19387677 to 19388122)
agccagaacactggcaagctcaccgagtgtgctgagtaagaacagttgatttgatttgtgtttatcatttcttcataagtatacttcaatcaaattattgtcactttctgtattttgcaggctttttctaagatgttggagtaggataccccacaaaccttaataaaataaagttctttttttttacagttctatataatcattgaccagagtttcaaaacattatgacttgatgctaaaaagtcacaacctttttggcaaaagcatcttcaaagttttatcataagtaatagcttttttggtgggggagggtggtttatcagagatgaaatttgtgtttgcttggcttgagatagaagaataccaaaacaattattggatttttccctaaataatcattgtggtgctatattttcaggaaccaatcaaggcttcagagaaatctc

SEQ ID NO: 29229 - DNA, 721 bp, Medicago truncatula
  Intron number 1 from transcript Medtr1g146840.1 (locus Med tr1g146840) derived from phytozome v7.0 (chr-ID MtChr1; po s 32601186 to 32601906)
accgcgcagacaatcaccatcgtcctggtcgtttcgtatgtattccaattccaatcaattttccatatcaatggagtttcgaattcttatgttattttgcttttcttttctgttgcattccatatatatatatatatgcttgttaaatcaatcaaggattttcaccttgtttataacttgattgatttaacatcaatcaatctcatgttcgatggccaattacctgcaaattttattataattctgcaattcacctacttttgtaaatccgaaattgattacattcagaattacaaaagattgcatgaatttttaaacaacaatattgtgtttatgtggggtcaaagatcataccaaaatatagggtgtgtgcgagtcgagcactatttcttcccgcccatcaaacatatagttattctaggatttggcgcgacttttggatttgcggcgcgaggtttttaccatttggatttattcgccattaattattaccttgaataaataatatttatgatataataacggccaatgatttattcgtcatttggatttatttgttatttgggaaatggacatttattatagagatacattaatcttacccctatttgggtggttttgagatcagtttgatttttgaatagcgttataatttggatatttatatgtctggtgacattatgcaggcgcatacgactcctcctgattactttgttctggg

SEQ ID NO: 29230 - DNA, 257 bp, Medicago truncatula
  Intron number 1 from transcript Medtr3g104460.1 (locus Med tr3g104460) derived from phytozome v7.0 (chr-ID MtChr3; po s 25967437 to 25967693 reverse strand)
cagaaactcatcaattcctttctattttatcttttgttaaactaaaaccctatcataccatttttctctcccactccttctttcccatcttcataagccacccaatcttatgtgataaagataaaaaaaaaacccagaaaatcaaaccctctccgactcacctgactccaccgtcattaattttgatttcgtcatcatcctcgtctctcttcaaccacacaggcgtcaagaagaaggttctcctctctcttccaaag

SEQ ID NO: 29231 - DNA, 644 bp, Medicago truncatula
  Intron number 2 from transcript Medtr1g014010.1 (locus Med tr1g014010) derived from phytozome v7.0 (chr-ID MtChr1; po s 2806192 to 2806835 reverse strand)
gtcctgccaaaatttcgtatttcttcactcactatgtcttttttatattgttgtctttttggggggaattttattaaattttaaatccattgatattttattgggtatggttagatttgtggatggagatctatgttatgtagtattcacatttcacattgaaggcttttctgacaccgatacagtatgtaatttacattcaatcacttcaatttttgtaaattattatcggtgtctacgtgtcaggattaatatattttgtgtatgtgtttggtgttccattgatgggattgaacataatggaattacaatgttccattttttagaacatttaaaggacaaaacttaccttaagttatggtaacctaacctatgtgttgttctccactaaaaaaacattccattataagacaaagtctttttgtccatatattgtattatgtttttttgatagagaacaagagtcaagataccacctaactgacctatgttttgtctttatttaaaatagtgaaattcatcattttatagacaaacttctttagcaaaagttgtttaattttccacactctgttgtgtgattatatatttgtaattttgcgtaaatatataattaatagttaattttggtttgtgaaggccac

SEQ ID NO: 29232 - DNA, 600 bp, Medicago truncatula
  Intron number 2 from transcript Medtr4g018520.1 (locus Med tr4g018520) derived from phytozome v7.0 (chr-ID MtChr4; po s 3603166 to 3603765)
ccactaagttgagcagtgctggtcttgtttataaggtaaatttctcatccaaacaagtaaaacctatattttatgaaatgctggttgaattgaaataaagagaaggaagaagttattttaatctagtttggttcaaaatgaagacgagggtaatagaggggattaaaatctgtcctcactcaatttttgcttccatgcaatactgagagtatttggagggggttatagaagatgatctctgtagcatcgacacttttgattgatgatgtgtctggtgcctgacatgacatcgacacatgtgattacattcaattgtcattttctcaaattattacacgtgtcaaggtcctgtctaagtgtttcatataagatgaattttaaatgttttaaatacattgactaaaatattcttatgcaaaatgtagtataaaaggttttaagggtaataaaggtaaattagttttcaagtccttccctcctctaaccaaattgttttttgatgtttttattttgaatatcatatagcttaataattctactatgccttcttttttccctcttttttcggtgtgtagcattttggaaaagagattatagcta

SEQ ID NO: 29233 - DNA, 973 bp, Medicago truncatula
  Intron number 1 from transcript Medtr2g091950.1 (locus Med tr2g091950) derived from phytozome v7.0 (chr-ID MtChr2; po s 20897441 to 20898413)
acggcacaatcacctttccttcttgtcttaaacaggtactttgggtttggtttaatttgtttatgcttttaattagttagaacttagaataatttatggttttgaaaaaaaaatgatttttttttgttttgttttgtttagatttagcgcttttgaaagtaggtttgcacttggtactaataatttcttgaatttattaattgttttaggaaatgattatgagattaattatggttttacttgttgaagatacagcagaatggttcaattagtgttagtagtaaaagggtttattggtgagtggttaattatgtttttgttgtgaggattgttagttagttagtgattttgggatatttgcattagccatggaagctatttgataatgtcttaatactacttgggaaattgcatcagtagttgaatagtaaggtgttttgttacattaataaggtgtttgttaaacaggttattagtattggtttattgtagttttatgtgtttgatgtgcaaaagaccgaagaatagtgtttaggaatcaaggaacataaatcattttatcttaaaaaagtgattttaggataaaatgatttatgtttgaacaataaatttgagtgtaaaaatcgcgttagggggcaaaaactaacattccattgcttcacgttagaaccaattctcgaggaaaactcatttctaatctaaaacctgctaataataccaaaatcaatttaatggtttatttttgcaatactttcttcaataaaggatggtaattgattatggtgaatgttttctttgcttgtagtgattttacatagtgttgattaacattttcttcaattggtggcctgtaaatatctggtttgtattgaatgggacataagttgatttcgggggtttgaagtttgacaattttgttatgttttgatgacttacagccaggaccacgtgatcttccccatcattgtcttat

SEQ ID NO: 29234 - DNA, 765 bp, Medicago truncatula
  Intron number 2 from transcript Medtr1g106300.2 (locus Med tr1g106300) derived from phytozome v7.0 (chr-ID MtChr1; po s 22131033 to 22131797 reverse strand)
atcttcagcttcaccattgggtaaattcatttgttagtttctgtgaaatttatgttagccctttatgttatcttggagcatggaaatattgcctattccatggtagtcaacaaccgcattccgatgtatatccttacaccacccaaacagattgcatgaagtgtttccttggttgccagaataatgtgccagattcacaagatccccaactccgttaaatttataacgatggagatatcgggggaatgggagagagctaaacaatcaatgtggggtggggaatggatgtggtaatgagtgggttttgcaagaatcttgtttgctgcggggcctgaaaacaagttatgaacaaaaaatattaggtgtgtcgtcacatgtatctcagcatggacttgcatgggagaagattggtaatagtgttggggcttgtcaatgctcctaaaatgacaagcctccattggcaggacaattaagctccagcagtgagggttgcgtgtttaaagggaggtaaaatacacctaagatatttagatatggtatgaaaaactgctgagagcagagagactaaatgggcggctgaaaatatagggtttgtttttctttactttgtttgacattttctttgttgaaaatataatagattttttaacaatgttcacaatatgctttgattcattaattggaaaatgggttttcctattcatatgatttgattcacaatttgatgatcacggcaaattttattgcagcagattcaagttgtaa

SEQ ID NO: 29235 - DNA, 846 bp, Medicago truncatula
  Intron number 2 from transcript Medtr3g043540.1 (locus Med tr3g043540) derived from phytozome v7.0 (chr-ID MtChr3; po s 11928617 to 11929462)
acactataagaataagaattactggcaacattaatgtatgtcataaagcttcagtttgtacttacttatctattttgattagttttatttttaatcaagaaactaaactagtctacgaaaattggcacgggagaattgaacctaagaccttgaggagtagcacactccaaggtccaaagccaacaccaccaggtcaatcaaagtgggttatattttgaaataaatcgtcggtatctgggttagccttttgttgaaagcatagaacttaaaaattacgaaaagaaaatgactttatacaaatacggacacgtcaacatcagtagtaagtggtaacttaagaaaatgacataattaaaagtaatcacatgtgtcagtgtcgtgtcggtgctacaaagcttaaaagactttagtttagaaattataataaaacagtacatagaaattcagtttctgacaaaagatttttctgtagataaatttaattatgaagtgatgaactgaaagaacaaaaagcctgacataaagaatacaattagtgatactaccaaagaattagcaagttgatacaaaagctgcttttgatcctctttcttttcattttagtctttgtagctcatattggagggactaaagtgttaggcttgtcacatctacattgttgaaccagatgaaacccttagatttgtcacatttacattgtttttaaattgattactagtaataaagaaaaattaacatttactcaggttgtactttttcctctgtatagttcgattttattttaatatatacacactatttaattcaacaaaggtgataaactttcttacttcgcgcaggtaattc

SEQ ID NO: 29236 - DNA, 938 bp, Medicago truncatula
  Intron number 1 from transcript Medtr3g107170.5 (locus Med tr3g107170) derived from phytozome v7.0 (chr-ID MtChr3; po s 27184663 to 27185600 reverse strand)
aagaagaagagaaagaagaagattacacctaccaagtaatatatattttattttctttttaattcctcttgttgatctgttttagtttatcacttcttatttcattcttctcatgaacattaagattctagcataaatacatgttggaataattgattaattaattaatttgattagcataactaagatctagcctccatgagtcatcataattaatatattaattattaacaacaaccttaatcattacaatttgtgatatcattaccaataacatactacaacacatccccgtaatttaatttgttaagaaaccaaagtgagaaacacaacatgatgataaatagaacagaatggaagaggacaaatactaaagaacagtagcaaacaaggacctcctgtgctgtggatttttatgatcaaattcaaagccataatcaccattgttgtctcaagttaattaaagtttcttacaaaagattccatttcaattttaggtaccaaaatgtgccctaaatttaaaagtaaaatttcaaataaattgacatcttagctaccctaccattcaatttcaatctacattaatagcttgtggaaggccttttaagtctgagttactaaacaagtcttaatattgcattgaacttctttttttttttttttttttacaaattaatgttgcattgaactttgtttatatcattatgtacttaatcatatgaaacatttaatcattttgatttatatactgtgagtctgttattactatttggtccacagtttattgttttaggggatcacggtgtaagtatatatgtcacatgaagtcatgtttttgtttgccttcaattgtatactgttattatttgtcctataacaacaatggtttttgcttgatttcagtgctgttttctacatattgtttggtcttagcacaa

SEQ ID NO: 29237 - DNA, 1005 bp, Medicago truncatula
  Intron number 2 from transcript Medtr1g025130.1 (locus Med tr1g025130) derived from phytozome v7.0 (chr-ID MtChr1; po s 6163054 to 6164058 reverse strand)
cctgcagaaagaccctcctgtgtcctgcagcgctggtatgttttccattgcactctctatctctctctctctcccacccattcctgttgtttcaatatttcagaaaaaaattacatgtgcaatccaaaaaagataatatgttctgatgttattctggagcattggtttctcctctgtacaaatattgtgccatattttctttgttgactcatttattttatatgtcatctcttttcattttttgccttttcaaatatggcttgctattattaaacatgtcatcagtgttatcgacagcagaaagccaagaatccgacatatggtgccgccatcctgcaaaaattggcggataacggcatggtcaattttgtgatggatggcaccgcaacgccatacttggatacgtatgcattattgttaaagtcgggtcagcacctactgtgagtgtggagaaatgggagcatcttgtctgaactttattggctgtgtgtgaaagatttattgcaacctcgataaggactctagattgatggacagtagatttatagaaaccattgagagtaaggagagaaaattttgaccatgcaatacaactgtatacaatcgccaaaattaaaagctatttgatgggtcacataatcgtataaaaggcacatgctttatgttttatcttgactatttgtggtaaaatttaattgtcaacatttacttctccctagctctcttaacattacgtgtgaatcaggtgagagcatgatttgatacaaggagataattccaatcaaacaatcatataggacagtcatttttagctcttctcaagttctcatgctctcgcctaaaatggctactatatagtgtaaattgatatgtaatatgcgtgcatgcttgtttgagttccaagtatgcttacgtttcttttctatgtatgtgaatgtcatcatgatctttatatattatactcatgcaggccctgttggtgaagacctgtttcattggcaagct

SEQ ID NO: 29238 - DNA, 411 bp, Medicago truncatula
  Intron number 1 from transcript Medtr1g093680.3 (locus Med tr1g093680) derived from phytozome v7.0 (chr-ID MtChr1; po s 19139828 to 19140238 reverse strand)
agtattacaaaaaattacagctaagtttttatctggtaatttcactccttttcaatttcatcattcatcatcatcacactatcacgtagctggtcatttctcaaccacttaatcaatcttaattaggatgagaccaaaaaaatgtttcaatttttacttataaaagaacaacattacaaaattttaagaaacgtaacaagaccaagatgaaggcaaaaacaaaaaccttgattccttcactactcacgtgttgtcatgcatgcgtcatgttcctcccaattcctgtgacttgtctctgttttgtgtccaaaacgaagctatgccacgtgtcacttccattcattgcaccttatatattcatcttcatcatctcaattattcacttcattgttttctttgaattttgtagat

SEQ ID NO: 29239 - DNA, 652 bp, Medicago truncatula
  Intron number 2 from transcript Medtr3g041220.1 (locus Med tr3g041220) derived from phytozome v7.0 (chr-ID MtChr3; po s 11476910 to 11477561 reverse strand)
gcaagatcaagttcggtacttcattgaagaggtaaatgacttgcactgtttggtagcagcaaatatttagttattttaatccattgtttgctcaaatagtatactggaaaatgttcttggcaaatttgcttgttcctatgtggttttagattttttttctaacaacttatgctggattattgtctaaaaaagaaaattctgtttgaattgacttatttgagattatctactagcataagcacttgagagactgtttggcagaatttataaaaacaacttatgacatatctataaactgttttcagcctatttccctaagctctctaggatagcttatgaaacagcttatagcttatatgaatacagtttgaatctatgctataaacgcttagttaagttgtttatccaaacgaggttaggtaaatcgatgtagaagtactcttgtattccataaataatgttgtctgtaatcatcagcactttaatgcttcctatacttataatgcttactcaaatatgtaatgttgctgaacttttctgcactatcttcaaaaataatatttgaggaagtttttatatcactataatctaaatgttattatacaaattcgtttcaggtcatcggtgaaccggtctatattgtaggcaactc

SEQ ID NO: 29240 - DNA, 875 bp, Medicago truncatula
  Intron number 1 from transcript Medtr1g090600.1 (locus Med tr1g090600) derived from phytozome v7.0 (chr-ID MtChr1; po s 18413120 to 18413994 reverse strand)
agacaggtggagtactagcagtttgagtattgtttgcagcagtttcagtttgagtattatatctgtgcagttgcagtttgctaacaagcatcatatgtcttcttttctggatcgttttcccttatgcgttcatgttattcaagtaaacaccggaggccacattttccgacataaattaaatgaaatgtttattattttgccatatggatctcaaatctcactaaaactcagcacagaataactaactttggaggcggcactcatgccatgagttttagttcatctcagatgtgacatttgtagaatactgtttttgagttaaaagaaaagtactgattgtatattctaaatattactcctattgtttttgactgtgcaaaaatttatgttatagtattaatagagacttattgaaactgtgaccgtccaatttttttttatgtagagctaccaatcacgggatgagatactggaaaatggacagagcaatttttttattatttcatttaaaaaaatgacatgggaaaacagttggaattttttttttttgaaagaataaaaatgaaagatttgttcacaagaaacaaaaaaatcatatgtgacagtgacagcatatgtaattcttccaaatagtaactacaaaatacctcatgtatgattagccaaaatatgtttgtgaattgatatgtttttacagattcttttctttctcgtgttaaatccttggattaaattgtgacaagttgcattatcatttattatttagtgagcgcatcatgcatagcttgtttggacctactcattcactcatctaattaattaattaatggtatgattcagggattgctgagagtaacaagagaaaaagagattga

SEQ ID NO: 29241 - DNA, 1001 bp, Medicago truncatula
  Intron number 2 from transcript Medtr3g019800.1 (locus Med tr3g019800) derived from phytozome v7.0 (chr-ID MtChr3; po s 4202237 to 4203237 reverse strand)
tgtgtaatctggttttttttgtgtttgggctttgggtttgggcttaattttctgcacgtttcttgcttttgcttgctacctacaccctatttttctgctaattgaacctctgtgtgcctaattttttttctaaaaaattcctaaaaaattgtcatatatttcttgatacattttaaccattttgtgatgtttttcaatggtttaaaaatgataaaaaatgtaggtgttatttttcttggttaatttgtctcttttaggctaatattgtgattttcttgccatgtttgctcttcataagtttagatatgaatcatgaacaattagtatgtaattctatggtatatatgatactgattttatgattgtgttgctgtttgggtatggtttaggtgtttcttgcattttaagcaactttcattctcattatttccatcatttctttaccattttatttcatgttcaattgattgttttatcagtcatggcattgttcttatcttgttttgctaacatttgttgacttattcttcactcatctcatagcattttactacatcatctttcctattagattaggttttatttttttttgcaatttttctctcttgtatttctaatggttatgtaatattttaggctagtttaaattcatcttttaattttttgcaagaccatagaatgtaactaggacaatgtaaaggactatggacactataagtgatgtacaccgacacgagcaccgacacatgcacacaccccacatggatgttctagatgcatgattagggaatgtatgtttagatgtatgcctaggttttacaacgcttaaaccaaaaaatcattttttcaaaaaatgtgaataacctcacttgaaaactttttttttctaaaataggagtcaaaactcctcattttccttttgttttcttaagtaaaaaatttttaataaattttaatcatgcttagactttattttgcaaaataactacttccacctcact

SEQ ID NO: 29242 - DNA, 866 bp, Medicago truncatula
  Intron number 2 from transcript Medtr2g127190.1 (locus Med tr2g127190) derived from phytozome v7.0 (chr-ID MtChr2; po s 30979631 to 30980496)
aaatactcttgacatcaccattattgccaaggcaagtaattaccaaagaaaataattataataattaagaagcatgattccaactcaagtttgattgttatccaaatttaataattataataagggttacgctaacaagtgccctaagggtttagggcagcggcaaagctagtataatttgtttgaaggggttaaatataaagaagaaataaaatatattttaaaactaatatattaacatttttttatgaacattaatatattaaacttaatcgataagtaaaataaattcacaatattttttacttatatttagtgaaacaacaacgatgaaaataaaaggtaacaatagttatttgtaaaatatgagctctatggagttttaagaagacaaatttatctataattgatactaaactaaatagattatcaatttttgttaatataatatctctttgaaacaacaaaattgtttggagtgactaaataatatattaatggggtagttgtatataaaatttatgctaatcattcaagtttttttatttccgttggggtagccaatgctaccccatccctttgaagcccttcgcccttgatttaggcacttgttaagaagacaaaaaatgaaataagtgattagtttaatgaatcaaaagtcaattctcaaagtttcaatgtaatgaatgcacaatttttaagagaaagttttttcattaaactttttaacaaatgcattaagaacatcataataaccctagagcacttgttaacattttccttataataactctatctatgactataaccataccttactatgtaagtttctatttgtgtttaaatttttgtaattgattctacag

SEQ ID NO: 29243 - DNA, 672 bp, Medicago truncatula
  Intron number 6 from transcript Medtr1g143450.1 (locus Med tr1g143450) derived from phytozome v7.0 (chr-ID MtChr1; po s 31674867 to 31675538)
atttgaaggtgatgtttatgtccttattcaatattgttagccataagcactacagtaatacaaatttgaaagccttttaatatagaatgtaagaattgtttgaaagcgttatgttggaatttccgccttcattgcggctctcccctagccgcctaattgtggcatttggattgccttcattgctgcctccaacaccttcattgtgttgggtgtgaaaggggtggatttagtccgacattacctagagatatgccatgtgtagtgtttatatagcatgggcagccctcgctttaaaagtcgaaggttgagttaggctcaacccaaagatttaagacatcatactccatcactagttatatatgatttcatgtttcagcactgatccttcactagaagtaaacgtagtgttcattataataatcactacagaattctttatcctttatttttgaaaaacattcttatctttacatgatagcctaacaatctaacattaatcgtgcttaaaattttctgaatgttcattcatttaaatttaaattgagctgtttttgaaatttgtattgagaagatagtgacactgattattttttttttccgtttattccttctggcctctaatcatgcttatttcaatatacatcgtaatacaggctatcatcaagcctcagt

SEQ ID NO: 29244 - DNA, 505 bp, Medicago truncatula
  Intron number 1 from transcript Medtr2g113860.1 (locus Med tr2g113860) derived from phytozome v7.0 (chr-ID MtChr2; po s 26774450 to 26774954)
ccgtagtgaggaccacagtaataccacttcagctggtaaattttctttttcttttatcaatggatcttcattgattaattttttgttcattcgttttttttcttgaagaaacctttaccctttgaaaaaaaatgaattttttgatgtgggtttgtgttagattgatcaaagattgtttctttacatttgggttttggaaaaaaaatgaaattcttgatgtgggtctgtacgagtcttgaatatatggatggaaattttgattatttatttatttatttatttattatattccttttctgggtttttctaattctattggctgcttgcatgtttggaatgatttgatcaataagtcaaagtggggtttgccattttgatgattttacggttttttttttgtcttcttggattgattgaaatatgtgccattttgtttgattcttatccctcacgtgttatttgttttgtagataaggtcaaagttgatttgaatttgagtgagttg

SEQ ID NO: 29245 - DNA, 765 bp, Medicago truncatula
  Intron number 1 from transcript Medtr3g100900.1 (locus Med tr3g100900) derived from phytozome v7.0 (chr-ID MtChr3; po s 24350343 to 24351107 reverse strand)
ttggtaacaagatttgagcgggaacaaaaaagatagctatagcttctaaaggttcatctcttttttcatatttcacttttgatttttaacttttttattttatgaatttgtaatgattaatataattctaattcgaggaaaacaaggaaacaaaacggttacagattataattaccaaaaccatatatctatctatgatgacatcaatagatagatagatagatagatagatacctttgtcttttgtctttgattgccaaaaacaacaaccttttattttgtcagagaaaggaaaaaaataaggggtctataagaaatttggttttgttttcctatatttgtactaaaattcatttcttgctttgtttcctgatttgatgataaaattgtactgtagagtatagtctgtttcataggtgttaactaagctattggttagttaatagaatcatgcttattttgtacttttcttctggtttttcttgtgattgtaattattacttcttttattgccttttaaaatcaaggaatttcactcttcttctctctcacttactaaaaaagttgaataaatggcccttcttagtgcatgtttggattgactgtgaaattggcagaatcacgtttgccattgtgattttgcagaaatttaatagtatgttacctttttatcctgcaggaactttaatgcatctttttttttatatatatttttattccttaactgcagtttgctatagaggagtgttgaaggctgatttaatt

SEQ ID NO: 29246 - DNA, 774 bp, Medicago truncatula
  Intron number 1 from transcript Medtr1g093750.1 (locus Med tr1g093750) derived from phytozome v7.0 (chr-ID MtChr1; po s 19176793 to 19177566 reverse strand)
gtcaacgactaattctacttctcaccacaatttcagtaagtcaatttcaaccatttcttattttcatccttgtttttttctcttttcttcaagaaaaataacttgacctgtttctattaatttatttgagttcatctatgacataaacaattatgagactgtttgagaacttatgaaagcagcttatgatatgtccataaattgttttcaacttatttccataaattttacaggataagttatgaaaacagtttatagtttatatttaaaacaacttgactttattttttgttataaaagcagcttgcacataagcacttttatggtaagtgtttatggtataagcacttaataaagttgtttctccaaacagggctcaagtctgttataagttcctgctcttttttttaaaaataaatttgttgtttattcaatgaattttatctttgaagaaaacttgaggaggagttaagacttgtgcatgaagcaactttagtagatgataacttattgcttgctttacgttatgcatactctactaatctttctttttttactctgactttatttgctaatggagtgttaggggataaggagagatagcatatgcattgttttgcataatcctattagttttagatgacaattttttaataatcacttagaagttagaactgatcatagggatgcagtaatgcagtaaacaatttgcttattttggatatatattaaaccaaactaatggaggaacatgctttgtttgttttcttagac

SEQ ID NO: 29247 - DNA, 572 bp, Medicago truncatula
  Intron number 1 from transcript Medtr3g124770.1 (locus Med tr3g124770) derived from phytozome v7.0 (chr-ID MtChr3; po s 31765185 to 31765756 reverse strand)
gtcctgaattaaaggtgtgttacttttctctctttatgaaactgtatcaaatactatgtttattttttagctttatgcattagtactaattttgtttggttgtattttttccaaaatgcaagaaaagaataaactgtagggtataatatttgttatgcttttctgtatgtcttatttgtatataggtatatttgtgtttctaattctgctttctaagacttggtcagtgaattattaattattgactacctattaaactgtttaataaaaaatttagtatcaaagttttggttagcaatttgaatagatttttgttatagtcattagggaaaccaaaagagtaggtaaacacaaaaaatagtctcataataataaggttattttccattcaaagattagctgtttaatttgaccttaaaaaaatatatagactgtatatagtcttggtgaaatgcatactgtatttacactcaaacaaagtctcatacgcaaattgtatatttattttgattattcaatttttgtttgattatctaatcctattatgttacctcttcagttttgttaatttc

SEQ ID NO: 29248 - DNA, 568 bp, Medicago truncatula; identical to SEQ ID NO: 28415
  Intron number 1 from transcript Medtr2g005130.1 (locus Med tr2g005130) derived from phytozome v7.0 (chr-ID MtChr2; po s 107127 to 107694)

SEQ ID NO: 29249 - DNA, 688 bp, Medicago truncatula
  Intron number 1 from transcript Medtr2g104740.2 (locus Med tr2g104740) derived from phytozome v7.0 (chr-ID MtChr2; po s 24792378 to 24793065 reverse strand)
agaatcatcctgataagggtggtgatcctgaaaaggttggttttttatctttgtattcgattattggattgtctgatttggtttgttatttgatcaattgatgttgatgattggatttgataattgttgtggtttgaatttgattagttgattttagaattagtttgattgaattagggttgtgggctgctggtagaatgatgtttgttggggtttatttgttatagattataaaaaagtgatttttatgttcataaatttagagataagtgattgatttgttatagattataaaaaagtgatttttatgttcataaatttagagatgagtgattgattttgtttaaaaagtggaatttttagatataattgattgttgttagttgtattgatattgagtttacaattgggattgatattgatgattgaattatataatcattgttgggattggattgtgattagttagttttaggatattgattatacaattggaatttgatattgatgattgaattatataatcagttttagatttaggttgtgattagttagttttaggttagtgtgacgcatgtgttatggtatcttgattttggtttttggtgtgattagttactagatgaaattaggaattaatttgtgtttttttttttcttcatatagttcaaagagcttgcacaagctt

SEQ ID NO: 29250 - DNA, 478 bp, Medicago truncatula
  Intron number 2 from transcript Medtr2g042780.1 (locus Med tr2g042780) derived from phytozome v7.0 (chr-ID MtChr2; po s 12093221 to 12093698 reverse strand)
ttgcacttagagcagtggtcccaaacattagcaaggtaaacatcacaaattttagtggtccatcaattaattattataattagtgtactactcatccctcaaaaaaacaaaaaataattagtactactcaatttttggttgcaattttgttgttgatttttttgttttgtttgaattaagtggtttgggtgaaaactactctcttcataaaatataagtacaaaagtaaatgaattttgttcatatatatatatataaattttgcttatattttattacagatggaacgtaattaatattatgtgacactgtgagtaggtaatttaattttttaaacatttcattagaggttcgattttagactaaagcctttgatatcaattggaaaatatcaaccattatgtgtttaattatttcgaaagattagtctctgacgtcaatttctttctaatgatcagtggtgactttctttttccag

SEQ ID NO: 29251 - DNA, 614 bp, Medicago truncatula
  Intron number 1 from transcript Medtr1g016270.1 (locus Med tr1g016270) derived from phytozome v7.0 (chr-ID MtChr1; po s 3116291 to 3116904)
agcttcttgctgctaagcaggtgattgatttacttgctgttgttatacttcaatgcattttggtcactgacactttagattgaagacgtgtttggtgtttggtgtttgacgtatatgtttattttttgtcacttttgagtaaaccaccgaattaggcatggttttctatgacactctcaaatgggttcttgagattatgcttgtttcacaaatgtcaccgactctttcaaattttactcatatcagtccttctgagagtccggggaccaaatttgatagtaatgttatggactaaattgatagtaagtggttaaatatacagaccaaattgataatgcgtggttaaatatagggatcaacttgacaatttaatggagtcggagacctttttaaaatattcataatcacagagacctattcgatagtgacctacaaagttggggacgaatttggtggtttgctcgtagttcatagctacaaagtttttttgattattttttgtaataatatacatatgttagtgtgagatgggaataagagctaggttttaaagtattgtttgcttgttgagttgtgcaggatttgattgataaagctcagacagttcttgttga

SEQ ID NO: 29252 - DNA, 824 bp, Medicago truncatula
  Intron number 1 from transcript Medtr3g163780.1 (locus Med tr3g163780) derived from phytozome v7.0 (chr-ID MtChr3; po s 43098442 to 43099265)
tggccaagttagtaggctagcctgcattatgagggtgaggcgttagatgagagcgcatgaatagtattgttagggtatgactgcatgtctgtgaggaaccttggtccttgaaggataaactggaatttatacagttatcttttgattcaatattactattagcatcaagcttctactattatgcaatgtcgattgttctatagcagttttgaggttatagtagttttgtggtcaagatatttaatacatttcatcatgcaagagtactttgggtttgaagaagcaaaacatggaccatgcacaggctcaattttccttgcaccaaaattcaactatattttcgtataatatggggttgatattatcaagctctagaccttaccttatctctttcctggattatccaggaaagagataaatcagttttttttttaatgttgtaaatctacatctacagattgtaattgtaccttaccaagaccctaaacagtatttatgactattttttctctctgccaaatttccttcaacttttcttcttgttcaaaagttgttaagttttctgcttttcatgtggaatagaagattgacattagctcaagttcgagtagaaaacctaattataatttactgcattcaaattctattaaagtctagtaatttaactagttcatgatgctactaaatttacacagttggttatgtagggtgagtttgtcttgcctactgcctgaaagacctatggattgtatttatttttgcattgcctgaccttttacccactgtcaggggcacgtgactattgttgcaaaaccgggcttgaa

SEQ ID NO: 29253 - DNA, 658 bp, Medicago truncatula
  Intron number 1 from transcript Medtr3g068990.1 (locus Med tr3g068990) derived from phytozome v7.0 (chr-ID MtChr3; po s 16409533 to 16410190 reverse strand)
ctgctgatttgattggtaagttattcaaagttcactctcttgggttttcacacatttgtttgttgttagtattattggaagatgacatattaacactctttttttgaacattgcacaaccatatacatattggtcctttgcaatcttcttttgctttaatattattagcttctttgtttgtctattacaaattgaactttcagaaggctttgtcttacatgcacaagtaaaatggtcttccaccgtgtacaaatgtcttttccaccattggttcaaaaagtcacattatatttcatttcatttaacgatgagatttattgatccgatgatggaaactagcttatgcatcaatattggacttaatcatcaaatttatacatttaaaaaaaaagcatcaaatttataaaagttcatatagttaaaacatttatgcatgtatatggttaaaaagaaacctttgtaaaaagaaagataaaaaaacttaaaagcatgttggctagcaaagggtatgttggggcatgcatattgattattggtaatagtaatataaaaattttgttttgctaatatttgcataaaatcaacaaattttgtttgacttgccatggtatatttggttgcagctgaaaaaataggtcttgccacgtcaccaccttac

SEQ ID NO: 29254 - DNA, 373 bp, Medicago truncatula
  Intron number 1 from transcript Medtr3g110950.1 (locus Med tr3g110950) derived from phytozome v7.0 (chr-ID MtChr3; po s 28031925 to 28032297)
tggtctggtcaatcttgaagactattttggtgttttgtgtatttttgttttctagtttatagcattttaagaacatgtatattttgacactttatttatttcaccttttttaatatcatatcacttgttttaagtttggtttttttgctctttttttcttctactttgtctctttataaattctgatgcttcttgttataattaatcattataataatgttaagaagtcaatcaatgattgtttgatttgattctgaaatctgaatgttgttttctggctttattcacttcttggtttgtactgatactataccataccatgcatgtgcatgctgcaggaggcaggagcagttatcttagaccagtagtctgc

SEQ ID NO: 29255 - DNA, 545 bp, Medicago truncatula; identical to SEQ ID NO: 28373
  Intron number 2 from transcript Medtr3g136310.3 (locus Med tr3g136310) derived from phytozome v7.0 (chr-ID MtChr3; po s 34385434 to 34385978)

SEQ ID NO: 29256 - DNA, 918 bp, Medicago truncatula
  Intron number 1 from transcript Medtr2g014760.1 (locus Med tr2g014760) derived from phytozome v7.0 (chr-ID MtChr2; po s 3877271 to 3878188 reverse strand)
gtttttacgtttggatctggtaagaagaaagctctttcattttttattattttttaattattaaaatacattgtggcatttctatttattttaaattacaaaaatatatagttggcaaatttttaaattaggtggcatgacacataagattgactgggtcaaaattgaggttttgcagaaggggctaaacataaggggtcacttttgcctttttttttaatagggggtcaaaatttcaacttttgcaaacttagggggcaaaaattgcattttagcctaaaaaaactaaaggaagcatcttaacacatgaaagcgacaacatattaggttaaaattaagcctcggtacctgaaaataccgaaggacttaatccatctatgaatttagctgattaaataatgttcgctaaatatatgggagaggatcactattcaaactcaatagaaaacacattattggagagtcgaacaaagattagtcacaccaaattattattttaattaggatttgagctcgagttcacccaaataaatagtctttgattgttcaaaaaaaaaaaaagtctttaattgaatttcattacgacttgttctttaaggattccaaaaaaaaaatttctcaatgtatttatttaaaaagttaaacatttcaatttcaaatgcgttttcatgaaatattactattttaaattcataaaagaactcttaaaaaaagcactggattaaaaaagtagttaagctaaatctagggattaggaacaaaaaatccaggctgtaatgtcggggaagaaacaaacgataaccagcgggaaagtgagggagggtatgtttgtgcggtgtcccactattattagctttttcccacattcaatatttttgactttatatataatgtttgttagattcatgaaacaggttt

SEQ ID NO: 29257 - DNA, 999 bp, Medicago truncatula; identical to SEQ ID NO: 28059
  Intron number 2 from transcript Medtr1g087140.1 (locus Med tr1g087140) derived from phytozome v7.0 (chr-ID MtChr1; po s 17458664 to 17459662)

SEQ ID NO: 29258 - DNA, 968 bp, Medicago truncatula
  Intron number 3 from transcript Medtr1g111930.1 (locus Med tr1g111930) derived from phytozome v7.0 (chr-ID MtChr1; po s 23967585 to 23968552)
ctagccaagagaaaaggtataaatctatcacttacaatcttccctcccccattcacttcgttttctctaacagatttatgtcaatcatattggatgtttatgctatgttcagttcaaacagaaggattttataggtatacatctgtgaagtctaggagccattttgtggtggttactatataactgaaattttccccttttttttgactgacatatgtatttaatattatatgttaatcatcacaaatgacaacctaaagctatgaagctcccgtcattgtttggtccaaagaagggccggatccattgtggatttattatagactgtttgtttttgcaagagattgattcataacttgaaccaatgtcatccacttgaacctgggatctccatatgtgattaatttcaagagattatggacagtaccttgtatttccaagagatggatttcatagtttgggaatggggaaaaaagttgagtgtatttattattataataaaattagtgacaagacgactttgatacgaaaaagggatatgagctcagttgaatgaatgtacttaagttgttagttttgtacctggacatctaggttttcttggtctaagccgaattaggattagctttatcagcaagtgcggtatttctcaaccagtttcttttagaaactttgagacctattgatattgttgctgtgctttatcacgtgagctatacatgtggtggtttgtattgaccaaataaacgtgtccatctcataatattgtttccattcaagtggggagattcagctgatattgatgtaggactcttttcagcagcttttgatgtatggggtttcacccgatatgagggaagactaggcagcttctctctattgagtttctcttttttctttcattgctttatgttttgttcttttgtttaagaggattcattattctcccgttctcattgcaatttttc

SEQ ID NO: 29259 - DNA, 943 bp, Medicago truncatula
  Intron number 2 from transcript Medtr2g032890.1 (locus Med tr2g032890) derived from phytozome v7.0 (chr-ID MtChr2; po s 8825277 to 8826219 reverse strand)
caaccagggaagcattttcctgagcaggcagtgaagtatgttcaatttataatttagtttattgtccttttgatttccttccattagttttaataactctttgccacaaggaagtgactggttctacaattttgtttgcttgaaaccttcaatttagctttcaaataattaaaaatgttttcatcccattataatgatgcaccttatattttattgaattgtagaattgggaaaaaaaaggttgttatgtatttgtggatgatatgtaacaattcatgtgaaatctggaccaaattccagatgcaatgatttacaccgtgtatggtttgaatgaggagagggaaatatttaatcatatattttgtttgattgagggtaggggaggggagggattcaattggatattttactgggtccgaagttttccttgcaaaactctttgaatgtgtatattggcaattttgtaatggaatcttcttgtttctgtaccttcatagtcttgttacactcttatttatgctctttattgaaagtactgtattctaagcctttgaaaattgggattacttgcttgcatgtattgcttttgttctgtttattgtttgccttttttgagtcccgtttgaagtcaaatattgtactcatgccaagcaatttcagatatcaaacaaatacatattcttgatcagagtaaaagaaaatctttgaaagcttgtttgtgggaaataaattatgttgaaatttttactgccactataattgaaacaactcttgggaatctgtttaatctcatatactgggatatttgcttgattattctcagattcattaacctcttcagtttctgatactcaagcctaatgatgatttctttgattgtttttgtaagatgttataatttgatggtaacaatctgctaatttcttcataacttgcagatttt

SEQ ID NO: 29260 - DNA, 523 bp, Medicago truncatula
  Intron number 2 from transcript Medtr3g105570.1 (locus Med tr3g105570) derived from phytozome v7.0 (chr-ID MtChr3; po s 26443139 to 26443661 reverse strand)
actgatacaatctcttggtttccgttggatattaagtaacaactaaaactggttagtgatcatttctcatactttcagaatcagatattaataccactagaaaaaattgtattagaaacaaaaaatcttgaaatatgttctaatttaatttctaagcatgtttttctatctctattttttgtcaataattcaattacttgtgtttgattgcagtctttctgggacatgatagaaggtgtgagaatggatacgaggaaaacacattaaaattgttttgaattgaagaattatatatatatatatatatatatatatatatatatatattttttttgtgaagtagcctagcggcgagagaaactcacgttaaaggtgaataagtggggtgtttggggttcgaaccccagcccctgcataaattatgcattatcccttatcaagtgagctataagctcacgtggacgaagaattatatctttactactacgtgagcataactgttggattgacgagcattccaata

SEQ ID NO: 29261 - DNA, 903 bp, Medicago truncatula
  Intron number 2 from transcript Medtr3g159900.1 (locus Med tr3g159900) derived from phytozome v7.0 (chr-ID MtChr3; po s 41970509 to 41971411)
actctcatcacttttctccttcgaatacctgtaaggtaacactagactctgtctgtcacatacacgtgcatgcaccgtgctcaacaagttatctctatcctcttcaattttgtctatttttgggttcactcatgcgtccatacagataccccaactcatttctttttttactcataaacttaactcttttcacttttcttcataaattcatatccatttgggtagttttttttttatatgattgattagattagatttagactaactatgaaatatgaatgaccattttcggttaaatatgtttttgatccctataaaattgagtttttttaagttagttcttacttaattttaatagtatttttagtccttaaacaaaaattatgcactcagttttaatccctactaaattcaaatttggttaattatgcttaaactcttaagtttttgaacaattttttgcatgcgtgttaagaacattactaaaagttcctctgtaaaaaattatctcaaaatttgatttctaagtccaattttttgttgcttttatcttgattttttgtcgtttaaaaaaatttatatttaatttatttcatgttaaaaaattctaaattttaggaaatgatcttttgaaatgttctaaacataaaatcgttcaaaaatttaaaagtttaaggataattaaacaaactttgttttagcagggactaaaattacatgtaaatattttttgtagggattaaaaaagctattaaaattaagtaaaaactaaacttataaattttcaattttatagggaccaaaaacatatttaaacctttaattaatactttattcaattttgttgcaatgaataaggtctctaactttagaaaattaattttgacaggaagagtgggtgat

SEQ ID NO: 29262 - DNA, 478 bp, Medicago truncatula
  Intron number 1 from transcript Medtr1g120470.1 (locus Med tr1g120470) derived from phytozome v7.0 (chr-ID MtChr1; po s 25930848 to 25931325 reverse strand)
tctttgctattcgcaccctttctcagcaaagttcgtctatctcttccttcatccttcttcttccttttcccattattcctttttattcaatttttaactgattatattgaaatttttattttttttggatattaatgtcggtttcagcaaacgggtttagggtttcgtttataaaaactattgctttgcatgttgaatgttgaaaaatcgatgcttttgaagtgaaaaatcaaggttttatttacactgtgtttgtttatgcaatttaactttgtagttttgttaatttgattctaagtagcattgtatttggtttatttgatttagggcatagtttcagttttcatgatctgattcttattgatgcttttcaaagtttccacttttgaatggttttgttatataaatggtaagtgtgactatcaagttttgttctttttcagaaattgaactcttttgtggtaaattggtagagaga

SEQ ID NO: 29263 - DNA, 591 bp, Medicago truncatula
  Intron number 1 from transcript Medtr3g144490.1 (locus Med tr3g144490) derived from phytozome v7.0 (chr-ID MtChr3; po s 37468563 to 37469153)
cctcggtggttcctcccctgctttgccaacaacaagtaagcaccaaattaaatctttttcctctttcatcaattatttttttacttaacctccggtgtaaactggtaatccgaagttcgattagaaaataaataaattgaatcatagacttgataattcgaagttcggccataaaataaataaattgaagatgggatgatctagtcatgattcaaaccatgtataactttgaatgtacaaaacaccacttttatgtattttctttcatttttagtttctaacataaaacattagaacataacaattctcaacaaataaaacatgttggtttttttttcttaatttttatttgaagtaataatgtaagtataacttaggcgtgtattcgattaatttatgctcgtgagcttagctcagttggtatgaacaatgcataatatatgcaaggtcaaaaaaaatattggattaattcattagttcatttactaagttatttttgtcttccattaaatacaaagcttattattttgattaatggtgtcaaataataatgcagttgcagaaagttcaagcattaataggacaacaaca

SEQ ID NO: 29264 - DNA, 495 bp, Medicago truncatula; identical to SEQ ID NO: 28642
  Intron number 1 from transcript Medtr2g006450.1 (locus Med tr2g006450) derived from phytozome v7.0 (chr-ID MtChr2; po s 656136 to 656630 reverse strand)

SEQ ID NO: 29265 - DNA, 458 bp, Medicago truncatula
  Intron number 1 from transcript Medtr1g068080.1 (locus Med tr1g068080) derived from phytozome v7.0 (chr-ID MtChr1; po s 13480749 to 13481206 reverse strand)
gttgggttgaaattgaaggtaactttatattagacttttttttttaattatcatgaatcaaatttggtattccgggatggatttacaacactgtcacacactacacaccaaccacttgcacagttgcactagaccctcgtcgtctattagacagtttttggttctatgcagaattgtttctacttttattagtaattaaataaaatatagagtaaattattagctgtttaattctagaaattgtattctccagacaatttggtccttgaaattaatgaattcacaaaatgatccgaagattctcaatcacattagtcttccgagacaatttcaagaattaaattgattgatccaaacagattaataggatcaagaaaattcataatcatttaggaaattcgatgattttagaatgtgaaccgtcgtctcactgaaaacaaaataatattgacaggatt

SEQ ID NO: 29266 - DNA, 892 bp, Medicago truncatula
  Intron number 1 from transcript Medtr3g097340.1 (locus Med tr3g097340) derived from phytozome v7.0 (chr-ID MtChr3; po s 23231024 to 23231915 reverse strand)
ttgcctacgtaccgttttacgggatcaaaaccggcgtagttcttgctaaaaagacttgtggttttttgttttaattgtttgattttaaattttgaaaatgatttgaagaaggggattgagaggcttcatgagcattagagtatgaaaaagtgagggtttgcttagtgattttgcaaaagaagtcttaatgattaggtttatttgagaatttgattaaaaaaaaaaaagggaaaaattattggagttttgactccatttcttatgaaaaaaaatatttgaagtgaatttgtttgcatattttttggaaaaaagttggattttctctaagtgtttaaacctaagcattcatctaaccatgcaatcctaggcatacatctagggtgagtgtgtgcgtgccggtgcgccatagtgtccatagtccatattacaaaaattgcctaaatacattctatggcccctttgccaagctacataccaatgatagcaaattacatcaccaaatgaattaaaatttgcaaaaataaatgctaagctgaacaaagtggaggagatagtggtgaaatggacaaatgctcatgaaatgaatggaacaaaagaagtgagatgattagtaaaataaagcatagaataaaacaagtgcacaaaaatattaagaggaaagacataaaagaaactaataaagtgacaaaatgtgcatgaaaatggtcataaggctctagcatatatatgacccataatcccttcattatgacatttttagaagtcttgctttgtgccctaatgtgaaaaaaaatgggacatatttgatgctaagtttatggtacactttcaaaatattttggcactttatttactagtaaaaatgcatactaattgcagaacaaaaagggag

SEQ ID NO: 29267 - DNA, 1000 bp, Medicago truncatula
  Intron number 2 from transcript Medtr1g143200.1 (locus Med tr1g143200) derived from phytozome v7.0 (chr-ID MtChr1; po s 31547024 to 31548023 reverse strand)
gagggaaaaggtccgctgatgtagaggattatgctatacttggcaccgaagagattggagaaagatcaattaacaagccgcagaagatgaaatgagtcaaggttgagaaactgaactaatggggaggatgaagtccataattttaaaattttgttttgtctgataccagattatgtgttgcctctggatgaatatgttacgtttatttgctttagactatttcccattttggtgtactgttttttgaaccttaggccccacaaccttttgtttgttgcccgtttatctttctgtcaactgttttgtctgaatcaatctaagtatttcctcctattgatgtttaacctgtttgaggttttacatttatcagtctaagtgttttacatatgtaatgtgtttattctgactatctttgtaagcctattagcctaaacacatgatattattacaaagctatcggcgcaaatgttactgaatttcatcttttactatatgtacatgatttgagatgaattttggcaatttgttaatagttttagcaaattgtaatatttggttacgtttcaagcatattttggccccgtcagtttgtgaatggtcatctccaaagatcacaaatattcattttgataaatggaaccttgcattttgaaaaatattaaattagtttatctaggtccattaaggcattaactgaatttttttagagtttatgaccttatattacaagtatttcatattttaaatagtcatttatatgagaattataaattgatgaacatctgataaaacgttaaaaatcattttattcctaaattaaatcattctacataagtttaaaactgttagggactatatacttaatattatcatatagtggttaggtaaaaaaagttttgatcacagaatgataacttacaactttagtattaatgtatgttaatatactttgattagtgtcacataataaactatagttggggaagccttaaggacctcc

SEQ ID NO: 29268 - DNA, 740 bp, Medicago truncatula
  Intron number 3 from transcript Medtr2g078030.1 (locus Med tr2g078030) derived from phytozome v7.0 (chr-ID MtChr2; po s 18128304 to 18129043)
gtgggcactatattactccatacctaaagaaaacggtaagcaatattattaattttttgtttcatgctaacaagcgcctctttaaacacttcctcttgatgaatcaaatattgtagtactatattgaaaattaggaaatgagattcactatggtcatcgtttcacacaatcacgcgcgcagttggattatcggtgaccgtccaatctagatcagatggttacaaacagtcaccaatttcgcacaatcacgcagttggattattagtgaccgtccgatgtggatcaaatggttacaaaaaaaaaagaagacatagtttttactttaagattgaaaagtactgtgattaaatcttgatcaaccgatcttaattaaacagttaagattgtttgacttcataactgcatcatttttttgtcaagtagtctagtgattagagctcacacatttaaatgtgaagaagtggggtgtacgaggttcaaaccatttgcatctaatatgtaatatccctactaactgagttaagctcatgggcatctacatcattttatttaccgtcaaggtccaaaaattatgtagtcaatttccagaaagtcttaaagtgttattttcaaagtaaaacttgttttttacctccttaacaagcattttcctatttttagtttgttacattaaatattatctctattttgtatagtttttaggaatatgatattattgtgctatgatagtgggcagatct

SEQ ID NO: 29269 - DNA, 478 bp, Medicago truncatula
  Intron number 1 from transcript Medtr3g104200.1 (locus Med tr3g104200) derived from phytozome v7.0 (chr-ID MtChr3; po s 25823668 to 25824145)
ctcataggtaaattttgcatattgcttcttatttgtgattccttgtgttgcaagaaactcaaaaaatggtttgtaaatatagaaaacatgtgttggctgggaactgatcttctttcgtgtgataatttttaccggaaggtgtccagaggaaatttccacccttcaattctctcttaacgactttgacggcatgcagtagaaataaataaatgattgagatttcactgcataaaactttcatatgaaatgatatgttctaggtgttttctgttgggagatattatttttcggataaatttattaaagaataccgataaactttatcccttgttttaattaggattaagtaatcataatctaaagtggcttgttcaagtaataattatttgaaagctttaaataaattagaaattttgaatccaaaaaagatgttgaaaataataaaatatttcaggtttggggcaactatcaactccat

SEQ ID NO: 29270 - DNA, 370 bp, Medicago truncatula
  Intron number 1 from transcript Medtr2g026040.1 (locus Med tr2g026040) derived from phytozome v7.0 (chr-ID MtChr2; po s 7025423 to 7025792 reverse strand)
gaccagtttcacatcctccgccagaaaggaactgagtaattatttctcaatcttttcctcatcttcttcattttatattataaacttatcatatttataagtttaaatcagattatggtaaaaatcaaatgtttttaataatccaatgattatgattacattgacggcgtatatgaattatatcatttatgtttatgttttaaaacatgttttgattggttggtatgtatatggatgtcattaacatttgtggtggatgacattgataatataatcatacatgataatagatctttatgcaatgaaattagattacgagttgaatgatcacattgcagattgaagggtactggagagtacaacaagtttt

SEQ ID NO: 29271 - DNA, 659 bp, Medicago truncatula
  Intron number 3 from transcript Medtr1g024610.1 (locus Med tr1g024610) derived from phytozome v7.0 (chr-ID MtChr1; po s 5853364 to 5854022)
tggtttgtccgagtggtaagacaccgagggatttagattgtttgcagttacaaatctcacacattcacgcactaaacatattgatattttttagatcaagatcatagctttggatttcaagatcaatatttagagttaaaaagttgcttgttttctatttcgtccgatctcgatccaacaatcattgatgtgttaactgtgtgaatttgcgactaaagcaaatccaaatcagagactcagacacttcaaataagtcttcaaaagcttcattcttagctcttttatatgaataaaaatcaattgtaaaagaattagtctccttattgttttttttttttgaataatagtctccttattgttgttaaacaaaagtaaatacttggtgtctataacatgtttataaaaacattatgttttaatttaggctagtattccaattaattttatttttaaaataataattaaagcacaaccctcaaatacattcaagggaaagtaataaaaatagttttgatattgatatgattagtgtttagtatgcaatagagcttgaaaatttctagttaaattcttgtgcagcaactatggtttactaatgtagatttaccctgtgcagcaactatgttttactaatgtaagatttaccatgtgcagcaacc

SEQ ID NO: 29272 - DNA, 760 bp, Medicago truncatula
  Intron number 2 from transcript Medtr3g076080.1 (locus Med tr3g076080) derived from phytozome v7.0 (chr-ID MtChr3; po s 17524638 to 17525397 reverse strand)
gtcaagactgcatcaagaggaagttgttctttgaggtgggtttcctctcctagacttgaatttaaataattagaattgatacctttacattggtaaagtgattagtatgagatattaagtgattttcatgaatgataatttcttgaaattgttgttgaaattagaattagggtggattagtgtgtggaactagaattatagttatacaaattctttaactaagctatgtttaggaacattaagtaattaattgaatcgtgggattgtcaaaattacactttgttgagtttagttttctatataccatatgaaccttgagcccaaatatatatctaggtgtgatatgaataaatcgattaagcttagttactatgaagatcaaattttgttttatattgacgctggctgatgcctacaaatagatttgtcttatcttgttatgtgtctctgctaattaagtcatagacttcttgtgatacttaagaactaggccaatttatagacagagaaaaagaaaagtattttctttacaagcacattgtgaaatgaatgacagttcaactgttaaatcattttagaaatatgcattgtttgtgctgtttcgtctgaactgttttggacaagtacaaaaaatgtttaacaatagttaaacactcagatttctacggatgtgccatcttttgaactcagatttaaaaaagtcacactcatataataataatttgttttactaaattaataggatgggtacaaccctagg

SEQ ID NO: 29273 - DNA, 933 bp, Medicago truncatula
  Intron number 1 from transcript Medtr3g076080.1 (locus Med tr3g076080) derived from phytozome v7.0 (chr-ID MtChr3; po s 17525395 to 17526327 reverse strand)
caaacacttaaacctgggctgctgtcttcatcaaggtcaagttgcttatatattttgtttccattacatgcaacaacaacaatacaaatttcaacaaatttgaaattggtgtatgcaacttgggtagtgaaaacgaccaatatatccttccattagatttgggttgttacattatatcctcccttaaaaaaatttcacccttgtaaaattaactccatactttctttttcttctttctaatgctttttgatccttaacttgttatttattattttttatctagaaaacaaaacaaaagactttgaagtgaagtaaaatagttctaaatggaagctaaaacacacaaattcttattgacaaattatggcttatcacacctttctaaaaacttttttttgccagttatacttggctgttatacttggctgaatgccgtcttgctgcctccttaagaattttaataccgagcacttagcttatgtgggtttgttgatcaaggactttgcatctttttcttttgtattgttatgaaaatatatcaatgaataagatgcaaagtcttacttgatcaacaaactcacgaatgataagcgctccgtattaaaatccttgagggggcagcacattcagccaagtataactgcaaaaataaatttttagaaaggtgtgataagccataatttgtcatagtttatgtggtgtttagttcctaatttcaataagaatttgtgtgaaattcttttaaagaggataaaatgtaacaacccaattctaatgtaaaggaaaggaaggatatattggtcgttttcactacccaagttgcatacaccaattggtgagtaatattttcattggagcacaagagagccaaggaaccgaaattgaaggattgatgcaggacaagagtgcttgttggagacagagttttgggtc

SEQ ID NO: 29274 - DNA, 684 bp, Medicago truncatula
  Intron number 1 from transcript Medtr2g120800.1 (locus Med tr2g120800) derived from phytozome v7.0 (chr-ID MtChr2; po s 28499543 to 28500226)
ttcaattctctcttcttcactcactccacaagcaggtatacgtatctcaattctcaatttctcccaatttttcattcttttagattttaatctgcttttttacctttaaattatgaactttttattttgaatctaagtttgatctgattgcttttttattaataatatattaaagttctgatctttgaaatcaattatgattaacaaaaaaaaagtcgatttttattatttgttgcttatgatttgccctatgcagttgcatataaaagttatgatttttgaaatcagttatgattaacataaaaacaaaaatcaatttttattgttattttgttatgattcgttgtatagagtttgaatttaagatttgattcatgtcttagaggatttgttgttttctgattggtgctttttcatgtgtttatgttatgtattgtaatgtttgaagctgtttttttatgatttatttgtgcatctgtcttgttcgtgaaattctatttttttttttataaatcatgtaattaaaattcatagctttgcttagaacagcctttgtattatgtgttttcttgtcgtgatatttgggatgtcttttgttggtggttttatttttgttgaaaatatgttctttttgttatatatctgttgaattttacctaaagtgtgttgttttgttctatagtc

SEQ ID NO: 29275 - DNA, 712 bp, Medicago truncatula
  Intron number 1 from transcript Medtr4g021870.1 (locus Med tr4g021870) derived from phytozome v7.0 (chr-ID MtChr4; po s 4290530 to 4291241 reverse strand)
ttgtcattttcttatccttgttctaaaatttacttgtgacttgcataatatcaaatattcttgttaaattgatcctttatcttgctcagttatattgtttgtttaacaaaatgtatgtatgatgttatgcacaaaataagtgatggcttaacatcataaccaagattaatagctcaaatgaactctaaggctccatcataatgaaagaggaacaaatgtaaaatgtcattattggttgattatgcattagtattttctatcagtttcttatggtgattgattggatcttgaagtggtgctagaggttgtccttttatctattgtagacatggattagtagtcttcttactctcaactcaacaattcaatttttattttcatacgcacacattaagatgcaatttatatgttttatgttaattcatgagataattgtgaattatgaagctcaaataattaatgctcgtcttaaatataagccaaagttaaatgcatttggttcaattttcgatcaaatacatttgattttttttttactttataatttatttgagttgtataagcaaagcagggcacatgcacacatcacatcacatgtataacctgaaatttcccacatattagaggtccttatctaatactagtttctatttttattgtgtttcctttttttttttcatccttaatcagtattccaagagcaccggttaac

SEQ ID NO: 29276 - DNA, 887 bp, Medicago truncatula
  Intron number 5 from transcript Medtr2g006710.2 (locus Med tr2g006710) derived from phytozome v7.0 (chr-ID MtChr2; po s 787060 to 787946)
attgcaggacgctggattagttcaaagcctataaggttagtagttcctttattagtcataggctttaagttttgctttatgatatttaatttataaacatgttggcttgtaactagtaaaatgagtcagttatagtaatatttagttataaattttggagacttcaataacatgcatatatggtttaaataaatttctagaataaaaataaatcatttgtgaatatttcctgcttcctaacctaacaggctattcaggggaagaaaatgaaaaaatggtaataaaattaattgttagaaaatgaaataagggaattgttctctaaaactgaacacactcttaatttttcactattatagatcacatgtgtttgcaatatttctctgccttctatgttttttgctgccacttctacactttttcttgtatgttgtcagttttttcttgtgcacataagcatcatattctgcattcaaattagttgatagaaaggtttttaaatttagtggttttacagtgttagtaagggcattggtgttgcagacaaacaaattagctgacattttctttggaaggaagcatggatattcaaaaaacgtattttttgtaatatactttcatttatgctcaaacatattttgtcggtgacttctcacataatttggggagcaacagcaataggtcaactttgctacttcaacctgcctctgcgcttttgtgtgtctgttaacgttacgaatttttccttatccgtgattgccaccaattaattcgttggtgaacagaatggaaagagtgtttactgtttcttattgtcagtggtactgctctgataaccttattgctatgcagggacatttttcatcaagaggcttccgttcaaacat

SEQ ID NO: 29277 - DNA, 810 bp, Medicago truncatula
  Intron number 6 from transcript Medtr2g006710.2 (locus Med tr2g006710) derived from phytozome v7.0 (chr-ID MtChr2; po s 787951 to 788760)
gaagcgttcattttcttcggatagtgagatattaacgagactgtcagttttctgtcatttatgttacctatatcgttcaagtttattttgtgtttagggctgttcaaaagaactggaaaaccaaaccgaaccacgcttaactaaaccaaaccatttctttcggttcaagaacccaaaccatgatttgcaaatagtttgctacccaaaccaaacattagataaccaaacctgaactgaaataactgaactgtacaaatttaatttcaattacacaagttcattttctggtgttatggttattttaagaatcttaacttttattaaagaggaatatttcacaatatccatggttatgatgatagagtattgcacaagtgtatttctgaaatttaactactgtataactgatttattgtaatagaattcagaatgaattgtttgctagaatagatagtgtatttctatccagcgtggtatagaagaatgacaatccttgggagttgggtaattgacttgatcaatgaatttttagaattattaacaatctgcttagctacatattacatttgtgaagttatgctctatttttttgtgcatgttgtcgttttttttagtgttctaaattgcagtttcatttaatgagtgagagtttagagtcttgggcattgaacaaaaattttcttgtgattgctaatatttgtttagtataacttttttctggcatttatgttgttcaatggacttgttctgttttttcttttgattgctgatcttttttaatattattttttatttgtgataaaggagaca

SEQ ID NO: 29278 - DNA, 755 bp, Medicago truncatula
  Intron number 2 from transcript Medtr3g133570.1 (locus Med tr3g133570) derived from phytozome v7.0 (chr-ID MtChr3; po s 33861096 to 33861850)
cccgcaatcttattgttttttctgttatatttgaggtttgttctatttttttttaatatagttgatgcttaattatactttgtatgccttttagccactgttgtcaattgctgatttttggagtcgctatttcacaatgttttgtagtactgattagggtcttcggaacaataccaatttgtgcaaactgcgttatgcaacagcgctgtagcacccttataactgttatttaacatcactcctttgtacttttcactgtaatattgcctgttgaaattctcatgttttctccattgaacctgatatttaagttgtttctttaatccttagaaacttttggttgttcattccttttcccattgtagatatttataggattgtctaccggcatggtttgttctacttttgaaatatgtatcaaacatataacagaaacaatatgttatgctctctcttcttcttacctttatttttattccaaaaataaaaaataaaaaattaccttatttatagtttggcacatatatatagagagcaagtaattgaccgcagtggttattcagttcagtttaatagttcatattatttatccattttgattaaacagctaattaagtggttatttggtttctatcaataactaagttgcagacttgctgccatggtcctaaactgtagcccccctttttctcattgtaataaaaaatagagtttcgctgaaaatagtttcaactttcaggtcattgctgtaggtt

SEQ ID NO: 29279 - DNA, 751 bp, Medicago truncatula
  Intron number 1 from transcript Medtr3g122340.1 (locus Med tr3g122340) derived from phytozome v7.0 (chr-ID MtChr3; po s 30418093 to 30418843)
cctggtatttttcttttcttttttaacttttttcatactaataatttcatcttgatttggtaaagttgaaaatttgtactttattgtgaattatttgtttaatatatgcatagatcgcatcgttagggtctgtttattacatgttcataagctgttttcagcttatttccgtaatcttctaggagagcttatgaaaacagtttctagcttatatgaaaacatcttataacagtttgactttgtttattaatttgttataaaaataacttatacataggttctgtttggataaacagtgtttgtcatgataagtgtttataagcttacataagctatttttatagaaaaaaaatataacaaagttaaacttctttgtatgtgctataagctgttttaaaaagctatattgcagaacttaaaataagccgaaaaagtttgtgaaaattatcataagctgttttcatgagttctcccaaatagtctaacaaaactaatgtcactagatgagttcaaataagccaatctaagcaggcccataagcacttatatgataagcacttgagctataaattaaattaagctatttatccaaacaaggccttgaactgtattgctgtttaaggaatagatcatgatgttttgagtaataaattggagtgttgaattgctttttctattttgctgatttttcatctgttgggtttgttttgttgtagatttgtctgtggtacgaaacaaggatccagagtgg

SEQ ID NO: 29280 - DNA, 874 bp, Medicago truncatula
  Intron number 3 from transcript Medtr1g122290.1 (locus Med tr1g122290) derived from phytozome v7.0 (chr-ID MtChr1; po s 26855607 to 26856480 reverse strand)
gtattcctggtttaacaagtgattcttcatctcctgtaagttatcctatcatgcttttgtatatttgtgtggttaaatgtttgtgttgtcttgtctctctccctgtaatcggagttgggaaaaccatgtagttatgcccaagttagaagttaattgacttctaggtcggggcaaggcctttgaatcaatgttttaacgatcgaacaatgcattgaaccagcaggacctctaggtcatagttcaattgttttgaattactcaaataagaacaaaccgcaaccaaactattcaaataaacaaaccattgacaatactagttcacggctctatcagttgtttttaaacgttgatttactccaacaggcaaaggcctttgaatcaatgttttaatggccgaacaatgcattgaactggtacgacatctaggccatagttgaactgtttgattcaaattactgacaatactggttcacagctcaatcatattcaaattaccgaaccgttcaattcaaccggctgaaccgtttggttcagttcgatttttaaaacactgcttcaaataactagttttaagtatttagtgctaaaaagaaagattgttttcttttcgttaacaaaacaagtctatcggacactttttcgctaattgttcatttgtaaggcattatcagacgtcatatatgctagacgttcatgttcccttgtacccttattataacacgtttattaatttgcagttattcacttctttttgttgattaggaaattaaattaaattatagtgggcagtggtatcttacgtttattttttcttttgctgctcttccctttctttgtagtatctcaaacatcttgcatatcatacagcaaagcg

SEQ ID NO: 29281 - DNA, 549 bp, Medicago truncatula
  Intron number 1 from transcript AC235678_16.1 (locus AC235 678_16) derived from phytozome v7.0 (chr-ID AC235678; pos 82748 to 83296 reverse strand)
ataagggatccagcagtcaattaggtcaggtatgcaaatttgtaaaatttattacctcattatcatagtgatgaaatccatgaaaatatacagtgatagttatttcagttctcataaaccattggtacttaatactcaagagttagaaaatgatatatacttttatgctgattacacagcattggatttcaacattctcctcctaaaatgtgagccttcacattatcttcatccaaaatcttgggaaaatagaagaaatgattaatgtattcttaaataaagaatcggtaacaattagagaaaggtgcaatttgaagttcactccttaagagttagttaaagtatgaggattctttttttttgtttctaaggtcgactcaataaatcaaaatcagaaattgtacaatttgaaatgcatattaattttcaaaaccacaaggttttcctttttccattctttaagagacaggttcatgatacatcttagtgtttaattacttgtgagtcgtgacagatattgtacagtgatcaagagcggcaaactattct

SEQ ID NO: 29282 - DNA, 981 bp, Medicago truncatula
  Intron number 2 from transcript Medtr2g114150.1 (locus Med tr2g114150) derived from phytozome v7.0 (chr-ID MtChr2; po s 26927015 to 26927995)
tccggtttactcaatgtattctctttatgccctatacaacaagcaaaacattttacttttattttcttaaagtatttatcttttcttgccctttactgaatatgcactgttatcgataccgaattgctatagtttcgaattttggttcatttttattgaatgttgtgtttaattatgctagatttaagtaaatggctgggattctgttattcaagcttgtacattttcatgtcatttactgtctcttctgatcattcatatttggcggtaatagtatgtcgtagttttcattcacgtgctttcaatgataccatactttgatatttagtactaattagaattgtttgtcaacattttgatatatcagaaaccaatttacttattagctttggtagtgagaatcgaaatgatgtagaatgatagacataccatacttctctatggtagatactctataaggattgccgatactctataaggacaaggaaacatctgacttgaacaataaatccagagtacttcttttgattgccgatactgtataagcacaaggaaatataatatcaatgttataattatcgcaaaaatcctagaaacattaggcatctgtaaggggtatttattgcccaaagttaataaaaatcttagataaattctaaacaagtataaaatatcctagtcaagtgctcatttcttaaatttgaatatcacaagaaattgtccatgactgctaaacgtttttaggactgtctcgaaaattacctattttcaagtaaaatttctctcccatgttctgtatagcatgccttatgcacattagatttatcacagaatgaatgcaacttttttttagcttcatcatcttattattattgtcagatattgatttgtttttctggccttacgttcaccatatatgtaaattataacagagctctgtttgcagtcttctctgaacggatctacttcaaatcttccaga

SEQ ID NO: 29283 - DNA, 456 bp, Medicago truncatula
  Intron number 1 from transcript Medtr2g008040.1 (locus Med tr2g008040) derived from phytozome v7.0 (chr-ID MtChr2; po s 1364737 to 1365192 reverse strand)
ccaccattttttagtcattgcttttggcttactaggtaacgttttctttctttctttctttctttccttctttcttgattcagcaaaatgtgtttggattatacctttttcttttccttttcaattttcttgctcatatatgatttttcatattttgtactatcttaatttccaactaaagttcctatagtacgtattttttttcttttattttccatcttttggaagtagtgaataggtgatagcccccttgctatgattatgaattatagttgacgtatgggttgatcacaaattccaacttcatatatagttgttgaaaattctttttcacactctaacgattgttttgtcgattttgcaacctatagtttcaattataacaatttttttatttaaaaaaactaacaaatcaacatatttttcttttgatttgcaggtaacataatttcctgc

SEQ ID NO: 29284 - DNA, 712 bp, Medicago truncatula
  Intron number 1 from transcript Medtr1g025410.1 (locus Med tr1g025410) derived from phytozome v7.0 (chr-ID MtChr1; po s 6275869 to 6276580)
tatttcttagcacctttgattttcaacaacaacttgtaagttaaaaatgaaacctttcttaaatattcatactaattttcaacttattttcttttttctttaataatttaacttgcccaacttttaaattttgtttctttttacaattcatttaactgcagttagttctattgaagtaagttttcagcttttgatttttggatatatactgttaaagttttcatttttttaatattttatacagatagataggctagaatggcttatgaactttgacaatagttgtagatctgtatgctttggaaacactttgtttagagcctgcattgcaataattaagtagattgttttaaggaaatgaaaagcaattgaataaggcgattgattagtaaaaggtccggagttcaaatcctagcaaaggagaaaatcataccaactaacgtactaacatttgtcattaattatttttatattacgaactctgtaatttaaggttacaaggctaaactctttccagtgaggctaacacctcaagtgtacttgagatgattaatagctgttttataagaaaatagttatgagaagctcttaggtatatgtatattctaccaacatctcttagactcttcaattcaatgtatcttaatatcaaaaggaaatttatgttttaattgcaggcacttcctaaaacattttcagacaatttaaagaa

SEQ ID NO: 29285 - DNA, 604 bp, Medicago truncatula
  Intron number 1 from transcript Medtr4g018580.1 (locus Med tr4g018580) derived from phytozome v7.0 (chr-ID MtChr4; po s 3613980 to 3614583 reverse strand)
agtgaaccaagtatcaaaaacagtcaaggttagttttttacttcccactctattgaattcaacatacaaaagctaatgaggttgagatgacacaaggaggatcataaccatgaacataaacagaagatgaggaagtataaactaagtcaatgacaagtcttcttatggtgatttcaagatgaagaaaacattgggatggaataagtgatattttataggtgcctaccctatataggaatgaaccaaatatagtaactagttctgcacatggatcagcagtaaagtgaaagatccatatgcatatgatgcatggaagatgaacaaccacctcgctgttatcgtctactttctccggtcactattataagcaagtaactcacaataattgggactttgactctccaatgagactgagttattccaaaagatagatccaatgatcaaaacattagtcttttatcaagtatcttggttacagaagtaaataactaaaatttttatggtaaggttttaaggcagtaatatgtttatgtttttgttgttttatataacttgttcatttaattgttagaattctacatatcatgtaaatcagcttgctcta

SEQ ID NO: 29286 - DNA, 347 bp, Medicago truncatula
  Intron number 1 from transcript Medtr3g166360.1 (locus Med tr3g166360) derived from phytozome v7.0 (chr-ID MtChr3; po s 43553492 to 43553838)
cttataatatcggaaaatgtagttttcggtcagtttacaaggtgataaattattttcttcatcttgttttcttaaatgacccccaaccattaaataattatccttgatttgattcactatcacaatgtacaacctttgaattattgttttcatttttttttttaagattgtaatgaaattgatgttaagaggctctgaaacgtccaacaagacgtctgaaaaatcacgactaaagtcgatgtgtgcagctatactgtggttttgatggagcttctgattagattagccgcatttaagattaaacttaggtttattctcatactttcagcatcagaactcatcaggtt

SEQ ID NO: 29287 - DNA, 635 bp, Medicago truncatula
  Intron number 1 from transcript Medtr2g024440.1 (locus Med tr2g024440) derived from phytozome v7.0 (chr-ID MtChr2; po s 6183895 to 6184529)
gcagagattaaaaggttttaaaaaatcatttgtttactggaaaataaacacaatgtctctgcttcctcctttgctcttcctccgtcaccgaccctttaacctcaatcatcatcttcttcatatttacaacatcaatcaattaaaacactctttcctatctctctttgtacttgttcgtagtgtacagatgttatgtttctctttgttccatttctctaattatcaatcactgccgatgtctctttctcttctttttgatggatcatccaaaataagtatgattccaagtctggaatcaacagcacaacctcaaatcaataaaaaacttcagaaaataatttatttttgtccattgggtcataaaaaataagtgtgattcttctttagataacccttaacaaacaaagatgaacaaatgatgaaaggatggatttttttaaagaataatccacaatcaaattccatgttttattcttattcgataacatgattatttactctattttgattatgacttatttgctagattgaacaattttggttcatttagggctatgttatgtggtagtgagaagattgagttgtgaatttgtaaactgtgattcgatggatgacaaggaaaacgacgaggagtg

SEQ ID NO: 29288 - DNA, 902 bp, Medicago truncatula
  Intron number 1 from transcript Medtr1g099450.1 (locus Med tr1g099450) derived from phytozome v7.0 (chr-ID MtChr1; po s 20314278 to 20315179)
ttaaggtaaattggttgaagctgaattgaatgatggaaagtagtataaatttagcgtttatattaattttgattgatttgtgctcttgtaacttcaaataatgtggatacatattttttatgacttgttaaatggaatctagtgtttccgtgagcatagttagttggtagagactctgcaatatgcagggtccttaaagggtaaaattttagccaccaggctaattgacaaaaaaaaaaatggaaactagttttaggaaagctttacattgttgttcatattcattaattttcatttggaggaaaaaggacgagttgattaaattgtagtgaaatgagaagaaaagggttggaaagaaatgcatgtgggtagtgatcaattcactgtttggataaacaactcaactaatccttagaggaaaagcatttatcatttaagcacttatatttgagctaattatatattcggagagaaagtatggttaaattgatttcatgtaagttatacgccgttttcttaagctattatgaaaagcttattgaaattagctaaaactagctatggacatgtcggaagatgtttacatgaactccctcaaacacaatgttattaagtacttatgacagataagcccatgttcataagtcaatccaaatgtagcccaattttataaatgctttatgctttactttttgtgctggtgtggtaacatttatcttttagtaatatatttggaagctatgcattttggcaagagattcatttcaggattcatcacagtaacacatgtttgcttaatcatacagaccttttgttttttcacgtaatgggtttcatttaacttataatatgtatttatttttaaaggttgaatcgccaaagcagggtaatagtgtggttgg

SEQ ID NO: 29289 - DNA, 487 bp, Medicago truncatula
  Intron number 2 from transcript Medtr1g028690.1 (locus Med tr1g028690) derived from phytozome v7.0 (chr-ID MtChr1; po s 7069008 to 7069494)
atgtgtttggatatatttttaaaactatttaatcatattgaattgcatctacatttggttcataattattagaaaatcttcgaaccaaaacatagttgttgcaacacatgtgatacttttctatttcaccaactgctttttagaactttctattgaatactttgatctaataaacttctaggaacttcttgggagatgaaatttctttttcataaatttttcatgtagtcacactcggtaatcaatctcggctattaatttgagtttggacggttctacatagtcagaactgcttaactgtgtaatttatttatcttcaaatctacacttagtactaatagggataattccactcctgtgaaggtacaaccttaatgtttccaaatattatcttcaaatctcctgcttgactcatgttattcacaatatatatatatttttattctgtatagattgacctatcttccaaatattctattgcggacac

SEQ ID NO: 29290 - DNA, 529 bp, Medicago truncatula
  Intron number 1 from transcript Medtr3g143560.2 (locus Med tr3g143560) derived from phytozome v7.0 (chr-ID MtChr3; po s 37063022 to 37063550)
tgacctgtgcatcatttttcgtccagcaccatcaggtttaaataaacttgtatacaaataatttttctattttcatgtttattaaatataaaatatataacaaaatgaaatttaaatatacgactttttcaacaacagaaaaaaaaaaaaagagagagagagattaatggggatattcgaacaaatacacacttattagaattattgggttaaatactaagagtacttaattttgttgaaatgaatatggtataaaactcaacagttagtttagatgtgatcaaagaaacacgagtttgacataaaaacttaaaatagttaatttataaagaagacctccgactaataagttgattttgtaaagataaattatgttcttatcaaaacatgatagctatgcccatatattataacaagttcgtgcaaaacttacaagtagattttgtataagctcatgcaaaactttgttgacaaagtacatctgataacctaaaaaaaaatcaaacgtacaggacccgtacctgcgagc

SEQ ID NO: 29291 - DNA, 616 bp, Medicago truncatula
  Intron number 1 from transcript Medtr1g099890.1 (locus Med tr1g099890) derived from phytozome v7.0 (chr-ID MtChr1; po s 20568210 to 20568825 reverse strand)
cttgtttaccaggatcttcttacaggtaataaaaacctttcatctttgagatttttttcctttagttttcgtttgtttttcttttcatagaattttgattttgatgttctgttgattgttaaatacttgatcctgtatttagtgtatgaatgaattttgtgttatgtttctcacaaacctcactttggttcttttttttttttgtcctaaaaaacagagaggttttaaggttttttcaaaaagaacatgaagttttctgtttgtgttctgtggtttaacctttggatttgaaggaggggaagtaacttatattattatccaagattttgataaaacttgttggtgtaattttaaagttgttgtttttgtgacagacgattaaatttatgatttatttaccacaaattgttatatgaatattttttacccttaaacatgattagcctaacctaatacttgataatggattttagtttgtgagattgcaaactgctactaatatttaagattattgcttttggttgcggatggattgagtaaaataatgttggtaattgttttttattcaaatgcttttacttataaactttactttgttgatgaatttctctaggtg

SEQ ID NO: 29292 - DNA, 835 bp, Medicago truncatula
  Intron number 1 from transcript Medtr4g015300.1 (locus Med tr4g015300) derived from phytozome v7.0 (chr-ID MtChr4; po s 2788222 to 2789056 reverse strand)
tgcctgttgttgctggtgttgtcattgctagtggggtaaataattttcaatcttcaatctctttataattttaagaatttttgttttatcttatgttattagttttggatttgaattgttttagtgcatgattggattgacacataatttgcgcgaagtaatcgtgataacataattttgtcgtattagagtgtaatttgtctcaaaatcttggacaatattccgtcataattatcggaaatccaaataagagaatgaaaatgtcaagtccaatgggtgataaataagtcaatgctagttttgaattttgaattgttttagtgtatgattggattgacgttaaatttggcgaaataactgtgataacatgattttgtcgtattagagagtaacttttctcaaaatcatggagatattctggtaatccgtcataattttttagaatccaaactagattttgtcaaaattattgtgaaatgttgacacatttcataatggaaattcgaaccttaggttggtcatgttgtgggaccaacctcttccactagaccaaacacgcgccaatcattttttgttatattagttttagtgtttttgggtgaatgttaatcaaaagtcaattcaaatgaaattagtttgttgaaaatgattgtattgaaatttagctcatttaatctttaaggaacttgatttggtaagtttgatatgattaaaagtaaatgcttgaattacctatattctaattccttcaataatcaaattgtttttcatcaatctcacatgcaacattatttctgcagggtgaaccaagttttcatctatttggatttataat

SEQ ID NO: 29293 - DNA, 385 bp, Medicago truncatula
  Intron number 2 from transcript Medtr3g103550.1 (locus Med tr3g103550) derived from phytozome v7.0 (chr-ID MtChr3; po s 25501919 to 25502303 reverse strand)
ccaaggtatgacataacttttctaatggcaaatgttagttgctagttatgattttatcggtgaggggagtaaaagaaaagtgaccaagtccttatgcaacggtataaattaaggacaagcagtcaacttgcttaagtattaattgtttaacattttgttttacatttacttagaaagattttaagaaaatgcgttgaattgcatgccaaactaaaaatatagagcaaatattttgcattcattctctaccatgctttttctgcccatcgtttcatattctgttcgacttttgtttttggtgaaatgttggacgttttatttgagtaattttctgactgcaacatattatcttctaaccaatgcatctcttatcttatgcagttac

SEQ ID NO: 29294 - DNA, 702 bp, Medicago truncatula
  Intron number 1 from transcript Medtr3g103550.1 (locus Med tr3g103550) derived from phytozome v7.0 (chr-ID MtChr3; po s 25502434 to 25503135 reverse strand)
attgtgattcttctctcttcttttttgcgggtaaaccttccttcaaaaccctaattatcattctaatctgatatctaaatcacatttctgttgctgaaggtgatattgtttgagacaatgtcctagctgtgaattatggttttaaataaaatgtatattggttaattttatttgctttgaaattattttcttatcaacattaattgtttccttcaatggaaaatgttcaatttgatttgtttacattttccactttttgtgtttaatctttggtttaaacggtctattatgaaacttttgctttttctacagttttttcttttcttttgacgatgtcattgacaaattaatttgaattgttaatcatttctgtggtctatttggttggagaggaaatgatgaaaacactaatcagaaagtgatggttatttattcctctttaattataataagggcattgcaaatctaatgcttctgtgatttgagttcatctttgtcttggttatgttgtacattaaaaaaaaaaactgtggtcactgcataaataaaatagcatgagatttaatgtagtagtgatatgcgttgatgcagttttttacgaagataatattaaaatcacttaattatggtatttgctgatgcatttttttgttttaattctaagcaggctgaagcagtttgtttatcaccccaataggccaa

SEQ ID NO: 29295 - DNA, 959 bp, Medicago truncatula
  Intron number 1 from transcript Medtr1g092970.1 (locus Med tr1g092970) derived from phytozome v7.0 (chr-ID MtChr1; po s 18777319 to 18778277 reverse strand)
gtatcagagcctggtttggcatccaccttgaatgatattttccgctgcattttcttaagaaaattcaattttctcgtttatttctttctttattcttttcctttattgtcatttctctttgattttcccttaatttctcgagaaaaaaaaaattgcttctcaagctttctttcttgattctgttacaatctcaatattgagattcagttttctttgttatgatctttgtccactactttgattcagtttctgttcttgatttgtttgatcaatttctcttttgatctgcatctcagtttcacatgaacaaaattttctttccaatttgtgtttgcgtttgatcgcgtttcctttgttctcacatttttcccctaatttccagggttccgtgattttgttactttctgttagtttttttggttccatttcacgtgtgattcgaaaatcttattcgaattcttcatctattgcaatttccagtttctgaatctttcgatttcgtgattgaatcatgtccttgcaatcacaattctcttttgaaattccgtttttcatcacagttttgtttatgcttgctcttaatcccaaattctagggtttgccgttttcaattccatgacaaaaattaattttctgatccactttgacaattgacggattcgtatctgatctgagggaggttgatttctctcacaaattctgatgacaaattgtgctctcaaggtgtttgtgataagttttctttgaagatgagatgaatttttggcagcaagtatgggttttcttcaatgttattgcattcagacatgaagcttctctacattcatttagtcttcgacttcgacattgttgactgcggttttcgttgagattgtgtgaggttgctgattgttaggcacaattcttgtgcgatattcggtggcttctcctcatcaaatgtgattgatgttcagacgtga

SEQ ID NO: 29296 - DNA, 766 bp, Medicago truncatula
  Intron number 1 from transcript Medtr1g096730.1 (locus Med tr1g096730) derived from phytozome v7.0 (chr-ID MtChr1; po s 19843941 to 19844706 reverse strand)
ctaacggtgaaaatactaattgataatttttatttttcttcatatattatcgcttttggccaatgctccatgccaccgacaagctctttaacacacttttttttcaatgtagttagttgttgtattaatatttactctttggtgtggatttgaagcaaaaactgaacctctaactcatttaaccttagctcaaactaatcgagtaatccaaccctcatataacactcacactctttgattaaaaattacattgaatctcactacatgatttgattggacccatgtaaattttaaccaattaagttgagtatgtgttagacattgcatgttaaaaagtttcactcctcttgttgattttacttctataattgaaaaaatatgattgattggtaaatgataccatccccattcttggactatatcatacattttttttttacttctatatcatacatttttggactatatcatacatattatgaaaaatataaatgaatgaggaaataatacttttaataaagtagtttagtctctattaccataagtgctggttgaaaaatattgaattgagagtgatgtaagtagtacaattggaaaaaagttgttaatattatgctgaaaattaaaagggtctttcattttgtgacaaatatttttatcaaattggccatgattatgggagggagggaataatttctataacctaaaatgtactaagtattttctcgtagatagagacagcaagttcataataaaatctgttaaa

SEQ ID NO: 29297 - DNA, 829 bp, Medicago truncatula
  Intron number 1 from transcript Medtr3g092980.1 (locus Med tr3g092980) derived from phytozome v7.0 (chr-ID MtChr3; po s 22011591 to 22012419 reverse strand)
ggatttaccaggtgaatttaatgctttttataagtaaatattagtcgttattatattatattagtagtctggttaaaaaactacgccttggagtttttattttaaataaacgatgttgatagagtacattgataatacatgcaattaaagtcactaaaaaccaaatggatgaatttgcgaaaaaagcaacaaaatacacaagtctacaaatacgactatgttcaagtgtaaaaaatactaatgcctacagatctgtaacattgatggtgccaaagtcattgattagatctggacttgatcaaagctaatttttcaacctaaatcaattaaacactgcattaagatgaaaaatcaagaaaacactatacaacaacgagaaatcataacaaacaatgtcgtattaagacggtggaatcattaaaacttaccaaagaagacttaatttatgtggaaatcacttatttaactaaaaaaaagaaagaaaaacaatttggatctgaatgaaaaagaagaagaaaaattgtgaccactagggtttggcaaggataaaagcgagtagtttaattacgccttagagatatcgtgattatcttaccttgatggttatttattatctcttaattactatgtaccaccgacacatcataatatgtaaggtatccgcaccaacacgacactgatagatgtggttaaatttaatttattttattttttaaagttattatgagtgtggatctatcagtgtcatgtctaatgtatgtatgtatgtatatcttttggtgtttcataacttaattatgctttttttttttttttggtttattcagag

SEQ ID NO: 29298 - DNA, 916 bp, Medicago truncatula
  Intron number 2 from transcript Medtr1g064890.1 (locus Med tr1g064890) derived from phytozome v7.0 (chr-ID MtChr1; po s 12726171 to 12727086 reverse strand)
tcttcgattggtaagtttaaaaacaattctatgttatctcaaagtttataatttcatttgtgttataattagtggtgtaaatgctttggatcaacccatctacaactctatatgatattgttaatcttatgatttctttataataatgcgatttgtgtttaattatatgttctttaaatttctttgacagccttagaaggttagtttgctatttgaagatatggagaagtacaacgtcacttttctacttcaatgaatcaaagaaatacggttatgtaaaaataatcatttcttgtatgtatgaaatttattgtaagaatgatgtgtattataaagtgaacctgtattagttagtttgtattttaaataaaaaagactaaagcgttaaatcttaataaataagaaacatttatggtaacattatattatatacttaaaaaaattatagattaagataaggagttattgattttctttatgtttattgcattcagatggacactcggtgtttgtttgttcactattttcaatacgataatgtgtataaattacgaataaattttaactttgattaaaattgtaggaaaaaataatatataattttatcttttcgaatgacaccaacaatatagcaaattaaccttggataaaatcatgtattcccttttctctatgaaaactagaattacctcactcgatatgaaaatattacaaaatgactcaaaaatcataggcaattgctctaaaactcttctatctaggataaaactaaataaaaattattgaaaaatatgtatgaataacgtaagatcacatgtcatcatttgtcatattactgttgtggagctaccgatgacctaacctagtaacgttgcatgttaagtattgtgattgtatcgtgagaggacgtcttcat

SEQ ID NO: 29299 - DNA, 866 bp, Medicago truncatula
  Intron number 1 from transcript Medtr3g109930.1 (locus Med tr3g109930) derived from phytozome v7.0 (chr-ID MtChr3; po s 27629112 to 27629977 reverse strand)
cgctgcgtttttcctcttacaagcttgcaaattcggtatgttaatgttttctttcatcatttttacaatgtttgtttgatcatgtgttgatgaatgaaatgctgttgtgaaattgaaggtgaatttgactttgactttgactttcaatttattaatttgtttgcttatttggatttttggttataaccttaatagggttagatgttattggatgatcatgcatttgtttaattatttgtttaaaaaaaaaaaactttgagatgtaatcatgggaaaaacagagtttgattcctgggtggaacaatcgtcggttagactttgtaccttctggtcgaactctggaatactagggtctcattccacctgagaactggagggttaacaaaaagaaaaacaaaaaaaactgagatgtgaaattgagaggggttttgtttcattgatgaacttggttctgtgttgtacacatttttgttatttttgattattagttttaagtttgtggattatggtttataggcaattttctattttaagaatgtcatcttgctagtcaattttgtttacctgtaacatatctgaaggaagacttgtaattcagaatgcagctggtataatgttattgatttcagttatagtgatttaacgatatagcacatgatttcaagaaaaacttctttgattgtaaccaaaaatgtttacattgctttcgtggttatctactgtgtttgcattgattaatgatgctaagttagcagtattatttctatttgagtgtttctgtatttctgatactgatctaattcgtgtttttgattttttttttttttgcagagatttgcaatcttattttgcagatcttagcattt

SEQ ID NO: 29300 - DNA, 961 bp, Medicago truncatula; identical to SEQ ID NO: 28737
  Intron number 2 from transcript Medtr4g005920.1 (locus Med tr4g005920) derived from phytozome v7.0 (chr-ID MtChr4; po s 535138 to 536098 reverse strand)

SEQ ID NO: 29301 - DNA, 796 bp, Medicago truncatula
  Intron number 1 from transcript Medtr3g086750.1 (locus Med tr3g086750) derived from phytozome v7.0 (chr-ID MtChr3; po s 20428913 to 20429708)
ggacttgccaggtataatattacactcaaacatgtatatgacatgagtttaatttttatatacattttcaaacaatcacaatcatttttatctgtgacttttataagttaggattaaaatcaagtattttgaatgatttataaaaagtgacattgtgtgacatatctttcatcaatacatgcacagaaaagatagaggtttcaaaattcatttttgacctttgttttgaacattgactaaagaaaattacataacaataagaggccttgaggttaaaagatcgacctcttattttgttctgattgacaaaatcattattggttaatgtagcttgcaatattcagaagtgcttttaacaatcaaaacaaattaaaagaatcttaaaaaagtggaggcacgtttctttagacacgattttgcttctaatcatctttattctacaatatacgaaacacatgcttgctttattggtcaagtatattttttttcttccactttggcataaaatatttaagggtgtacttaacgttgtagggagaatggtccttcaaaatagggttactgttgtgaacgtcaaggtacatagtaatgaggaaatagttggattcccaactcaaaaacagtcaacaaaaggaaaggatcacatattaaagaagatttcttaattttcagtctttcaaaacatgcaaatatataactaggtcgaggtgtttctaaaaagtgttataattttaacatattgttattattatgacatgattatagggaagtcattgctaccgggaaaagatttgga

SEQ ID NO: 29302 - DNA, 366 bp, Medicago truncatula
  Intron number 1 from transcript Medtr3g098310.1 (locus Med tr3g098310) derived from phytozome v7.0 (chr-ID MtChr3; po s 23757286 to 23757651 reverse strand)
gcctttttttgggacacgtggcgtcttctcagtaattttgggatgaaaggggccaaaattgccatttttttaataggggccaaaattgcaacattttgaaacatagggggcgaaaaatgcagtttagcctaaaatttatatagcaattcaaagaacaactaacataacataaaatttatataaaaatttgcaaaattaaatagtaaaagatatagtacgtttgttttttgaaggtagtagaagatatagtacatgaattcctttcttttattaattatgtgcaaaattaaacattgatgttgattttggaattatttcaaaattgtactagcttggttctacaaacctgaatatattatcaacgag

SEQ ID NO: 29303 - DNA, 797 bp, Medicago truncatula
  Intron number 1 from transcript Medtr3g143650.2 (locus Med tr3g143650) derived from phytozome v7.0 (chr-ID MtChr3; po s 37110509 to 37111305 reverse strand)
atctcaacgcactgttcatcatcactctctcacctgtaagtcttctctcaaccttactatgtctttatctagggtttactttatctcccttaatttcaattttcactttcttttcaatacctaattcactttatccagaaaaaaaaatctaatttagtttatcgaaaaaaacctaattttgcttatcgttaattggttttgatgcgtatgtgcttgaatttgaatttgctgtggtgatattcgaatatatattgctcgtgtatgaattcttagtgttatcaatatcgtttatgctgaagattactgcgtatcgtattcgcctatactgaaagggaacattggagacacgagaataagcatccgttcgcaaattcacagaaacttctcttcttctcatcgcgtgtgctttcttttagactaacaataacaacaatttttgataaaactctttctcatctgttattataacttattatccagtgaaatcactgtcttgttttccgcgattccccactaattattcaacttatatccgtggaaggaaacttatttcgtcacttccacctgttgaccataccattaatgtactaaaacattgaacgaaacttattatcatcattatttttgaacccacattctttaggctttgatccatgaaaactggcagacgttagtcattaggtagttccataattgggtcggtggtctccttcctatgtgctttagttctatgtatctcagtaagagtacgttattccaagtgctaatatgagatacaatttttctgcagtaatttc

SEQ ID NO: 29304 - DNA, 914 bp, Medicago truncatula
  Intron number 1 from transcript Medtr3g124370.1 (locus Med tr3g124370) derived from phytozome v7.0 (chr-ID MtChr3; po s 31515227 to 31516140)
tcaacaacactctcaccgatattcacaccagacaggtttctcttcactccttttcttcttgtttttttttttcttcgtgcatatcctaaaccctagtagttgcgctcaataaacgcgcacctagattaattaatattacaaaaattgtgtttttcgatgcttcgctatcacatgttgatgcttttctgattattcagttaatatcatgttattattattattgttgttgttactaagaatattaagagaataccctgttttgttttcttatttgatttatcaacactcatggaatgatccacgctacaattgcccatgatttattattgttttatagaaattgatttcatgcatgctgcagactgatttctgcttttatattattgtttaattaatttcatgcatgttattatatacttttatttgagggaatgttattatatactattatgtatagaatccctaaaaaaaaagtatagaattgtaattttcccccctttttctggtggcttgttttcttcaatcacttttattttatattttaggttctgtactctttgtcagtgactaaaactataaactttaatttataaagctaaataaattaaaaaataaatgcaatgcttttaagctttgctaaactgggtttatgattttgtataagtagatactttgcttgaaatttaaatgtgatttttttttttgggtgttgttattttcttcttccctttattctctgctctgttatttgggttttgtgagtattgatttttgatttctgagctcatgtctaagggaaaggcgtcattttttgttctttgagattttaattatcattgtttaatttttttttttggtgacaactggtgtattaattatatagagactggagccagtgaagaaaagggtcattt

SEQ ID NO: 29305 - DNA, 550 bp, Medicago truncatula
  Intron number 1 from transcript Medtr3g058880.1 (locus Med tr3g058880) derived from phytozome v7.0 (chr-ID MtChr3; po s 13076788 to 13077337 reverse strand)
ttcggtctttgaagcaaaggtaacaaaacaaaaacacagtttctctctctttcattcatgcttccgaatctgtaccctttaaagtttttaactttatttttatttattttttcgtttttttatttaaaaaaatgtttttttttttgtttttgattttttggggttgacactttaggttcatgcatcttcatcatggattaaagtttcattttttatgtgtttgatcatatgggtttgtagatagagagagaatttagagagagaaagagaaagagtcaaatgggtgttcaattttttcttagtttttgtttggccaacaaaatcacatcaattttctttttttagttatttttttacaaataaagaaggttatttttttcttcttttccttaaatgctttcttgttaagtaattttaattattatttatttattatttaacatttattatttatttatatttataacctacccatgttgcaaattttctgacttttttgaaatatatttttgcagatctagttcagtattgcagattttagtgtgttgaa

SEQ ID NO: 29306 - DNA, 387 bp, Medicago truncatula
  Intron number 3 from transcript AC235665_1.1 (locus AC2356 65_1) derived from phytozome v7.0 (chr-ID AC235665; pos 35 53 to 3939)
aatacaaccagaaggagaggagaactgttcttgaggtgaggtcaatcaattgtgcattattttgctttgaatcaattcactagttttttatgcattgaagtctttatctaactgattttggactcttttcttactaagatgttaagcaacttcgtactttgtagaaaatatttatgatataattagagtacaaacactaattcgtttaaatagaatatattttgaagccataatttgtgacattctatgcttgttttcttgcttgtttagatagtccttgattatatgctttcattttcttgtcagtttcattaaatcaatttcatgcatatatttgttttattttttgcggtaaaaaaggtgctcgaagattttccttctgttcaa

SEQ ID NO: 29307 - DNA, 881 bp, Medicago truncatula
  Intron number 1 from transcript Medtr3g106570.1 (locus Med tr3g106570) derived from phytozome v7.0 (chr-ID MtChr3; po s 26850815 to 26851695)
agctaggagggtgtctgtcatttttttccctcctggtatgtttctacctttcttcttcttctctgaattcttcatatatattatactgttgtttcttccataagttatctcaactgggtatgttatttgagactcctcttttaatctatatatgtatacaatgtttctaaatgattatgattgattgtaaattgatattcagtttgtgaataaattaatatgatcaaattctatgcttttcaaggattttccttttgttagttaagtttgagatatgataccaatgatctaagatagagttcataacttttgcacttcctttctttcaactcaaagatcatgttcacacttagttcagctaaacaatatggctagtttaccattgtattggttgtattgaaccttcttaagagtaagatatggcagagtaaattgattaattatttcttatttaccatttgaatatgttaatacgtttttggcgttgtaacttttagctatactttgattgattttctagctagagtttagaatcgttgggtattactcatagtttactgacaagtagacaggccacttgaactgttgggtacagtttaggggtaatattgaaaattggaccgcagtatttaaacactccttgttatatcatgtaactctaaacttgaatagtatcaaagtattgtagccattatgtattcggaaacccatacataattggccaacctccatgatcaaatttcgtgtgttctttgtctacggttttcatatatgttttcttttgaaccggtgttgtaattctaacaagaactgacttgacctttacgatatatttttcttagtgttaatattgattttttttataggtatcatccccataa

SEQ ID NO: 29308 - DNA, 957 bp, Medicago truncatula
  Intron number 1 from transcript AC235757_28.1 (locus AC235 757_28) derived from phytozome v7.0 (chr-ID AC235757; pos 83908 to 84864)
attagttcgattttcaatcacttttctcacatctacattcattcgccttattttgatttctgttaatttttcttagcgattttaattcatattgtgtaattgatatcaattcaattcgccctttgtaaattagggtttgagtgtaaaaaaatgtgtttttttatgggcggtaaaaatgtgttaattgggaatttttaagggatgggatgggatttctagcttgattgattatggcttatttttatcgagattgtgctaaggtaggatttttcgttaatctgtgttattattaagtacaaagttcattttttttcggtgtatttgttgaactttggaaagttcagatgtagttaagttgaagaataaatcaattttgtcaccctctttccaattttgttcctaaactatatgaaatccgtcgatttagttcttaaaagaatatgaaaatctgtcaatttaggcatagcatattaacagcagagagactacttattatatttatatagtttagggactaatgccagtttcccaagagacctcttggttggaagtttgcttctcaaccttgtggtactttgttcgacacttggcaccaagaagggactaaatttaaggtagaatgatactttagggactaaattgatagtttattcttaagttgaatttgcctttgtttgggagtttggaggagaggggagggctttggggtggtggaaaatatggagaaatctttcactttttgttaaagagtgtttttgtggagaatgataaattaatgcttatgatcaatatatttttattagttgctgtgaagtaagtttggtttaatattaacgaatgattgcattgccgattgttatttagtctatttttaacgcgataattgatttcgaatgctgaatactgagctttttttctgcagtgagtgttaagtggcaaaaggaacttttcaaggat

SEQ ID NO: 29309 - DNA, 473 bp, Medicago truncatula; identical to SEQ ID NO: 28253
  Intron number 1 from transcript Medtr1g106180.2 (locus Med tr1g106180) derived from phytozome v7.0 (chr-ID MtChr1; po s 22067206 to 22067678)

SEQ ID NO: 29310 - DNA, 409 bp, Medicago truncatula
  Intron number 1 from transcript Medtr3g163340.1 (locus Med tr3g163340) derived from phytozome v7.0 (chr-ID MtChr3; po s 42919230 to 42919638)
tgttgctgctcctgctcaaaatcaatcccatagttatttcttcttttccccactttttcttgttatttattaccgctttatatctcatacttgtcattttctctaattattatcggtgttgtgttctattcttatatgtgcttgtgcttcataggtagttaattcactttttaagagtaaataattgcaattaagtgagtaagagccttatatactttgggatagaatttcattgcaaaatgcatagggtctccatgaatcattggttaggactgacaaatctatatcattgattttcattcctccatgaatcctccattcacactttctcagttatcaaaaatacttgtttgctttttacaacttttaatcaaattttgtttttcttcttctcatattagagtctccc

SEQ ID NO: 29311 - DNA, 475 bp, Medicago truncatula
  Intron number 1 from transcript Medtr1g102860.1 (locus Med tr1g102860) derived from phytozome v7.0 (chr-ID MtChr1; po s 21213159 to 21213633 reverse strand)
ctttgctttcgtttcgttggtatgtatgtacttttgtttttgtttatgtcttcgatctaatttccaactccttctttctccatcccaaattgtatattttcttcattcaattttttcttgattatttttatttatgctttttttcttccttaattttgttttttcaattttctctctgatgtagctcatgttcgtttgtctttcatagctgtctgtctctctgtgttcgttaattttgttttgttaatttagatcccgttcaattacaacgatcttcagtttagggtttgtgatgttttcatgggattgattgatctttggtcgcaagatggtttatttaataattgggctagtttgatttcaacttttatggcttttaattcatgtgggtctatttggtttttgataaaaattcaatttttataataaaggaatgttttttgagtgtgatggcatttttcattctggcaggtgg

SEQ ID NO: 29312 - DNA, 649 bp, Medicago truncatula
  Intron number 1 from transcript Medtr3g111030.1 (locus Med tr3g111030) derived from phytozome v7.0 (chr-ID MtChr3; po s 28057853 to 28058501)
gaggtataaattgcctcaaacttttttatgctgataacttttgttattttgtatgcattttataacttttatgttatgtgatttcatttattttttatatttacattattatccttgaaaacacaacatgacatcagaagaaatgatatattatttctatcaaaataaagaaaggaatgatatattattagttaatattttgattgatgacataacttgattttcatagtagtcaaacatggtagggtagcacatttttacataagaacaaaatattatttttatattgaaaatgaaagaacatagtgaaacctggttattaatttattttgagcatcatgatctaaacttacctcttgatgaaatgattttgatcatggttagaaaaacctcgagaaatcttttacgaatttacaattatgagtcataaaaacgaactacctcacatgaatactccttttatagtgaactcttatgagttccggtaaactctaattaaatctagataaacatttgattttactatagcaagttaaagagttgagtcgaccaaagataaacaaatttacctaactctcgagtttgacagctttgattctgacaacataatgtttgaaacttacaggacctggctgttcctcactggggt

SEQ ID NO: 29313 - DNA, 838 bp, Medicago truncatula
  Intron number 2 from transcript Medtr2g121840.1 (locus Med tr2g121840) derived from phytozome v7.0 (chr-ID MtChr2; po s 29006384 to 29007221 reverse strand)
aaaaacagttatatggtttttaaattgtgcgttaaaacttaaaagtgcattgttagtgttattatgctttgttgatgtactgcatttgaaataaatttggaatctaaggaggtaacatgtatgacacttgaaggttttaagttttgaccgaggtttttatggtttgagacaaaatattctatctgcattttcagttttcattctaaattgcaaaaatattatcttgcttttgctttattttattattttcaattacttacttgtgtagagaaaataaaaacagataataaagttaaaaaggtgtgtggtcttcaaaccaagaatgccattgaattgcagaaactacaaacattgtgatccttgtgaattgtgattgtaaaaaattgcgaatgaatccggcttacgtgcaattgagctgctatagttgcagaaatttttgaaaccttaacactgcagtcacaatagtagctgttgatcacaatttaaaacacaaaaatggattccttacaatatatacttgtaagttatgtggcatgaaataaaatgcatacggtgatgataatcctttagtatagcctggtcttaaatgatactaatgatttcataatcatgctttaggaacttaacttccagcggtttaattggaactatagcttctgggatatccaatctgaagtcaatagaatatttgtaagttcttgaatctattatgtacacaaaaaacaaatagcaagctaataagttgatcccaaaaatgaagcatactcttaaagttgagtaaaaacattttgttccaattttagggatttgtcaaataacaatttgactggagctgtgc

SEQ ID NO: 29314 - DNA, 803 bp, Medicago truncatula
  Intron number 1 from transcript Medtr3g092820.1 (locus Med tr3g092820) derived from phytozome v7.0 (chr-ID MtChr3; po s 21930492 to 21931294)
aagagggtgtgttgagatctttaaaaacttcagtacagcatactctcattaatataattaatagaagtaaatcctttagtacgagtaaaactaagtactagataaggaaatattgacattaatggaattgatggcggattaccaagtaattctcacattataaaacctgcattgattttgagttttgacaacaccaaaggaaattgaaaatattaatcatactagcaagcataacgaatggtgtttatttgaggttatatctatagatttttgggaataaaatgatagaaatatactccttctgtttctaaatataagcaaaacattaattgaatgaatctaaaaaatcaattttgcttatatttagaagcggagggagtacatgtctatgtttattacaagtttaataaatttttatcctagtgtataaaatgtttatggtaataaaaataatttcacatagaaaattgtggtaatctcatgaagatgagaataaattcaaatttaactacctattataatccttatttttaaagtttatggaaatattataatgttgactaaacatcttttttctaaataccttaaaatgaaattcacatctttatattttaagaaatgttattcctaaaaataaatccgataaacttaaaacaaacacaccatcttttgcattggggaatgttattcctggaggagttacaaataagcttggccaaagggacaaattgaggggacctatttaatattttttttttctttttaggtttcacgctagatagatcagttattttttatttagc

SEQ ID NO: 29315 - DNA, 711 bp, Medicago truncatula
  Intron number 1 from transcript Medtr2g111430.1 (locus Med tr2g111430) derived from phytozome v7.0 (chr-ID MtChr2; po s 26420012 to 26420722)
gccaggtgaatcaatttgtattgattggatcattaaacatgtttgacattaattaaaattaattttaaaattcacatatatgattgattgtgatttcttgacaataaaaaagttttacaccgtcaatgtatcaatattaaactcttgaaaatcagtcatttgctctgtttgattttattcgtctgatatgatgctctttgacttaacatatttccagtctttagaactagaatgtaaaatggaagagtggtttctttcgtttcgaattaaatttatctggtagaagaatctgttatcaatcttcaccttatagccaaaaatgctacaagttacaaaatgctgtcaaattatgtgtggatagaaagaaagctgttgtaattaagcataacaaatcaaaattgtttgtatgaattatgtctttctgttgattaattttatcaatacatggtgcatctgaccttgagttggatcaaaatatggtttatgattgaacactatggcgtaatttgatccatgtagccgaccccacttagtgggatatggcttggttgttgttgcatggtgcatctggcctatcatccaagaaattgacatgctgaatggcccgatctaaggtctaaagaataatttatttaaggtgtcagcttgagagtaccctccgttagaaactaacatttctcttgcaggtaaggcttggtctagtccaggaag

SEQ ID NO: 29316 - DNA, 515 bp, Medicago truncatula
  Intron number 3 from transcript Medtr3g149360.1 (locus Med tr3g149360) derived from phytozome v7.0 (chr-ID MtChr3; po s 39036581 to 39037095 reverse strand)
aggttctgaaacaactgaagtatatagaagtatgtttaaactgcatatttcttactagtcaataatcttgtggtgagcgtttcttggtttgcactttgcctgtatactgtgaaagattaaaacataatttgcaacaatcaaatcatgtttatgatagaacattatggcgtaatttgatccatgtagccgaccccacttagtgggtcaaggcttggttgttgttgttagaacacccaccaaggctttataggatcagcttaagttttacatcttctaggaacattggaatgtggactagttgtaggtcaattcccctcctcttctaatcccgccttatgggcccgtcttattttgtctttccatagaagctattttttatcgtcattgcatagttacatgcttaattgctgacctctatggtgatatatttttaaattttttcctctttcttacttttgtgtctacctactttccatacagttgaggccacgacttgctgcaaaacagagaaaatc

SEQ ID NO: 29317 - DNA, 648 bp, Medicago truncatula
  Intron number 2 from transcript Medtr3g149360.1 (locus Med tr3g149360) derived from phytozome v7.0 (chr-ID MtChr3; po s 39037102 to 39037749 reverse strand)
ctgattgtgctgtacctcaggtgaaatatattgaactctggctttctgatatatttagagtgaagagttgaaggaaatgatattaaaaactgatgaagcagagcctaggctcattacaatagtggactagagcatccactcccgagagaaaaaagaagttcctcttttcatgattctcgaaatgcatgaccggccaccatcattgtgcttatatcatgtccaagacaccctccaattaaatttgaaggctttagagacaagctcaccttgtacgactccgtgtagccacacaattatgcttgtgtgggatattagagtcaacaccccctattagttacatcaattgtaactgacaactgtcagttagtcaaaattagtcttttggatagcctataaatagctgctcctgaactgtatgtgcaacaaaaattcattcatcaatacaatttagttttagtcttttagacaatagtctcttctctatttctcaatcccatcggcaagatttggtttctacaattcaagcacatttgtccttttctgttcctgtgtaatttgatgtagctttgaacaatatcttgcttcgtcttgcattatgatcattctaaattccaatcttcctttatttgctgcaggaggtggaaacag

SEQ ID NO: 29318 - DNA, 704 bp, Medicago truncatula
  Intron number 2 from transcript Medtr1g146780.1 (locus Med tr1g146780) derived from phytozome v7.0 (chr-ID MtChr1; po s 32556376 to 32557079)
ggcttcttatcgagggcaaacattggccagaactggtaatgttttaatatatttgcttccatatatgatttatttctttcttttccatgttttactcgtcactaatttagtcttttatgttctatcaaatgttcgagatctacttgcggcggtcaaataaacataatcaaccacataattgaactctgttaactatctaatttgttgtcaaaaaagatgtcaagtttttatctcaaaataatacaactcttttgcaatttataatggacaggatttgcttcttttatttttccatgctttactcctcactaattatgttgtatcaaatgtttgagatctagttgctgcggtcaaatgaacataattaaccacatatttgaactctgtaaactatctaatttgttgtcaaaagatgtcaaatttgcatgccaaaataatacaactcttttgcaatttatcacgtagatataatcttggccgtaaaataagatgttatggctaaaatgaatgctgttaagtttagtacttatcaagtgatgctccttagacaacactatcttttgattctttcatttcaatttctccactttataacatacacactataacaccaacataataattcattcaaacctcttaaagtttatcatgagaaattgaagtagcgtattttctattctccattttgaaatgcagtccggggg

SEQ ID NO: 29319 - DNA, 363 bp, Medicago truncatula
  Intron number 3 from transcript Medtr3g010570.1 (locus Med tr3g010570) derived from phytozome v7.0 (chr-ID MtChr3; po s 1876196 to 1876558 reverse strand)
ttccagattggtaaatctcatcagatatttgtcaagtatgtttaccaaatcaacttttattttcttttaccatctttttttccatgtgttgtgtgtttttataactataggttatttgtttttgtataggttacctaattaaagtattattgtgatctttgttgctcgaatatgtttttttgattgcttcaatgactttcctacagattattgtttcccaagttcttttctgcacaacccatgagctcttgcttttggcaaatgtatatgccaatctgaatataatgtcttgtctgtcgatctcatgccaaacctataattctcatatagttctgaactttcaattaaaggctgagatctgtt

SEQ ID NO: 29320 - DNA, 1046 bp, Medicago truncatula
  Intron number 3 from transcript Medtr1g111110.1 (locus Med tr1g111110) derived from phytozome v7.0 (chr-ID MtChr1; po s 23569357 to 23570402 reverse strand)
gatttccttcaaccgcaggagacatcacgtaagcttgttatatgtatacatgggtatattaacattccttgtgccaaaatagcttatgctgatatcatcaatcaactcttctctatttctctcacactatgtaatcctggatttttattcctttgcgccaattagaatttagttccaacatgctagtcttagactagcatattgtaaaatgtcagccatccaactttttttcaatttacaactccttggcaagcagatcaccagattcttttaagagtatttattggaaaatcttatagatacatcacaaagattttatgttagatacacttgagaccctgtggatgttattgttgacttaaggtttcatcctttaaaacacagttaagcactatttgattgactctaaaaatatttctttcctttgatctgtggatttcaatatgcacttcttctgaatggtttgttgcatttgaactcttcaacatgtctaaaattgtttctatccaaaaccatgtctaaaaatgtttactcgcaatttgttgtgaattgaagtaaaacatgcagggggatgtcgtgggttaacttaatatgtgcaatgtatttcttaacacgattttttaattcagcactagcagtgcatttggctaaacaacttagttaagtgatgattgaataagcacctatgtataagctttttctataatcaaagaggaaacatggttaaattgttttcttataagatataagctattctgaagagcttattgaaataagatgtaaacatctcatagacatctcacacccttctattttcaaaagcatatgtcaatagataagttcaaataagtcgtttataagccaatccaaatgcagccttggtatgtttcagtttgttttatgtaaataacacagttcttctattactatttaatgttgtgaaaatttgttgaatgcggcattctcctcctgttctacatgatcattttgtaattagctaaataattgatgtttcaggtatattgactacctgtttttaggagatt

SEQ ID NO: 29321 - DNA, 701 bp, Medicago truncatula
  Intron number 1 from transcript Medtr2g074250.1 (locus Med tr2g074250) derived from phytozome v7.0 (chr-ID MtChr2; po s 17001624 to 17002324)
caacaaagaacttgtaagaaattctcgttattatatttatttattacaatatcgattttttttacttaaatctaaaatttgttgcatctaaaatttttatcaattattatgcaatatgtgcagttctatttatgtgtggaaggacgttatgaaatccccaaatgataaatctagttcaaaattgtttttttttatacttgataaaggttttttgacttttttttagaaaagaaagtcaaacaattacattaatgaaattagtggtaagaaatagaattatgctcccatgtttgttacaatgtcttcaaaaattattgttatttaatgtttttagaaatatcatcaattctactatttacagattcatttcctaagaataaggtgaaattgggcaaggttctatttagtgagcctaattgatggacataatataaaataaaagaagttagtttaagcattatgatctactgttaaattttaataatgccaatttatttcttggtcacttgagtatctaaatttacaatatgttatgcatggtgggattgtccttacttttctgttgtgttataaaaaatcattgtaatttgcaacatatatttttattttaatgaacatgtgattaaaaccagattgaattactataaaggatgcaattaatttcagatagtctccctgtattgcaaagaagaatcttcaca

SEQ ID NO: 29322 - DNA, 922 bp, Medicago truncatula
  Intron number 1 from transcript Medtr3g064530.1 (locus Med tr3g064530) derived from phytozome v7.0 (chr-ID MtChr3; po s 14740069 to 14740990)
ctcgtgtctgatccaccttcgaatcaacagaatctgtaagcacttcgaaaattcccatgtaccattgttcaatttaatttagcttctgttttcataatttcaatgacccatgatcttgaattgttttaatttcaatttttttgattcaattttgaaacttttttgttttttatgacgacccttttgaagttttgatagattttagctttaattgaggattcatgaggattttttatgtttctgttatttttactgataaatagcctgaatttttgtaatcagaaccttattgatcttctgttattaattaatgttatgaataattaaattatttaatgtaggaaattcaattcaatttttacttgtgtgctaaataaaaagttagatttttttaattgttctttactgagtagtttgaatcaaattgattgtgtttgctacataggagtagtaactcaaggtgtttttttatgtgttggtgtatgagtggtgattttaactaccaattgacaaggttttagaaaatggtctgctgccgcgattgtagcagcaacagtgattgcaacctctttagcaccagcactgactgagtgacgtttctgattgaaggcgtgtccagggtcaaacacatgtcagtgtccgatcactgagacatgtaattacatttaattatttcattttctcaaattattattgatgttagtgtatgtatcgtttctttgtctttgcctcatagattgcaattgcattagcaatatttaagcaatgtcaagaatcattaaatggcgtagatcatccatgacttaaaacttcatatcaattatggtcttgattatttcaggcttagcttagtaagaaatagaaatttgaagattaattcccgtgttggttttgtttgttttactggtcagttgttgattgt

SEQ ID NO: 29323 - DNA, 554 bp, Medicago truncatula
  Intron number 1 from transcript Medtr2g058940.1 (locus Med tr2g058940) derived from phytozome v7.0 (chr-ID MtChr2; po s 15837628 to 15838181)
taaaggtttagagattagaattttatacctatccctttgcttgttgtccctgaaggtgatgccatgattcttagcttgcgttttcttctttggaggaggtcccccggatgtgcttgcaacttctttaccacttctcttggaagccattgccttgaccttgcttttagtgtgatggtggtgatggtttgggtgtgggttgttttggtggaaaaaggttggtttagtgatgtggtaaagttttaagtgagttgtaggggttgggttatggaggttggtgaagaatttctggtttttgggttaggtttatgagggttacgaatttgggtgatgttgtttggatggatgaaagtggtttttgaatggtgggttatgattggaatggtgtttgtgattgattgggaggagaaattttgggaattggtgagatttggggtgggtgtggaggtttgaggttgtatggttatggaggttttagagagaagggtgaaggtagagagatgtttgtgtttgagagtgaaggaagaagaaggccaaaaggtgtggttatacctacc

SEQ ID NO: 29324 - DNA, 447 bp, Medicago truncatula
  Intron number 2 from transcript Medtr2g017390.1 (locus Med tr2g017390) derived from phytozome v7.0 (chr-ID MtChr2; po s 4315153 to 4315599)
tcataaaggtgatgataacatattttcttttctcttgcaatgtatatatgcttctttggaacattttcctatgatgtcaatagctagctatagcggcggcagctgcggctgcaatgtaagcctgtaacttacaggttatcctaagcaactatagtgcgccgtagtggcctaaattgcagctgcttgcagccgctacatgcttcagaaaaaaccctttgttttatcaataacttattattgaattttcatatttagttacttcaaacctttgatgcttaaacatgtttgttttcttgattattttattttattttttggtttttacttccatgatatgcaatttttcattgttttgattattttattttattttttggtttttatttccttatatatttttatctgattacagttcatagctgcaagcagaaatccaccggtttattg

SEQ ID NO: 29325 - DNA, 782 bp, Medicago truncatula
  Intron number 1 from transcript Medtr1g100170.1 (locus Med tr1g100170) derived from phytozome v7.0 (chr-ID MtChr1; po s 20691610 to 20692391 reverse strand)
aaggttaagattatgtttatgggttttcacttggaagaatttgagtttcttgatattttatgaatttgagattatgcttcaaagttgagatgtatcaacacccctatagatttactaaacaagctaaagacaagattagtagctttcactagtatattataactcactcataatatgtttgcatcacagcctagatctaagcacttaaaccaccttcttctttttcttcaatttgggattaggattttctcacatatttcctgtaatagtgcatccttgtgtaacgatcatggaccttttttcaaccttacagtaacgttgtcattgtgtcattgttttgacatgattatttatcagatgatggaaggatttttttattaaggaatcgaatgatggaaaaatatgcatggaaggatgaaaagtgttatttatttttagtggggttggtagtccaatttgtgtggattctgttcttagtaaaccaatgtttgatcgtacttttggccaatatgtgagggtgctggttgatatggatttaacaaaagagctgaggtataagttaatggtagagaggaaaggttacgctttccttgttgacctagaaaagtttttgtgaacattgcaaaaatgttggacaccacattgatgaatgtagaaaattgaaacatgttggtgtggagatgatggtgaaagaaaaagaatataggcaaagaaactggtaaaaaacctgttgttcggtttgtgcaggttagagataataggaacattaagacagtggagct

SEQ ID NO: 29326 - DNA, 979 bp, Medicago truncatula
  Intron number 1 from transcript Medtr3g013500.1 (locus Med tr3g013500) derived from phytozome v7.0 (chr-ID MtChr3; po s 2597066 to 2598044 reverse strand)
acgaaccatttaactcaacctggaattacaattctgtaagctttcttacttcttgcccttcttcataatatcaggagtgtcatttgtagtagttttttcctacttgtggattccggtacatatctttcgtttttcatatgttttatggcttctattttctacacttttatattctaactcaatataattgtttaaacaacatgtacgaaacacttcactaacaccatggtaccctccatttatgtatgcttcttttctgcattgcgttgtctattgtttcattgtgtatgcctctcacctagttatatttttttgtcgagaaactggtgcattaagtcaaacaattgatcgtcgaagcagtgtaataaattttattctctcctctacgttgttcaacatacccaccatattagaggtatgcctcagttttcttttcttgttgcttagttgtgtcatgctttcaactagtgtagatcatttaggatcatggaggatatttagtggaattgtatcctaattttgacttcccggtatctatgtttttcattaacaattttctgtgttgctttagcaattgcatcttagtttgttgctcctatataataatgattatttggctaatatatatcaggagacacacatgattctgttaactagccttttttttttttcgtgtacattatattctggagttaacttttctaacattctagatgtttaaaatgtaagattaagagaaattaggaatctttagttgatggacttgcttcatatgatatgttgaaactataatagtttgtattttgaattaaatatcttcaggctttggaaaatgtttggatgagtttttcctgagaaaatattggtggtgcaggtagttatttgtgttagtaatttcagacctttgaattaagatttttcttgtttgaaacacattttttcaggtttgatcaccacacattggtagttaaagaaattg

SEQ ID NO: 29327 - DNA, 1017 bp, Medicago truncatula
  Intron number 1 from transcript Medtr3g109370.1 (locus Med tr3g109370) derived from phytozome v7.0 (chr-ID MtChr3; po s 27391714 to 27392730)
taagtttatcagtggtggtggcgacattattgcaggtttatctctttcctttcacataattgtgaccactattatgaattaccaaacttttgtttcaccatatttggcaaatagttgaataattttgttttttttgacaaatgaaaatgattcctttcctttgtttaaaatatattattcaatttactttctctgaaagaatatttaccaacattatatttgtttgagtgaaaccgtacattgtatagttttacactaacatatgtttaaaaaaatattccattttaccaaatcatataattaattttaaaatgcctccggtctttgttactaaagtttttttttttttttttagatttattcaataaattatgtatttgatctatattatgagctaaatacataatttattatttactgagtgaatccaaaaaaaaatctcttataatagagacgagatagagtaatattaataacgtggcaaaatagtatatttctattggtgtttttgaagtttttttttttgtttacttttctttataaatcttcattctttatattactttctcaatcccgcaacagatgatccatttgaaaatgtgtaattttgacctaacttattttgatcatattttttctattaatatataaagataaataatatcatataagatgtcgttagattgtctcgatgaatattttcaaaatatcaaattttcataatttttttctaatatattattcaagatatttaagctcaaaattatgcattgacatgcgtaataaggtcaactgtgtcaagtattaaggaaccgagagattattaataatttattaatttgtccaatttaattaagtcaatcagtcattttgattttcctttaaaaaaaaaagtaagtttgattctgatttataatttttaaaggactcctctaatagtaaaaaaatgtacaactttgatttgaaaccttgaaaatgacaggagctgtgtgtgggtctgcaagttttgtgaacgca

SEQ ID NO: 29328 - DNA, 297 bp, Medicago truncatula
  Intron number 2 from transcript Medtr3g133070.1 (locus Med tr3g133070) derived from phytozome v7.0 (chr-ID MtChr3; po s 33615902 to 33616198)
aaggtgttgagttccttttatcttgtgaaaggaaggtatataataatatactgtagtttacttcttcaaaaatttatgtatactgtagtttagtttcttgagaattctcgttctgtattatgtgtgtctgctcgcgcgcgtgtgttctcaccctgttgcgactctaatgaataaataaagataaaatctggcttaagaaaacaaattccataatttgcttagttttttgatctaggttaaactagctaatgttttccatctttgaatcatgagattaggtacccttgtccgattgca

SEQ ID NO: 29329 - DNA, 366 bp, Medicago truncatula
  Intron number 2 from transcript CU179634_1.1 (locus CU1796 34_1) derived from phytozome v7.0 (chr-ID CU179634; pos 11 16 to 1481 reverse strand)
cagtttgcaggattgcttgtttcgcttctgataaggtgattgcaacagtcctctattttagagtgtttgctttatcttgtttattcgtaaattagaaggactaattggtatctaacaactcttttgaatcaagtttgaatcttttagcttctcctcagttggtcatgcttacctcttagctctcacatctcagtctatagattcatacttttcatagctcatggtttctatttaaaaagttctcttcttttttttttctttttttttttgcttaatcctaaatggcagtttacttgaggtgttggttgggcttgttgctattgtcaaaaatgagtttacttcaatttttgtttgtttaaatgcagt

SEQ ID NO: 29330 - DNA, 342 bp, Medicago truncatula
  Intron number 1 from transcript Medtr3g086540.1 (locus Med tr3g086540) derived from phytozome v7.0 (chr-ID MtChr3; po s 20258025 to 20258366 reverse strand)
tggagagacttgtaactctggagcagattttctaggtctgtcaggctttcctatccatactcccttttctttcatatatcggaggtcattatattatatttttttatgtttattatgcacaagaagcatcactttcacttggttatgcataatcaatctaattgatgtttttattatttcgtttgtgtttgatttccttattgaggttcttcacacaggagaaagttcatgtgccactaatttagttaatgtttctaccaagtatgtatagaatgcagctcacaatatcttgtgatatttttcattacttaggtccaaaaactccagtgaaaaataaccaag

SEQ ID NO: 29331 - DNA, 757 bp, Medicago truncatula
  Intron number 1 from transcript Medtr2g085570.1 (locus Med tr2g085570) derived from phytozome v7.0 (chr-ID MtChr2; po s 19307613 to 19308369)
aatctcattactggttaatattcattcttactctcttctaatgttttatgtcctctgctattactactggtgctattaaaatttattattgttttcagggaagtataaattatgtccaagattgtatgatttaagaaaaacttgtttattatattaaaaactaaaaaataaaaaaaatcaaaaacttgtttatgtttttgttatcttcatttaagaaaactaaaagtgaatcgaattattctttttaattcattttattgttaaggaaaaaaaaaactagaacattaaaatgaattaaaaaaaataataatttgattcacttttattcttctagttaaagactacttgaaatgctgtaccaaaaaaaaaaggattacttgaaattgattttttttttttttttttagaaatacttgaaattgaatagcagatgagaaataaaatcttggatgttttctatgttttttgtttcgtacaggttttctatggtttttttaatcttataataacattacaatttatatatagtataacaagcaactataaattacctttaaaaaaactagaaatcagcaacaaaaaatataatatataacgtaatatagatttaacaaaataatagtattattaaattttgttgtaatcttatcttttaacttggtataatgcaaaccaataacaatttttctgcaaaataaaactcattgatatgactctttgtcaagaaatgttaacaattattttggttgtcaaacag

SEQ ID NO: 29332 - DNA, 574 bp, Medicago truncatula
  Intron number 3 from transcript AC235758_17.1 (locus AC235 758_17) derived from phytozome v7.0 (chr-ID AC235758; pos 92660 to 93233 reverse strand)
aaactagtgttgttctcaaggtttgtttaagtttattaattaatttgtgaagagattgaaaaatagttaatttggtataagtgtcatggttcttgctctaatagcttattattattttttgtgcattgtcaacaactttatgcaggtttttgttatgtttctcatattttaactaaattgtggctagtagtgctgaactttatacctcatagatagattattaataattaaattcaaccattagctatattataaaatctttatagcttatttttggtagaatacaaagtgtgtggctatggaatgataatttgacgatataacatgtagacaaaatatgaatgtatctgttttcaacaaaacaacaaacccaattttgcaattttctgttatgttgcttgaattggtgaatagttccacttaccatgaagaatttgggttttctctcattttcaagttgctttagctttcacgactttattattgtttttttatttattatttatacaaactttatatttaaatgaattttttgatattttgaagcaggggatatcaacggatagaataatag

SEQ ID NO: 29333 - DNA, 676 bp, Medicago truncatula
  Intron number 1 from transcript Medtr2g025460.1 (locus Med tr2g025460) derived from phytozome v7.0 (chr-ID MtChr2; po s 6757283 to 6757958 reverse strand)
agttctgtcagagtggagctgccaaattttcgttaaatatttattgtgcttatagatattgtcagtatttcatttactggtgaaatatgcggtctattttagaatatgaagtgttgatctcaaaagaaggtagtatttagtataacaaattacttaaatgacatacaccctctttatcttgtaaatgacaattatcccagcagttacaccccttctctctattttctaaaaataataaagggcaattggtttattttaaagacctaaaagaagattagtgcaattttcccaccaaataagggtgggtggtatttaatttaaaataggggcgtatttctcatttaagcatacctcaaggggtgagtgcacatggaaatttttacagtgtgttattttaaaaggaaatagctcagtcgaaacagaaaaatatcgaacacattgtcgtccgctaaacctgcaccaattattttgcaataaatctctcaaaattttgataattattttaccaatattttcattgattgggctgggtcatatctttagttggatggcagctgctactttcagcagaacaagcaaggtgtttttaattaacaattgatatttgatattattgtctttgtttattgatcgactttcagggaagagacgacttccaaataacccttcttcgaat

SEQ ID NO: 29334 - DNA, 846 bp, Medicago truncatula
  Intron number 3 from transcript Medtr3g151320.1 (locus Med tr3g151320) derived from phytozome v7.0 (chr-ID MtChr3; po s 40098662 to 40099507)
ggattggtcaacttctggaaagtccaagccaaagggtatgccctgatttatctttctggtgccactttggagtgcttctattcttatttatgtgacaatgttggtatcaatagatatgctagatataaaattgggaacggggaatctttctaatacatatcaattttctgcagaagcataatttctctttagtgtactccctgtggttgctccttccgcttctgctgacagtctataatctcgatgaatttttattagaggaatagcctaggtcgagcttatgtgagcttgtatagtccctcccatatcatataatacgcttgcaactaactctcctatagttgtaacaaagtaactgacagcctgtcagttagttatccccttagaactctctagaacaatttgtgctgtcagattgttagttacaactacaggagagtttgttacatgcttaatatatgaagtgggaaggactatacatgctcttgtgagcttgagctaggctattcctttaataacttctactctctgaatgcgaggttttggtgtggaaaactttatgactttggacttccattttgtttgttttttcaagtttctttgttctgtgttatctcatacatttctttcttcccatttaattgtattttgactatatcattcttctttcctctatcattgatggtttcttcctcagtagacatgatgtttaggagtgtagagcattgtagctgaacttaaaaatattattaagttgacccacccatgtaatttaattcatattttattcatcctgcctattattttgtagatcatcagcctctctgcttaactctactgattgtg

SEQ ID NO: 29335 - DNA, 690 bp, Medicago truncatula
  Intron number 2 from transcript Medtr1g093330.1 (locus Med tr1g093330) derived from phytozome v7.0 (chr-ID MtChr1; po s 18935340 to 18936029 reverse strand)
aagtctgttcgtgaaaaatttactggcgtaattaggtatgctataattttactatcattattctagacaatgatgtctctggttatcataaagtttaaattcaagggacttcaatgaagtaaccgttgcatgtaaacctgttatgttgttatgttctaattttatgatctactatgcatggcgtatctttacaatttacccaccattagcctgcatttgataaacaccggtaaagttcacttaaagtggtgggtggtacctggttttgagtggctttgtctctgcattacatcaaacaaaggtgcatataatgattcattgcgtccttaatttgcaaaccacctatgtaaagaacaagaaatagagaaaatttctgatacgttaatctctatgggtgcacagtgagttgctattctttcatagataatctctagatttgaagttatcaattgttgttttagagggactttagcaattacattgaaaacagggaagaaaggggttgtaggaatgcagtcagttaaatcttgtctgtttggttaaacacttgagctcactttcctctatctgtgcatgactatctttatatcacaaatttcatgtgtttttcatttggaattataataattattcctgttttctgttttaaaatactagagtattcattattcttatttggcaggcaacaag

SEQ ID NO: 29336 - DNA, 712 bp, Medicago truncatula
  Intron number 1 from transcript Medtr3g143100.1 (locus Med tr3g143100) derived from phytozome v7.0 (chr-ID MtChr3; po s 36830366 to 36831077 reverse strand)
atcaatcacaaaaccaagcaaattaaatcaacaaggtgaaaaactttgatcctgctatttattttttgaaataaatctattggtatgattttggctattaactgcttatattgacttgaagtaatagactgcttctggattggtgattatagttgttatgaattatgcacataatttggttctgcctcggtaatcattagaacaaagttgtttctaataggtttgaccttggaatatatttactataatatttgcataagttactgtaaatgacaccaaaatatggttggtatatccttactatcagttggattagctttgatattttaattgattactcttgtttattttctaacaacatttttcattttttactttttatttgagttgctggaatgacatttgattatgactttttcatattaataattgtcacatagaagatggaagctaactagaaaaaatgcatttccagaaatacttaaaacaatattttgaatttttcagaatttccaaagtgtcttttctgaagtatactttatcaatgaaaatggaaacaagaaacactaaaataaccggtttgtttacgatgaaccgcgcgcattgtcacattctagcctctggtggtggtgttttgttttaatttgtttcaatcaatccaatgtttttacctctgttgtttgatattattgaaagcaggcttagtagcaat

SEQ ID NO: 29337 - DNA, 746 bp, Medicago truncatula
  Intron number 2 from transcript Medtr2g085140.1 (locus Med tr2g085140) derived from phytozome v7.0 (chr-ID MtChr2; po s 19114594 to 19115339 reverse strand)
tctttcgttacaattcatcaattaccaattcctaggtataaatctgtttatcataatttcaatttttactctcgttagcatcagtgatgagataatccaatttgttatccttgcactttgattgttagtgaagaaaatcatggggaattattactctgagatgctcttttctcttaagttttttaatttttatttgtttgttaatattttcctatttgatctatggatctgtgatgttatttaatactgcgttatctatctgaaacctcactagaggatttgaggagaatttagtttactgagatccaaagttataggatataagtataaacttgtttttgtttttctctgttgttgttaatggaagatgaatatgatgaaaaaaataatgaaagatatctgaaaatcaaatactttgtatttgatatgatcgaacaaaattatcgctacgttctttctgattcatcttccattgatttaatcattttcatttcaatttaagtttctgtctctgaaccttaattagagaatatttgttgttagttgcatattggtattttttcagtaaaattcaataaaaaatggttgctaatgtgagatttacttatgggtaaataagtgtgtctaatccctttttataatcaagattaattaggttttgtgtgatttctctgaatgcattgtgtgatttgttattgtatattgtaaagatattaatattttctggatggttttttgaaccagtg

SEQ ID NO: 29338 - DNA, 507 bp, Medicago truncatula
  Intron number 1 from transcript Medtr2g085140.1 (locus Med tr2g085140) derived from phytozome v7.0 (chr-ID MtChr2; po s 19115324 to 19115830 reverse strand)
cttcattgttggaggtatataaaattgaaaaatgtttttttttacataaaattttgacaaatgttaactttttttgttattgtcaagaaagttgtgaaaattaatttgcaattttcctatgagattggaaaatgcagactacaataatgtttaagaatagattaaaagatatgcattgtcagtgtaaaattgttttacacttacaaccaatcacaaatcgtcaacacaacatacatatctaccttttactttattcttattaaaaaagttcaaacatgatgtagcaacatataacttaaactcttaaaataatcatggagggtgcgaaaagaagttaacgtaaaccctaaaactcttatgggcagttaagagttgggcctaaggcccatatcaaattatccaaagtcaaaacaatccctagggtttacacagttctataaatacctaaatttcatttcttctccacattcagccgtaaacagagaaccctctctttcgttacaattc

SEQ ID NO: 29339 - DNA, 1038 bp, Medicago truncatula
  Intron number 1 from transcript Medtr3g092620.1 (locus Med tr3g092620) derived from phytozome v7.0 (chr-ID MtChr3; po s 21807103 to 21808140)
gcttcaacacacacccacgcgccttcttccaccttgtacgttcaatttcatctctgattcgttcatacattcattgcttaattattatttttgtttgaattcgcttatcatatatcaattgcttctgttatccaattcgataatcataattcataatcttgttacctccatgaaactgttgaaattttattgcatttatacttgttttcaaaattttgatgatttctagtttcaaatcaatcattgtgttcatttgctgatacaattttcttatcatttgaaattttaacattggaggtttagtgcatgtttgaaatcgcggtgagtttcacaaaattacagtgtcggtgtgtgtgattttattgtagtttttgctaaaatcacataagcacgccatgattttatcaagttctccccaaattcaaacatttacataaaaatattgggtttaagataaagggattgatgtttagaatctgaaaagaaagtttgttatgaaacttcgagtataatatctacaacctatcacaaaagcttcatgttagagattctattcaaacattttctaagaagcaaacatcgttcatgcaaacgtgatacttttttttaactgagaaccatgtttgctcatgtaaaagcaagtttggggagcttttcaaaggccatctatgtttgattttgtgcaatctgtattgaatttggacaatcctcatagaaaagttggaggaacgggtagagacattaatttttcatgttaagactcctaatattaagtgtttaaaaacttgaatggatggtttcatgtcaatccctcttttttttttttttatcttcaaataagaataatatccctctcttcccctacgtaccaaactcattcatccaaatatactcttaatttcttatgttgcggcctttggtgaaattggtattcctaactacaaagaatttgaaagaattatatatttgacttctaataatttttatgtcaatgctgctgcaggtaggtatatactgcaactctatcaatttgctttg

SEQ ID NO: 29340 - DNA, 655 bp, Medicago truncatula
  Intron number 1 from transcript Medtr1g111740.1 (locus Med tr1g111740) derived from phytozome v7.0 (chr-ID MtChr1; po s 23890097 to 23890751 reverse strand)
gcgtaaatttttcaaaacttaatcagcatatttgtatattttttttttacttttcatttcaagcctttccatcgtgatcatttgattataggaaaaactaaactaaaggcactttaacttggtcaaattagttttttcaaaagaaaaacttagtcaaattacccatttatctctactaattgtttacatctttgactaaactttcattcttagtccattcttgttgtcattgtgtaatcgtatactattaagaattaagaacgtttcacactcaacactaaaataagactctcttttgactgcaagatgacaattttagataaaatttaaaaatgatcatgctaactttgatgaattagatatttcaatggttagtatatgatgtaatttaaatattatcttgatgaattgaagatataatttaccttgatgaatggttaaataaaattttgataacaaacataggttaaaagtagtttggtctaatattgttgatatatttttatacataaatgaccaacttgatacaaagggaaaaaaatgacattttcaaaacttatatgctctaatgataccatcatgattcaaactaacaactctattttgatcaataattcaagatttcggcaattgaggcattccgccatagcataag

SEQ ID NO: 29341 - DNA, 392 bp, Medicago truncatula
  Intron number 1 from transcript Medtr3g115020.1 (locus Med tr3g115020) derived from phytozome v7.0 (chr-ID MtChr3; po s 29229947 to 29230338)
gggtgggtattatgtatcttttttttatgaaagattaataaatgagactgaaatctaaaggtgattattgtgccatgtcattcttgaatttttcttataaaatcattcttgatatctagcattttccttattaaaatggcacacttctttttattcaaacaagaaataaaagtggggcaataaaatgaattggcaacttgatgttttcatttaatggaagatataaaaattagtaattcattacttcaacccaaaacaaactatcatctttgattttatggtgacagtttaaaattgactcaaaattgatgttgaagttctcaaaatcatggcacggtttggttcagtaatttggaggtttttgttcgcaaaaatcgtggtgggtctttgta

SEQ ID NO: 29342 - DNA, 355 bp, Medicago truncatula
  Intron number 2 from transcript Medtr3g115020.1 (locus Med tr3g115020) derived from phytozome v7.0 (chr-ID MtChr3; po s 29230529 to 29230883)
gggaaacacttcacaaacaccttcggtatttgtgtgttgtttttcttttccttcttatcttggttgctttggttatgtacgtggtgttacttcacactttgatctaggtctgtttgttgttgatgttgcttgaaactactttgctcattgattatccttcctttgccccacacatctaagatttgttggtgtgattttattgttcgaattcacaactaattttgaatgtcagtaatacatacttcaattgagaatatcgataatgttaagttgaacacttttatatgtgttcgaactcgagacctcagttttgtttgtaaatttcaggtggtgattgccgaaattgttaggccgg

SEQ ID NO: 29343 - DNA, 749 bp, Medicago truncatula
  Intron number 1 from transcript Medtr3g101720.1 (locus Med tr3g101720) derived from phytozome v7.0 (chr-ID MtChr3; po s 24670528 to 24671276)
aggatccttttttgcagggtggtgggtgtgttccctctgtattcattttcctccttcctttatagtgtttgtttagatcttccttttttcatttgctcgcttatgtattcgggtgcatgcccccgatcctaattttaatgcaattcttgacctttattaagaaaaaacacggaagtaaaaagataacgtaatgaaaatcacacatatattttgtattagttcacaacacaacctatttcaacctctagtccctccctcattggagagatttacctttgaacaacaaatgacgttttcactattatcaaatagtaaaagtattcttaatgtctctccaagatacaagtatcatcaaaccccttttaggctctatgtattatttaacaaattatcatatgactcccttccttttattctctagtgcatgtttatttatacggtgaaaaaaattgattatgtataattggttttactaaaaagttgtcagaatgtcaaatcatttatgtttgaatacatgtacattaaaacaagttagacaatagatttaagagtaaaaattatgttttgactttatttacatctaaaaataaatatcatgttagtcgacatcaacatataggcgattgaactttaggtgaggaaaactgcccaaccgatggaagattaggcgagtgttgggacaatcgagcgagagaatatgattcacaaaatccacgtttcatgtgtagcaccactaactgcaaagtggg

SEQ ID NO: 29344 - DNA, 767 bp, Medicago truncatula
  Intron number 1 from transcript Medtr2g018000.1 (locus Med tr2g018000) derived from phytozome v7.0 (chr-ID MtChr2; po s 4641362 to 4642128)
aggtatatgtaacttcatcttgtttttagtttagttcaattgctacaaaactatggtcaacctgtcattattgatgtttctgatgatgttgttagttacagatcagattgccttgtttttctgttttggtcagattttttgtttgtttatgttgtccattttcttttggtttatgtttaagccttgattgattttagcttataatgatgattaattttatgtgtcatattgagatccaatttgatggctatattctgtaatatacagtcggaagaaaactgaggatccccttagaatggtcaaagaattttatgaatttaggactttgacccttaccaaaatcctcaattttcaatttttttccttcattatccaatctgaatgtggctttatttgtgatattctaagtacggattgccatgtaatgttaccttggtatatggaaaaacatattttagtataggtcaaactcttaaactgatcttagttacttcaaaggattctctacgcagtttgcacgataatgttaccttggttttaccaaaataaaagaattgtgcgctgttgagtcagttagtttcttactacttagtttccatcattcagtaaaatttcaatttcagttagttttcatcaattcatgcacaaactctttgtctatccatgtttgtggggatgtacaaaacatgaaatgttcacagaatctgacttagtatattgatttggtttcatgaaggttctaagtgatccgcaaaagagagcaattt

SEQ ID NO: 29345 - DNA, 862 bp, Medicago truncatula
  Intron number 2 from transcript Medtr3g106020.1 (locus Med tr3g106020) derived from phytozome v7.0 (chr-ID MtChr3; po s 26635814 to 26636675 reverse strand)
tcaaagataaatacggacacgaagcctatcaaaaggtaaattcaatgttctatcaatcatatactgattttttagcagttttgatttgtcttgcaatgtaaagatacaaattttagtagttacaagtgttggagtaatcatatctcagtggaaattttaattacaatgattcaaattgtgatcgatatatggttcaaggtaaccccactgtgggttggccttgtggtgttgacttaagactttggagtgtgatccccataaggtattgggttcaattcctttcgttgtcaatttcagtggtctagtccatatctctggcttaaaattgtgctccacaagtggacgattggattggaccccttggataaattggtccttaggctggaaagtgagttttcaaaagaaaaaaagtagggctcaatgttaagcaattgccaatgtcattttgtttatgttgcgatttataatactctgaaagcttatagtaaagtgttattgttgcaattgctattatggttgtgattcggttgtggttgcataagaaaagaaatcttgatgttacaattggtatcactaaaggttttttaaatcacgatagcattgattgtaaattaatagcataatgtatgatttgaagtagagttatagcttttcatataatatctgcttaatgttactatgtcagtgatgtggttggggatatattagaaatttggtgttgtggttaaaattgatgtaaggttttttaaaatcttggtagcattaattgttaattaataacataatatatggtttgatgtagagttatagcttttgttcataaactatttgctgaatgtgttattatttttgatgcagttgg

SEQ ID NO: 29346 - DNA, 804 bp, Medicago truncatula
  Intron number 3 from transcript CU013523_27.1 (locus CU013 523_27) derived from phytozome v7.0 (chr-ID CU013523; pos 108135 to 108938 reverse strand)
actctaagggtgagtaacggagtatacttgttcatttggggtcttctgtagattaagagtaaataatttggattttgaaacattatattagcttagtaaaatatattaaatgtatgccgcttaattttatgcttttttacaacaaaaatgaatgttttggcttaatgtgggctagggttgcaccctttaccctgttgttttgtatttgatgcttcaaacctgccaaatgtctcaaattacttgctggggatttggatcctcctgttcagagaagcttcgttacccatgttttctctgtctctctactctatgtatggcactacagtgaaagagaaaacatggggatatatcctccttggaacaatagtggatctgaatccactcggatattaattgcaatctggtagtctgtcttctattacaactgaaaaacagatattccacaattattaattttcatctatttatgctcgccttttgttgagtgtgccagggtcttctcaccacccgcatactgagggaagtttgccgactttcagtttcatgttctgcttgatatatggttgtatatgtgtgtcctagattcttttatttttttaaaagctattaatttcttggttatgtcaaagtgacatttttctcacgagctgaatagaagtgattgatttcgagttttattctagataaagcttctggacatggtactcttatatggcttgccaatgtctccgtatctcaattttggtattcctcgtgatgttttttgcaggattccattaattcagcatcatcagttactcaaac

SEQ ID NO: 29347 - DNA, 752 bp, Medicago truncatula
  Intron number 2 from transcript Medtr3g040860.1 (locus Med tr3g040860) derived from phytozome v7.0 (chr-ID MtChr3; po s 11245731 to 11246482 reverse strand)
tgacttgcaaagtgaaacaaaggttttcagttaccgttctttataagaaaatgtatcaagtttatatgaaccaaattgagctgaattgaactacttcttctatgaaccaaaaccaactattttttttttttttgttttttttttgtttttttttgtgttgaattgattttgaacagttcaaaatctgaatgtttgggttttaagtacttaaaaaattggctttaaaagttcataacaggattttaacaattcaaaaattgaagtcccacacaacaagaacaagaaagaaatcaagtattctgaaactatatataatctatttgacatatggaaaatattgtcaaaagcgaaacctgtagtttgaaatgtttattaaacttgttctgaactattatgtagccgaattcacatgtttgatataataacaaatcacttaaaattataaatatcatagaaactacatttaatgccttgtttgatgtttatactaggccagcctccaatgcaagaatgaatgccacaggtattctattatattttctgcaaaattgaataagtgaaatttaataaaccataaattgaattcatttagcaacttttgaggggaaaaaaatgtaagtttcagggatcgtaaattcaaagatataaggatgaaactttaagaatacttccagaaggaaacttttgccaatctttttgaaacatatatctgctacattttggagtgatatttatcttttagagaatcctct

SEQ ID NO: 29348 - DNA, 384 bp, Medicago truncatula
  Intron number 3 from transcript Medtr3g143770.1 (locus Med tr3g143770) derived from phytozome v7.0 (chr-ID MtChr3; po s 37156935 to 37157318 reverse strand)
gctcgcttcatcagtggcatcaacaatcatactcagtaagcctgtctcacttattgcatgttaatcttgaattaaagtgatagaacactgggggtgatgtgaacgaccattttactttgattagtagtttcatgtggactgctttatttttctgtggtataccattctttttgacattgttatttcaaataatccttcttgcagtccattttatatgttgtttagtttttgtattctctttaaagaactaaaattttgaggactctactatcgtaaaatgctaacaccttttcttttgtgcaatgatattgctatttcttcggtttcttgtattaaaaatgtccaatttatatgcagggaaggcaggaagaagcagaactgtaa

SEQ ID NO: 29349 - DNA, 631 bp, Medicago truncatula
  Intron number 1 from transcript Medtr3g031480.1 (locus Med tr3g031480) derived from phytozome v7.0 (chr-ID MtChr3; po s 8847860 to 8848490)
aaaggaacgagtgggccgagttcactagtgattatgtgagtcatgaacaagtgatatttgagcatgttttcatttctctctccctcaacataaatggcgattgtgaatctgggcaatagtattttttttttttggcaaagaagacgtgaaaatggtggtaaaagtgaaaaagcatgttcagattattatttgatttaaataattaaaagattaaaacaaatggttttaaatcccttaaaaaaaaaaaaagagcaaccggtaaccaaaagaaggctagtgacgtggctttctaattgagagagtgtgcgtgagagagtgcaaaagcgcctgtcgctagcactgctcatattatagtattataagttgtacgatcaatttgactaacaaaagtagataagtagtgctctatttaatgtgttattatcataatttttgaattaattacgaaagtaacaaaccaaatgcaaataacaaactcccgaaaattatgtgctttaatatcgcaacaaacaaacttcttataaaacactgaaaacgccgcgccaaaattctttgatccaaattccagtccttgaatataaattattcacaaaaagaaaaaaatcaagaagaagaagaagaagttctactc

SEQ ID NO: 29350 - DNA, 672 bp, Medicago truncatula
  Intron number 2 from transcript Medtr3g031480.1 (locus Med tr3g031480) derived from phytozome v7.0 (chr-ID MtChr3; po s 8848575 to 8849246)
taaatatcattccgttgatattaaatcaacagttagtaagtttttttattttgaaaaaatgtgatcattgttttatttatattttcttgtaaaagattacgatgtatgtttgcgtcaaccaagttttccaatttattgacgaagaaaatgagtttgtagttgctaaatttggaagatgatgtaatgtgtttaatcatattaataattttaaagagataatgtatagaattaaaacatcataaagaataatttctggtgataagtgtatggttcctcggtatgatgcaatggtagattgacgattacgcaaagaaacaacaattggtttaatggctctataaaaacttagtcttttgggtgtattagagacttgggtggttgtgtcatggagaaggtttacaattttttctcaaaatcatatgaaacagaaattgctagtttctgtgtcatacattttttagttttcttggattgaaagcaaacactagtttatgtgttgtcatttctgtttgatactatcactctcatttagattcactctcatttagattctctctctgctttatctttctattggtagtgtttttgtgatcatgaaccatgggctttgaatgttttttgttttttgttttttcagatcatatattgaaggtttctgttccagtatcacta

SEQ ID NO: 29351 - DNA, 770 bp, Medicago truncatula
  Intron number 1 from transcript Medtr3g144720.1 (locus Med tr3g144720) derived from phytozome v7.0 (chr-ID MtChr3; po s 37599735 to 37600504 reverse strand)
gaatcccaaaaataagaggaaggtggaagaaaaatgtaagcaataatatataagattttacaacgtagcgtgggctagttatagttaaatataaagcattttttttaagaaatatatataaagcgttcattaaaaataaaataaagcatgatattttttttcaaaggagaaaacgtggcagttgttttattaaaaaataagctatgaacttggccgttattttttaagccatgaacatgttgttttattaaaaaaataattaaattaaattaatagggttaaaattggaagaaaatataaaaaactaccggctataagctcaaaagctacttgaaatagcttctcaaaaaaagctataagctagtgaaaaaaactttttaccaaacacaacttattatatcgaaacaagcttataagctagcttatttgtgttaccaaacacaaccatgatgggttgaatttggtgtgaaattttaattgttacaagcctatagtgtaaattaattaagattgtatacataaatataattaaataaaaattaaaagttaccttattaaaattgatttttttatagaaaaaattgactcatttatttgacatttaatgttacatttgtatattacattttgattgattaatatcttgaaggaggtaaatatcccctaatcaagatagtgtaatatagaaaaaacctctaaatattcatgtgtaatttagttgtgatgtttatgcagtacaaatttggtgtatcaattggatttcttatatt

SEQ ID NO: 29352 - DNA, 624 bp, Medicago truncatula
  Intron number 1 from transcript Medtr4g011480.1 (locus Med tr4g011480) derived from phytozome v7.0 (chr-ID MtChr4; po s 1676668 to 1677291)
gaggaaaggttcaaacaaatgaataaagggattgaagactttgagtcatttgaattagtggagaaaacatatatatttaattcattattttattttttcattgattttatatatgtatataggatgtgaggattttgtttgagacatcaagtatttttttgaactagatgaataatgaatgttatttcaattgctatttaaactaagatgcatttgttttgggttgattcaattacatgttggcttcttctaacaggggaaatttaaatcctctagtgcttatgatgtaagtaaactgtgaaaatgagaaaatagaaaataaaagattgttaagttaacaaactaattgattgttataatgtacctttaatatctacatttgatttgttcataacaattgattgttcattttacactctaaactgaagaagagttggatatgtgtgacatgatagtgtgtcgacttgggttttaaattcagaatagaaggaggggtgagtttgaatgttcggttaatccgagttctttgttatttatttaaaaaatactaaattttcaaacttttaatccaaatcattctaaactttaattgccactccatataaaatccagatagagaatcca

SEQ ID NO: 29353 - DNA, 948 bp, Medicago truncatula
  Intron number 2 from transcript Medtr2g126060.1 (locus Med tr2g126060) derived from phytozome v7.0 (chr-ID MtChr2; po s 30467986 to 30468933 reverse strand)
ccaaagcacaagacagaagaccttttgatcttttggtatgtatatttccatatatgatatgcgaatcagtgaaccaatgatagcttctttttctttgttacttgtgaatgaatatcaagaaactgcctatacggatcaccaagtaaccaggggtatgcaatgcaagctaaaaatcatatgataaataatacaaaagtttctggaagcatgaattggactattttaactgatatatcagtggtatattggctgaaagaagaagctttctacagcttcgagtgatttggaagatataagaattaactaaccaacatgcaaaattcaagataaatcatctgacaacatttgaataatatatacacatttttttatcatcagtatgaatgttactaataattctaataattacttgattacattacattatactacaattaattgctattgcctagttgttaccatttgtgactctccaacagtgaaagagacaccctatatagaattagaaaatattttcctcactgaaattagtaaaattaactagtagtagttcattgtttcttctgatctggcattggaaaatgaacatatacattaaatagaaacacggatttgaaatttgaagttagctatggattgcattgcagtcattaagatgcaagttattgtaaaccagaggggtgatcgaaacctggatgcagctactcggtccaatttcaagggcctttcactctctaagaagtagctaattatgtttgacgactagtgcatgttcaaaagctatcatttgttcattataaaaaaagaagatatggttcattcatttattgaaattaaattcagttttgttttgtacatgagatatattacttgagtaataacattcattcagtagatctcttgactgatgcaggtgattctgaatcccaaattaaagaacaagagcaa

SEQ ID NO: 29354 - DNA, 848 bp, Medicago truncatula
  Intron number 1 from transcript Medtr3g039590.1 (locus Med tr3g039590) derived from phytozome v7.0 (chr-ID MtChr3; po s 10528599 to 10529446)
cagaaagtcttgaaagagcaccgaatagcacttcagttaatcaccaattggaaaatagtgaccaccgaatttgtacagtttaacaaatcaaaagttaaagaaactagcactcccaaagaatttgaaagaccacgtaaagtgaattcaaggatgctaaatatggtaaatattccaattgtaaacaatcagaggtcagcaccgaacaataataacaagtagcaatggaaatggatggagaattaaaatcaattttacaaaagaaggggggctcttacacacatcaaataagcaattaaatcaatataataaataaataaagggctatgctatatgtagcgacaaaaagtctcgcgaatatcccacgaattatgttttataagcttttgccgttttccatttcacagttattactctctacctttttttttccactcaaaacttggtcaccaactacatatgaagacacatgaaggcagaagcaaacactgtatgctcagaaaaagacaataagcaaaggcaactttgtcacgtctctaaactttggtaattgaagagaaccaataaaataatacaatgaagagaatctggagatggagtggaacagtttgaaacaaggggagagataaatggtatcaccaaaaagagataaaacaaggaaatcaccgcttttgagcttttctcgtgtgatattcgtgaaacttttgtcgcgatgttaagcattttccataaataaataatcatagagaaaatcggggtgttacatttcatagtcattaattgatgtgacaacacatcattagtccggtacatgaggtacaaccacttcttactttggcgtctggtttccc

SEQ ID NO: 29355 - DNA, 736 bp, Medicago truncatula
  Intron number 1 from transcript Medtr3g106100.1 (locus Med tr3g106100) derived from phytozome v7.0 (chr-ID MtChr3; po s 26674712 to 26675447)
ttcacacaaacgagaaacgcagacggtaagagagtgcgcgcgccaaggtagtggtgcagtgcagtggcaagaataagcaaatgttactatatagggatgatttggatagtgagtgaaaatgagaggagttcttacctgttacattgaaggtagtcatgtccaatgcaggagaatcttcagctaaggttctgttctgttttctttttttctttcaaaattcttcatcttcactatcaagatgtcatttttttcttcttttcaaaactctgttctcataataatttttgttgatgtgactggattaaagaacgaagttttattgtttatgattagttgtgtcgtgtgacttaatatttgtttctgttattagtattcctttgtttcttatagcatcttttcttttcaagtgtagaagaaagtgacgagttttgattggagaaacaagggtaagttgagcccagtggaacatcaaggcaatgcgagtacgtgtttttttttctttctttctctttaacaatttcttatttgtatttttatagtttcttaaaaagattaatgtatataacttttgtgtgtagactcttgctttgcctttgtggtatgttatataattgaagcactatatcgtataaaaaacgagggaaaagatgtcattctctctcgtcaagacatttttaatcaaatgattaaaaatgaaaaagacccggatccgaagaaagtagttcgattccagcaa

SEQ ID NO: 29356 - DNA, 295 bp, Medicago truncatula
  Intron number 1 from transcript Medtr1g042050.1 (locus Med tr1g042050) derived from phytozome v7.0 (chr-ID MtChr1; po s 9518254 to 9518548)
tggagcccccatatacacaaacaaagacttatagggtttgaagtctttttttggataacagtaaacaactaaacattgatgtttattcacaattatatattaatattattttgattcgtctcttcatagttcatacatatttgatatattaatttcattgatcaggttgcatttcttgaattcaaatatttatccttttcttattaccatgagccaagggatttgtaatatggcacacctgatagcaatgtgttttgcaggttgcatttggttatttcaagcatttaaaactatc

SEQ ID NO: 29357 - DNA, 670 bp, Medicago truncatula
  Intron number 1 from transcript Medtr3g016770.1 (locus Med tr3g016770) derived from phytozome v7.0 (chr-ID MtChr3; po s 3336900 to 3337569)
tttgcaaggttcttgagaaaaaatcgtgttcaggtgtaagatgaccttccttcactgtttaaccatctaagtgggatgttgtcggaggctggcaaaatttagtgttgccaaaggacatgtatctttgttttgataggaggcttggacttagtgcacaatgattacgttagttagtcatgtctctttgattgtgtttagcatgtaatatcactagccaatggacatttgatgaagtgtgatatttgaaaatgcgcttacacatggtgaggaattgggattgttgggtcacctattgacctatgatcttttcatttaatgaaggagtatatttctcacttttgatttccacatttcatacataagtgaatttatgtttctctaagtgaacttttaattttctccttctttcttgaactcttgagtttcgatgttctatcttctaaatatattaatgttatcctcaattaagacaggtctctcttttttatcctttttattttcctcaatgctagaagataatcagtgtcatgtaaggggaaaagtgattatggttatggtatgtctgctttattgttgaattttgtgaggtttcgtgagtagaggtagagtaacgtgcgatttgtgaaactgggttttaactaagtccgcttcatttgatttgtgtagaaat

SEQ ID NO: 29358 - DNA, 667 bp, Medicago truncatula
  Intron number 1 from transcript Medtr1g121580.1 (locus Med tr1g121580) derived from phytozome v7.0 (chr-ID MtChr1; po s 26543855 to 26544521 reverse strand)
atcactttctcatttcctttgattcttcccgctaggtattccccatggttacccctctttctttttttccattttttcttttaaagttatcatttttacttttattctcaatcacccagatcacagattgttgcacgtaagctatctgcactgcactcgttcggtttcttctatttttaaattgttggtatcaacgatttgatttacgtgttttgtatccaatttaattatctcttgcaatttcttattttgtgtgtttaggttgtgcttgtagaaaatttaactcccattgtagagagatgttatgaccgttgttgtaattttattgtaatgcaaattatcatcgtacttgttcatttttgttttgaagatttatagaaattttcaaaactcaaaacccttgatgaaatttgatagtagtttaggtgcttttgacataataatatctttgcttacaatagcaataactcaaaagcagaaggtagctgtagggatatttgaattgttagggcacagtttcgaacctgcaattctattctcaccactaggctattcgacaaaaaaaaacaaaatatgtgactggttttgatgttttcctgattttattttatttttgtaaagggaggattaaattggagttgaagagttttaataagggatttttgaa

SEQ ID NO: 29359 - DNA, 298 bp, Medicago truncatula
  Intron number 2 from transcript Medtr1g060140.1 (locus Med tr1g060140) derived from phytozome v7.0 (chr-ID MtChr1; po s 11856263 to 11856560)
gttcttgtaagcaatctacagtgtattggaatttcttgacaattttttgtggtttttgtgataactgcaatttgcatttgaatttgaagtttatttctcacagggttgttttcttcgttcacctaaatagtttgcattcattcaatttcatatacatattattgggtctagagtttcatgattcagttaagtttttccctaagttttgaattgatcgaagttatgaactaaatttgtgtatatttgttgttttggttttggagttggtttgaaagtctgcaaggtacatcaagagact

SEQ ID NO: 29360 - DNA, 809 bp, Medicago truncatula
  Intron number 2 from transcript Medtr1g111290.1 (locus Med tr1g111290) derived from phytozome v7.0 (chr-ID MtChr1; po s 23624452 to 23625260 reverse strand)
agaggtggtgacttgttctttttttctttttagtagactggccatcttggcatgtcaatcatgttgtgctattttcatgcgagtttacgacaacatttagattattaaaattgattgactatgattcgtgatgcaatcaaaacagacttttggcaaagacattaagaaacaatatgatgatcatttagagacatttttggaaagaacttttgttacgaaggataattcctacagggtagaacaatatgatgccatttgatttgatcatcattaagaaacaatatgctggccttagttttgtgtgattaaaaattattggttttcaacttcgttgttggcatatgcaccctaactggcttgctctatcatgtcgtagatgaacaggtttctgtattccgcagcttaaatcatgctttctgtgttccccttcgaagagagaaaccatctattcttttcaatttttctgtagtgttatttcaaatcttgaacggaatttgacttgcacacttttagcaaaattagactgacaaagaaatacattagtattatcaaatgttgcaattgtctctgcatggtcattatttgtgttcatccatattttagcattttctgctttaaaggaatttgtggggaactattacctcaacgagttaggtataatgtcttacaaatttcatagcttatcactttgagacatttcttgtggtcttggtttatctgcgatcatcagtagtcctttatttcaccatatgcttacttggctgtttgactcagaagccttccagagggaaaatatttgcggcccgtat

SEQ ID NO: 29361 - DNA, 516 bp, Medicago truncatula
  Intron number 1 from transcript Medtr1g112240.1 (locus Med tr1g112240) derived from phytozome v7.0 (chr-ID MtChr1; po s 24096964 to 24097479 reverse strand)
tcacgtgagaaccctcgtgccattctaacagtcagactcattatggatctaatgtagtaaatttcaagaggcggattccacaaaaaaagcgttgcactaccgatttaaagggagttgccatcagtttgttttttatttattttattctgtcaatgaaaaacatctgcttgccttttttatttgttataggaccactaaatgtttgtgactttgtaaacaagttaattttttagaagatggttttcataatgctgaatgatgtacagtcaatgaagcatttagtctatgtagattttagaatcaccgctgcctagcattgttaatcacttatcggatgtaattttgtaaataaattatcacatcataagtgaactcttattgttttgtgtttgattatgttgaaagagtttttgaggtcataatttttaatccccaagtataccaataaagaagggtactaaatttctatctgattgtttctcagcttttgaagattcagctttgtccgaggagacg

SEQ ID NO: 29362 - DNA, 248 bp, Medicago truncatula
  Intron number 1 from transcript Medtr1g121920.1 (locus Med tr1g121920) derived from phytozome v7.0 (chr-ID MtChr1; po s 26680681 to 26680928)
aggtacccaaaatcgaatatccattaattttgtttcttctttattcacattcgttaaaaaattactctttttaattaaaaaattgatttttatttattttcgatgtggtttttggtgcattgattgaaaattaattttgtgggttatgctttatgtgttttcattattgtttttatttctgggttttgttattgctgttattgttgttgttgttgaggtttttgattaaatatggtgtgaattgcaga

SEQ ID NO: 29363 - DNA, 503 bp, Medicago truncatula
  Intron number 1 from transcript Medtr2g073810.1 (locus Med tr2g073810) derived from phytozome v7.0 (chr-ID MtChr2; po s 16725821 to 16726323)
ctattaaggtcagtttagtgttgtttcaaattgttgactaaatttgctcatcacctatgaatctgaccaaacttatttgtttcataatggtgatttagttatagctaaaaggtctgtgtgtgatcataaaactgatcaactttttttcatttttatggctcatcctttatgacagaaaatataatttccccttttccttttattgagtacttcctttactttatagcaaggttccagtctctaaatttattgatttcaaattctttatctaatttcgattgattatatagaagagagataagaagtgtagctactactgaatttttctcccaaaatcaaaattagtcgttcatatatattccatacgtttgctatgattcactcaaatttcattgagttcagttcatcgacatgtgcatttttgttccaaaaatcttgatcttatcatcgtttctccattggtttgatgcttagttcatttatctgtatgcagagtttgtata

SEQ ID NO: 29364 - DNA, 701 bp, Medicago truncatula
  Intron number 2 from transcript Medtr3g103580.1 (locus Med tr3g103580) derived from phytozome v7.0 (chr-ID MtChr3; po s 25524286 to 25524986 reverse strand)
ctggaaaccccaaatacgcttttaaggttttcttcctcgctgtcttcttaatttctaaattatttggaattatagtgtgatagatatagggttcaaacctaattaagctatttatccaagcagaacctaatttatcataagctgtttccttaagctgtcttaaattgtctcacaaatgtttatgccggtagataagtttaaataagccaattcaaacagagcctgagactctgtttggtaaaatatagcagatagcttataagttaatctacagcggatagctagttgatagccgataaactagttgattaaatttgtggtctttggtattaaaagttgaactagctcatgaatatgtaatgacataaaaaagatatgtttagttagtatttaatttttttcaattaagataactgggataaaatttagagaaaaaatgataagttataagctttaagctataagctacttgaattagcttatcaaaaaacgctataagctagtaaaaataatttacaagctcctgagaaaatgacggttaccaaacggatctttttcagtcatatgaactgataagctattaactatatgctagcttattgtgctttccaaacagaaccttagtcttcatgttttctcatgttggtctttgtgtgtgttgtgcagcatttgttattcagtgtaacagacccacaatttag

SEQ ID NO: 29365 - DNA, 760 bp, Medicago truncatula
  Intron number 1 from transcript Medtr3g150370.1 (locus Med tr3g150370) derived from phytozome v7.0 (chr-ID MtChr3; po s 39609039 to 39609798)
aaaattgcaaggtaacatagtcttatcccaaattcaaaatctctctaggtgtacctaggatcccttactaattaataatgattgcatgtgtttgatttagggttaataatagaagtgataaattaatttaaattagaaagatgcagaaagggatcttgaatacgcaaacggtactttatactgtgattatggtagtattattaaaagttaagaatcacttgatttgataataaaattgttgtatattgtgggaattagtatggatttataatatatgcttttcttttggttgtttccaattccctatttaagttttcaaggaaagtactttgtatttgtgacattcattgagtgtggttgaattcttgtttgaccttccatgtaattaactctttttggttcacttttgtgctgaaggtgcttgtgttcaataataattagcccattcaaaagaaattttggacatacaagcaataggaatagaattccttaaaaataatattctaatttgtttgtagcttgaagtaaaccatttgatcattgatcgcatattttcttctactgttgtgaagtgttttgagtaagtgtttgtgtggttgactaatagaagttagttttagtttaacctaactacaagaaagctagcacctttatgtcatcatttcattaacagatgaatggtctttagatacactcatgctcaagactacataaacattaaaaagaataaaataacactgcagggcaaacctgggtaaca

SEQ ID NO: 29366 - DNA, 853 bp, Medicago truncatula
  Intron number 2 from transcript Medtr1g013730.1 (locus Med tr1g013730) derived from phytozome v7.0 (chr-ID MtChr1; po s 2628019 to 2628871 reverse strand)
atacacaagtatgtatataacttttcatgttttacttttcttccttcaaaaaaaaaaaatgttataattattctttttacaatacgtacttttctttttgatataatacaatgcttagctatacgaaataatatgtcatattctattgttttattgaggttgctccaatggttgaatgatatattgttctgattttcaatatatgaataaagtattcttatttgatatccttctcttgtaatttagaacagtgatttatctctatctacagaaatattaagcagtaaataaaacttggtgacaactaggatacccatggaagaatgataggtaatttaccccaaccaatacacattagccacataaacacatttttaagtggtatccatgaactatcttgattccactaacaaattactcattttcattggttggtgggtaaatattcaaaggtaatctagaaaaaaccataaaactttgaccaaccaatatttatttattttgactgaaaattttgacctaggaattgaaagtaatacttcgataaaaaaaagtttcaatattttttttggtcaaaaaagtttcaatttttataccctctctaaagtgacctaatttattatttaaattcacttttaaaaaataaaataaatcgtccttactttatcttttttacatttaatatccaaaaaattcattcaaatgcattgatgtttttttttaatcgattcaaatgcattattgttattatctcctttataagtttaattttttttttttttttatctatgttttagtatgtcttctctaaattaaccttaatactttgttttggaaaggctttcttggaagc

SEQ ID NO: 29367 - DNA, 712 bp, Medicago truncatula
  Intron number 2 from transcript Medtr1g009180.1 (locus Med tr1g009180) derived from phytozome v7.0 (chr-ID MtChr1; po s 1108086 to 1108797)
ggtatcttctatccttttctctttttctgtctgtcagcatgtgatgacttctagcttgtgcatatttatttagtctcaattgtgcatggatctcattaaacttagggggtgtttagtgcaactcatatctcatgacataaacacaatataagcatttgaaagagagaatagttttaacgatgtacgggcacccctaattcttcaacatttcattttctctttatatctctcttccaatcacatcatcaaactaaccaatcaaatatatctcatcactttctctttctttttcgcaatgtgtttaatgtgggcgtatggatgtttaaacattttctaatagtttatgatgtgttaccaaaccagggaaagtgaaagaaaaaaaaaaaggaatgattgaatcatgatagtaacaatctcttttaagacacttttttaaaatttatattttaaccaataaataaatgtgttagaaaatgtgtgttaaggattttttttctaacacctctttttattaaagacatttaaattttcatttggattcattacgaaatctgcctttaaatgtctctgattttatacataatatgatagttatgcatttagttgattatgttctatatgtattatgtatagggcttgactagaaatattactcatctaactgttctgttttgtaggaacccttctgtatactttccttgtacgaacaagt

SEQ ID NO: 29368 - DNA, 443 bp, Medicago truncatula
  Intron number 2 from transcript Medtr1g023320.1 (locus Med tr1g023320) derived from phytozome v7.0 (chr-ID MtChr1; po s 5128446 to 5128888 reverse strand)
aggtagaaattaaagaacctttactctctaacaacattttcaattttcatttcaattcgtattgtgtttgtgggtggctgaaattacatttggttatgaattttccttttgaattgtgatagagtgaagattgaaacagactagagagaatgtgttttcggaaacactaaacaatgttttgaatttttttagaattttcaaaaatttccataatgtcttctctgatgtttattttatcggtggaaatggaaacaggaaacaccaacataccataacgtgtttctttatttatttatgaagttgtttgtcataatagcttatggttattttctgctaatattaattggagttgtactagtaactgtgttttgatgttattttctgctttttttaattatgaattttaaggaagctagagcattgttggggaggcttgaatatca

SEQ ID NO: 29369 - DNA, 959 bp, Medicago truncatula
  Intron number 1 from transcript Medtr1g023320.1 (locus Med tr1g023320) derived from phytozome v7.0 (chr-ID MtChr1; po s 5129136 to 5130094 reverse strand)
aagtccagatttttggaatctgtgaaactgttgcggtaagtccaaagctgcgttcccattaacctttttgtctacacccatgttcttcttctgcataaaccttttgtcatttctttttctaatcaacaaaacccatcattgcttttcacaaaaaaactgtcatttttcttttcttttttttcatgttcccatcaatcatggggtttgttatattttgattttctgttgcaggaacgtgtcaattttttgttacattgtgtttagaagaaaacttagtctgtgatatatataattcaccattgttgtgtacttgtgtttttacttgtgatcttgtgttgtatcaacatttcatggtacaaagttgggaaatcttgaattataggtaaaagggttgttttgcattcttcatttatttagttatttgtgtgtgtttggttctgcggtgatgaaaattgattttgaatgaattgattatatataattggttttagacttttaattaaaagtgagttgaatggaaagtgatatatgtatggtgatcttgtgttgtatcaatcatttcatgaaataaagttgggaaatttcgaattgtaggcaaatgggttgttgcatccttgatttacttagctactcgtaaccgatgttactttagtgtgtgtttggttttgcagtgataaaattgtttttgaatgaattgatttcataaaagtgatttgaatgtgaggtctttcatgacataaagtttggaaatttgaaagtttcggtaaatggggtgtgacatttttggtttatttagctacttgataccaatgttgctttagtacattatatttattttatttgttgtgattaagtttacaaattgtagtgataattgatatggattgatgtttgaacattgattttgttgtgctcattgtgaaggttggtattgaggagtgatttctattagcttcaat

SEQ ID NO: 29370 - DNA, 414 bp, Medicago truncatula
  Intron number 1 from transcript Medtr1g116780.1 (locus Med tr1g116780) derived from phytozome v7.0 (chr-ID MtChr1; po s 24760520 to 24760933 reverse strand)
gtgaaactcaattcttggtggtggctcaaggtgtttagacccaatgactttatcaatttccatgcatgttggactaacccgtctatttttttaggatactccaccttataatatcgtttgttgggctctggatctttttgttttattcctttttgcttctttggttgttgtactcttaaactttgtttgagttccagctgacacatcttgttctttgttagaaaccttcttctttgtatatacgttaattcttttggcttcttaaaaaaataactttatttttcatttagataaattaaattaagtaatttgctaaaataaagtataaacttgcatggataaaaaatatcttaactttattttgttaagatattttttattgagaaatcatatatgttatttagctgaaggagg

SEQ ID NO: 29371 - DNA, 767 bp, Medicago truncatula
  Intron number 1 from transcript Medtr1g122040.1 (locus Med tr1g122040) derived from phytozome v7.0 (chr-ID MtChr1; po s 26731199 to 26731965)
aagttaacactcaactcgaaacaaaattcagtcaggtagctagactcattcatagatctctctaatttcattctcgttattgtatttatgattccgatttaccttcattttgttctcagatgctagatcggttgacttttaggttaaaattgaaaaactgattatagatttgaattggtttaagtcgtattatgtttctcttcatcatcaattttgaattggttgatgataatcatgttttggtgcattttaggtttttttttttttttttttttatcaatttattgagatatttgaacgcattaagctaatttcaagacgcgcattttgagttattgcatcttgttcctttgcaatcatgttttcgtgtttttgatgctaaaaaaaattaatgtttctgttgtgtaacatttagttgtacactttttcgttatgtttgaatacgagttttgctatacaaagtgattatgtatttagttatgagacttagaggcgtcttgaatatatcttgtgttcgaaatgctatacatattattttcatactttgaagcaccgacacttctgtttgaaggcttgtccgacacttgttattgtgtcgtgtctgactggtcacatgtaattacatccaattatgtagttatcaaattattaccggtgttgatgtgtcaggtgtctgtgtatatcattttatgcttcatagctcttatgtataacatttcttattaatcgcaggagcctgagcccatagactgggaatattatagaaa

SEQ ID NO: 29372 - DNA, 658 bp, Medicago truncatula
  Intron number 2 from transcript Medtr3g150330.1 (locus Med tr3g150330) derived from phytozome v7.0 (chr-ID MtChr3; po s 39587454 to 39588111)
aaaagattcacgttagtatctttcttctttttctcataataattcatctatattctgtttttatttttgtgccattaaaacaaaaacaaaaacactttttaggtttggttatttggtgtgagtttgttcctattgttttggatactccgtggtcttctctaacaatatttgctaagtaccagattctgtttttgactttttatttattttttattttttattacttttctggcctctctcaatgaccctattttgagattcttattgagaagcttcaattttaagtaaactattgacttcaacaatgttttatttaaattttccaattttggttcacgcttttctctaggcacttaatctgtctatctattaccacccataagagaaattttttcatagacacaatccaaattgaaattgttaggcacaccctcaaatgaaattagaaaaaatatttagtcaccatcaatattgtgcccaaatatatttatttagacacaagtatatctctatgcgtaattgtttatttatattattgcatatagttagaaaaaattgatatttctgttagactaaatgtcttattaatcgaaatgttttttgttaaattgaaaatgtgacagtttcgtaaccttcaaagctggacccgagagtttgt

SEQ ID NO: 29373 - DNA, 629 bp, Medicago truncatula
  Intron number 1 from transcript Medtr1g089760.1 (locus Med tr1g089760) derived from phytozome v7.0 (chr-ID MtChr1; po s 17962202 to 17962830)
agatattggaggtttggttttttaccttttgcttcttgtatattcaacatttaatagtcttgtttttattgaaaaacctgtgcaacttaggggattcatgaaaactagatagaccaacccgaattgtatgcatttacacctcagtgtttaaatataggaccttgttgactaaatcacagaaattaagaaagttggtagtactattaaatttgttagtaattgatattatttcaacaagttcatccttcaaggtagagtacgtttatgtttccatcgtagtatttattgttggttcaggggtatgtttgtaaggaaattattaatgcagttgaaaattcaaattaggttgtatagaaagagacagacatttctcaagagggtcttatacttagagacggaggtagtataatatatttatttgaaaagttctcaaatccaatgtagtgatgcataattgtgcaatcttctatgtcggatttcatatattttgtagacatttcactggagtctttttcaattgttctttcatacctgcatccttgactatcaataactgtggctatattcttgttaattcttgatactacattcaagaaaaaaactggtggtctggtgatttggaggtctgg

SEQ ID NO: 29374 - DNA, 834 bp, Medicago truncatula
  Intron number 3 from transcript Medtr3g136590.2 (locus Med tr3g136590) derived from phytozome v7.0 (chr-ID MtChr3; po s 34528896 to 34529729)
gaagcggtatttataatttttatcactatccttgttaacttgaaatttaaaatgttataatatttccctttctaataatttcggtataaaagcatgattttttcatctgtcctcccacatgatttcttaaattttctattgagaggcctgcacattgcttgagtttttttttttttttttttttgcattaaccctccggttccagggaaaggggccttggtaatccggagtttggccttgaggtaaggatagcctggccaatagttcctgcgctgtgtgctcaaagaaaaaagaaaaacgctttgcaagagttattatgggttaagactcttaaccactacttaatacttacccgaaaggtcaacagtattcgtatgcatggaactccttgtttgagtctttactgatttatcacaagctgcaattaccattctaaatggaatggttcttacttcttagacatttttctgatttcattgaattatctcaacatttaacaaaaatttggttcactttttacacatgtatcaacagtcactctgaagatgtgaaattgatttcggtttggaggttctcttgaattgattctaacttgaagctaggatttgtagcttttgcctctaaatgtgattattacactcaagtttattattcaactcacttttaacttaaattaattttacaaaatcaattcaatcaaaatcaattttcacgaccttattgtaattcaagcttcaaagctgtttgtacaatcttaaatcacggaatagcaaactgatttcatgcatgatggccacgtcgcagatgtttatatttaatgtttttttgtagctg

SEQ ID NO: 29375 - DNA, 916 bp, Medicago truncatula
  Intron number 1 from transcript Medtr2g029700.1 (locus Med tr2g029700) derived from phytozome v7.0 (chr-ID MtChr2; po s 7967362 to 7968277)
gccctcttctcaataactccgattgcttcctccaggttcctcaacttaacccttcctctgtttttttttttcattatctttttctttccattttcgttgcttcaaaatcttaactttaagctttgagcttattcatctgattaatcaatttgggttacttcaaagttttttttattgcctgagatttcgtgattttagtttctactttttagttttcacactctttttcttttcactaagaaaccggaatgaagttaaaataataaactttattgttaggatgaagagtaaaacactgtacaattataccctttttagtaatttgcaacattgtagttttttattttttaatcttttcttttcaggcatgtaacaaaatttacacactaaaatatcacaataatcatgtgtacgaatttagaagtaattgtaattaatgtaaaaagtttccagtgatctacatgaacaatgcaaaaactctttaatgacggtgtatactgtataccaattatatccatatgaattatggctctgtttggataaacaacttatttgcagcttatgagattagcatttatcatgataaacacttatgtataagctatttctatagcacaagaaaaaaatatagttaaatagctttcatatttactataagctgttttcataagctatcttacagagcttatgaaaataagctgaaaatagcttatgaacaatgtcataagttgttttaacaagccccctcaaacagtctcacataacttatgccaatagataagctcaaataagtaaatccaaataggccatattatcatttttaacagcctttattatccatgatcttattatgatgttgcctttattatcatttttaacagcttaatctaaataagtttgtatcactcggaagacc

SEQ ID NO: 29376 - DNA, 752 bp, Medicago truncatula
  Intron number 1 from transcript Medtr3g097760.1 (locus Med tr3g097760) derived from phytozome v7.0 (chr-ID MtChr3; po s 23509126 to 23509877 reverse strand)
tcagatttgaactttctttttccaagttactggttgtatgtctacggactacagtccatgatcatgtttttgttgtatcttattgtctttccttgtccccaaaccatggatatctgttaaattaaatcccccattgcgctctctctcacttaatccttaaagtagtatataaacagaaattcgcaaattagagtctattgttatacatttacgaacaatatataatattattttgatatagtataggaaatacaatagattggggtgatacttgagagacaaaatggatgatttattcattgggaatttgacaaaaacactaatgtatcacacttaattgttttgagtgaattgtgcagtgtttcaactttcaagttgatctttttttctttcttagaaaccaaccaagtattcttttctcaagttttggtctctttccaatatatgaactttgtgaatttagtccttaactatttattattaacccaaaaatccaattcatatcaattaaattgtttttttgtctttagatttttaattgaaacaaatattgcaaatcgaaatagactatttttaattgattcaaatttttagaagttaaaatatgatttttctaatgcaaaattattatttacttttgtacttttaaacaatttgttgtttggtgaaattcattaaattaaatttaattagttgatttatatgtttcactctcagtcggtccttcctaccagaaacggcactacactggg

SEQ ID NO: 29377 - DNA, 1006 bp, Medicago truncatula
  Intron number 1 from transcript Medtr2g120660.2 (locus Med tr2g120660) derived from phytozome v7.0 (chr-ID MtChr2; po s 28436338 to 28437343)
ccttcttctacttctaaatccacccaatttccaaggtgtctctctctctctcttttattttatttttattgtttttatgttttttctgtttaccctttacttgacatacttgtgaatcaataaaaatatagaaattttagcttaagatcatggaactcatcttgaataattttttttttgttgtttttattatgcatgttttctatgtgctgatggttggtacctgatacaataggttatttttatttttagcattgatttgttgttctgtttgtatattcttggaatttaacatttatagtaagctttctatttcaggtgggaaaagtgttaaacttcaattgggaaagaattccttatgttttcattcatttatagtactctatgttcaattgagtttattccatgtgtcttttgcttatataccaaaaataattgtctttttcttgtttgtctacctttttggcaccaaaatgaaaagggaaacaaataatttccttgtctgaggtttagcttaatctttgatttatgttgattaaacaaataattcctctttattttgcaattggattattgattctgttgaagcacactatgtagcgtatgcttaaagtactgcatgtagttttttgaatggataatgaaagttaagttgatcccagggttgaaatgttaatccatggttcttctaatcctctatgaaagttcttccaattaactcatagggacttttttatgattaggaattgaactcggtatcctaggtttacaacaatcacatgcgcaccaaccccggtggcactcataggggatttgtgtagacttgttcatacaattttatctctctattgtccagttagtaacatgtatataatgctcctttatgtggtatgcttaatttgaactctcaaaaagttcatgttttgattttcgatactgcaacggcaatctgccagatccaggcaggtttctcatatatatatttttcattttatttgtaaggtaa

SEQ ID NO: 29378 - DNA, 425 bp, Medicago truncatula
  Intron number 1 from transcript Medtr3g102730.1 (locus Med tr3g102730) derived from phytozome v7.0 (chr-ID MtChr3; po s 25127880 to 25128304 reverse strand)
gaagatcctgaatcagtggtccaacaagtgcagaagtatgttatcccccgcgtccttttaaatatattagagtagtgctaacttttttttcttcatatttttcaaattgcaattcctatgtatttaaatttggagtatactgatctttttttttttcaaacactattttttatataaaaacaaaaagaataacactcgttagaatattactaacaccactctcttttaaacactttctcttacactcacttctttcaaatttttaaattaattatgaaaatcactttatatctttttcttggattaatcatgtaacttttttagtttagatattttagattttggttgaattaaacaaattatgtaaaaatggacaaccggtgaataatttatagaaaatacgttgaggaataaaatagtttaga

SEQ ID NO: 29379 - DNA, 738 bp, Medicago truncatula
  Intron number 2 from transcript Medtr3g013020.1 (locus Med tr3g013020) derived from phytozome v7.0 (chr-ID MtChr3; po s 2334650 to 2335387 reverse strand)
gacacgttttcgttaacgagaaaggtgaatttttctgtttcaaattcatttctcctggtttttgtttttttcttttctccttttgtagcgtttttttttttcatatgcaatatggaacatagcttttagggcatgtttggattgggttatttcagcttatcaactatagcataaacatttgtgagactatttgaatgaacttatgataaacaacctatgcatgtccataagctgttttcagcttatttccgtaagctctataggataacttatgaaaacaacttataacttacatgaatataattttattttattttatcttctgttatagaaatagctcatatataagccgaccccacttaatgggataaggcttggttgttgttgttgttatgttataagcgcttaattaagttgtttaactaaatagaaccttaattctttagacctgagttattagagccttaattgtttagacctgagttattatgttttccatttaaaccttcacttgttatttgttaaatgggttagtagttattgtactgggaactcaattgaatgtttttcgcggcgtaattgatgttagtagactcaaaattctaactatcattccggtattctgtttatcataatttgtttttctttcctttctaaatgttgattttttttttgtgccatgcaaaatattaatgcttgatattcaatcaggtgtccagcataaagcagtagttgagt

SEQ ID NO: 29380 - DNA, 655 bp, Medicago truncatula
  Intron number 2 from transcript Medtr2g122610.1 (locus Med tr2g122610) derived from phytozome v7.0 (chr-ID MtChr2; po s 29488650 to 29489304)
taggtgttggaataggttctattatcagtttcctggtaatataatatattcatttttgttttacttccttttatcattcaattgcgtttttcttagtaaattgtatatatttgaattaatcacacacatagaagacatgctcaatatatatactacactttaatgcggaaggaaaataaaaagataagcatatgtagaatctggatttacaacatattgatttattaaagatatattaggaacacttgaatctatggctaaagtccgcgggcaacaccaatctgaaacataaagagagacggataatgtcataacgaataccccttgatttgtgattatttctcaactaggactcggtatggtcttaggcaagacaatatgcggcgtgtctgatatattgaagatcatagtcgacatatattgagcccgtatcaattaaatattatagtagttaaataaaatattcaactatgatattcaactagattcctttttacaattcaaaagtgatataatcacttgtatgaaaaagaatcatataaaggaaaaaagttccaccaaacttggtataattcaattatgattctgaaattattggtataacgaaaaaagttggtaacaatccctcttttttgtttgtttgttgttacaggga

SEQ ID NO: 29381 - DNA, 580 bp, Medicago truncatula
  Intron number 2 from transcript Medtr3g150190.1 (locus Med tr3g150190) derived from phytozome v7.0 (chr-ID MtChr3; po s 39528755 to 39529334)
aagcttctgaggctcttaatagtctccaatcatatgtatgtaagcccaatattcaatttgaatgctgccatagtggcactatagcaccgtagcatagcagaatttgaacaaaagttatttttttactatccgctatttaccaacattgttgattgtttttcacgtaattttctgtgtcaaactcggttagatatttagttatagaatgatttgatagaattggtttaaggtagttagaagatagtttatgattaggtgaaagttggttatgattgttagaagaatatgatacaattagagtataggatacaccttcatatagtgatctaagtagctaagataactgtctatttatactgccttaaaccaattctaacaaatctccaactactaactatatataacaaactatcactgaaattttcacacccattaggggataggataacacagactgtcaatcatgtaacattttgattttacttggcatctacaggaagggaccttaatttgatgtgtttatttgtttattctttgaatgctgcgtaggagtttgacggccgcataataaatatccaat

SEQ ID NO: 29382 - DNA, 785 bp, Medicago truncatula
  Intron number 1 from transcript Medtr2g021560.1 (locus Med tr2g021560) derived from phytozome v7.0 (chr-ID MtChr2; po s 5512166 to 5512950)
atcaaaggcgtgtctggtgtgtgacaccggtgctttatagattcttttgttttgtaagttcttgtatgaaaattgtgaaagattgaagttgttgaacattgaattgttcaattgtttagtgatgaaagataaaagtaaaaaaacaggggaatgaatgtaatgatgtggattagtgctggttattattttgtttagcctcaattgttctgttaattgattgtatgttttactggttaaagtgaatcggataagattttgcatatatagcagaaattgtttagaatttcactaaatttggctttgcttaacatgtgtatggcagctattaatagctttttctgcaaaaataagtgtatcagtccagagtttacctttactttgactagtagagtactatgaatttatgagtaatttttttcttcttcaatttaatttctctactgagttcatggacatggattaaaaacaagttggagccatgctatgttagcacttgctctagatgtgacaactgacaagtcattgaaaccatcttatcaatgaaatcgtataaatacctgttaaacaacactagtacttcagtttatgcatttttgttgattaatataaatgtgaagatcaaaagacttaatatatctgaatttattaaattaacactacaataaaggcctcacacgatgtaatcactttgtgatcacactttagccaatttcattttctagtttgtttaatttctatctctttccatgacctctatcaagttttatactcttaaaacagggtga

SEQ ID NO: 29383 - DNA, 720 bp, Medicago truncatula
  Intron number 3 from transcript Medtr3g139400.1 (locus Med tr3g139400) derived from phytozome v7.0 (chr-ID MtChr3; po s 35869234 to 35869953 reverse strand)
acttcaactcatctaattgtaataggtagatagaaaaaaaaaggtccaaccaaacaaagcaataaaaacaaacttagtgctatataataaccaaacaaagatccaccatttaactgattgagcttaataaattcaaaccaattaaattgattttatattttcatattcaggtccaaactgtactaaactaaacaaatctggcttttattaattcgggtatcgtttaatcgatcatttgggacctgtgttttggttttattttactttactttattctttataaaaaaaaaaaaactatattagtagtattatcttgaaaaatatattttatatatgcattttttaatcattatacattactagcataaagaacgtatgtaaaaatatacaataattctttgtagtttgtaaaataagcatttaatttttaaaagtatcaacctgattaaacctaacaaagctattatgttcttcatggattccgtttggtatagattttgtaacaagatattgcaaaatacaaatcaaaagaagccgaaagttttaattgtttagaatttcccaaaagaaaacagatgaaacttatcttgtacccaaaaataaaatcaaacttatctatgtttacttttgtttctggggccattagagtagcattgccataattttattttatatttcaatttaggaagataataggagcaaggtattaccctaaccttg

SEQ ID NO: 29384 - DNA, 882 bp, Medicago truncatula
  Intron number 3 from transcript Medtr1g060350.1 (locus Med tr1g060350) derived from phytozome v7.0 (chr-ID MtChr1; po s 11958392 to 11959273)
gaaggtaatgtgatggttgttattgttggagaagaagtttactggatgagtgtgtgaaatttctaccatgtcaattgaatttcgagagtttaattttcttttgaatttatgtaatgcttttgttattggaaaggttaggggataaatgtgcggaatgaaatggtgtcaatttgaatttttagggtttggagtggtttttattgttttgatatttattttgtttaaatgtgattcttttgaattcttgttattggcgaagttactcaatgagtgtgtgaaattttagtgttgattgaatttcgagagtttaattttcttttgaaataatgttatgcttttggagagttcagtggatgaatgacataatgtcaatttaatttttttagggtttgtagtggttttgatagttttgatttttattttgtttaaatgtgatattagtccttggaatttttggttttattttgtttaaatgtgatattagtccttggaatttttggtttttttcgatttagactctgataagtttttttagtttagattcattcctccaaattcaaaaaaggttccttcagtggcatgattttattgagccacgtatgacattggaggctaaaaataataatttttgaatttgttggaccgaatcaaaaccaaaaaacttaccaggaataaaacaaaaaaatactaaacttgcagagactaaaatcatatttaaacctttttatttattgaaaatgacgacaatgtgatgtgactcttgcatttttataacaggttttgtgtaactgagctacggctagatttatttttattgttgtgttttgatttttgtccttttcgtatttttagtagttcaagcagaaaacacaagtacagttg

SEQ ID NO: 29385 - DNA, 562 bp, Medicago truncatula
  Intron number 2 from transcript Medtr2g103900.1 (locus Med tr2g103900) derived from phytozome v7.0 (chr-ID MtChr2; po s 24365107 to 24365668)
tctttggtttatcttcatctctctctttatcccaggtgaatcttcttgtttttttttttccttcacatttctatcaaaatttttagtatattaaattaataataataataacaattttgttctaatgttaatttaatttgataaagggtcatctattttgactttatctttgcaaagataattattttctcttaagtcaacatttggtctttattgaaagaacaacctaaacaaacaaaaaaacctttcattgtattttaccagtccaagtatccttctcgttattcggaaaccgcgttattccttttcactttttcactatttaaattcattttcctcaaaaacatcaacttagtcaaattcacatgtttttctttttcatcaagtttctccaatttaattagaaaaaataaataaacaaaaattgtttttgttgattttgttttttgttgttgttgaatgtactatgtactatgtatgtactatactatatattatgtgttaaattgtttttgttagattgaaaacaataagcatttggaatcttaaagatctgtagaaa

SEQ ID NO: 29386 - DNA, 555 bp, Medicago truncatula
  Intron number 1 from transcript Medtr2g120850.1 (locus Med tr2g120850) derived from phytozome v7.0 (chr-ID MtChr2; po s 28539859 to 28540413)
ggttccggtaatttttagtactagataaattaataagattatttactcgtttacttatagcaaattacagtattgaatgtattcattaatctccctctttatgagcaagacgaaattggtgtataacacacgtaatttgtaccaaagataaagataaattcatattatctttttcggtacttttactaaattgatcgataataaaagaattaatacgggtttatttatgtataaattttaaaatacgttgagtttttcctttaaaaaataaatacgttgagttttgattgcatattactccatccgttcctttaaggtaaatttttcgttcatatttaactgttgttttggtattttaagggtatgatttgtcaattatatcttttgtcaattattcttatatttttcaataaaactaattaatgctatatatttaaaaaactatggtttgtttatttaaaccgagtttgtttgttttgttttaaaacaaaatttgtttcttgttatcttcaaatttgaacgtgttgccatgtagcttttgtagaaggtggtgcg

SEQ ID NO: 29387 - DNA, 777 bp, Medicago truncatula
  Intron number 1 from transcript Medtr1g025260.1 (locus Med tr1g025260) derived from phytozome v7.0 (chr-ID MtChr1; po s 6220509 to 6221285)
ccctattggttcacaccaattttgaacgacatcttgttagtatttctttcattcttttaacctttacctctttttctttccttccatgttccacatgaatgaaaaataaaaacgaaacctttctaaagtgttcatatttgggtgttgagtgcatgctgtttttcaccgtcatttttctattttttttttactatgcccacgttttaaatttttagctttttttaattcctttaaatgcatttagttcttttgaagaaagtttggagcttttgatgatttttatttttaataatgagcttttgattattggatacgctgttttttttttttttgcaatgattattatattctatacatatttattgttgtttttaaataatgggaactgtgacattagttgtagatctatttttttcgtcttctttctttctagttttgcttttgagacacttcatcatgagtttacattgcaagagaggaaccatgtttttgtggctataggtaaagaaaaggaaatggataaggagattttagtgcagtttttcttggtttattattcttttccttgttcggcaaacactatctatgtaaatcatgtacttgagatgattaatggctgtttctcaagcaaataattatgtttagctttccgatatatacattaatccgcaaatatccctcttaggctctcttgagcttaatgtttcttattctcatttggaaatttatacttttattgcaggcacttcctaaaacattttcagacaatttaaataa

SEQ ID NO: 29388 - DNA, 979 bp, Medicago truncatula
  Intron number 1 from transcript Medtr1g122100.1 (locus Med tr1g122100) derived from phytozome v7.0 (chr-ID MtChr1; po s 26767244 to 26768222 reverse strand)
taacttggtgattctcaacaatccggagagctttggttagtccttcttccggatgccatgagagtttcatgctctggtgcttagttgttttcagctttctttcttctttttttcttgtttcttttttggcttatttttctcttgtaaacaaaaaaaaaaactatggccatattagatagatatattctcctcgtcatgttatgagaggcatctacaatcagagtactgagatatgcatcttataagagacaaattttgacaactctttttatccgaggtttgtaactataatatttttttgctctcttaaaataacattactaaaacatcttgaaagtatcaaattttttttggcagtgatcttgaaagtgttgattaatcacaatataggtttttcaataatacaaaaactaggcgagcataattatttttagtgttaattaatcaaaaaacgatagtctatttgtacaacgtattgaaagtggacatgtatcatcttatttttttcttgtcaaaaaaaaatcatcttatctttttgatcaagtgtgattttttatatcaagaacatgaatgatcttccttttaattctaataattttgtccaagatatatatataaaaaaaaaagagtaaaccaagcaaaccctaaaccctcaacaaaaaaaaagtttgagttatacaccttaacgtcatagaaaaaatggacaaacaaacatgattttactccgtttattaagcattgaccatcaatcaaaatttattaatttgagtgtatcgtagaatttaccctacttaaatacggatgaaggagagacgtggtgacaaaattatgaaatttgattggatatattttctcaaaacaaatattctaatttttggcgatatgatacaagttacaacagaaaacctatataatttgaccttggtgtgtatattctaccctagccctaccctttgcttgccgcagttcttctactttg

SEQ ID NO: 29389 - DNA, 729 bp, Medicago truncatula
  Intron number 1 from transcript Medtr1g114590.1 (locus Med tr1g114590) derived from phytozome v7.0 (chr-ID MtChr1; po s 24502809 to 24503537)
tgatttttcaggatcttttgattaaaggctataaggtaacagtctggacatataatattatgattaatggtctttgtttggagggattgtttgatgaagctatgaccctactggaaaaaatggaagataatggttgcactcctgatgttgtaacttatgaaactattattcgcgctctttttaaaaatgatgagaaccataaagcagagaaacttctacgtgaaatgattgctagaggtctgttagaagagaaagtagagataagatgatttctttttgttaacaattatgatttagttatgttcattttgtgatgagtatgctgtagttttaactaaaaatcttgtattgttatgttctttttgttattaaaatgttacgaatggtcgtttgttttgatttttgacgtaattatattttatttccaatgtgcagtcaattttcttcatatagttgtatcaattttttccttcattggtcattctctgtgtttctaataaaaaaactaaatgcaattcttgagttttaaatggttcatgtagtcgaccccatttagacggaagaagcatttgtgttttttattgcattttcttcgattgttttcacatgaagggaaattgtaaggattcaaccttttgtgtttgtatcatctgagttttctatagagctacaattgttgatatattctttgaagtcattgttggccaaagaattggagctttttgaaag

SEQ ID NO: 29390 - DNA, 939 bp, Medicago truncatula
  Intron number 1 from transcript Medtr3g076400.1 (locus Med tr3g076400) derived from phytozome v7.0 (chr-ID MtChr3; po s 17661934 to 17662872)
tctcggtgagtgtgtatagagtggaggattaacaccagacatagtaacttcagtgaaagaaactccaggtatactaggagatggagtagtatcacgatgggcaggtagacatgctgtggtttgtttgtccttaattcaaatgttgcttaattcaaatgtttaattcaaatgatcctatgggcaacatagtcaatgactccactgcttaattcaaatgttgcttacggttctggtttgtttgtccttaattatccctatggaactgaatcacaagtttatcttattagaagtcctaagatatttaaagacttcaatgtgtttcaatgtttttcactttaatatttcatataactctgtcatgtttacatataaaaatatatgtttgaacttaagttattgaaaataaaatcaaaaagcaaaataacaagtgactcataaaatatgagagccatacgtgatcaccaatggtaaacctacaattttatgttcaattttttgttgcatacacacgttaaatcaatgtgtgcgtgttaaattaaaataatagaatgtgtgtctgttgtttatcgatttctatcttttcgtaagcattttttgttgttatttattgagactcaaacaaattatattttaaatataattaaataattatatttgggcaaatggaaaaagaatctgaaatgaaatttcaaagataaatggatcacatattaaagttcataagcatgagcgtccataaaaaagaaacatttcatcgatgtcaaaaatgtatccctacaaatattgcgaaagataatttgaatctccacaggctttaggaagacacataaaagctcataaacatttgcattaagtagagataaagttttcttccactagtattcttatgcaaattatggagtggatgaatgtcatgcaaaagaaatttctcttctataa

SEQ ID NO: 29391 - DNA, 437 bp, Medicago truncatula
  Intron number 3 from transcript Medtr4g022410.1 (locus Med tr4g022410) derived from phytozome v7.0 (chr-ID MtChr4; po s 4559718 to 4560154)
ctacattatccggttgttgagaagtttaagacttagtaagtttgcattatgatttcaaaatatagtattagagtaacttattatttcacaatctgatttgattgttttttgaccatgtttcttgaattgttgtcgtgaccttaacacttctcaagctcagaggcaaagtatcagtcataacttaagttagagttcggcttcttctcaacgtactttgtacaacgattttttcaatctgcctcaggttaggccaattactgaatttataaacttagtcatggtctgctttttttatgcacgaacatgctttgagttttttgatgcacaagttaaaaatacatattgcattattctttatttcatgtgcataatttgggttaggatacatacttcatcactatttggaaaacaactaaattcaatcataaccagtttgg

SEQ ID NO: 29392 - DNA, 401 bp, Medicago truncatula
  Intron number 1 from transcript Medtr2g103770.1 (locus Med tr2g103770) derived from phytozome v7.0 (chr-ID MtChr2; po s 24270053 to 24270453 reverse strand)
aacgaccttctcactgtaagttcatatttctaattcaccccccaaaaaaaaattaattaattttgattactgggtttttacttccatttcctaaattcaattttcaagtcaggtttaatttttagctttcaattttagcagtatgaacctgatgcaatcatgttttgataatttgattctttgatttcatcactattagaagatcatagttaatccctatttaggttttgggtgtttcaattcattctgatattgattgacttaggtgttttttctctctttctttttgatttgacttggattgaaattgaactcaagtatcatgtttttatagatcaatttttgaagatagttttttttttttttttttttgcaggattcatttgttagtgaggctaatc

SEQ ID NO: 29393 - DNA, 427 bp, Medicago truncatula
  Intron number 2 from transcript Medtr3g009480.1 (locus Med tr3g009480) derived from phytozome v7.0 (chr-ID MtChr3; po s 1387798 to 1388224)
ctgaaaaaagggactagaaaattgattgcgtcaatgtattcagtctctgttagtgtcattaaacgtatttggaagagagcaaaactcacaggagatgtgtctcataggaaaacaacaaattgtgggcgaaaaaggattgaactggatcatgatcaatttcttcaagttccattatcaaaaaggtccaatacttcaactcttagctttacattggttgtgggggtataatgatcttgatgccatgccacaaagtaactttgtttttatgaaaatcattaactttcagttagctttatcattttttttaaattactacgtcaatgtttaccatttatgcttaacattgcttgcactttatcttctgtgtattaatgttggaaattgttggataggtccactttgcgagatttagctgaagctttgaaaa

SEQ ID NO: 29394 - DNA, 811 bp, Medicago truncatula
  Intron number 1 from transcript Medtr2g007230.1 (locus Med tr2g007230) derived from phytozome v7.0 (chr-ID MtChr2; po s 1033659 to 1034469 reverse strand)
tcctaccgcgacgtgtcatttatttttatttggaggtttaactattcgttaaaaaaagtaaatatgtttttagtcctacaaaatttcaaggttttaagtttagtccttaaaaaaattatccctatttgcattttatagggactattttggtctggaggactaaaaatattcattttttgtaaaaagttttcaaaatatggactattcctacaaactacaatatcaccgaggactaaaattaccattaaaattttatagggactaaacttaaaaactcatgattttgtaaggactattttttttttatctaagaaagtttagatgagttaggtttcaaaggttcaccaagatcatgacatgccttaaaactcaaaggcttaaatagacatttcatccctgcaaatagagttctttgaaatttcatccatgaagttactaatctttccattttgctattgcaaatattaattattttaaatttgatcctaattaggtatgtttatgaggtggatggtaattagcaacgtggcgcatacgtggctaaccagaaggcatgtgcaatgacatttttgccattaatgaatcaggagacacgcaaaaagaccaaattacccatgtctccatattttcatcttatttcttcttcttctgaatcgaactgggtttttgaaaaccctaaaatatcaactcttcttctccattaaacccttcacttttattccctcatctcagttctgcttcagtttgcaatccctaatctctgtctccagttcaaaaatgtcaacagggaacaccagtacaaggtactcac

SEQ ID NO: 29395 - DNA, 823 bp, Medicago truncatula
  Intron number 3 from transcript Medtr3g150250.1 (locus Med tr3g150250) derived from phytozome v7.0 (chr-ID MtChr3; po s 39546746 to 39547568)
tgttcgttttattctggtctaggctccttcaatttgtgttggtttttctgctatcaatgtttgtggttatttgcaaagagtatcatgcaagtggttagttttgatagtggtggctgtatgtagaatttaggtgtctcataatttctcagtttggtagaagctaagaaagaagaagacatgatgttgggattaattcatgtttcaataccaagtagaagtttggctctttttttttctactgtgtggcaggcgtttatgtgtattgaagggcgtgggattgtgtgtttaaattatcatcatctttgtacaagcgctgcagacattttactcttggatttttgttgttgttatttctggcatcagttttagcatatggtgtggggaactatagcttttgaattcaacttacaacactggcatgagagattgagaagagataaaatagggaccttgattttattttctttatctatgtaacattttttagatatacgttcttatgaattatcttttgaaataataggtttgtaagattgatccagataactgattggaactatgagtttatcatctaaggtgtaaactataatctgttcacttattttaattccaaatacttgaagatattttaatttcaaatattgtgcttacttggttctcaagatgattggtaagggtaagcgaaggtcattctttgagatcttacagcttaaatcattgtgttgggaagtttaacttactgctgaaatgcagagataatttgtgtttttagttttttttttaatcagcatatattattagaacacacccggtacaagccgtg

SEQ ID NO: 29396 - DNA, 882 bp, Medicago truncatula
  Intron number 2 from transcript Medtr2g104710.1 (locus Med tr2g104710) derived from phytozome v7.0 (chr-ID MtChr2; po s 24773516 to 24774397 reverse strand)
tggttgcaggcactcaagtggtgagtgctttattcgattctgttgttttatatctgatttttgtgtgagcaatgatggaaatttaaagttgaactaaattaggttcaagttagattgttccatgatgcagcattttgatttcgatatatggtttagatttatgatcttataactttgtgtgatttaagtagttggattgatactttgcgatttattaaactattctagccgttcgtatccaaggtcctgttttttgacgttattaattactctgtttcgttggaaaaagaataatactttaggactgatgttatggatgagaaggctagtgcagtcattattttttgtgttaattgctgaactattttgggtatttattcttctatgttagttcgctctccaattttctatagaaatggctcacttgaccattaatatgtgattatcgcctatatgagtaacacttgactgctctgcttggcatatataatacacgtgactctcaaactttaaaacaaccggcaatgttagttatacatagatttgacgattgatgaaatcagtttataaggacatattactgattttgtattcgtgaataactaaattagcatatctgtctttgtttatactcttgatttataatttccagtatcaaatagtatgttccttaataagtggatcagagatttattgctgtttttgcaagtatcggtttttagttgttgactcacaataagaaatagtttgtagttcatgcttcttgatgcaactgacgaaagttttctgaaatccaccatatgtagtttgttctgtacttacatcttcatatcttcattctcacatgttttgatatttcatttaggcatagtgattcaaaaa

SEQ ID NO: 29397 - DNA, 1040 bp, Medicago truncatula
  Intron number 1 from transcript Medtr1g112370.1 (locus Med tr1g112370) derived from phytozome v7.0 (chr-ID MtChr1; po s 24146363 to 24147402)
ctactgttttaaaaaaagagaagctcagagaaacggtatagcttatttttcataatgttttgccatatttttatatcccaggtaatgcttaaccattttttatcataaaagttgtttatttttgttaaaacaatagtttttgaatttaaaccaatgatgttggtttaaaataaaagaaaagcatagtattaattagtgggggttctatcaaaatttgcaccgacatggaaaagatcttatagctgatgttatttgtgtttcttttagaaatacatcaacaagtgataaacctaattaaaggtatagatagatattgaagaataatgaatctgattaaaagaaacatcaaacaaagacatcaacaattcagtcagtttgcagaacaagtgtcaatcagttgcattacttgttctgcaaactgactgaattgttagttctgcaactgattgacagctcagtgtagttagttatacagctccgcatagttggttagttgacttgtaacgaacttttcagctcataatgattgtaatctagctagatggtagttacatagattagattcattgttgtatataagttttatcaatgtactctttgcaacttaacaagttcattttccacattatttgcttgttcattttctattcttagtttcttcataatagttatgtgcattagggtatcctatctgttctgtggtattcctcgcttctctttctagtctttacacaggcaagtaaggtttaagatgttcatgaatcctaggaactgattcacaacctgtcatccagtaaattaagatgtttcgctcaaaaacactagcaagtaaggtttctggatgttcatgaaatgattgttatctggttcgttggaacaccgtcaaaattttatgattttatgtgagactcgtgctttaccctttttctttttcctcaaacaatagatgctttcttaaactagtgcttgtcaacattcaaaatcgactttgattgatgatcaaactgaaataaaccattcatgctttgcttgcagaaata

SEQ ID NO: 29398 - DNA, 777 bp, Medicago truncatula
  Intron number 1 from transcript Medtr3g159750.1 (locus Med tr3g159750) derived from phytozome v7.0 (chr-ID MtChr3; po s 41906191 to 41906967)
gccacaatcgcagtgtccctgctttgaattcgtcggttcccccttaatcgccgccatctattttgtttcatgcctcgtgcgtgcgttgtggattgaataaatgatcaattgaccatgagagatagaatgaaatgatctgttttgtttatttgcgatgtcacaattttttcaaaatatatatcttacttaaattggatttaaataaaatcaaagatatagttttgaaattgtttaaaaaatatatattttggattcaaataaaatcaaatttatgattttgaaattgtttcaaaaggatataatttgatttaaataaaatcaaatatattgttttgaaattgtttcaaaatattttatcaaaaaaaatgtttcaaaagatatattttggatttaaataaaatcaatatatggttttgaaattgttctaaaagatatagattttatttaaaaatatctaagagattcacgtacgagtcaataaatagaattcacacggtccttaaaaaaataaagttcacatggtgttgaatatcataccactttcaagaaaccttaatatctctaaagctcttattgacttgactagcaccgatcacccaatcatcagagaaggtctgttcgtgtagactgagtagagacatcgttactttgttttgctcgtgatcgaaaacttttcaacaataagattggtgcacctaaagaggtaatattcttatccccgattcaacaatgagatttttttcacttcaagagataatatttttatcactgttacgg

SEQ ID NO: 29399 - DNA, 682 bp, Medicago truncatula
  Intron number 2 from transcript Medtr1g124450.1 (locus Med tr1g124450) derived from phytozome v7.0 (chr-ID MtChr1; po s 27127309 to 27127990 reverse strand)
cgaaggttagtattcattttcttataatttattcaggtcattcaatttaatttgctatcttctacttatcattggaatatataatttgattctaaactttgttaaaaatattatcactcggtagcattactaactggttatgttaattactggtttgctaagttaactatcggttgcattactgttatgagttagttaggttataggttagtttgatcttgctctgtcttggacttttctgtattcaattaggcttactttggattagtttctctcttatggtaagttccagggccggcccaataattttcaatatttggtgaggcttaaatcaaatattataatacgggactttttttatctgcgtatgaggcctttttttctttataaaactgaagacaaatacagaacttgtgcttgattgaatctgcccccacttttgtgcttagtcttttttgtaccagatcatatatcaaacctgaaagcaattcaaagtcttttattcaatctattccttcctctttatccaaaaccatataacttcagcaatataaaagttttattcttattttactgtcttttttgcatgattacttaatttcatatttcttgtcatatcctggtttataagttttggtttatgctgttgactacagatactcaattgagaaaattcctttat

SEQ ID NO: 29400 - DNA, 614 bp, Medicago truncatula; identical to SEQ ID NO: 29251
  Intron number 2 from transcript Medtr1g016540.1 (locus Med tr1g016540) derived from phytozome v7.0 (chr-ID MtChr1; po s 3205761 to 3206374 reverse strand)

SEQ ID NO: 29401 - DNA, 519 bp, Medicago truncatula
  Intron number 1 from transcript Medtr3g092730.1 (locus Med tr3g092730) derived from phytozome v7.0 (chr-ID MtChr3; po s 21894238 to 21894756)
cagtgatttgttggtggtttcattggtctcgttgctgggttctttttccttcagtggtacttttttcctcaatggtacttttctatctctatcttgatgtttaggttttaattgttgaacatttttaccgtggaattttcataaaccctgtacaattggtacgtgttgagaattttgttgttaggctagcatagccattatctcattcaatcttctgctattacaacaacaaccctgtacaattttgtaaatcaaaatttaaattgttagggtttatgaaatgctgcaagatcttttttccacaatatatgagcctaaattttgaaacggtttagggtgcctgaggactttaaagcatttcggtgacgattcaatttccaccgttgaggtaattattagatgtgcttatcatatggtattatatcattctgtgtgaatttgagagtaactaattgttggggtttggttttttttgtcaatttagggattattctgctaactgtggaattggatccggtg

SEQ ID NO: 29402 - DNA, 808 bp, Medicago truncatula
  Intron number 2 from transcript Medtr3g092730.1 (locus Med tr3g092730) derived from phytozome v7.0 (chr-ID MtChr3; po s 21894883 to 21895690)
cttttggttgttttgctagacataatattccaaacgtggatgctaaattgattcctgaaacttgaaaatgagttctttcctggaattttgcttttatcttcaattctgttttggttgtttaactctgtgatttaaatcataaaagaacaacacatttcaaatatttctcaaatgccttttattgttaacttgaatattttgatgatttgctgctaatttttgatagttaagtgaaattaaaagcacgacaaatacaaaacatcccacatcataccattattaagcaagtgggtactagagagttcggaggagttgatgccctacgacactgtgtacatatgattgttataattggcattcacactagagagtttggaggagttgatgccctacgacactgtgtacatatgacacactagagagttcggaggagttgatgccctacgacactgtgtacatatgattgttataattggcattcactaatttaagtttggctttgatttaacataactgtttaaattttgatttggatttggtttgtgaggagttcagttaaattgtgttaattgaaatgttttagaatatatttgcttcatattttcaggtttcatggttgatgttggtttttatttttcagtagtgtcattatttaatataaataaggtaatgtgtgttagtatgaacagaaataaccaacggtgatttaaattgtttttggcgccgataatgccattgctgcagaattttatcttgacaggttcatgttggttttgtagcgattgcaaatttgtgtgaaagcatatat

SEQ ID NO: 29403 - DNA, 881 bp, Medicago truncatula
  Intron number 2 from transcript Medtr3g128090.1 (locus Med tr3g128090) derived from phytozome v7.0 (chr-ID MtChr3; po s 32697888 to 32698768 reverse strand)
ttattgtacattgtaagttccttaaatcctaacaccttccttctttttgttccttaatagctttctaacgattattatcattttcagtttcatgtttcatactattagatcactataagtaaatcttactttttcaattaattactatatgtaaattgactaatgcaatgcataatgttagtttttaaacttgtaatattgtacaattatttataccggaaaaaaaataaaatcgtagaattattacatgtgttaaggtattgatcctagtttcacctgtctctctgtctcgtggtcccaacaaattttggggtatacacttcttgcttggtattctattctattacaaagtgtgaaaccttggtgctgtggttggttcgcaagtgtatgcttggttccatttttcgacaagacaaaattgattttaaagatgtacaactgattttgacatgttttgatgctctcaagtataattgattataacatgaagccagaatttggagtttttgcaactatgattgatattcagccttgaatttattgttcaacgcacttttacatgaatctacccaaacataaatcactttacatccagctcaattttattcataatcaatactacaaactcaattcattcaaaatcaattttttatcaatgtaggaccaaacaaacacttagtcattgcatttatatcatcatagtgtgtgtgtgtgtgtatttattcttctgctttattttgagttttttgacagttagcgaggttcttttgtctctaagatttatttttgcagtttagattagtttcattctttcacaatcaaagcaaaattggcttccatcatttaatgtaatgcatcactattttgcatgcaggcagtga

SEQ ID NO: 29404 - DNA, 792 bp, Medicago truncatula
  Intron number 1 from transcript Medtr3g154130.1 (locus Med tr3g154130) derived from phytozome v7.0 (chr-ID MtChr3; po s 40699877 to 40700668)
gaccaagaaattttggcagcatcgagttggacgaggttaggcttgaatgatcctatgacgtcatatgcatatgcgatgtgatatgaacccaaattatagagaagaagttgtattattaatagaaatcaataactactagagaaaagatcaacccatgtaattcgagagcaaaggctccttcagagtactgaccgtgttgtcttcttaaattcttaagtttaattttctgcatcctccaattatggctaaactagttcatccaaattgaaacggaaggatgaaacacaagatgaacatactctaagatttcaagccaacaccacccaatatcaaacctaaattgagttctagtgttttgtttccatagtgtacgtagttttagtcataccaagagggtcgggaatattgtggcttagaatttggcccaatatcctttaatttgatagagctgattttgatggaggaatgtccttccattattttgtaacaatcagatttggataaaaaataattcattaataatataatcctttttaattccacttacatagaaggatggagggagtaataaatctttttgagtggatatgaagtaataaatcaatccatgcatattgtcgttcgtttccaattatctaaaattgattgtgaaattgttagctgaatgttatgattggggtttaaatgtttgtaagttttgaaatgattattatcattttgtttttttatttttatttttaagaatattatcatttagggtgtgtttggtttggaagagaagttgtgaagaga

SEQ ID NO: 29405 - DNA, 633 bp, Medicago truncatula
  Intron number 1 from transcript Medtr3g006190.1 (locus Med tr3g006190) derived from phytozome v7.0 (chr-ID MtChr3; po s 675209 to 675841 reverse strand)
accaaagagttttgctactagctcctgtcaccaaggtactttcacttactttttcttttcattttttttttaaatttctaatttttaaatgtttagattgacaaggaaattggtagaattaaattgttgctctcatttcgtaaaatttattgtgtactatgtgtatgtttggtatcacgatgtatatagtagaattcgatgatctgtcgtgattttgcagaagctattgagtctggatgacccgcttttaaaaaaatcaagtgggttaccgtaattctgacattcatttgtaataccaaacatagactctatgtttttatatttgatgtcacattagtattgtatatgcagggaacattaatttgttccttaatgggttggctgcatttatgcaaccacgcgatttgagattatattgtctgatgttgatctaacaattcatgttttagcttcgtgttttgaatttttgttttacaaaattagaatgcaaaagtctaattaaaatcaaatgaataatatcgtatgactatgtgaatgcgtggttatagagtaatttgtgtgtctttgaggaccacatgaaattattacaactgaaattaacgttgttgaagtgaaaattctgttgaattgcag

SEQ ID NO: 29406 - DNA, 808 bp, Medicago truncatula
  Intron number 3 from transcript Medtr1g024850.1 (locus Med tr1g024850) derived from phytozome v7.0 (chr-ID MtChr1; po s 5952294 to 5953101)
ccgtggttcttggacttaaagctatcaccaatattgtaagtattatttgtgtgtttgtgtatatgtgttatttatttgttgaaggaacccaacgattttgttgataatattaattattaacaaatgatcatatgtaagggtttaactttaagaaagttttgtcccataaatatatatcacttggtagagacaatgctttgttatatgcagatatcggatttgaatttcgatattccatttattctccttaagagagtttttccttaggaaaaagagatttttttgttaaactttataaattactctatataaattattatttataatttaaaaattaacacaattgtctgatcacttattatgaaaaataattgcgactttttaaatattatatcaattacaaattagtgtactttaaatagaatgtcttctttgtcaattttttttagtgtttttaaacaaggaaaattagtattatgtgactatcatttattttgtatccaataatcaattttaatttttgaaaaaaaaattaatttaattttccgattttctctcatttattttttgggttaaatttgtattttcatttcttaaagattaatatatacttattttgatctattttaacattttgaattttgttaattcatgtactaacaaaaattgtgtgtttttagactcttacccaaacacattattcaaacaatgaaaagttaaatgagaaacaaatatgaaattaaaaaattgtattcataaattaattccttattattgtgttcttgcattctcattttgcaggagaaca

SEQ ID NO: 29407 - DNA, 724 bp, Medicago truncatula
  Intron number 1 from transcript Medtr3g010200.1 (locus Med tr3g010200) derived from phytozome v7.0 (chr-ID MtChr3; po s 1687992 to 1688715 reverse strand)
atttcttcacgtttccttgtcttttttgtggatttagttttctcgttcctttctgacttcctgtgttcgtaattggggttttttgttgtgaaattttctcagctcttgttacagcggatatgatatactgtgattttaaagctgcagctaaccttaatattacgaacatgcagacccttggattttacggttcattttcttgccttgaatgtacttgttctggaaaataggtgtcctttggcattgtaatgtgtcattatttagaattattaaactaactattaatgttgagtattccttctggttagttttgtctcttgatgttgtggtttgatttagttcttgctggtgttggtcttagtggttgctatacttattttaatgatcatcacaaataatgaattgttagttaattgtcattctgattcttgtctgcaaaatatagaattcttcagttgtggttcattattatttttatttttaggatttgtttgcaaaacactagaattgaattgttattcatgtgacaccttaagattagtggccactaggaagacatcctccactgaatctatgacagccaccaagttcctttaaatgtgttcccagtgccatatatacttttctatcactgtacaatgtttgaattgatatatgatttgaattctaagattatctatattagagttaaactcctatcatgttcagatacaaaagctcgtgt

SEQ ID NO: 29408 - DNA, 961 bp, Medicago truncatula
  Intron number 2 from transcript Medtr3g020060.1 (locus Med tr3g020060) derived from phytozome v7.0 (chr-ID MtChr3; po s 4378969 to 4379929 reverse strand)
gtggtcggaccctttactttgtctgggtatcgactgaccttttgatgtaataactttgattgtttgcttgcttttcggggtgttttctctggtacaccttatacttaggagttttttggttacatatttaggagtttacaccgccgctgttaatatatcccattttgatttcttaaaaaaaaaaaaaaaatcatcaagttattaatatatggaaaatctattttggtaattaatttatttatcggcaataaatgtggaggttataatctgaattcaattgatcaattgaggtaataatatgacaaacaggctctaacaattgttttaagggtgttgcctaaaacaatttgtctcgaaaatgcaagttagacatacgaaaaactaataattacacaattttttctttaaaaagaaaattacacaattgtatatgcataaattactcattttgattggttaacaatgtatgaaggccacttgtttgcattttctattaattgttcataataaatatttggagaaaagggattgcgtgcattgccagtgtgaactaatttttcatggaggtctaataaaaggtggtgtttaggataaaccatcaactaagtagttatggtgaaccatgaataagaagagtcctcagatttagtagttctacccatttcatctttttaacagaattgatttttgtcaaaatttggttatctattttaccttgctcgtaattcttatagtgtattgaccatctttagaaataagaaataatcagtagatttgttgatcttcttaatgaaaaaaaatcattgaatatttgtatctttcattatcttaatttttgtgtttaacatcatcatttacattcattttcataagaatgtcgactacttataatctcacaattatttttctctaaagaacttgttttcatctaacgaaaaacataggtagctattcgtcccct

SEQ ID NO: 29409 - DNA, 765 bp, Medicago truncatula
  Intron number 1 from transcript Medtr1g105800.1 (locus Med tr1g105800) derived from phytozome v7.0 (chr-ID MtChr1; po s 21884185 to 21884949 reverse strand)
taattgagaaggtgattaaccataattttcagagtgttcgaattgaacacctgaaaattgtggttaatctcatccaaatttgtggtcaataatgattaattaatgattattgggctttatacatggtattgactgttaattgaccaaatatttgaactatgttaatcactaagattgttgttgtcaaagttgtccaatttttgtttatcaaattaacacagctgaaagttttataggtatatcaattttgtcaccatcactcttgctaaaagagttgaaatggggacagtcaacttgtctccttttctctctgttccttttctagtgtttttggaatctattctttccaaatttaaatgttttctgaaatgtatcttacttgagtaaattttcaattttcactcaagtttcccttagctttgtaatctcatgatgttaaaatgtgttaaattgatcaatggttctacgatttttgggggttgggtagctcaactgatttgagttaagggttaaggagatggaggtcctggttcaaatcccgacgacggagaaaaaactaatctaacaactaactagtaattacaaacattgaccatttaaaaaaaaaaaaggttctgcattttcctcaatatcattctctcatttcagttgaagaagcatatgaactactgtttgtggttttatgaaaattgatgtgattttccacattgagaggcttctaagtgtaactgatagtgacacatttatttattttgcagctgccag

SEQ ID NO: 29410 - DNA, 600 bp, Medicago truncatula
  Intron number 3 from transcript Medtr2g030140.1 (locus Med tr2g030140) derived from phytozome v7.0 (chr-ID MtChr2; po s 8291516 to 8292115)
tctcccaaactaaacacgtcgaacacaaaggatcggtctgtttcccattttcttctacttttctcaaaatcaaatcatattttatttcacattattgcaattgctcttgatttcacttattatgacgtgtccgtttccaactgctattgtcatttcgtctatctacaaaaaaaataaaataataaataaagcgcgaatcttaattaagtcataatagcataaacacttatcatataagtgcttatgtataaactataaactatcttggagagcatatgaaacttagctgaaaactagttacggacatgtcacaaattgtttctaagatctctaccaaacagtctcacaagtgattatgccttttgataaacttaaataagttactccaaacaagctcttaataagcttgtttgcatatcaatgcctttagaaataagtaagtagtttgaggtagttacttgttagtaatgtgattggataaaatatgtgtatcatcagttatcacagcttataataaatgtaatattagtgctcttttcatactttgttatatctttgttatgtttcgcaggttgatttggtcactgaaacagataaagc

SEQ ID NO: 29411 - DNA, 890 bp, Medicago truncatula
  Intron number 2 from transcript Medtr2g110750.1 (locus Med tr2g110750) derived from phytozome v7.0 (chr-ID MtChr2; po s 26123109 to 26123998)
gtctacaggtattttgcaactccctttatgggatatcttgttttttcgttatataatctgcacatggaccaaagtgggtttttgggggagaaaacatgtgtcaatagtgtcatatcttacggaggctaggggtcacaacttgtgtcaacttttgatttgatggtcatcaatgtatgttttcatgaagtaggtaaacttatttaggtataactttttatgttagcataaaagaagccgtaattctggaagaaataataattgtactttaaacttcaaagaatgtaatagataaagatgaggggtacaaatgccgattgaaaaacaattatggtcatcatttttcaagcagttaagtcctttgaaattttgataagcacataaataggtatggtgcacaaccgtcttgagttttgaaagtactcgattggttttcttgaattttttttttcatatataccatatcatacatttgatttctttccaattaatcttaataatttagaataaatagctaagctcgcagatgacaagaccccccacaatcatcataggcatagttgttgtgggaaactccctcttgctgtttttgttgctgcttctgttgaagaaaatcttcgatgatttgcttcaccaaggctttgaagtgaggctgagataggttgaggtcgggttcgttggaagcctactttcgaaccttggattatgtagcctcatccatatttgattctagtgagatcttcagaacagtttcctcgattcctccttgtttgatgatttgattcaccaaggctttgaagtgaagttgagataggttgaggccgagttcgttctactttcgaaccttagattttctagccttgtccgtattttgttgttgaaacaaatacgga

SEQ ID NO: 29412 - DNA, 463 bp, Medicago truncatula
  Intron number 1 from transcript Medtr1g117920.1 (locus Med tr1g117920) derived from phytozome v7.0 (chr-ID MtChr1; po s 25449198 to 25449660)
tttcacaattgctagtttgccaagattttggttgcgtccgtgatcaacctagatctattttttgttcttttgtttccaaagcatgttttaaaatcaagtttatcttatcactgtttttttccacatgtctaatgttttccaattttgattatcaaacaggtttcgtatttttgtatccaaaaacatattttttattcttatttaaatttttcacttttccaaaacgaaatatagaatcatcatcacatatgtcctctgtgaatcataattaccaaaaattggcataatattggaattaaaacatctgaaagaaaagaaccaaaagtacgaagagtaaaatatacaaactaatatccacagaagttggccatactaggttcgggataatttgccaaactctaaagtatatagggaatagcaagagctagaaaactccagttaaatcttcagcacaaaagctcct

SEQ ID NO: 29413 - DNA, 512 bp, Medicago truncatula
  Intron number 2 from transcript Medtr1g143320.1 (locus Med tr1g143320) derived from phytozome v7.0 (chr-ID MtChr1; po s 31589475 to 31589986 reverse strand)
agaagagggttaccgtgcaggtatttttttcctcatcttttgaagtttgttctttgaatttatttatttcttttcaaattattagttataaattgagattattttacttgtacatgtttgtgagtaagaaataagagtgtgttggtgccagtttaagtttattacatgttgcaatcaatcatttacatttattgttcctattttaacatccatgtgttgaaagggcctgtttgatttgatcttgttttgtagtttttatatactcaattgaaaatcagcttttaaaactatttttaagaagaaaaaaaaaaaactgtttcgcaatccaaattcagtatcactagctgcaaatgattccatatttataaagatgatgccatatttacaaaaaaggaaataaatctggccctaagttcatctctgtttttctcaagatttcagagagtattagtcgtattatttaatttaattatgcaatgacaattttgcgacacactttctgcagaacgagg

SEQ ID NO: 29414 - DNA, 403 bp, Medicago truncatula
  Intron number 1 from transcript Medtr3g025690.1 (locus Med tr3g025690) derived from phytozome v7.0 (chr-ID MtChr3; po s 6757113 to 6757515)
gtataattgttcaaacagctggacgcgagcaaaaagtacaggaaaaaaacagtattttaataaaatatatgagtcttctgaaagactttaaaacttattggtggggcatttactccgacttaattataaaacaccttacaatttcataatgattttgatctcaatctttttgcatgtgtatgggttgctgtctacttttattttattttctttttgacttaatgcattcttcattctttttaataaagtatcatgtgtgtaactgtgtatacaatttttattaggtaattgatactatttatttaaggaattgaattttttatatatattttcttaaaccattactgttgttttttttaaactctcagttgtgggatccctctaatcatagttctactttgat

SEQ ID NO: 29415 - DNA, 501 bp, Medicago truncatula
  Intron number 1 from transcript Medtr4g018160.1 (locus Med tr4g018160) derived from phytozome v7.0 (chr-ID MtChr4; po s 3351898 to 3352398 reverse strand)
gcatcaagatattcattacgcaaatctgtatccgggtaattttaaagttgaaacttacttgatttgaaatttaattactctatcattatgggtttcgactcagataaaattttaaatgttaatacataataagcacctaatcctccgttcccttgataaaaaagcatctaatcatccaaaccaatccctcaaacaaaaaaaaactgtgtctcacaatacctttatatcgtgaaatttaagaaaactaagatcattaagaataacgaacagtgtactaaacgtgcttattttgtgtatgaatttgttcaaatttgacttctcatctctcaaaacactaattaattaagcttatttcataagaaaaaaagaattttgttcaaaaggggcttacgtgttttgatttgaattctttttaaattagtagagatcttcttttgacctatgcacatgtctgataattaatatatatataatcatatcttgttcatatataatacagga

SEQ ID NO: 29416 - DNA, 844 bp, Medicago truncatula; identical to SEQ ID NO: 28409
  Intron number 3 from transcript Medtr3g137280.1 (locus Med tr3g137280) derived from phytozome v7.0 (chr-ID MtChr3; po s 34784466 to 34785309)

SEQ ID NO: 29417 - DNA, 511 bp, Medicago truncatula
  Intron number 2 from transcript Medtr1g087210.1 (locus Med tr1g087210) derived from phytozome v7.0 (chr-ID MtChr1; po s 17501548 to 17502058 reverse strand)
tttcaaaagcaactacatccaggtaatgatcttgtatctatttgctttattcaaaatgaagagaaactgttcaatcacataaccctttgaggttttgaatatttatcctcttgcacttagatgtagtggcctttcaattcaaatatatgctaatttcttgtgtataattaggtttagtgaccttctaccgttaaaagtaataaatagctatgctaaaatggtttttaagtttggttcaccactaagctttgttgtaagacatgcacagccatgttagagtgacgtgcttggtacttgtccccaaaaattgtcatttttttcttctaaattttgaaagtgacaggacatatattagttctatggttagtcttgtatttttaaaaccatgcacttctaaagccttcatcattcttttgtagttaatatgtgtgctatattgaattctaaagttgtatcttgagatgcattggaacaatgtgatatctttttcaggcaaagtagaaggaaccat

SEQ ID NO: 29418 - DNA, 634 bp, Medicago truncatula
  Intron number 1 from transcript Medtr1g087210.1 (locus Med tr1g087210) derived from phytozome v7.0 (chr-ID MtChr1; po s 17502082 to 17502715 reverse strand)
tttttactgaaatcaggaaggtaccctcaagtttgtggtgtctttactctcatcaagtgtggtgctgtgctgcctggaccttctctcttgttgttacatgcattttctgcaaacttttaaaatcctcttctgattcgtagttttcaccaatgaatttttgttgccatctcatcatacaaaataatagtggagtgatgtgtgtctaatggtaaggtaaatgaaggaagatgcatactattacaatctcagagatagatggttttttaatttctggattagagataaagaatgattaagattcttggtatgagttgaagagttctaacgagcatgaaaaaaattacaagttagcatgtcatatttttgtcatcagggccacatctgcacaaattggtcagctcagcaacattacatgtgccacgtcagcaaaaattgaccacatcggcattttttgattaaaaaaacacatcaagaacttttttaaaaaaaatgaaactttcaagggtataaatcaatttttttttttttagcaaggaccaaatgcatattttgttttatgttcaaatcttcgtgtaattgtcgatccatttgtaaaacagatcaaggaacggaaagagaggaaccgaggtgctaa

SEQ ID NO: 29419 - DNA, 523 bp, Medicago truncatula
  Intron number 1 from transcript Medtr2g096120.1 (locus Med tr2g096120) derived from phytozome v7.0 (chr-ID MtChr2; po s 22168726 to 22169248)
ctcacctcaaaccccatatcaaactttctcactaggtacctataattattcttgaattttttttttttttttttatttggttttggtctagttggaaacttatgattatctttcatgactaaaaatattaaaattagtgaggaaaatttaaagaagaaaaacagaagttcctctttgaataaaaaatattaactttttctagttttgatttttttttgttagtgtttgtaatttcatttttgttagatttggttgagaactactactaaaacaaataaaattaacaataaaaatatgaattttatttttgattttctagctaaacttaattagtgactaagaatttcattttccccctatttaaatttcatcactaaatattttttttataaaagatactaatgggtccatatctattataattatgcatatatagttgggtatgctagctatatattaattgctttgttttggttatttttggtattgtagctcaggaacttctggtggtgagagaaagttg

SEQ ID NO: 29420 - DNA, 573 bp, Medicago truncatula
  Intron number 2 from transcript Medtr2g014830.1 (locus Med tr2g014830) derived from phytozome v7.0 (chr-ID MtChr2; po s 3913059 to 3913631)
tattccccttcaaacaaaccctccattcatcaaaggtatgctataaataccttctaattataaattaatgataatccatttagttttttttttttttcctttgtgatatgagtttcactttaaatttaaaatatttagatttagactaatatttcattttttttataaagtttagtttcatattttttgatatactgtatataattttatcttctataggtttcagatttgattgtaggcacaaagaatctaagtttatggctaaaattagacctgcaaactgtaggagaaaagattatatgcaatcatatatcaaataatattaggtcaaactacatgatatctcatcaacaaattaactaattttacatttattaagaaaaaattaactgcaatcaattttcttgattttataaaaaagcgtgttctaaaaaatgacctgaactagatctaggtaaataaaaaggtagttgaaaaatgaaacttatgttataagtttattgagttctattgctaatacaagaaatgtgtcacacaggttgtttagtggtttggacaacatatactgtgctt

SEQ ID NO: 29421 - DNA, 809 bp, Medicago truncatula
  Intron number 2 from transcript Medtr3g079980.1 (locus Med tr3g079980) derived from phytozome v7.0 (chr-ID MtChr3; po s 18704896 to 18705704)
agacgaataaaaaagaaagtttgtttgctgatcgggtactgctttcccttctattctatctgttttgtgcaaatatgtttatctccgggctattatgttagttcttattttgatttatacttgctgaagatatttttatcacaatgttttcttttctattttatgggaaatccaagaaagcgttaaatttactttgcacactggtatatggtgtggacaacataaattgaatagttcattgaacatgagaatcaagaaaattttgttcaactttgtacctctggtaaatgtttgtaggtgtaactaagaagttagataacatcatataataggatttcaagttagttagtgtaccggaaaaattagtgtagtttcaccatgtaaattaaggtgctacaatcagttttgtcaattgcagatcgcagaaagtagtggcttgttcaaattccctatagcactgttatagctgctatttgataacatcttgtagtaaatcgtgtatcgcggaatagtagcagtttgttaaaattccgtttcactatagccgctatttgacaacactggctacagcatttccttaatatacagtgcttactatcctgttcatatgttttgtttatcacatgttcccttacacacatattttcaagaaaaatcactttccggaccggattaattatcgtttctacttaattttttgttcctttgttatgtttaatgaccgattcttattattccatgtggttggtatctcactcgagcttttctctaactctattaggtatttgatttatttgatacaaagcaca

SEQ ID NO: 29422 - DNA, 503 bp, Medicago truncatula
  Intron number 2 from transcript Medtr2g052940.1 (locus Med tr2g052940) derived from phytozome v7.0 (chr-ID MtChr2; po s 14445717 to 14446219)
attcaggtttgaaccttggccccgcagttgtgtgtgtgagtttcgagttgtgcttaccagttatctacagacgaaaaaatccgtaatttaatgattttgtaaataaataactgattatcataaaatttccctttccttgcaagatagcatcgtaagagaagtaaggtgagataattttataaataaactcacccacactcaaatatatataaggggaagatgatatctttgagtgttgatgagtttgcctcgacatctttgaggaaattgtggtaaatagtgatatgttctttttatgtattgcttcgtgataagtaaataagaaaacttaatgtggtatttaagccatgactgatctaatgggttggtctttttggttgggctctcggctcttctcatgggcttaagtcatatcattgttactgtgaaaaacaaaggtagtagaaatctcaacatccttgttgcttattaagtagattaaaagattggaattgacataggtt

SEQ ID NO: 29423 - DNA, 848 bp, Medicago truncatula
  Intron number 3 from transcript Medtr2g052940.1 (locus Med tr2g052940) derived from phytozome v7.0 (chr-ID MtChr2; po s 14446265 to 14447112)
agtaatcagtattcacttaatcataatgagttgattcttttgttggtttaataatctatatatgtttgaaataaatcctccttgtgattttgttgaggggtagataattagagacatgaaaaggaaatgaagaatatcttcaagttaggtttcctttgttgccttttaaatttatatgggcgttttctaaagctcataggtagaatacatgagttattttcggattgatgtgatgcggaattagggaaatatctctcgagtctcggtggtagtcccaacttggcatcgataggacatttcaattcaaaactcttgaagattattgtgcaactgtgtttctgtcggttgctgtttcttaatgcccttttgagtgttcaacaatgtgtgtttctataatgtggtttgtggttatgtaggctctattgtagaagttgatggtgctctttttatacaacattaggcccttcatttttatctgaaaactgccttaaaacttgttacaaagtatttcatattgttgacctttttaatgtcaacgaagcaaaaggtattgacgtttctttggaatcatcctactcaccttagctatacggggttttctttctcttatgtactttttttctcggtgtctttgatgcctattggcatgcttcctttgctttagttttcaagcatcctctattacttgacaactagagatttcggagtttgatgtatacgctacgggaactggggaggctctcggattattttataatttatacgctatagtagttaaatttttatgtgccttgtattcatccatcacatatgcttatgcaggtagaattgtgatatctcagatttgg

SEQ ID NO: 29424 - DNA, 614 bp, Medicago truncatula
  Intron number 3 from transcript Medtr1g037160.1 (locus Med tr1g037160) derived from phytozome v7.0 (chr-ID MtChr1; po s 8689752 to 8690365 reverse strand)
catcactagtaaaggtatgctttcatatcaaaatcatctaacagcatagtggtaatgttttagaaattaagttttctgttactataatatatatacatttgctaaatcaacatcaaagtatggagtaagttatttacgctttgggtgcatataaagccagttatcaacgtcagaatgacatctaaaattatcatagattgtttgaataagagtaaaatttgaaataagaattacttcaaagttcaaactaagatggtaaaaaaccgttatagatggcttaagttgactccaaataactcacttgtcttttggtctaatagtcctacccttaagaatccatgatggatcctactactaacatactgttaagaagaagttgcttcaataagctatcgtaattgtaagtagtcgcccacgtcaatcttcttcaacggtggaattcgttaagaatgcatattttgaacttaaagactctctaaatactgtctttggagctgctctcaattaacctgcaatgtatttgttgccttaattattgcaatgatgaatattaatttgtagtttatgaaatatctgcaggaagcaaagaaagttcgtttggagaaatttgagat

SEQ ID NO: 29425 - DNA, 401 bp, Medicago truncatula
  Intron number 1 from transcript Medtr1g121130.1 (locus Med tr1g121130) derived from phytozome v7.0 (chr-ID MtChr1; po s 26322164 to 26322564)
agaattttcattcatttgtattggttttgtgcattgtgccacccccttcctgcactacttgcagtctttgtgttcttgtgtttctgtatctattgtactttctctctttctttgtgtttttatctatctaaactgtctctcacggtaagattctactccaatattactgagttctctaaattctgtgcaactttcctttttactattatttatagcattcttttcgttttttgtccttggatgtcttttgatggttcatatattttcataaaaatttactattttaaatctttaatgaacgtcttatggtcacccgttaaagattaatttgtgtactgtgcttgtattggcaaaaccctcgaatagcacgcaaacgatcacaaattcacatagttattggt

SEQ ID NO: 29426 - DNA, 829 bp, Medicago truncatula
  Intron number 4 from transcript Medtr3g149180.1 (locus Med tr3g149180) derived from phytozome v7.0 (chr-ID MtChr3; po s 38952535 to 38953363)
attggaccatacaggtgagtttttggaatgtgtgaaggatcagttgaatgtattatgttataaaataaaatagtggcatgtttccatggataaccagtcacttaattgttgatcctgattaatatagtcattttttgatgcgtagcttcaattgggatatgttgggtgtgattttcatttgtacactttatagatacataactcttctctatcaataatttattagttcggattgttccaatgatgatttttttttatttttttttattttcatctatcggttttaacggattgcattttttgttttcaatctgtcgtcatatttcagtttgtcgtcaaattagatccacatgttatgcaagaggaactttcatttagttcgggttgaaactgtaataaggacggccacatgtgtctctaattaaaacagaaaatgacgagactctaataaggacaaccacatggtatgcaagagaaactttcatacagttagaggagtattaagtttgagattggtatctagattgtcaaacttactctttatattaaaccaactcaaatagtttgaagctttatttttagaaacattgggatgaatttgttatttgatctatgatgactcatattgggtgctcctccactactcaggagtattagctattaattaatgttcaaagcaaaactgaaagaaagtttaattcgcaaattttagtttgttaatagttcatccaagttcaaggttttgggaaattgagttattgtgggggttcacattttcatttttgttataatagactgcaagttgggtttgtgcttacaaggtcagtaa

SEQ ID NO: 29427 - DNA, 802 bp, Medicago truncatula
  Intron number 3 from transcript Medtr2g121610.1 (locus Med tr2g121610) derived from phytozome v7.0 (chr-ID MtChr2; po s 28892785 to 28893586 reverse strand)
tgcaaggtgtgtatatctatctaatctaatgtgaggagagaaattaattgaatacataatttccctataaagataattttgaaattaattgtatttttcccatttgatgaatgaaacgatataactttattgtgaaaaaaatgttcaaatacttttcaattttattttgatttcaattttaacaaaaaaaggggaagttgtctagtgcatagctttttattctgtgttgtcctttattaattgctttttcaaatcaaacattggacaaatatttttgtcccgtccaatacttcattttcttacaaatcaaacacacacatgacatgcattaaatatttatacgcttttataggcacaaaactatagtgataaaatattgtaaaaaatctccaaataaaaagttcctgtaaaaaatgcaccaaaaaaaaatattgtaaaaacaaactatagtcaaatcattcatttcgttgtaccaaaaaacaaaaatatgtcatatctgtttaaaatttgagaagatatcaagtattaatttggtgatgaaaatggtacaaagattttcatccatccactgaggaccaacctcttaaaaaaggagtaattcatttttgtacacgatagtaaaatagcaattcatttggtatcattgttatacaagattgttcatcaatcaaacttaaaaaggacttattttgtagagtaattgtgaagattcctaaatataattaatattctatgccaagttcttattccatatcatatcattacagggtctaatcataaatagaatccaagagtctatatc

SEQ ID NO: 29428 - DNA, 1031 bp, Medicago truncatula
  Intron number 2 from transcript Medtr1g076530.1 (locus Med tr1g076530) derived from phytozome v7.0 (chr-ID MtChr1; po s 15291396 to 15292426)
gttggatttcgttgattcttgtgttaagaaaaaaggtacgagctttcatattgatattttagcatatgtttggttttgcactgacaagaattgattatgactaagagtgaattgaatgtaaattatttgtgtttggatatattcatgtaaaagtgagctgaacttgaaatttgtgtgtaaaaattaattatagaatcaaaagctacaaattctagcttcaagtagaatcaattacgaagacaaaatcaattctactcgaaaacaaccaaatatgtcagaatcaattctacactaccagagtcaattttggctcctctagaagtggaatcaaacataaccttagtatttcacaaagttaaactcaaacttacagaaaattctaagttgttgttaggcaaaagctcatagataattgtatgtatagcaccccctcgcattaaaacccattagtcctccatatcttattttgaaattaaacatttttttacaagaacagtagccaaaattcaaatacagtattagtatcttttgcacaaagataatgactattgatagataaacaatagtgtgtagaatttacatgctagtaggctgtctttggaccttggaatatgataggtaagtgaaaaaattggacgtttctccattgggattacagctcaatagtgtatagaatttaatatattggttgtttttcgcatttaccgttctccttatgatacaaagaagccagaattctcatagatatgtgttgcatgaaattatgtcattgaaccactcaactttagcagattttcttgatagtatttttttttttttttttactctctgtatggtgccaaagttgcacttttagggtaattgaggcattgaaaacttgttggctgaggaaatctatggaatagttgagtcttgcattgttcttatatatcttgtataatgttcagcttgacgcaaatttctgtgattcattttatgccagttcctaaatactatgtgatttgatcgataggagatttccgggatcgaat

SEQ ID NO: 29429 - DNA, 994 bp, Medicago truncatula
  Intron number 2 from transcript Medtr2g014950.3 (locus Med tr2g014950) derived from phytozome v7.0 (chr-ID MtChr2; po s 3971267 to 3972260)
ttgccactccttatctacatcaaactgattctcaggttaatatccaaatattgattattagtcttttctttacgcatggcaatggggcgatgtggggacgggttttgccttccccatccccatcccctactctcatatacttaccccttaccctatccatagctaacggggatgagaaattgaatctcatccccatccccaatgggttatggtattcccgctccatccccgttctgcagtgaatcaattttttgataattgataaaaaaagagtttttttaaacttcaaaggtaatattgtaatgcattatccaacaatttgcgttcattttaacatttatttaccgaataattcagtttctcctttaactatcaataaaagtttgtatatcatgacaattatcaaaccaaataacatagcatatcattatcaaccccctcaacaaaaacaaaaatatgacatttctacattcgggtagggtttggatatgggttcggggtgggtacatatatctccgttacccgtcccgtacccgtattttgaaatcggtaaaaacccaaatccatacccgatcaaattgaggaaaatccgtcaaattgaggttggcttggacgggtattcatgggcacgagttttttttccatgcctacttttccttccttttggttatgtacttgaaatatttagccaattttatggctgcttaattaacttcttctaattgacactttagataaaagaatcatcaattttgctactgaaattgtagtaattgatatttttctctctacaatcaatgaacttttgaaataatcatgaatttgaaaatttctgttacattaattatatgaagacaattacaaatttaaattgactaattcaaaagagctaatatatgtggtcaaacttttctaattttgtacattatttataaatttcgttgatgttggtagcacagtttaggagcatagaggaagcagcaatagccggcgt

SEQ ID NO: 29430 - DNA, 861 bp, Medicago truncatula; identical to SEQ ID NO: 28029
  Intron number 1 from transcript Medtr1g105960.4 (locus Med tr1g105960) derived from phytozome v7.0 (chr-ID MtChr1; po s 21968336 to 21969196 reverse strand)

SEQ ID NO: 29431 - DNA, 912 bp, Medicago truncatula
  Intron number 2 from transcript Medtr1g112360.1 (locus Med tr1g112360) derived from phytozome v7.0 (chr-ID MtChr1; po s 24144227 to 24145138)
actttgtaacttcttacgaggaaaaattggaagaggtataggttttgacttttgagtaacttcctttaaacgaaaacataggttggatattcttgccagacattgtttcaaaatgttgtttatttatgcagacttattcctggtaatagctagtcagataacccttatttcagtggggataatatattgaaattattcagtttctattcatagagtagatagatgaattcattcatatatatgtaaagccatagacacagaattagaagttcctttttgttttgatgttcttgcatatcatttcaatatgctttttaacttatggttttgttcttggcctaggcagcataaaaagtgactttctttagacattatgtcagtgtcatgagcacaatacaactcctcatcaggaacgaaagaaagaattcaattgaaatgcgctaatttatgagaaagaacatggaatatctcccgtgattacagagcaataatgcagaacctttgagggcctgcaacctccttaaacattggcccctgtatcttctaaaatgagtcaatgactagaaatcattccctctcaactgtccttttatttttaggcaacatgccttctttcttctactatctcagctcaactgtcctataacttactaagaaactctctgaccaacagtcctcatggacacttaacaatactcccgcaaaacttctatctaatatttgttggaagagtttaatttttatatgccgtcagtgtaatttttttacacatgcatctaataatgtggcaaaatatcattcaatgcttgtgaaaacttatttacacttactgtgtatttatgttaaatcctttgctgaaaacattattccagcagagccccaatctttgatgcatgattaaccaaaatacag

SEQ ID NO: 29432 - DNA, 667 bp, Medicago truncatula
  Intron number 1 from transcript Medtr2g100170.1 (locus Med tr2g100170) derived from phytozome v7.0 (chr-ID MtChr2; po s 23298605 to 23299271 reverse strand)
gtcaatttccaccacggaagaaaaatcacactgatgtaatctttacttgtttatcttcttctcactttttctatttctatattcatagcattggattaacaatttgtgttatagtaagatgaaaaatgaaaattacccttttgttttcaattgtgttacccctttttgtttcatgtttttttatggattagtgtgttttaacgctgctttaatttggattgaaattaaaaaaagtcttttttttatttgtttgcattggtttcatatttcaattcatttgcaccatgtagttgcacatgaattttcaatactcatttatagttttagggcctgtttcgattgacttattttttagcttatgcaaaacaacttatgcaaataattaagtttttatgtattactcataagcttgtcaaggtagtttatgaaaaaacagcagttttgagcttatgcaaaacaacttgtgcaaataaataagcttttatgtcttattcataagcttgtcaaggtagtttatgaaaaaacagcttatgaagatacaatttttgttagtgagagcttgtgaattaacataaaggtttatttatttgcataagctattttacataagctcaaaaataagccaatccaaatgggcccttattttgggattccattcaaaagttgt

SEQ ID NO: 29433 - DNA, 991 bp, Medicago truncatula
  Intron number 1 from transcript Medtr1g111000.1 (locus Med tr1g111000) derived from phytozome v7.0 (chr-ID MtChr1; po s 23505755 to 23506745)
ctctgcagaaaaaacatctaggtcggttcttgttgtttctacctagtttaattatcctggaagatcatttatttttttgtttcaaagctatacttgttgataaaagaagacgttatatgttgattagaattgtgccatattctttcaaatgctgctaagtataatcaaagctgcactcaagagaagaaattacaggatgcaacaacccttttatttattatgatagaactgttgaggcaacatatgacatacgtgagaacccataataaatggagagatagacacatttgtgcttaatttgtttcatatccttcgaaatataaatatgagcttttagaagttgacatggctaagaaaatggcaaagaaaatatggattgagtgaggctgagataatgtcagctaggtaagggaagttaaacaagtaatgaaggttaaattatgatgaatggaagaagttttgatcttttaaagacaatgacttgatcatggagagaagatattggaagaccatcctctcctttctacccacttttaaaatctttcttatttctacgaaatccatagctcctcatatcatatttacttaagacgcacaacttaacagggaaaataaagactcccttcacttttcaaggaatctcagctgcaaaaaccaactatatttttaacgtgctctacacactaaacttgagttcttatttctttgcaacattcactttcttcttcgttccaattacggttgttagtagtaataaggacaaacatatgtttaataaattggaagtataatatatattcgtattttaaccaaatgactaaagtaaaatttagtgatccaattattacatcatgttcatgcaattgtattgaggtttgatacagattgatcaaattaaatcttgcatatcagttcaagtgcagatgctcaaatctcaactgataaaataattttagttttgaaacagaaaaatatattgaaactcgaacac

SEQ ID NO: 29434 - DNA, 862 bp, Medicago truncatula
  Intron number 1 from transcript Medtr1g013250.1 (locus Med tr1g013250) derived from phytozome v7.0 (chr-ID MtChr1; po s 2328861 to 2329722)
gatctctcccacccaggtaattactccatgttcttggctaatcaattttttatatttctattagtatcagatggagtttgatattttttacctaacagtttaatattattcaaaacctaacagttttcaacgtgggtaaaaaatatcaaactccatctgatactatgcattaaccaactatttgaaatatcaaatttttatatttctattagtatcacttagttaaccctaatctgttagccacaaccacaccaccattacctcctttttttcttctagtgcaacattttgtaactaaaagaaaaagggggaaaattgtgcatttccctggaccgggcggtttccacaaaccggacccagttcgacggctcaatctgggttttccgggtcttatctggttttgacccaccagcggttatttgaggcagaccaagacggtaccagctccggttcccggttgaaccagctgatctggtttttaaaacattgatattcatcaccagaatgtggttttaattaaggtcaacataactgtgatcttgtttcaaaagcttggatggaatttccttaaatctaagagaccgtgtttaggttcacaagagtattttatgccgctgacataaagctttagaaggatgcacaaggtcgcgaaatcattttaattgagccttgattgtattaggatgcttgcaacttttcttctaatgacttgggggttgatagccttatgcggtttcttttttgtttttaaattatcattcatattttatgaattgatgaatatctttgtatgctcaaaataacataaatgcagcattcttcagcttgacaggttctcgtaaagttgtggtttgcaacattc

SEQ ID NO: 29435 - DNA, 840 bp, Medicago truncatula
  Intron number 1 from transcript Medtr3g104490.1 (locus Med tr3g104490) derived from phytozome v7.0 (chr-ID MtChr3; po s 25975083 to 25975922)
acaagtttgaaaaccagagaagagtgatcaatattcagttagaagtacatatagattgtgtgttgaaatattgttgatatatctcatatgagacgacccacatgttggagtgcatatggtagcttaaggtacctctgaaagtgtgtaaatttgtgtggagagtttgtaggtattttttttcatagggcccgattaagtagcaggggtgtccaatactcacttaactatgtcgtgtgcaatgcgacttatgaggataaaaaccacatatttctttgagtgtactctgtctatttaagtttggctttcatttgggtttttgtcacattaaatagacgatgtaacaacgttatgatgttgagcgagcatatttactcttctcttgaatttgagaaaaaaccaagttgaacatgcttctaacatgttatggagtatttagaaaaggcttataatgtattttagaacccttaacttttaaaaacttgtaattttgttcccttaacaaaaaataacgattctacccactactttacaaaactttacaaaattgcagagaagaggccacgtgccctaaaacaggggttcaatatcgcaatttttgtaaagataaaaggacaaaagagcatattttcctaaaaataaagggttataagaacatatttctttaaagatagaggacaaaattgtaatttgttttgttagagtgccaaaattgcaactttttaaaagttaacggttaaaaaatacatttaaacctcctttagaaaaatagaaatatgtgtatatggtaacatgtcttggaatcaagtagtcaaattattgagagagcaacacacttgcgtg

SEQ ID NO: 29436 - DNA, 954 bp, Medicago truncatula
  Intron number 1 from transcript Medtr3g114780.1 (locus Med tr3g114780) derived from phytozome v7.0 (chr-ID MtChr3; po s 29135726 to 29136679 reverse strand)
gaagagtctgattttgaagaaaaggtactctcctctcatcatctccatctaggttttattctttcaaattcaaaatcactcgttatttagttagctatgttaatcaataaaccatttcctgattgcaattcgccatcaactttagcttatggttgagaatttcagattaagtgaggcattatgtttatgctgttacatattgcggctaaatatgagtaaaccaccattttagatcttgaaatttgcaagtgtcttgcaatttgggatctgaatgtaagaaatattaagtggtttcccctaattgtttaacattagttaaaatgatctcactccgtctagtagttttgttagatgtgatgatgtcatcgtggcttgtccacacattcaagtttaaccaccattgatctggacttctttcatcagaaccctgaaaccaattagcactaatgaggagtctacgcacaaaatttttaaatttttaactagtatgaaacttgcattttaggttttttgcgacgaagcttcaaggcttacaattgtaggatccaaagtggtggtttactctactaaattattcatatttaggaagatcaaatatgttttccatacaacatgattcatatatattatgaatacaatctcttcagagaaaaacaaattagttttttgttacttgcttgaacttagctaaataagtttgattatttgaattgaactagttgttgaaggtagctactcattcacactttgattactttagactttagtttagagtatttaggaatgcatggatatataagcaaggtagtatgtccacatttatatagaagtaagtctgttacagttgaaatgtttagatcagataggaataagtgacgatgctctttgaatgtcttattttttctttgccacattttcatctctctcagtttttgctcaaaccattgcagtgca

SEQ ID NO: 29437 - DNA, 848 bp, Medicago truncatula
  Intron number 1 from transcript Medtr4g005810.1 (locus Med tr4g005810) derived from phytozome v7.0 (chr-ID MtChr4; po s 465250 to 466097)
cttctctcccctctttcgtttctcgcctggttcaggtaagtaagaattgcttattcgtctctctttttttgttatgtattgcaattctaagtatccttatgttgttttctttgcaaattgctcgctcgttcacattactactgccgctttggattaacaacctatttgcgaaacataaaactcattatgtataaatcatttccgtataagctactataagttgttttcataagctatcttgaaggacttatgaaaataagctcaaataagtcaaattgattatccatttactttttgttagggaaagttgatgctttttgttgcggtgaaactgaaactgttcagaccaaaattaaaccttttttttgggtgaggatgggatagggatcctctcattttttcaaaagaaatggagggtttcattactaatgtttcaggaattaagtgtataaacgtccaattatctcaagtgtatgtcaccatttttagaagtagaagcctttaaccaaatatttatttattttagtaatggaaaggatctctacccgtggatagaggtgggaaaacccgacccatcagggatgggagaacgatatctatttctctctctctccaacggcgatttggggcatgttcgggtatttttcagggagtttggagggacatgtagggcaaaatccggccacgccccattgctatgccttctcgagtgttttgttctcttttaaaacaaaacatcatcaaatcaaagtacatcaatttatgcaattacagtaatgtttttttcattattgctgacttattgggtttgagtttttctttgttatttaggttttgaacaatcaaat

SEQ ID NO: 29438 - DNA, 872 bp, Medicago truncatula
  Intron number 4 from transcript Medtr4g005810.1 (locus Med tr4g005810) derived from phytozome v7.0 (chr-ID MtChr4; po s 466698 to 467569)
tggccggtggcactggtctgcatccttcatactcacctttaaactttctagtttctaaagaatataaaacgttactttgagtggtgcaattgaaattgttgtagtagcagttagatagaaataaagatagaaggactaattaccatatgatggcttgagataccataccaataaataagggtattattagaaaaagcaatcgatactatcttgatattttaaagttacaaataattcaagatgagtcagtattcgaaaacttacagataatatgacattgagatgtgttatttgaacaaccatttgtgtgacaactataaagttacaaacaaaagtagatattgacacggaaaccaaaacaatagagagagagagaaagtaaaaacataatgtgagtatgaaagagaaagttgtcaaaagatggttgtacaaatatcatttctctatgacattggagagtgccaagtttctgtgtatataagcttcaaaaaattgaaaatttaagtaaattggtgcagttttggaaaatatgtagagtgtggctaaaagaagtaatgaagtatggactggtcagagggatatatagttcaaaaggacgatctgatgctgtaaaattccgtccatggggaggtccaatgaaaggttggaaccatttgtgagggtctctagagtctagactattcttagcagttttgctttccatcttcctagtcacacggtccctttcatagggtgtgtaactgtatttttgttttccataaaagctttgttctgctcgccgatattttgttattatggagagataaagattttagagcttaataagcataagggttttcctgtagagcttaaatttcttgattttacagggg

SEQ ID NO: 29439 - DNA, 881 bp, Medicago truncatula
  Intron number 1 from transcript Medtr1g125280.1 (locus Med tr1g125280) derived from phytozome v7.0 (chr-ID MtChr1; po s 27575770 to 27576650)
agtcttaagggtccactttgggaagaggtttcaaggtatagtacatctatgtcttttctttttgttttcttcttcttcttcttcttcttctatgtacctttcattttcttgtttataagctttatcatgcatgagaagaagatctgaatttagatatgtattcattttcaaatctaaattaaccaatcattttctggaacctatttcctgtcagtggaactagtcaaaaaaagctgtttgattggaatcattttttttttttccttctcaaaagtcatatatcttattctcaagtgtatgagacaataattcacttatcttagattttgagtcataagataattcatgtcatttgaatcatctaagttaaattcttctatctgaatcttgatgcatgttgaactcaatcatagtttataattttattaaccaaattaattaattttaatgctgagttcatcttcttcaactttttttaggttaatttcatccttccatctaatttttattactttgtgtgtttcttatttattggtcactcttttaggtatgaactaatacctagcttcatgttttttttttttttggtgtaacatgtgttttaatttagtactatatactttttttttacttttttacatttttttggtgtaatcatatatttttcctcatcacaaatttttacttttttttacgtgaaaggagtctagtttttttcttttcctattttaatttaatactatatactttatatgattacaaaattcaatcatcataatcaatatattaattatcacctcctttctgtctcctccacttccttgatccctctatatatacatgtaggaaactagctgatcttggttatcacagaagctcaa

SEQ ID NO: 29440 - DNA, 468 bp, Medicago truncatula
  Intron number 1 from transcript Medtr1g016180.1 (locus Med tr1g016180) derived from phytozome v7.0 (chr-ID MtChr1; po s 3083457 to 3083924 reverse strand)
cacctgttgttattggccatcaggtatattacagtgagtattgtgtttatttcttctttacctgatattacttgcaaaaaaacttggtgtatggcttgtcatataattcaaaacttccatgttatgtgtaatggttaaattatatatcttctatttaagttttagttgattcatcattttggatgctaaatttgtttttgcaaatgtaatgaatttttcaattttaaaggccgactcagtgttgtaaagtggaccatagtatttaaacatgagttgtaatttgaaaacctaagtagctactctgcagtcagagacgaaaggactattggctgaactttgtgatcaaatatcatatgttttttgtttgtgtttttcgtatctatttttgtttgaaccaggatttctgttttaacattctgattatctcttccaggacaaagagttgcgctatcgttttatctataatca

SEQ ID NO: 29441 - DNA, 1069 bp, Medicago truncatula
  Intron number 1 from transcript Medtr4g018280.1 (locus Med tr4g018280) derived from phytozome v7.0 (chr-ID MtChr4; po s 3436746 to 3437814 reverse strand)
agtcattcatccttctgttgtgcaggtgctacgaggtaatctttttagtttctttataattgttatctttgttatgtagctggatctttcattttgcatgtgatttgtttgtttggtagaaaaagactgatttacagctttttcatttttactgatctcatatatgtccttttcttcatcatgaaccatctatttgagaatcttcattgaattgattatatttaaaattttaatgatataatttcaatttattgaagattcaatggtattttatttgttttcctctctttacattgcttatttttgttggcccattgttttaagatattgaattgggtttacagtattgacttgtgatttggtttcttggtagaaaaagacagtgattattaattagctttttcattttgtttcttgatcaactgcatttagaatttatggaataactgcaaaacattgtggttggtgacattggtgacattaccaaccacaatgttacaagtctgcaaaacaacaaaaagaatctttgaaagaaaaagaaggaagccacgtgtgacattatggttggccaatgtcacccaattgctatccgaataatagagagaccgaatgaatttaatagttaattggcatagtagtaaaccaaacaccacgctcctcaattacaaaattagaaaattagttatgactttaattagataaacaacatattcataataaattgatcctagaagaacaatagatcataagataagataagataggatggatagtgcatgttaacacggtatacgagtttaatccataatttccttcagccttgcccattgccatcggtctcaccatctctcacctcaaagacgccacctcaaagacgccatcttcacccacggaaccctcgttgacagaacttccttccaatggacaaaatatttgtttgctatttgttgtcagtttaaaactagtttaaaaagaggtttaaactagttttcaactgacaacaaatagcaaacaaatattttgtccattggaaggaagttcagtcaacgaggaatcggtagcgaggaat

SEQ ID NO: 29442 - DNA, 790 bp, Medicago truncatula
  Intron number 1 from transcript Medtr3g029180.1 (locus Med tr3g029180) derived from phytozome v7.0 (chr-ID MtChr3; po s 7620560 to 7621349 reverse strand)
acactagtaataatatgagaaaatgaaagtgattgaatgtaaacatatgggttagttaatgttgtgttggtgtcacacactggatatgcctttatctgaactgtcgatgttatgtacttttgtgcggaagatatttcttttaaaaaaatattgtctggttattattggtgatagcttctgatgtttatggctacaagttagtgctgagaagtgagaggaaatatggttgtgcaatttattcctatgaatctgtgatagtttaatttgccggtgtctgcgatagactgaccgctgaaatgccagttgcttttgtgattgttcttagacaaggtttgtttgattctatgctttttgataggatgtgttttgtattagctctagttgggagtaatatggcaagtggcattaagtttgagttgttgacaatctttggaaccatgggtgaagaagatatgtgacacgacgactcataaattagaattagacaccaatgttttggaagttagttttattatttgaggcaaaataaaatactatcatctatttaatcgtcgtatccaacttgtattgatttcaaaggtcaaagattttatagggaagaaatattcgaaaaacatatgagaggtgttgtatacattagacaacacatacctgatattcatctgacagccattttaaagcattgatgcttcctaggtaaacaacatataggatttgtagtatattagggaagttgttataatttctccatttaggggcactgtcattggtgtccccctcaacctaaaga

SEQ ID NO: 29443 - DNA, 826 bp, Medicago truncatula
  Intron number 1 from transcript Medtr2g071320.1 (locus Med tr2g071320) derived from phytozome v7.0 (chr-ID MtChr2; po s 16376347 to 16377172)
ctctctctctcaccacgtttcgcttctcaactcaggtaacttctctctctctacttcttcatcgttcaactatttcattgctttttcttttcaacacattccgaatattttcattttcaattctactttttctgttttttcaatctgttgttgtggaaattgcatttggttgcttcaattctttcaaaatttgaagatctgaatctcgccattactttctacattattgctatgttttggattttcattttcaatttactttcaccattagagactaaattgatagattcttatacacttaacttgaccaagttcaaatattttagggactacctagtatatttctgtagtttaaggactaaattggagagacgatagtagtttagggattgaattgatggtttaaacaagttcacttagaaaatggaaaacggtgataattgctcaaactattgctcctttttttcaatacattccgatatttctcatttttaattatactttttctgttgtgtttgttgttgtggacacaaatgaaactagttgacttagagaaaggaaacttataatttcggtgatgataccatttttttagtttttgttagtaaagggcttatccttagttttttagccgaggtggaagagcagtaatttagtggtggaacaatgcatcgttatgtttatggatttagaaaaatcaaacaaagtttctttagttttatgctttgagttttgatttttcaaattctggtttatgcttaaaatggtctcagtaattttttgttgttcttttgggtagttctagggcattatttggtgacttaat

SEQ ID NO: 29444 - DNA, 1020 bp, Medicago truncatula; identical to SEQ ID NO: 28932
  Intron number 1 from transcript Medtr3g137150.1 (locus Med tr3g137150) derived from phytozome v7.0 (chr-ID MtChr3; po s 34737501 to 34738520 reverse strand)

SEQ ID NO: 29445 - DNA, 789 bp, Medicago truncatula
  Intron number 3 from transcript Medtr3g079820.1 (locus Med tr3g079820) derived from phytozome v7.0 (chr-ID MtChr3; po s 18613625 to 18614413 reverse strand)
agcaacagaagattgcattcaaggtttggtttttgcttgatcttggtttagaagttttgtggttaatgatctacaatcttattttacaaaaaagcatatatatttttttttttttataatttctttatgaaggaaaattagtccaatagtaaaattgatcttgatttatggtaactcaaagttgctaagaatttttttagggatggttgattgtaaagggtaaatcttgatgtttgaaaagaaataaatcatgcttggtttagtgattttgcacctaaataaggatctttcaatttttcttattattttattgtgtattaagcctctaaagtttttgtggttctattggtcattcatttttatgtctgtttggattgacttatttgtgtttgtttatctaccggcgtaaccacttgtgagactgtttgagagagctaatggaaacaacttgcatatcttcagttgctaatgaaaacaacttatgacaacttataagttgttttcagcttatttctataagctttccaagatagcttatgaaaccaattgcttatatgaaatcattttgactttattttatcttttgttataaaatagtttatacataagcaattatatgctaataagttcttaattaagttttttattcgaacatggcattaggttaagtatatagtgagagtaaatagtatgtttgtgtcatactaatattgtttgccatcctgagttttttcggtcctgaagcctttctctttatttcagaatctgcatcagggctatcctactgaa

SEQ ID NO: 29446 - DNA, 554 bp, Medicago truncatula
  Intron number 2 from transcript Medtr3g137090.1 (locus Med tr3g137090) derived from phytozome v7.0 (chr-ID MtChr3; po s 34704068 to 34704621 reverse strand)
gattaatcatcgaagctacccttttggtacgctccattgttttcttcattactaaaattaattatgtaattttaattgctttttattaattggtcaaacccatttcacaagctcacttcattactataaatacattcttaggtcatctcctattcgacttaacacatcacttcacgactaatattattagacttgatttatggacataaatgatatgtggtcggatcttaagattttccatatatttatcggatcaatggcagaaagacttgtcttttgtttttctttttaactataacatgaatatttgtagcttaaattcttagcaaaaccaccaagatttgtgtagttttaagagatttgagtaattgcgttagtgattaaatcttaaattgttaatgaaatcatattaactctttttatccaccaaaaatcaattgtttgcaaaccaaggtggaaaccaacacccataaattaattaattaatttttaacaaaggcgagtaatactttattacaggtttgtctaaggttgttattgaagcttaggaataa

SEQ ID NO: 29447 - DNA, 890 bp, Medicago truncatula
  Intron number 1 from transcript Medtr3g073690.1 (locus Med tr3g073690) derived from phytozome v7.0 (chr-ID MtChr3; po s 17096568 to 17097457 reverse strand)
cttgctattctcattcaccattaccatttaataaggtaaagcactttctttgttttgttttgttttgctgtcctgttttgtaatcttatctgcatttttcttgtcttttttgtacttttcttaattttccacaaatggggtttctgtttgaactttaaagttttgaactttgaataaatttatctgaatttgaaaaatgttttctgttatagatttgaatcaccaatgcatactaatgtgaaatgggcctttgagcttctttttttttagtttgtaatagatctgatgttaggtgcatgttggtattaaatatgtagaattgacactgcagattgatgtcactgtcatgtttgtgtaagtgcttcataggcaataaaagggagtttaaattgccgcgtaagtataactcagacggtaaaatgttgcagtgagtcagtgacatttgatatgttatagtgcatattggtatattgtcgcgaaagtacgcatcatatggtaaaaggttgcagagaaatttgatatattgtcgtgcaggttcaacccttcattctctactttttagcacttagtttgtgtgagttttgtcgctaggttgtttaaaacaaaacaaaaaggattttgtatttcaaaaagttggcacttttgtgtcatcaaaccaactttgcagcaccgacacttaaaattgaagatttgtccggtgtttgacatgtgtcggtgtccaacaccggcatatgtgcttacattgaattatttcattttttgagtcaatgtagtttatttatacctagggtgtatttcagaactcaagaagttttattctatttcttattgatttatcatcatttggggcggcaggatataaaactctgtaggacagttgggcaagtgaa

SEQ ID NO: 29448 - DNA, 918 bp, Medicago truncatula
  Intron number 4 from transcript Medtr2g095750.1 (locus Med tr2g095750) derived from phytozome v7.0 (chr-ID MtChr2; po s 21962946 to 21963863)
acaagtgttagatattaagttattggtcatatgttattggaccttataagtttctaagttacttgtctatagtttattaggttttactatatatttgcttgtaacctttattatattatgtcattgtaatcatgtgaaaccctagccatctccttcagtttgcatgtgaagcactatgctatggtgtttcttttgtttgtttggcgagtgaggacgatgctaacaaattgtttgtttagtgagtaaagatagtgcttacaattggttcgtaaatagttcttgttgaagacaaatttgaatattttggttgcttcttttgtttttggctattcttttcaattttgatttggtttgaaattgtttcatcgcttcggccggtgtttattctttggttgctcctctttgttgtctatgttattagttggtttagtttatttttagggttaaatttaacaaaattaaagtttagtatgctttagcttgagggaaagtattttaagtttatattattgattatgcttttcgttttttgcttgaaaaactcttgatgtttcttggtgcatcgtgagtttgaggggatgtgttagatactaagttattggacctatgatattgggtcctttaggtttttaagttactagtctacaattcattaggatttactatatatttaattgtagcttttattatattatattatgtcattgtaatcatatgaaatttcctttgttaggtttagtttatttttagggctaattttgtaacaagcgtaagggttagtaaactttagcttgataggtaatattttgagtttatattattgggtatgtttttcactttttgtttgacaaactctcgattattcgtgtttttgcatcttgagtttgacggacaaggattctctcccgtgtccttttc

SEQ ID NO: 29449 - DNA, 917 bp, Medicago truncatula
  Intron number 1 from transcript Medtr3g092950.1 (locus Med tr3g092950) derived from phytozome v7.0 (chr-ID MtChr3; po s 21994058 to 21994974)
ttcctgttgttactggtgttgttattgctagtggggtatgtaacatttcaatcacccttgttcattgtttttgtttttgcaatttagtatatgtatgatattgtgcattgttaattaatgggaatggtatgatatgggggatttatttgggtgttgacttttttatggtttgatcaaattatatctagtttagttttgtttgggatgtgatttcaaatggttatacgagattatgtgttgtattggaaagttagaaacttagtttagttaatcttttggatcattatctatgttcaaaagacttaatttacgttttttctttttcttttttcaatgagcaatttgttaagtgtatttaggctattgttgagtcaactttgtcttttggtgagagataactgatgtattcaatttatttaagatttcaatctaaatacaagttttgtcaaatagtggagctttagcatagcagaatttgcacaaactgttattgttctttgatacgcttttagtacaaagttttgtcaaatataacaacactaaagcattgtagtgtgacagaatttgtacaaaacgctattttcgtcgattgacaacactaataaactcacaacacaatagtctgaatatgttctgtactggcattgaatgatatttgttttagcagtgcatgatattacttcttaaacatgtttgaaatacattattgagaatctgagtaatacatgtttacactgtcactaaactgagttcttgatatccagttttaagcaatagtagatttttttttcctttgatgtattctttgagtgatattgatatgtgaaaaataaaaatactctggcttctgatatgtttttctcttcctctatttgatcatagggtgaaccaagtttccatttatttggattcattgt

SEQ ID NO: 29450 - DNA, 853 bp, Medicago truncatula
  Intron number 3 from transcript Medtr3g140330.1 (locus Med tr3g140330) derived from phytozome v7.0 (chr-ID MtChr3; po s 36292468 to 36293320)
ttgaccatcctgccttgataaatcacactattcaggtgggcaagttctatgatacacccaacaatttaagtgcattggtacaccaaatccttaaattaatagttaaatgagttatttttttgtagaaaaaaattattttctatcacctataattataataactaaatcttatttaccaaaaacgtcaacgcaataaaatttgatttttctgaattcttattactcatactatagaattttgagtactttttacaataaaatgtaaaaaaattagtatgatttttataaaaaataaaatgatgtttttttttcatataaaatgatattttctaaaatatatatgtcaacaaacacctattttcttcataaaaaatgatagttaatttataaaaattgtaagcgagagtaccggtacaccgtcatttacgggtgtaccatagaagtccccattcaggtgtgttattgattactactaggtcgattatatatgataaacaactttttttttttttttttgaaatatctttgatattagacttaacattgttcattgtgctttataagtttaaatatttcaatttttgactagaaatctatttgaaaaactgtaaaatgatcaatcataatattttattataaattagaatggattaaattaattagtacttcctccggtccatgttataaaaaaaattactttttaaattcattgaatgattgatagctgatgtatctataagataagattagatacataaactattcaatgaatctaaaaaattgttgtttcagactaacaatcttaacaatctttgcagcggataccagattttcttcttgaatcccagagttc

SEQ ID NO: 29451 - DNA, 745 bp, Medicago truncatula
  Intron number 2 from transcript Medtr3g140480.1 (locus Med tr3g140480) derived from phytozome v7.0 (chr-ID MtChr3; po s 36352772 to 36353516)
ctggaaacctccctgaggcatgtacttctaatacccactattcagtattccacactacttttcatatgtttatgtgtttaatttgttaacaagggtcatgcattaaccaaaatgaaataattatgtaccattcgtgtttgcgttttgttaagccgttccctttggctatcgtaggacataaagcattggatttgattgtaggaaatagttcatgtagagcttaattattagctaaagtgcttgttcttatctaaataaaaaaaatagccgaagtgattgtaaatataagatggaattagtctgctttgcatataaatattaaactggtctagcaatagatgtgaggaaaatgcttacctcagacattaaacatagttttctatagaagttcttgtgcaaaaggctgggaaaaattggaagggtcatttttgttatctaatattcctaaccggattatattttatatggaaggaccttcttttggtttacaaaatcagtaaaagtcacttgctccggttcaaatgattacgagcataatgcaattaatgatgcttggtgatattctacaacctgttgaagtctaatatatttaatgaacatcaaaatcataacttgtgtagtgtagtggctatcacttcttcaactgctatatccatttctctctttgtttcaaaatatcttcaaaatttttacataacaatttttgatgcatttcccccttatttcagaagacaacaaacacaaa

SEQ ID NO: 29452 - DNA, 602 bp, Medicago truncatula
  Intron number 2 from transcript Medtr3g076350.1 (locus Med tr3g076350) derived from phytozome v7.0 (chr-ID MtChr3; po s 17644161 to 17644762 reverse strand)
ccggattttgtaatttaaatgctgcaaatcttttcagtcctgattcatgaaatagaatgacttcatcagtttataattttagttgcttcatagttatgcatgtgaatagctagtgtgatagacactagcgtatgactatttatagtttaatgctttagctttatgactattttatatatctagttgcattagaaagccagattaaaaccaaacaattgagctcacgtggttaatgagctccacctaatgataaatcgattgggagaacccgagtttgattcccgtgtggaacaattcttggccagactatactaacctcatggccaaactccagattacagcgtctcatttccctagaaatcggagggtatatggcaagctagatgtatcagttattcaatgaacctaaaaagcgaattgttccttattataaggagcgggagaagtatatgttaataccgctaaagcattcaaagtttcaaaatgtacttgtttcttttttcttaatagaattattgtgctgctttaataaccaagcatgtaagcacactattgctcatatgtttttattatttataaatcttccatgaacagatatcacc

SEQ ID NO: 29453 - DNA, 498 bp, Medicago truncatula
  Intron number 1 from transcript Medtr2g113920.1 (locus Med tr2g113920) derived from phytozome v7.0 (chr-ID MtChr2; po s 26800057 to 26800554)
gcttggtctgcaggtcaagccctttattttacttttttttttcatccatagtaattatttatttgaatttttttcatccgtattaataattggtgattgcatcaaatgaatctgttcaaattttcatccacattaaatgtctgcgcaattgtttcctagtttataaaaataattatttccttaaaaaaacaattatgcccctatataattccttgtagtaaccaggaaaaaaatatataattccttgtattccttcttcacttttttagttcattttgtttctcatcttttactttaccaaaatgcaatgcttgatgtggatgtgtcgtagctcgaccaaaggttaattttttttattgatgggcttgtttgttcttcatcatacaaattctttgaatgctttgttgttttcttgtgcaaattgttgatgcaactgatttatattgcaatttttttcatggtttagtcttagactttaatgtttaggatttacaatat

SEQ ID NO: 29454 - DNA, 901 bp, Medicago truncatula
  Intron number 2 from transcript Medtr2g113920.1 (locus Med tr2g113920) derived from phytozome v7.0 (chr-ID MtChr2; po s 26800560 to 26801460)
tgttcctgttgtatcaaaggtttttcttagaggaggtttgttctttatgatgcaaattcttgaatgcttccgttttttttatttgacatgtgtaaattttattgtaactgttcctgttttgtattgcaattttttttatgatttaggtttaaaatttgtgactgttcatgttttagacggcaataaatcttgttggtcagagaaacgtttccatgtagtagattttctcacactgagttttgatggaattctaattgtttatttatagtctatatcagttttttttttccccttctatttgatgcttacatggttcgatcaatgagtcacagcagtgctgttattttgcacttttatccattttcgatgcatgtgcaattttgtttgatttctattcctcatgtgttctttgttttgtatgttttttttttgtagatgatgaaaatgaagatgattctaaacaggatcaactttaactttccatggatgtgaagaagatcgagagcattgattctagccatagagagaagcacagtaatatcagttcaactattattttattatattttattttatcaatggatcttcattgattgatattctcatgcaattcttatcattggatctttacataaaataaatgaaattctttatgtgggtgtaatcaaatttgataaaagcgcaaaatgacagaccccttttttttttttttaattataaaaaagtagagcttgatattttgcgcttttactattttgaattttaattattttcatttttttttcattcgtcctattcgattatttgatacatgtgtcattttgtttgatatttactccttacgcgttctttgttttgtttcgattgttttttgtagacaaggaagttgatttgagtgtga

SEQ ID NO: 29455 - DNA, 991 bp, Medicago truncatula
  Intron number 1 from transcript Medtr3g010120.1 (locus Med tr3g010120) derived from phytozome v7.0 (chr-ID MtChr3; po s 1653551 to 1654541)
gagtatttcaggacacactttttgggtcttaagtaaacttttatgaaaatttgtgtattccatgtaatagaaattgaagtttcttttagtgaataattttttaatttataatcatttaaaattgtgccgaaatagtcgttagcaagaaaacaaatatatcaggtaagaacgcattgatagtttatgaaattctgtgtgcaataaccttcaaagaaactaaagaacaagacaacttactttaaatttttttcttttgactacattgaattattatatttattcattattgaccgtattaattttttttggtcaaggacgatattaattattttattaaaataataaataacaagcatataagtaggtgcagtattacgctctccataaacctaatcatctctctctctctctctctctctctctctctctctatctccctccctctccctctctccgccgcatcctcaacttatatctctcttctcgtgcccgcagcaccctcaattttcattttcaaataaatggttttcaacttatcctccaattttgaatgccatatgtatgaaaacggaattgatttgcttggtttacggttgaacaagcaatgaatattgccaatttcattttgaaagaatattacaacatgcgtcttcattgtggatttgtcttgcggaatgattgtttaacccatttttttttgtttttctgcatacaagtatctctataaatttctgagctattagctcacaatactctcagttgttattgaaaatctaaagtttgagattttacaattgattggaaatctcagatggtgttttgcgggagcatggtggtatgaaatcgaagtcttcttactcgatcgcgagatgtatatcaggatatttgtcgagcaactcgagtgtagtgagaaactcttgacggaaatatctgatgatatttaaactagagaacaacaggttcttgcggagcatagaggaatattggctca

SEQ ID NO: 29456 - DNA, 535 bp, Medicago truncatula
  Intron number 1 from transcript Medtr2g017290.1 (locus Med tr2g017290) derived from phytozome v7.0 (chr-ID MtChr2; po s 4220357 to 4220891)
agaatagcagtaattctagtttttgttgtttgtgatgccataaatacttcagtgaaaattcaatttctccttccaaattgtgagtctaagatcatctctatttttttcactaaagttttcagtttagaatataaatataatgtgatatttggtgggagtcagatcaattatttaatgttaagataagatgtatagtcgttattatatgtatttggaagattgacctctctcttttcaacaaagcgaccataattttctctttttaagttttctcttacaatttctttattgaggggtggttttgggtcaatttttgacctaaaatcattcctcttcatctttttctctctatttcaatataaataagtgattttcacatagatcttgattttttctttgtgatttcatcgtctaagtgtggtggtttgttgttcgttgtcttgtacggcgttgtttgatttctcgtctttgtgtggtgttcgtttgattcatattgaaagatcgattattcaatcaaagatttgagcgtcaacgt

SEQ ID NO: 29457 - DNA, 551 bp, Medicago truncatula
  Intron number 2 from transcript Medtr3g044360.1 (locus Med tr3g044360) derived from phytozome v7.0 (chr-ID MtChr3; po s 12353239 to 12353789)
ctgattgtgttagatgatcggttagaaattagttagttagttatagtctgttagtttttgtgagtttaggaatgaatagtgttatttatggctaaagcataataaactgtataaatagggtccatgtattatacattctggatcttttgaatatgattgctcttgagaaatatctcaatttgcaagcatttaactaccgtttctctaatttctctaattttctcttggcctttgtacgggatgtcattatatcatttgtttcatattttttattggctagtacaagttgaaaatgtaattgacaaattttcaattttatttgatgtttgtaaacaaactattgagtctcttttataaattttaaactccaacgatgcaattaaatttttagctgcaataattcaattaacctggcttgggagttgggaccttggaatgtgctcttcctcatggtctcaagttcgatctttcatgatgttaatttaggtggactactttagcttcttcaattgggtttataaacgactacatttaagttcagctggattttg

SEQ ID NO: 29458 - DNA, 850 bp, Medicago truncatula
  Intron number 1 from transcript Medtr3g138870.1 (locus Med tr3g138870) derived from phytozome v7.0 (chr-ID MtChr3; po s 35570904 to 35571753 reverse strand)
aactcaaggtatgcacacaaaaactttataaatatgcaaatgcatctattactatttaattaaattaatcaatcaacgcgtggttgatccaagtgttatctactcagataccttaaacaagtgatcacgagtttcatctctaactcttgtgtcaggagaaaaatatagttggagaaagaacctaccttatgtattcaacaaattctttgacaaagattagtcacgtgtggtcatgtggatgcttaatacatataatatattgtaggaaagaatacacatgggtgttttgtagtagcttagagttttttatctagacatacaaagccaaggaagaattagtattcagtttgattttattcttacttgaaattaaaatgaagtatcattttctatggcatcatatcacaactttagggaatcttgattttatgttaagagtttatttgattagaaaaaaatgttttccattttctatgtttagttttaattgtaactgtggctcattttttctctctttcaaaacagtaaaaaataatcctttatattatatatcaacgattaatgtcttctctttttgaattggttatttaaaaaaaaattagtttcaataaacatattttaaaaaatgtatctttttatgatggtaaaaaaataaattaaccttttttaaaaaagaaatctctaaattattaaatatttaattttaatataaaacaaactgtcccataattttaattttaatttttaaaaaatttatgtctagaaaaacttgtgttggtagaaaataacaataagaatgaatttgttgcatgaaggtatctagggagcaattgatagagctagcaagaaa

SEQ ID NO: 29459 - DNA, 904 bp, Medicago truncatula
  Intron number 1 from transcript Medtr1g028080.1 (locus Med tr1g028080) derived from phytozome v7.0 (chr-ID MtChr1; po s 6728631 to 6729534 reverse strand)
ttgtttctgaggtgaatctctctctctctctctctcttagataattccgaggtttagtgtttttcacaatttttctgagttttatgtgtgtgtttttgtttgatccgaggatgtttcatgcaaccaacttcgtttcttttcttgttatgatgtttcttgcattcattaattacttaattaattttctgtttaatgttttattttctttctatttttggatttatattcaagatttcgttcataattgaatacttataaggtgctgtttggataacattgaataggaaaattcatgttttttttttttcctttctaatttcctaattttttcttttgtgatctttgatctcaagattagtaatgaatatcatgtagttgatgatgctctctgaaaatcattttccttgcttgattttacttctttactaatttttcttgtttattttgaaaatcaccagtatttcacaatgctagaaaatgtaacttgatctgattattgtgaattaattactattatttttcacataatagttaaagtaaattgaattcattagcatgacttagaaacatctttaggccattgagctgtgacttttgatgttagttgtttaagttaggggtgtttttcgtgcttggttgatatgaacttagttagttgcacgttggcgagccgaaatccacgagatcaagtttttaaactgtatttttagtagattaagtttgtgcatcatataagtgaaacaggataattgtgcattgtactgtagtaagttttattgaataaggtgaaattttgattgtgattcaggaatttgattgtgattcaggaaatatatgttttatgcattcaagtttgttttcacaattgatttttctttaatgatgttccaggccaaggattcaa

SEQ ID NO: 29460 - DNA, 458 bp, Medicago truncatula
  Intron number 1 from transcript Medtr1g103220.1 (locus Med tr1g103220) derived from phytozome v7.0 (chr-ID MtChr1; po s 21430911 to 21431368)
aaaaggaaggaaagtcaaggaagcaagcagtaacagtaactaccatgtttgttgtttaattaagtgtatgtgttatcatgcattatttaactttcttttttttcttatctattttaggaacaaagccaaacaatcaacttgcccaaattagatatttttttacatatactattataataataaaaacagcaccaagtagatggatgctggtgtgatgagtgaatctatctaagtgttggatgatgatttgatttttatattctttatttatctttattcatttcattccttcccatcttcacatggggggcaccataaaaaattgatatattatatagtatttatggcatgatggcggtcccttctcagtcacaattgtgtgctgaattatactgaccttgcttggttggagttgtgaagtagaggctccagctgggtgggagacaaacaagggcggt

SEQ ID NO: 29461 - DNA, 556 bp, Medicago truncatula
  Intron number 2 from transcript Medtr1g103220.1 (locus Med tr1g103220) derived from phytozome v7.0 (chr-ID MtChr1; po s 21431455 to 21432010)
ctttcacatcaaccaagtttttcccttccaacaaggttagttagttgttatttgttcttgtcttgttgaatttgcttcatgtgtttctgttttgtaaaaggaaagagatacaattgtttgatgattgtaatgatggatttgtttctgacttgtttggtgtcatcattgtttatagaatcaactgacagtactaatcaatttttttctgaaagttatgattattaatgattacaaccaatttttatactgtcatctttcacttgatgtgtgagttttgtttattttcttctatgattgggtcacaactcaaattataactaattaaaaccttacataattgttagtattatgattgagagtgctgattgaacccttaacatgttttatgaggagagttacaattacaaagattgacattcaagtaaattagtaatagacttcaaaagttctgcagtatcacatatgctcagtgatgattcttatatggtttggattaactcggtagttatgttgttgttttttttttttaatcattgtaaatgcagtttgtgataaa

SEQ ID NO: 29462 - DNA, 576 bp, Medicago truncatula
  Intron number 2 from transcript Medtr1g019270.1 (locus Med tr1g019270) derived from phytozome v7.0 (chr-ID MtChr1; po s 3817509 to 3818084 reverse strand)
gccaagaggtagcttggagaatcaattattcagaagtatgtttcttttctactttctacttattttctcatcattttttcactcttttcccaaaaggcacaaaattaaattaagtagatactaaataatcattaggacttatcatttttggtacataaactcactcaaagtcaaacctgatcaattacaagatctaatggccaaataattttgatctgatgttctatattattaaacacacttaattttttatttttttttaaatctattagttttgttgagtctgattagaaactctcacactaacacaataattaaggtttgcttcattattctaatatgtttgtatgattcatagtttactaataagtggaatcttgtaaattggaccatagtatgtaaacacaatttgtacactataaatcctaaggttgaattatagaaaggtatagcatccgctcggtaatggtagccgtagacgtctcactgatcaaatctcgtgtgttatttgtttgcgtttttcttttgagccgaggttgatgttctaacataatacaaacaggatactctgctact

SEQ ID NO: 29463 - DNA, 605 bp, Medicago truncatula
  Intron number 1 from transcript Medtr2g008800.1 (locus Med tr2g008800) derived from phytozome v7.0 (chr-ID MtChr2; po s 1779051 to 1779655 reverse strand)
tgaagtatacagaacacaatccttgttaagtaaacttgaaacttatatcagtgtaccttccttctactctttgcttgcaacagttccacttttttcctatcttgctcaagtcggttctttaataatcccttttaactggccatccctgagttaaacttccttgaggttcaatttgaatcttggtatgatatggttccgaggtcgatttttgaccacaaggttattcagaaaccttacagggtaaaatttccctcttataacaaaataaataaaaacaaacatcttctgagtatgcattatcatatgttatttcctttttactatatgatagaaccttacagtgtcgttctatccatgtagtcgaccccacttagtggtttggttgttgttgctgttgcatttcctttttactgcgtagtggtgggttgtatttttgttagattttgacctacgtactaatttgatgttttctatttatctctttattgggtttgattctacgtttttatggatttgtcattttatgccatgccaaattacataagtgatgtgcttaatatatgtgtttgtgttacagtttgaagataacgagtggggtgaatttg

SEQ ID NO: 29464 - DNA, 765 bp, Medicago truncatula
  Intron number 4 from transcript Medtr1g140740.1 (locus Med tr1g140740) derived from phytozome v7.0 (chr-ID MtChr1; po s 31219032 to 31219796)
tctcaatagctactattaattttcttcttgttaaggtgcgtgtaacagaacaacttataagttttagttacaatatttctagctggcatgtgtaatttgtttgttttaattattaacttaaaactgaaagtctatgtcataatgattctcttttttgtaatatttattgtatataagatatagaaatcttgttaaaaggcattcatatcaaatttcttgaattattcacaagaatacatctctctacttaaaaatatgattttttttttttgcttgtttacatgtcgattatttgtgtatttttgtttctaggattctgaaaaattattgattacttaaatgagaatggtatgaccaattgaccatggatcccatagattaataccttttaccatagtaacactgtgtagtaaacttaattatataggaagtctgcatttgcaacaagaattccctagatcctactaaagaaatatggttaaaactttgaatagttttgtggactgagaaaataggtattcgttaagagagatttgtatatacaatggtggggatgtatcataggtctcattctattggttggttaggctttgaagttacaacatatttttttaggaacatgaatggcaaacatataagatatcacatctatgatctacttgttcctaaatcgatattattttggacttttggtctataatttaattaccatatttatcactcttccctcagttgccatataagactaaaatgatatttctgcag

SEQ ID NO: 29465 - DNA, 472 bp, Medicago truncatula
  Intron number 2 from transcript Medtr2g038000.1 (locus Med tr2g038000) derived from phytozome v7.0 (chr-ID MtChr2; po s 10572989 to 10573460 reverse strand)
cagctggaattctcaattacactggtcacatttttgtaagtttttgcctacaccttttttttttttgttgtctagttctaagttcaattattagggcatcaaaattcaactatgaacagctattgagtgttacaaaaatgataaaaaaagtggctctcaattgtctcacatttacttatacatattatgcacttttttattttagactttgaggggcttaattttcttcataatacaaaattcacctaatttaaaagaactaaaaaattatattagactaaggtttttgaaggttttggggagtttgagtaaattttttaaatccaatatacgttgttataatactcccaaaatttgaaatacattaatcataaatattctttccacatttttgcaaacaattcaaatcctctaaatacatggtaacatgatgaatcttcatgtgattaataggttggtcgaatcaactttg

SEQ ID NO: 29466 - DNA, 483 bp, Medicago truncatula
  Intron number 2 from transcript Medtr2g013780.1 (locus Med tr2g013780) derived from phytozome v7.0 (chr-ID MtChr2; po s 3226808 to 3227290 reverse strand)
tgtgtctccatacaaaattttcaacctggcaaaacgtaagtttttcgtgttaaacaacttggcagattaaaaatgcaagtaaccactgattatatttccttatcctattcttcttgtctcttttatgcagtctacatttcctcttatagaatgagttctctctcagtcatatcatgtgtagattgttatttgaaatcatttctcccataatagccaagttctaatcatattttgtttctcatcctttcattataataccatatatttacactaagaccttgcttgtgaaatctttcaacttacacaatgttatctaagactcttaataaataagatcttttagagatgtgagcaggtgtatattctaacaagtagcttgtttagtaaacgagctggacggctaatgcataagttcattcaatcagtgatttgttgcgtctttgactttctgatttgtttcaggtgttgagtcctctacttgca

SEQ ID NO: 29467 - DNA, 690 bp, Medicago truncatula
  Intron number 2 from transcript Medtr1g023530.1 (locus Med tr1g023530) derived from phytozome v7.0 (chr-ID MtChr1; po s 5273845 to 5274534 reverse strand)
cggtcttttcattggttactcagtcggctgctcaggtagcatctcagtctcccacttacaatttgcccatgacacctttttgttgggagtcaagaggtgggctaatgtttgatccttggaagttgttctaattattttttagtcaatttctggccgtaagattaatttcaataagagtatgttggttagtgttaatgtggttgcttcttggtcggctaatgctgcttcagttttgaattgtaaaaatgggaacatttctttcctttatttggggcttcctataagtggtgattctcttaagctgaatttcgacaaccactcattgaccgtattttaggaaaatctcttggataaattggaatattgtttgttctaataaggagaaaggaggtttgtggattaggcggttacatgatttcactatgcccttgttaggtaaatggtggtggaagttgaaagaagagcatggtagtttgtggtttaaagtgttggtagctaggtttggggaggatcgccactttttacacgcaaagggggagaggagggtcgatgtagtggatcaatttagttagtatttgtggtggtgttggtatatttgtaggaagttgataattttacgtgtgagttaggggatggtacttccattttattttagtgggatccttggttggaaggaatagcattgaaaga

SEQ ID NO: 29468 - DNA, 505 bp, Medicago truncatula
  Intron number 1 from transcript Medtr3g098000.1 (locus Med tr3g098000) derived from phytozome v7.0 (chr-ID MtChr3; po s 23619528 to 23620032 reverse strand)
caggtatttctaacctacttataccatctaaaatctttagtttcaaatttcaataattttaattcgacatagccaattcttcgagataatgacattcattatctcaccaaaggtaactaatttcttaagataccagtatccattatcattttaacggatactgataatcttaagaatatcggtattttaagaaattagttacgtcctaactttcagttggtgagataatgaaccttagtgtcttcaatacatacatgtaagaattgaactaatttctcaagacactgagatttattttctcgattgagagtcaggacatataactgatttctttgatacataaatggactggttattgcttgtgttacattatgtttgtctttagttcgaaaaataccaatgtaccataattgaatatacttaaatgtttgattatctttcattttattttttccttatgcatatattagtttctgagctgggtccagaagatacaagcaagaac

SEQ ID NO: 29469 - DNA, 511 bp, Medicago truncatula
  Intron number 1 from transcript Medtr2g009920.1 (locus Med tr2g009920) derived from phytozome v7.0 (chr-ID MtChr2; po s 2276435 to 2276945 reverse strand)
agctgtttttgttttgtctgtcttcttctccgaaggtacgttgactctctattctccttgccaaagccaaacaatgaatgaactttttagattaaatcaacaaatcatttctcaattacaattacaattcactcattctccattgctattaaacttcgaagaggaaaattatcacatattttagtttaatcgaatttcagaattcatttattttgtttttgtaaattctcttttatttatattatgatttcacatgttcgttgtattatgtgtttgattttttgttttgttggatctattgtatcattctctgattgtttcatatcaaagtctcacacaattgtgtacaaaaaatgaaataatcatttcatctatagctatgatattgatgatttttgggggctacattatccttgcatgaatccataatttgtttgatttattagaaattaattatatgaaatgaattgaggactaattaattatgttattatgtttgagtagaatagct

SEQ ID NO: 29470 - DNA, 767 bp, Medicago truncatula
  Intron number 1 from transcript Medtr3g124650.1 (locus Med tr3g124650) derived from phytozome v7.0 (chr-ID MtChr3; po s 31661149 to 31661915 reverse strand)
tcaaaagggtaagtgtatatttgtttctatggttacaaaaattgattttaaatatataataattatagatcgaagatatatattcatgtaaaattaagttgaacaatagatttaaggttaaaactcaatatgtttcaaataaaaatatacttttaataataatatagcatttggacttaaaaaattaatgaaacatgttaaaatcaattttttttttctttctaagattacccttttaaattagaaaatgaattcatgcatgcaccatgtttccattgtacttaaattaacaactctattacttacttaaatggggtcaataagtgattacgaaggtccataacctagacaagtgacctctactacactcacatggagtgcaaacttatggtttatctaagatgtggagcgtgcattataatttgttgcagtggggtctgcatttacgcggctctttttaaaaaaacaggaaaaaaataacaattctattgtgacttaaaaagctgatctatcaatattttgctttttttacttataaatttgattactttttgtgcatagacccggattttctacataggaatcttgtagttatgtgatgaagatggttaaattgtcaaataaataaaaagtattataactcactaattaaaattagataagtagtcattatttgattgcagcaaatccatttcccttatgcactcaatctaatgcaactaatttaactagggagatcaagcatcaataattggaggtgtagttga

SEQ ID NO: 29471 - DNA, 743 bp, Medicago truncatula
  Intron number 1 from transcript Medtr2g049710.1 (locus Med tr2g049710) derived from phytozome v7.0 (chr-ID MtChr2; po s 13636391 to 13637133)
agttctcaggtttgtttttatgtctttcttcattacattctcattgtttatttttgtttctaatttctattagaggtttttgcagaaaattaaacaaaaataattatcatttgataacttaattaatctgatataatgtaatttttttttataaacttcacttttatagatagtgtaatgttgtcaaaaaaacagaaaaatagtgtcatattcattttgagctacaggtttaatgtatgtgaatatctttagaagttaaaaagttcatactgataaaaatagttttaaacattttttgtttaacactcttgttttcaagaatttggtccgagggtaaatcaattctagttagggattgttcgataagaatgtaggtactcctcgtcaatttgactttaactgaagttcattaactatttgatcattttatgtgaaaagaattgaactttaagaatatattcaatcacgtctcgtcatatatataaataattatgttgttattttagaaaaaaattaatcatctgataatgcgaaaattatattgtgaatgcataataaaatgtaaagtgtgcatcaaatatttgatatgtaaaggtgttcacacgacatggttagtactcagtaccgatcgtttgttaagttgattgtatttgaataatgttttaatggtgtattagattttgtgttctgataccatttggctaacagggttcaattctaggtgtggaagtcagtgttcatag

SEQ ID NO: 29472 - DNA, 939 bp, Medicago truncatula
  Intron number 1 from transcript Medtr3g123560.1 (locus Med tr3g123560) derived from phytozome v7.0 (chr-ID MtChr3; po s 31053542 to 31054480)
gaacaagaacggcaaccgtcgccgctgttgacctggtgagtttgatttcatatttgccaagttttggatagctatttatttgtgttctcaacatttgctttcactataataataatatagaattgggtatgagaattgaaaggatgtcttactctgtctagttaagttgtctcaaggaacttatcaaaataagatgaagatgatttatgggattttcataagatatttttgtaagctttactaatagtactaactatgttatgagatacgcttaaaaaaaaactctaaagaaactcttcctctctttagatgcggtccttatgggagatgtagggataataacatgcaatactactttccattgctggagattttaaataagaatggtggagacgtagaaaaggcacttgcaagtttcaggtcaatttttagcttaaattagttaagagactgagcaccaaaatgttgagcactgattatcataccagaggtcatgtgcctttaattatagggatgctgtgtgttataatagggatttgtttgccttctgactgggttgtttaatatttgtttccttttacgagtctaactctacttcataaactttgttcgacgatttgaatcgaatgatgaggtatccatgattttgttacccttttttacttgctagcatgttaggctgtagttgtcagttgtcaccataacctggaataatgatttgcattcacaaaagtgatgacacgcataaacacatagtataaacattaaacgctatcatttggactatccaaaaattaaggctttttataaggtgggtcaataagctcaatccactccaatccataagagctgagttagatccattttaatttgattgtgtaccgtgtttccattttcttcgcagaaaccctaaaaaacatcgtcgcattgggttaccat

SEQ ID NO: 29473 - DNA, 773 bp, Medicago truncatula
  Intron number 2 from transcript Medtr3g123560.1 (locus Med tr3g123560) derived from phytozome v7.0 (chr-ID MtChr3; po s 31054600 to 31055372)
ggattttagctggttactctctttttctttctctcaattttataattcttcaatgaagtttttttattatctttttgttacccatgctttttagtcttaactttgttgaagtgtagcagcgtgtaccagatgatatctgtttcaaatactaatggtgttgatacagatgttttagaaaacactccatgagtttcgtttatgttaatcacatcattgatgacagtgttttagcgaagggcactttataaaattgtgtcatctccacgttaagttaaactttaactacaatcaaatcttattctacttgggttataatacaatggactgctaaaagtagttttgaatttccttgggtgcttgatatttccctattttttttgtctttcaatgcatgacttcgttttgtatcctacttgttcttggactttgtaacgaaatttgttgaatttagaactttgtaaccgtttgttatggctgatagggaaaataaaaatcttaattttgtaattcatcagttaaatttgtaaggttaaagaattaacattttcttattatttttaagaatcatgtatatctagtaagcattaacaatatatgtaatactgttatgggaagattttcataaccatataaacattcacagcaacaaaagattgctacttaaagtgtgtgattttgtgtactgaaattatttagtactttcgacaattgttattaataaaagcggaatgacaattgcagtgacctggtagtagattttggatccgaagaga

SEQ ID NO: 29474 - DNA, 387 bp, Medicago truncatula
  Intron number 1 from transcript Medtr2g100640.1 (locus Med tr2g100640) derived from phytozome v7.0 (chr-ID MtChr2; po s 23503615 to 23504001 reverse strand)
aagaggatctggttgttctaaatttcaagtctttggtatcttattgatttgttttttcacttttgaaattgttatactgtgtaagttactctcattggtagttttttgttcaagtgggttgagtaaagttatgatttttgagatttatgtggtttgatttgttgaatttgagggtatcatagtgggtaattgggtttttagagatgggttttgttttttgtttgctgatttgtcaccaaatttgagattggatgatgaatacttggttactactgtagttgatattgtgtacttttttttcttcatttgtgtgagatttaagattaagatttaagaagaattgttacttagtttgttggttaaatttagtaggataggatattggaa

SEQ ID NO: 29475 - DNA, 644 bp, Medicago truncatula
  Intron number 1 from transcript Medtr2g033910.1 (locus Med tr2g033910) derived from phytozome v7.0 (chr-ID MtChr2; po s 9381710 to 9382353)
cgagtcgagtcgacaaaagaatatcccgttcaccttcaatctaattttcctcttccctttttcttcatcaggttttgagttattttttaaatcggaattatatttttattttttatttttgctcttttaattttactaagaggttttcacataaataatatttttactttgttctttttgtgtttctatcatcttagctaacgttatttttgacttgtttagatgatgggatcaattacatatttaatcaatgattgtattatcaacactgtagatcattattccaattgttttgattttgtcatattatttataaatattttaccattttgtgctagtaattttaatttggatattgtgagttttttcgtgagttttttcttttttccattttttgtaggatgtaaaatttatatttgtttaaatgaacgaatattgtttctcttaggggaaaaccgtcatttaacccagaagaagaaaaaaattatccaaaaaaatcctattaatattgtaaaaatacaaatggaattgtgaagatgtttaaaattttcttgtttcatttccataatatttatgtttaaattttttttttgtggttgcatattgtaggtacaaggtttcatttctcaactaatatttttttt

SEQ ID NO: 29476 - DNA, 333 bp, Medicago truncatula
  Intron number 1 from transcript Medtr1g019750.1 (locus Med tr1g019750) derived from phytozome v7.0 (chr-ID MtChr1; po s 4118047 to 4118379)
ataaatcaacttatgtttttttttttttttttgcttatgttacttttgttttaactgattgcgtatgttatttgtttttactgaaacatggcatatttttattgattttgtatctttgattcataatgattcgattcatgattcacaaaacaggctttctggttcacagtgtgaatctcgacatgataacctattagccttgctatgtagtattactttttcttgtcattgacgacaatttttattttttatttttttttatttgaatatatgcaacagtatgaacttcttattcgatatttgataaaaaatgcattgtttgcgttaacagtt

SEQ ID NO: 29477 - DNA, 811 bp, Medicago truncatula
  Intron number 1 from transcript Medtr2g093090.1 (locus Med tr2g093090) derived from phytozome v7.0 (chr-ID MtChr2; po s 21535189 to 21535999 reverse strand)
atttctcccagtgctcttgtgagttttatcaattccacttttggttggatcattccatttttattgatgaatgttgccatggtctacaatttatcattcataacttgttatagtaacatgctttgaaaaatagagtatcttaagccttccaatgttggtctatttctgaagctatctcttctttcaaagcacgtaagttcaaaaatacttgacttcctattttattttaagaatttttattttaagtatggtgtggtggatttttggacaacgaccataggcaatttgtgaaggaatgtgttagacctctcattaaggaacattataggaggagattctgaaaacatcaaaactgactttggttagtttttggaagttatatttcagatagttgcagttgtgtttttgttgattaactatatggtcagttatatttcagatagttgtgtaagaataaataagaaaaggcaaggcatagttggttattgcagagttattgagtggttattttggtggaaagagaaccaaaatatcgaaacttggtagaaacagtagccttgtacttcctattctgtgtatgtatatgttctatctctgattgagagcaactctccagagaatattcattaaaatgcagtttttattaagtttatatactattggtactagtttctattagaatgcccgccatggcggcactataggccgcaatgtcgtgtttataaggcggattttcgggcttcatccttaaaaagcattgctcagctggtggaagttccagggaacagatgaaattgtcatatatcaaaga

SEQ ID NO: 29478 - DNA, 791 bp, Medicago truncatula
  Intron number 1 from transcript Medtr3g138700.1 (locus Med tr3g138700) derived from phytozome v7.0 (chr-ID MtChr3; po s 35497578 to 35498368 reverse strand)
gccccaaactttgtgtacccattgaaaacggtaattcatcatgtttgtaagcttttcgtacttgttcaaagcctttaactttaagtcttaagtcttgattgctcaaaaaaaaaagttctcaagtcttgaacaaatacatttattgatttgattttaatattactttaatttttttttatcaatattatttataagacgtaaatgcacttttggccccctatgtttgccgtcgtagcaattttggtccactaacaaaaaaaatgcaattttaaccccctaattttcgcaactatgctgagaagccgccacatgtcccaaaaaaggggtcaaaatcacaacttttttttgtaaagataatgggtcaaaagactctatttccctaaacatggcaaaattagggggtcaaaattgcattttttttgttagggggccaaaattgctacggcggcaaacaaggaagccaaaagtgcatttaagcttatttataaagactatattcatgcaacaattgatcgaccattaacgtgtctaatagctcttcacttccatcaaccaacggtttttcgcttgagttcacagtagtattattttgacacagaaaacctacacataataagatatatttagtattttttttaagtaaagagagaaaaaaattaaaagttgatcctcactatgtgtgtatcgaggtgtggcagtactgagtcggcatcccacttgtttctttattgtgacgtttttggttcttcatggcagcatatcaggtgttggagaggcgtgtctctggagct

SEQ ID NO: 29479 - DNA, 676 bp, Medicago truncatula
  Intron number 1 from transcript Medtr2g037800.1 (locus Med tr2g037800) derived from phytozome v7.0 (chr-ID MtChr2; po s 10436473 to 10437148 reverse strand)
cactgttatcttcttcattgtgataatctgccaaggtaaaatttgtggtacaattaaatgttatttatttataatcttcttcacaacatgtaggagttgagctctaaaagaatgacgacaagagttttagatatcattgttttaccatgttttgtgaccattggatcctccttcattttcatatctacctatgcatatctaatctgtttcctctgttaggccatataaaattttcatatttgtacttaattaataattactatgtttgtgaatagcgagtacacgagaaatcatgggtttggtaagacataatagaattctagatgttagtatttataaatcagcgagaattactatcaaatttcatcatggtttatccaaccgtttctttggtatttctttctggtgtgaagttttgttgcattcatgattggattaaactactccctgcggtattgtttgtttttgtgcaatgtttggattgacggagagtttagagatatcacggtggcactgtgcttttgttcaaactccaaagtgtagcttatgatagaatcacgatggcacgcatagtgattctgccaaactcaccaccaatccaaacttacaaaaaatttggtcagcaagagaacacttcggcattttcttttcttaattagaagttccttttgcaggc

SEQ ID NO: 29480 - DNA, 751 bp, Medicago truncatula
  Intron number 1 from transcript Medtr2g042650.1 (locus Med tr2g042650) derived from phytozome v7.0 (chr-ID MtChr2; po s 12003482 to 12004232)
gatcttcgtcgtgttactgctgattgtagaagaaggtaaattagcttcgaaatcaagtgtttcagtgtttgtattttattttttgagttttgtgtttaattggtttgcatattatttaattggataccttaatgcttattgattgattgattatatggccctatttggataaacatcttatttgcagcttacagcataagcactgatcatgataagagcttatgtctagcaaaagataaaatgaagttaaattgttttcatataagctgttttcgtaagctatcttggagaactcgtgaaaataagctgaaaacagctcatgaacaatgtcataagttgttttcataagttctcccaaacggtctcacagaacttattccaaacagcccctatataagatgctgattttgtttcaatatagttagttttgatactcaacaataaaaaatgttccgctgaaattttgttgttcagctgatttagttttgaatctatgaattttgttaaaagaagcactattataatcttctgtgttgatatatcttcctttgagactataaattagcatatgcaatttcattggcagaaaatggaagaagattaagctgttcattgtttacctggtattgtaaagaagagttgttttttatgtttgtcttaattgctcagtagaagttaatgcactttgcaagctaactgtgtttcttgcgtacacgcatagtaatcatgaactgtatttgtcttgttaggt

SEQ ID NO: 29481 - DNA, 700 bp, Medicago truncatula
  Intron number 1 from transcript Medtr3g138400.1 (locus Med tr3g138400) derived from phytozome v7.0 (chr-ID MtChr3; po s 35381044 to 35381743)
accttcccggcgttgctccacaagacttctttaaggtactatctcatccatttcttctcgatctgtatttgaatcttatatgttagatctgtgttgtattctatccaattcgattcgatgtgatgtgatgtgattgattgattctagatttttctatttgaattggttgaaacaagacatgcaagtgtatggaatagattgaatctaaatttcagtggatcgattcatagaacaacgtttactaataatcgttgatatatggaggattgtgaggtttatgttttgatttctattactcatttgtgttttttatcagttacttaatttagccaactttaattgctctgtttgtttgcatcaatgaatcgagtgaagaatgtttaagctccataagtgtagttataaatagttggtgtatttttaaatatgaatgatatatcatcagataatctggcttggttgaaatcttgcattaggattttaactgcacttgtggatgacaatgaaatcagtttactaactacgtagctcctttaaatgtaatgcagctatctgctggatattttgctgtaagaatatgtaatgaaatgttttttttttttttttgtggtcataatcttgatctggcgaagtgaattgttgtagatctactacctaagttgctaactcacttgttaaaatatttctttgttgcagggag

SEQ ID NO: 29482 - DNA, 917 bp, Medicago truncatula
  Intron number 1 from transcript Medtr1g103560.1 (locus Med tr1g103560) derived from phytozome v7.0 (chr-ID MtChr1; po s 21606456 to 21607372 reverse strand)
ggtgtcaaggctttgaggtattcttcgcattctactgaaccactcttgttttccagttgtatttttacttttcttattcagcccttaattgtcacgtggagaatgggtgtttgctatttataaatggggtggggattaatcaaaggtagtgtttttttaagtctatcagtagtgctgttagaatttatacaactattacattattttaaacagaattctagataaattccacaagaatatatcatgaaatgactaatataatagcttcttgaagaagtataaatatgctaattttaccacatttaaacaatgttggattcatgaatatctttgaacatttaaataggaatagtctagctaataattaccttgtaggaattagttaaggaattgaaaatgttttttttgagaagtacagcttttaatcttttgatttcaataaaacattttagggtcaggttaacttgtgcccttagggcacaagttaaggaacttaaaaaatagaattaagtaataaattttatattgaaaagataacttttgaaacttttaagacattgaatgcacaatttccaagaaaaaacttcaacatttagtttcttaacttatgcccccgaagggcacaagttagcatttcccaacattatattgttgattccttattcggtgccttatgatacttgttagcataatctgaagtttttgagcttgataagcttgttatagtttccatccaatccaatgataaattttgtaagatgttaatcttttaaaactttcagccctttgtatatagttatatctagggtgaatgttggtttttatatttatttcatgttaatgtcagcaattgcaaccatttatgtatcaccttgtttgcaggcggtatttttttctcatcacattcaggtcttacc

SEQ ID NO: 29483 - DNA, 911 bp, Medicago truncatula
  Intron number 2 from transcript Medtr3g103660.1 (locus Med tr3g103660) derived from phytozome v7.0 (chr-ID MtChr3; po s 25577565 to 25578475 reverse strand)
aggccagaggtgctgaccttagggttcatttcaaggtacttaattctgttaacttttgttcatcagttgtagagatagatcatgatatgagattgttaggttttagaatttcatgtaatttttgtatgctcaccgatcggccagaattgatggcccttatgccaataatgaagtttttgcttattattcattatcctgtcaaggtagtttatgaaaacaagcttatgaaaaacagcttatgaaatacaattttggttattgagaacttatgaattaatgtaaaagaatatttatttgcataagctggttttcgtaggctcaaaaataagccattccaaatcgaccctttgtcctatagagaagttgcattttgtttgcataagtgcttatatcatataattggtttttgtgtaagcaattttacaacaaaagataaaataaagtcattgttttatttgtagctataaactttttttgtgaagtatcctttgagagcatagggaaataagctgaacaacttattgtaatgtcacaatctgtttccatatcttctcgttagattctcattagtgcttatatcagtagataagtttaaattggtcattccaaacatgcccttcatatgtatttattttttaagtacttgttttttgatagtttaatatactcctttaaacccaacctgagttgacacgatggtgttggcttgaggtcttgttgtatgctcttctcaaggtctcaaggttcgaataactcggtgtcaattttggtggactagtttggtttcttaaaaaaaaaaatatagactcctttagttgtttttgttcttagtatgatttttcaaagacttacggttgtgtctattttactgtgcagaacaccagggaaacagcgtttgccatcaggaagtt

SEQ ID NO: 29484 - DNA, 721 bp, Medicago truncatula
  Intron number 3 from transcript Medtr1g019510.1 (locus Med tr1g019510) derived from phytozome v7.0 (chr-ID MtChr1; po s 3978620 to 3979340 reverse strand)
agacacttggtgaggaatactgtgatatcactcaggtaatttcgtccttcattgttaattgtcaatgtaagtgtatgtctaaattttgcaagtgatttattttacattggttttgcaatttgtaattgatattggagttctaacacattgttttattggttgatttttttcgtgcctgatttggtgaatttgatttctgtactgattttacactgctgttgtaattttaaatgatattggaggtttaattttgtagagatgagaatgtcgtgttggatgtgtggtaggactaaacactagacatgataaggattagaaactacaagagagagagttgaggtagcacctatggtagaaaagatggtggtaactagacttaagtggtttgggcatgtagaaagaagacttgtggattctctagtaaagagagtagatcagatggagggtaatcaaaccactagagaaagaggaagaccttgaaaaactataagagaaactattaagaaagatttagagattaatgagttgaatagaaatatggtttatgatggaacattatgtcgccatttgatccatgtagccgactgcacttagtgggataaggcttggtcgttgttgttgttgctacttgatttttttgtgcatgattagatgaatggatttatgtattgttgttaaatatctgatagttgttgattggtttattaggttgcaggatctt

SEQ ID NO: 29485 - DNA, 740 bp, Medicago truncatula
  Intron number 2 from transcript Medtr2g095440.1 (locus Med tr2g095440) derived from phytozome v7.0 (chr-ID MtChr2; po s 21814469 to 21815208 reverse strand)
ttgctttcaaggtatattggtttttgtgtattcatgtgtctcttattttgttagttacaattttaagaagcatgaacaccgacttagtagcaggagaatgtggggtaatttaaatatagaaggatttgtttatccccatgtatgatgtgccattttagtcattaaggtatttaaataataaagtttaattttcatgtaccatcagatcttctttcaaaaaaaaaaaatgtaccatcagatcaatcatgtgtgacatttttgaagtggttccgataaaagtaaaatatttaatgatctaatatgattaattgttggtttagagcatccttacattgatagtttatatgactgaagtccttaacgatattaaagtattctttaaagtatatgaaatccgtcattttagtccctaaagtatatgaaaatttgtcctaagtttgttgtatctttaacagtagggactaaagtgagagattctatatactttatgtgctaagttggtgaaacatcgttgggggtttgtcttacaatgttaatataacagtgcggttctgtttttcacttttatatatttttttgatgtgaaagtatgatgaaaaatgaatacactcattgtcatggttggtttgattacttgtgtatgtccatttcctattttccttacatatgtctagttgacttctttaataacctcccttttgtgttttcagtttcaaactacggcgccaaagagttgttac

SEQ ID NO: 29486 - DNA, 651 bp, Medicago truncatula
  Intron number 1 from transcript Medtr2g095440.1 (locus Med tr2g095440) derived from phytozome v7.0 (chr-ID MtChr2; po s 21815269 to 21815919 reverse strand)
ccgtcttgatccttccaatcacctctactttccatgtaatcatcactttctctatttctcatcaccattttcagcatttctctgctcttgattttgctttcgcttttttctcattttttttttttaatgaattgaagtgctctgaattcaaattctgttcttctgattttaaattaagctgttctttctcaatttcttacctttttttttttttttaaatttcattttactatttgcaggagaaagttttaatttttagtttagggaaaaggtgaagagtacccttgtagcataggttaagaggacataaacagaaacaagatttctcttctttttaggaagttcccaattttagatacaatagttatcatcactgtactttaaataaagtgtccttaaaaaaagtatatatattttttttaagagtaaataaattataattggaagataaaaaatagctcaaatatcgccgataatattttgaaaaaaatgatataattcagtgtaatcatatttgttgtgtgaaaaaaattgggaagagcacatgcttgataatagaactaaaatctttgggtgtgtttgtgtgctgtttgttaatttaaaggttaattcatattcattctaaatttttgggttttgtttgtcttctag

SEQ ID NO: 29487 - DNA, 748 bp, Medicago truncatula
  Intron number 1 from transcript Medtr2g074430.1 (locus Med tr2g074430) derived from phytozome v7.0 (chr-ID MtChr2; po s 17090818 to 17091565 reverse strand)
cagttcgtggaagctttattccttggtacctctcattatttttgccttctctccctaatatatgatatataaatatattaaaaggtcatattttcctcttttaccacactttttttatccttcacgacttaccattttaattttgctggatcattccctctataaaatttcttagcatttgttcttgatttgaaattagttggatatttttatcataattgttcaataatgttattgctatcttatcatcaacactcaaatcgcataggaccaataagaatctgaatatgaattgaaactcttgtcctcgtgactctgactatttctctaacataccgttgggaattgggatggagcttgcaagttgtgtatcggttggagtacttatcgtataatttgtcgaattttgaagttgttggctttatttgcttttttggctttctttgttgatggtatatgttcacgaataagacattaaaattgaaaccaatcaaaactagtcagaagcatcccgttaggtttttttttttggtttattcctttacaccgtcagcaatgatttatgtggatttgaatgaagaatatttttgtgaacccctcttggcatcttgccgacttaagttagttgtattatatcacgatcatgataaattgaggattatgatgtgatttcattgtgacttgtgacatgtacacattttgatgttggagagccttttgcacttaaaaaaaaaaattaaaggattaa

SEQ ID NO: 29488 - DNA, 970 bp, Medicago truncatula
  Intron number 1 from transcript Medtr3g080650.1 (locus Med tr3g080650) derived from phytozome v7.0 (chr-ID MtChr3; po s 19079924 to 19080893 reverse strand)
ctctaatagagaagtttcctctccaaaactcaagggtattctctctgtttctttttctcttatttttttcattactttttcattctcaaattgctaattttcaagtgtttttaaattttgagagattaacgttttttgtatccatagaaaattatggtaatatgacttctatattactgatttttatctaaattatgctttgtcaaaatagataatggtatttcagaaacatgaggaatttatgtagagattataaaaaaaacatttggtgccttgaagttttgcgtatgcggtaggaattacttatttattgaaaaaaaaaactcaagttccacgtataaaatataagactttcgataaaaatttataaagatgttcatccttatcttataagtcgattttgtaataatgagttaagatcgaaatctaacatcattaataatattatttttttagtgagagtaacgacacatacattagctgcattttttttttatggaagaaatttataataagagaatggtgaccccatacaaagtagggattagcaacattttttatttataagcaaaatatgttaaagaatatgcaaaattatagcatatgtaattcaattaaatttgaagttttaaattcgtctttgatttgttttttctccaagttctcatgtttccgttaatatacccttatacaacttgtgataattcaagtaaatatttttataattagttatttttttatataaaaaaaaaaaaatttgatacaaagttcaaattccttcggtaatagttgtgaaatgattattagtgtcactttaataataattataacctctagacgacaaaaaatagcaacattttgcagcacacgactaagtataatagtgttatttatttataatatttttctgctgtgataatttttaattaaactgaaacatttttctttcaacttttttgcagtatcagaa

SEQ ID NO: 29489 - DNA, 541 bp, Medicago truncatula
  Intron number 2 from transcript Medtr3g163380.1 (locus Med tr3g163380) derived from phytozome v7.0 (chr-ID MtChr3; po s 42932417 to 42932957 reverse strand)
ctcatcataaaactccacactctcctcggtaacaagtaagctacactatcgttcttgagtatttttagactttacccaatttgatctttcgtaatttccttgcaactagtcttatataaaaaaattatatccaaactagtcacttagatttttatatagggtcgcattaatcctttgttacttttaactcatatttaacttattagtcgccgctctcagctacctctgtcaatagaaaagaaaatgattttttttttcttctgccctccatatgaaaaaaaattgatgggactgccccttttgaaaaataatgatgctagtgcccttgttctacctatcaattggcgggcactatctttttttatgtttgatatttgatttggtgaaatatggtcatatattttttttattttattttatttttttttatttttgctgttgcttttggctaatagcatttttcctttttattttttgatttttttctttgtttatattttttataattttttttaggattaatagtgttttacccttgtaa

SEQ ID NO: 29490 - DNA, 481 bp, Medicago truncatula
  Intron number 3 from transcript Medtr4g005640.1 (locus Med tr4g005640) derived from phytozome v7.0 (chr-ID MtChr4; po s 349740 to 350220)
agtttacgtggatattgtgccgaaggacaagaacggttaattgtgtatgattatatgccaaattttaacttgttctcccatcttcatggaccacaatcagcagaatgccttcttgattggaatcgatgaatgaatcttgccattggatgtgctgagggagttgcgaaaacacacttgaaattttcctaactgcaaaatcggaaaaggctgttaaatctttgaaaaaatatacttattattaatgactaattagtattctttttagaaaaaagccaaatctaaaactcttacacataaagttaaaaatctctcaaaaaaactgttttaggtgtcacttatttttgagtttgcatcgactttcagatatcttcatcaccaagcaaagccgcgtatcatccatagagatatcaaacccaataatgtgttattggattcagatttctgagctcgaatcagtggtttcgggttcgctaggttgatc

SEQ ID NO: 29491 - DNA, 786 bp, Medicago truncatula
  Intron number 6 from transcript Medtr3g080260.1 (locus Med tr3g080260) derived from phytozome v7.0 (chr-ID MtChr3; po s 18820273 to 18821058 reverse strand)
cttgcactagtaagtgttcatgttctatctttaatccttaagggaagaatcaaaaggaaaagatcacccttctgaattcatactgattccatgcattacagataacgattttcacataacagtttctttggaattcttacttatacttctgcataatgattctagcattactatggctaatgattttagaattctacacctaaggttgaattgctatgacctgtgttgtagacgcaacaggcacaagcgtggcccttaagttgctgtgtacttaaacataagagaagtatcgagaattggaaaggtcatggaattgctacgaggagcacagcatagtgtagatcttgatgcttgtaggaagcatgattctctttgttgcacaaatgcaaacttgtaattttgtatgattttaggatgaattgagtcccgccaaaatctagttacctgactgaatggtattagtaaggtagcctagaatgctatcttttatgcttctttatttcaagaaataataaggttctaatactagcatacatgataaaaatcaatattaaattgtaactaggtgatgagagattgaatagcaagtgaagtgaatcaaaattaatgctttattcacaccacaagataatatgcttgtagttttaagtacattttaatatgctgttatatctctttgccgtaggttagaaactacaagacataaatgaattcaatggagataatttgatatttatatatgtatatttaggtacacgaagcttcagttcaaaaagaagtgaagag

SEQ ID NO: 29492 - DNA, 688 bp, Medicago truncatula
  Intron number 1 from transcript Medtr3g080260.1 (locus Med tr3g080260) derived from phytozome v7.0 (chr-ID MtChr3; po s 18829658 to 18830345 reverse strand)
tgttctgctgtgtggactgtggtatgctttctgtttgaaccgtcagatcgttgatctgacggtcattgtgctttctcttgttatcttctctatttttgtggttttttttttaaacccttggatctttgatccaatggctatgatgaatccaggggtttgaacttggaccattgatttaatccaatggtccagaattaatcctgctgagccaatttgtttattatttttatttgttattgtttttactttttaaatgctgttttttattctttttgacatttttacgtttagaaaaaaattccaaaaatgttttttctcactatttttaattttctatcattgttaaaaatccatccttttttttcccttttaatttgttttttttattatttcttatatgatgatcttaaattttttattatcttaattcttgcttattatttcttatgtctcattcatcataatattccttgtgattactaaccatttaatttttgtcttaaatcatagcatgcatattcaattttctcatcattttattttgtcattgacttagtatgtataaatagggaattgatgtaattttatttcttgcattttattttggcataaaggccttagggttgtatttaggaattgatgtaataatgtaggtaacacaagcaccgacactaccacattttattta

SEQ ID NO: 29493 - DNA, 578 bp, Medicago truncatula
  Intron number 2 from transcript Medtr3g086690.1 (locus Med tr3g086690) derived from phytozome v7.0 (chr-ID MtChr3; po s 20382939 to 20383516 reverse strand)
aacggattcatcaacctcgttgctcgttatctcaggtatgaatcgttcatcataaagctcaacattgttcatgcttgcattttttcatgattttcgttcttcaatcgcatttgttcactctaactatgatgagatcttccggtgattttgagcttgtttgtcatggattatagaaaaagtgattttgaaaaaagcataagctgttttgtgttttttaccaaaaaataataacttaaaaaaaatcagttatagaaaaagaagttactcaaaacagcttctcatttgaaatagtttttagattattctcagaagctacttgaaacagtttctcatttgaaacattttttaaattattttcagattctcatttttgtaagaatctgcaacaaatggatgaaaattttgaaaagtgattttgtacaatataagctgtaacaaacaggctctttatatttgttgttggtttcattattgttttttacaaaatatgccgtaaaaacaggctctttatatttgttattggtttcatgattgttttttcaatgcatgggtcattgatcgaagtggagaagcacagc

SEQ ID NO: 29494 - DNA, 504 bp, Medicago truncatula
  Intron number 1 from transcript Medtr3g147230.1 (locus Med tr3g147230) derived from phytozome v7.0 (chr-ID MtChr3; po s 38045507 to 38046010 reverse strand)
ggagttgataaaggtgaatctcagtgattacgtaccattagtccgttatgctattttatcattacagggaaaacattatcattaaactctgacttttgattctggaccccacagtatcagtggtcttcactcttcacctagctggatcaagatccttgtaggccaacaattccaacccacaacccataaagacaagtactagtactacgtttattttcttagtagtgtgtgggaaatcagcagcaaatatgtgtgtgtgtgtgacacaagaattaattaactattttcatacagaatattttcattagtttgatccgtattttaaatgtgtatattattcaaaaaagattatttaaatttcaaaaatgataagaaattgctttggtccacaaattgcttaatctggaacaaatgcacgtttgttgctgtgattaaacagtaaatcaaacactttatttataaagggaagataggttgcaccgaggagtccaagcagagggttca

SEQ ID NO: 29495 - DNA, 766 bp, Medicago truncatula
  Intron number 2 from transcript Medtr1g111060.1 (locus Med tr1g111060) derived from phytozome v7.0 (chr-ID MtChr1; po s 23542216 to 23542981 reverse strand)
aatctaaggtaacaactttcttagtttttttttggtcttttggctttttttttttcttgctttgtttgattctagcattgtttatttgtttttagaagtgtatttttttttttttttttttttttggtgttttatgatgtttgggtttttggtgttgaagggaaagttgatctttaacatcgattgggaaggatttgcatatttgtttggaacatctttgagttaaagagagtgttgtttctttgtttttgttatccttttctgggttttgttgataatgatggtccctatgtagtttttggggtttgtttcaattttttgttttgtactttctattttttcttacatgtaggcctcttggtttacttgttctggtaagttggtaaatttttgtttgatttactctccaaagttgaaaatttgtccacctttctcaaagatttgtgaggttctttcatgcctatacttcctttttatgatccttttttcaataatttcttgcttttctaaagggatgagctttgattagaggattttattcttcttttgaagtaatagtactatagtgtcaaatgaagtgcataattcatatggataaggttctaataacatagttcatatgcataagctttgattatatgatatttttttacttttcaagtactatcgtgtcaaatgaaatgcatagttgatatggagaggattctaataacatgttacaatctttgtagagtgttgttcctctcaatacttgggtgcttatctc

SEQ ID NO: 29496 - DNA, 707 bp, Medicago truncatula
  Intron number 1 from transcript Medtr3g092040.1 (locus Med tr3g092040) derived from phytozome v7.0 (chr-ID MtChr3; po s 21560027 to 21560733)
gctatatctggtattttaccattttcaattaatttgttgagtttgtgttgttatgctcatttactatttgataaaatgatgaaatttgcattgagtgtttcatttccattttaattaagtgagaaactcattgagatattttttagttatttttcgtaatatgtgtttgtttgattgtttggttttgttgccatcaaagttctgttttttcagcctaatttttttattggtatcgttactatttttttaattgtgttaattaggtaaatgattcctatatatatatcagaattttatttctaacccgtacaaactaaatccgcactaaaattttccgttagattctttagtccgtgtaaaaatactcgagcaaaatgttatagactaagaagcgctattttttttgtgctacttaattaaccatttttaatttaaatgatttcgacaaggtcgaatcgatttggagcatgaaattcgaatctgtaacaatctttgacctaacatctggctggactccctattactagggccatgaacgtttttttctttagaggaagttatggcaatgcatatctttccatcactctatctcttttggatctctttctcttcaagcagtttcttttcacattttattattgaaaacagaaaatgattcatcattgctcatattttctttcttaatcagaatcaggaaagcttataac

SEQ ID NO: 29497 - DNA, 806 bp, Medicago truncatula
  Intron number 1 from transcript Medtr2g024970.1 (locus Med tr2g024970) derived from phytozome v7.0 (chr-ID MtChr2; po s 6505956 to 6506761 reverse strand)
aaatgtatgtgagtgctcattttcaccataagatttactatgtgttttctttgaagcaatgttttaaaaaccacactggacggtttaatccgttgaattttgaactgacattgtctattgtacagttattccaatgcaattttgtcctggttttaatggtttaaagtagttgaactatgattcagtgttcttgtaggtttgatgtttaatttggtttttaaaattttgatttgaagggtgttcttaggaagagaaatgatactttgatgtcgagtatgatgtcctttggtttttatgtgtattttttaaatgcatgcaagttgtagaagattgaaagtaatgtggatagatagagataagcatatacggtgtcacaccaggtgtctgtatttcgatgttcaaatgacacatctcttttgggaaatggatcctatgtaggaaagtcgtgactttagtgtattttatgtgaaagaagtcgtgactttagaggacccgtatttgtatttttgattgggtgagttcgggatgcatgtgagtgtggcattaaaagttagcatatggctggatttctctttttcagttttgttcctattagattgtatttgcgagttaaatgtccacaatccataatggacggagatgatgtgtggccatgtctgaaactagacctgtttttgttttgaagagaaactagtttattcttttgttttcctgaatctggcctgagtttcaaattcatatacgagtctaagaatgctggtttcttttgatcaggtggttggagttagaactgaagctggttgcag

SEQ ID NO: 29498 - DNA, 699 bp, Medicago truncatula
  Intron number 1 from transcript Medtr1g093810.1 (locus Med tr1g093810) derived from phytozome v7.0 (chr-ID MtChr1; po s 19210501 to 19211199)
gccacaaggtattattatcaaccttcccttttattttattttttttaattcttttcttctttctatttaatactgtacaacatattctagttttaatcatcaagtcaaactagacacttttattactgttttctttctattttggagatattatttattgaatcagaatttgttttatttttattttatttgtactgtttttgttgatcttattgtcattaattttggaaattttaggtttttttttttttttttttttttgcagatattggttttagttaattttcaagcttacttcttgattttgtttcatattgatgcattaaataagtatctttattgcatattttgctgtggcaatgttttacaaacttcttaactatgaagcacggacactcctcggattaggcgtgtcccatcgtgtccgacactgacacttgtaattacacttaattatttgaagttttcaaattattagctgtgtcggcatgtcagtgtcgtgtccggtgtccgtatccgtgcttcataggttcttactactattgaattcttactatcaatactatttgatttctttttggttattggctatggtgtcaaatatttgtgacttaaattatgttgtttatcaactaagttttaagcttgtgagtaatctattcaggtggcggttttgccggtggaagaatatcccttggg

SEQ ID NO: 29499 - DNA, 394 bp, Medicago truncatula
  Intron number 2 from transcript Medtr3g123430.1 (locus Med tr3g123430) derived from phytozome v7.0 (chr-ID MtChr3; po s 30973982 to 30974375)
tcttgacaagacaacttcgaattatctcaaagaaggttagcataatgatggagccttggtgtttcttttactactaaatgaactatatggagagaattagaaaaacatataatttctttgaagcctgctttcctagagtaattcatgttaatagagcttgaatttggacctaaaaatcatattttgatattatagggattaaaaccttatttactttttttatggttacacgttcaaacagacactccgtactcttctgtttgctttttatattgcgctaattcgtatacattacgaacaatagtttttataaaatattgatcaaaattataatatagataatgcttaaatatgtatttcatccttgcaattagggatcgttcaaattagcaaa

SEQ ID NO: 29500 - DNA, 374 bp, Medicago truncatula
  Intron number 1 from transcript Medtr2g021730.1 (locus Med tr2g021730) derived from phytozome v7.0 (chr-ID MtChr2; po s 5588501 to 5588874 reverse strand)
ggtaaaaactgaaacacagacgtttctggacggtggtcaatgcttttgattggtttttacacgttttttttttaagtgtttcacacgtttttggacctcattaagtgttatctaccttataccacctataaaaaccctcacatacttcctcttttcctcacattttctcctccaactctctccccctctttctcttcttcttctttgtttctatagtctctagggtctttatactcctttaggtaaataccggtggcttttgggggaagtagttgtccgttaggttggggaaaaagacatcatcctttgaggtaaaattaggtttgcttccttttactcccaaaatctttttaccgtgggtaaaaagaatcacc

SEQ ID NO: 29501 - DNA, 882 bp, Medicago truncatula
  Intron number 1 from transcript Medtr2g026110.1 (locus Med tr2g026110) derived from phytozome v7.0 (chr-ID MtChr2; po s 7082169 to 7083050 reverse strand)
tgcttctttgaaatccttggatttgcaggtttttattttcttttttgctttttagtaatatttcatttccttggaacacagtttgtttaggtttaagacatgtttttcaattaaattaaggaagttgggtcttggtaaaataggaaaattaactttatgggaaaacaatgttttatggtgattagtgattgctgattggctaatgtatgtagatgatttgaattgaaaattaagcttttgtagtgtcttaaggccttgtttaggtaaacaacttaattaagtgattatacaaggttatcatatatgtgcttatgtagaaactatatttataacaagataaaataaagtcaaactgttttaatataagctataagctgtttttcataagctatcttagagagtttgtgaaaataagctaaaaacaacttatggatatgtcatactcataagttgtttacatacatagctctcccaaacaatctcacatgtgctcatgtcaatagataaactcaaataagtcaatccaaacagttcatgttttttgaagcattagaatatgagacaccgagacattgagtccataaggcctagctcaacttgtaatcccgatattgataggatggacacctttaccggagaccttcagttgtctgtttggtttcaagtgatgcgtgccactttatctacataccaaaataaaataaaaaaagagatactgaggcccaatcggttttccctattcactgcttcatttgaattgctactctatcaatgtataggtttctagaagataagtggtatgaatgatgcatgtttattggtataactagtgatattctccttttagggttgttacgttggagatcaaggcttagctgctgt

SEQ ID NO: 29502 - DNA, 453 bp, Medicago truncatula
  Intron number 1 from transcript Medtr2g111070.1 (locus Med tr2g111070) derived from phytozome v7.0 (chr-ID MtChr2; po s 26225706 to 26226158)
ttaaggtaactaaaagtagtaacttttcattgaaaatcaacaattattgattaaaagctacatgtttaatataaaaaacataagttccaagttaaatttactactttaaacttcttaacatgatagaaaacccttatttatatttaagagcgttgctatttggtacgggttaaaaacaacgaaaaatgacgggaagaagaaacaagctgttacagattttttatttaatattatagtaaattttgacttgtagtggcaatcatgggtaggttttagtgttattcgtcaaatttcgttggtttgttccgcactatacagtatttccctatatttatacatcaaaaaaagtataaagtatttcccttatcattagtatcactatgacctgacccaaactcatgagttaattttattaggaaagaatcatgagttgttttagctgttgcgaatagg

SEQ ID NO: 29503 - DNA, 611 bp, Medicago truncatula
  Intron number 2 from transcript Medtr3g008910.1 (locus Med tr3g008910) derived from phytozome v7.0 (chr-ID MtChr3; po s 1180278 to 1180888 reverse strand)
ccaccttagcggtcaaacccctgttctctctaaaggtaattttgctcaaatggttgcttaatttatcataggttttattttttaggttagaaagcagattttgaattaactataaagctctatagggagagctttaccaccaattttaggtcttacccgactcgagaaattagtctctacagttgtgtgcaaggaggatatataataaagggggagccttggcgcaacactaaatttgttgtccggtggctgaaaggtcacgtgtttaagtcctggaaacaacttcttgtgtaagaaataaggtgagactgcgtacaatacaccaaaatggcgggagcctttctcagaccctgcgtatggttctcgagtacatgggccttagcctcaagatacatgatgtagtaactagtttgatccacaaaatacttcttccaaggctttgaccaaaattttcatcatttaggactagtaagcttatgacagtcacaagtccatagcatagtttaaatgtgtattggaaaattagggtttgggtttgtgttctgattgttctttcttgctggtgcttattgacagctaagcacaccgtccgttcctttggtaatagaagg

SEQ ID NO: 29504 - DNA, 962 bp, Medicago truncatula
  Intron number 2 from transcript Medtr1g025540.1 (locus Med tr1g025540) derived from phytozome v7.0 (chr-ID MtChr1; po s 6348912 to 6349873)
ttgaggtaactttgaaatgaaatttaccgcgtttttttactagttaccgcgaataataattaatcacggttaaatatgaaacgctttatcgtattcgtaactgaagaattactgttaaccttcttctcaacgtaagcagaaagaaaacgactgatcttttccttgctaaatcgttcgttttatcagttttttaaaaacgacatgacttttgaccatatttgcgctgtcgttttttgtctcatttttatttatagttttcaatcttgctagctgttttccttctttccttttaaaaactatagtttttttttttttacaaaaaaatgtagctaattatgttggttgagcagttaattattttgattgttctcgtgattttctcagttgttaggaacaatgtactaatatatataaggttggattcaaactcgaccaccacagagaaatttaactattccaactcatatgtaaaactagaccacatttgtctaaaatcacatgttagaaggtttagaataataaaaattaaaatatatttcatttagctcatttgatcaaaatcagacaattatcaatttccttaactacatccttagtttagttcaacatcaaccatcaacaattttcgatgcgatttgaattaatcatctatccattgagttaactaaatttttttatgtgtgtgcgaaacatttttttaggaacggtccgtgaaatatttttttatattttatacgtgttattactcaaattcagtgatggttaccccggtatcatttagttgaaaatttgcttttgatgatttagattcaataatatgatacacagttttttttttaactcaacgatttttgtattattaaaaaactcaataatttatttgtcattacaaaacacagtaattttaaacagcagtgatttgttttgtctttataatatcatcatgtatttattttcagtaa

SEQ ID NO: 29505 - DNA, 704 bp, Medicago truncatula
  Intron number 1 from transcript Medtr2g009820.1 (locus Med tr2g009820) derived from phytozome v7.0 (chr-ID MtChr2; po s 2243433 to 2244136)
caaggtatggattgatgcatggatatgattcttttttgtagttcaaactcaggaagattcgcttagcaagcattttagtggcttagagaattcagttagtgtttgtacgaacctgaaaaccaaaactatatagtaaccatcataccaactccaaataatatccaaaattattacatctaacatcaatctaagacataatcaaacttaatacatcaacaataacttcatgcatgataatttccttttctctttgcacattgcatccataaatcttgagaattattatttgatatccgagttttctaagttaagcttataattcactcatgcatatggagggttagcgatggaaaactcaccctaactatagctttgcaatttaaatggtagaggtggtgatgttgatgatgatggtggcggattcttcaattcttcccttcttctctcccttctaaactcttgtttcttccttcatcttgtttctctcttctctactaatgtttgacaaagtgtgttttgtgttttctttctctcttttagagttttagtcaagtagtgtagtggttagtgggtatgtgctcaagctcgcgcgtgtaggtgtgtcggaaaaattaactagttcattcaattgtagttggtccctaaataactaggttatttaattaattgattgataggaaaagagaggaccacttgagcaaagg

SEQ ID NO: 29506 - DNA, 326 bp, Medicago truncatula
  Intron number 3 from transcript Medtr4g019250.1 (locus Med tr4g019250) derived from phytozome v7.0 (chr-ID MtChr4; po s 3875562 to 3875887)
tcctgtccctgccattcttcaagaaatttcaagttagaaatcgtaaaaagcacaatttttaagattgattaatcattaaagtaatggtaaatttatttataattataatgatcatgaggccagaaattttcttaatcattttgatttgtcatcctcgctcttgtaaattgattattcgtattcccttttgacaataagcaaagcaaaacttttagcatattaaaggaactgtccggattaccagggtccgcaccccctaagaaccggacggttaagaagaagaaaaaacggactgataatttttccatttgtttgattaacaggaa

SEQ ID NO: 29507 - DNA, 558 bp, Medicago truncatula
  Intron number 1 from transcript Medtr3g111270.1 (locus Med tr3g111270) derived from phytozome v7.0 (chr-ID MtChr3; po s 28220766 to 28221323)
acattgtctcatcccgttctctccactcttcacaggtaatcgattctcatgtttctcattctgttttaatttccttgtatatcttcattcttctctgtcactaccaatctagtatcaaaatcattgctttagcttgaaagtgaaaattttatgatgatttcttatgacccatttgtcttctagatctttttttttttttattttttttttttttatcatgggtttattctttggagtttatttgctaccttaaaattcatctagctattgatcatagtaaattatgaatgtaccaccaacacttctgatggaaggcatgaccggtgcctgtgacaatgacacttgtaatttacattcaattaattcatctttttaaaattttactggtattgacatgtaagtgtttgtgtcaatgcttcatagagtatgatcattttctgacgttgatggaaaatgtgttcataaattttaagtgtttttgttggttgatgttttgaattttgattgttattttggttggcagggactttgcttgagagttgtgggaattggtgatag

SEQ ID NO: 29508 - DNA, 313 bp, Medicago truncatula
  Intron number 1 from transcript Medtr2g096230.1 (locus Med tr2g096230) derived from phytozome v7.0 (chr-ID MtChr2; po s 22234329 to 22234641)
gttgtcaaactcgtgagtctatatgagtttataagtctagaagtaaaaaatgagtagatttatagatagaatcgtttttatggtagactcagtagacttaaatagacttatatgtagagtcgcgagtctaggacgagtttactgagtccgtgaacatttttgtaaagcaatttaagaaaattccaaaatacagcccaaattccaaatcaaacaaaaaatgtcaatagaaaaaaacctagaatcttataaacatagaaatgaaaagtttcttcatttgaagatattaattctcatgatgagtagatagctgaag

SEQ ID NO: 29509 - DNA, 487 bp, Medicago truncatula
  Intron number 2 from transcript Medtr2g034680.1 (locus Med tr2g034680) derived from phytozome v7.0 (chr-ID MtChr2; po s 9727527 to 9728013 reverse strand)
ttgccatcgaaaagaggtatttcattttttttttggacactgattttgcttctccttagagtctatattttgatttttattcttctctctgttgatatgtgtgtacatatgttcaattatgcagtggatttagggcagaggccaatgaaattgctgtgattcttcttccatcaactagtatcgttttcttttagtattcaataccactactgctattttcctgtaatattagaacatcaatgtcagcctttcattaattcaaaacaccttgcttgtcaggtgatccatttaaaagagaagaattagaacagtctctttttttctagttactttgttctttgcttttactaagagacccttaggctacaaatttgttcaatttttcttggaagtttcttattgtggttaaaacttctgtgattttgttgtattttgtgatgtgcaatacctgcggcaggttattgagaagaaagcaaagtttgatact

SEQ ID NO: 29510 - DNA, 517 bp, Medicago truncatula
  Intron number 1 from transcript Medtr2g034680.1 (locus Med tr2g034680) derived from phytozome v7.0 (chr-ID MtChr2; po s 9728035 to 9728551 reverse strand)
ggccaattcatcaattttgttacttggcctcccaggttagggactaaattgattgtttattctttcatttgattgagatttaggttacactgtattgtgttcaaatgtcaaatgaaaagacctcaatcatgtttgaagaactaatatacttaaattatgtctttttatgatttatttcttgtaaccaactcatgtaaatgaagtaaatgccactgcatccatttctcaacttttgtttttttttttatttttaagccaatcgagttacagtttcagtgtatctatcgactgtgtcacgtctacagggcttagtgtaatccagaccagtacctatggaaaaaggaaatcactcttgtaggaagtaaataccgcatgaggaatttagaggcaagtgtggacatgttttgtttgatactacaattactatttttcatttttggaagttacttcatgattacaattttcagtaattttcagcgaagtcatcactacctcccttcaccttccctgaagatat

SEQ ID NO: 29511 - DNA, 581 bp, Medicago truncatula
  Intron number 1 from transcript Medtr1g076350.1 (locus Med tr1g076350) derived from phytozome v7.0 (chr-ID MtChr1; po s 15210130 to 15210710 reverse strand)
gggcactcaaggtgagttatcgttatgctaccttctttttcatacgaaattgttagagatcaagctcaattcatccctccaaagtgaaccaatctatggtaacaatcaaagtgaaccaatccaagttcaattcgttatctcttcatgaaaatatctgattttagatcgctctttatcaaatcattgaacatatatgaatcgaagttcttatcaatgaataaatatccatacctgtgaatcctcatttccattaacaatgaaagcatgctcaagtcctccgaagcaagaccttataataaacctagcactagcctatgacctttgtacttgccaacgaacttaggattgccttcaatattccatagatttatttcttggttcaaaagattaaccaacaagaatttgttatcctttaataatgaaaaagaagttattgtctaacgctcttcaataaatctctcatcctttatttctttattgaacagcaatattgtattgggtctacaaacacttagaatgtcttccccatcatccataattgggtttaaaaaattgattgttgtataagattttttatttgg

SEQ ID NO: 29512 - DNA, 519 bp, Medicago truncatula
  Intron number 1 from transcript Medtr3g019260.1 (locus Med tr3g019260) derived from phytozome v7.0 (chr-ID MtChr3; po s 3868491 to 3869009 reverse strand)
accactgtggaaaattgagcctcatcacaaaataagtaagtaacactctctttggtcttataactcgggctcttgagataaggagaaaaagctttgataatctatagtttgatccagaaataagtaaaatatgattaataattgttttagttggtttttgtactcaaaagcaagtaaattatacacatcttttgaaaaatggttaacttatatatgcatttagtttaacaaaaagctatttaatacacttgttgaatttttacatttttgttttatattcttgtcatttttctacatatctaggcaattttcgcaagggatttttaaattatttgaaattaatctcattttctgacaaagctagcaagaatcaataactggttattcaagtttcgatttgtggttttttaaataaaaaagtcgaacttcattatttatatatttttccattttgaaatttatgtatgcttactaattcattcaccatgttgctgccatgtctgtttgggaatctcaaag

SEQ ID NO: 29513 - DNA, 807 bp, Medicago truncatula
  Intron number 1 from transcript Medtr3g087050.1 (locus Med tr3g087050) derived from phytozome v7.0 (chr-ID MtChr3; po s 20596667 to 20597473)
acgcaatcacagttaatctacgatcgccagaaacggttagaaactcgtaatcgttttcattttttcttttatttcggtttccacccatgttcaaaatcatgaaaacttagaaatgatagatgaatccgctgtaatctaggtattttgtaataaggacttgtttggattggtttatcttagcttattgtgatactgtttggcagaacttatgaaattagcttatgcgttgttgttcacaacgtgttttccgcttattttcgtcaactctccgatgcagcttatgaaaacatcttataacgtatatcaaaacaatattcactttactttattctttgttatagaaatagcttatgggcctgtttggattgacttatttttgagcttatgcaaaacaacttataggaataaataagcttttatgtattattcataagcttttcaagataatttatgaaaaaacagcttatgaagatacaattttcgttaatgagaaacataaaagcttatttatttgcataagctaaaaaataagccaatccaaacagaccctatatacataagaaagcacttatgcatgagctgtacattaagctgtttatccaaacaggacctaagttaattatattgaaataaactaaatattgatttcagttagttttgtgtttctgtatgtaaatcttatgcacgctttcttcttttattgaagcaggcttatgatttttaatctaatttttaatttttgcttctttatactttctcacaatggaatactgttttttgttccttatcatgtcaggtatattcaag

SEQ ID NO: 29514 - DNA, 447 bp, Medicago truncatula
  Intron number 2 from transcript Medtr3g086520.1 (locus Med tr3g086520) derived from phytozome v7.0 (chr-ID MtChr3; po s 20244029 to 20244475 reverse strand)
acaataggtggtgttgtggtaagctgcttcaccgtttatttttgcctttgctatagagcattcaattacatttcccggaaaatatgctcttgcccgagttttgcttttgaacactcaatatactgtttgaacctgcatatcctgaatcctgattatgtcaaaaatacttgagaagttaattcttcaactctatgagattttactttttatgtgatatatttatttattttcccagcactgttgtagaacactgtaccggaataggcaaccttgtaaactttataacctgtgtaggttgttgtgattaaattcattcttttttatgttttctttgtatgttcttgtttaagagaatatggcaaaatatattttaattatttggatgccgaatgacttttgaataattttataggttcccatttttgctacctttgcggtagagcatcg

SEQ ID NO: 29515 - DNA, 648 bp, Medicago truncatula
  Intron number 1 from transcript Medtr2g117840.1 (locus Med tr2g117840) derived from phytozome v7.0 (chr-ID MtChr2; po s 27790831 to 27791478)
atgtcaggtttaccgtttacatacattactcttttcattttgtttcttcaatgttggtgtgttttggtaaacccaactggaaccggtggttctcatttgcattttggtgttagtcatctaaagttgaaagaatcttctttacttcatatacattttgaaaagtgtttcaacacttttttagttattcactggatgctaataacattcacttttaaacactatatctaacactcacttttttattggaagtaagcattttccttatacaaagtcgatgtgagggtatgatgtaatatgagttaagagacagttttgtttgcaaatgtatctcttcattgttgttatgaagatttgttatggggaaacatactactactttgattaattggttagggatgacataatgagttgaacatgttgaattgagctgttcaactaccccctatatttttttgtttctgtgaagtatagattaagattttcaacccatcttgatccgtcatacataacttttaaaaatgcggatcgtggacggattggttcgtgggttaagtttttatttttgatttaactacatatcaacttgcctaacaattaaggtatgttacttgcttttattattggcaggtcgatttaccgacctgccac

SEQ ID NO: 29516 - DNA, 356 bp, Medicago truncatula
  Intron number 2 from transcript Medtr3g125040.1 (locus Med tr3g125040) derived from phytozome v7.0 (chr-ID MtChr3; po s 31943653 to 31944008 reverse strand)
aactttggacaattcatactatacctagacataaggtgctcttatggagaatttttaaatcatgctcttccccttagaagctctctagaaagaagaggaatttgttgcactcctctgtggccctgatgtaatgctaaattagaaaccaagaatcatgtatttatggagtgtaacctaattgaaaatacttgatttggttcacccctaaatctcaaacttctggatcaacctatttataatttctttgattggttatcttacgaaattatgcacaaatcaaaagaggtaatcattcaaatagcagcaattacttataatatatggtttgccagaaacctatgtgtttttgaagacag

SEQ ID NO: 29517 - DNA, 795 bp, Medicago truncatula
  Intron number 2 from transcript Medtr2g120820.1 (locus Med tr2g120820) derived from phytozome v7.0 (chr-ID MtChr2; po s 28523945 to 28524739 reverse strand)
aagaggttgcaattaagcttgtgagtatttttttctgtcatatttaattatgaaattttcgttttttttttttttatatttaattctaaaacacaatttgcatgtttgttggtcaaagttattgattctagctcataaaggtgtgatttttatgtgtatgtgtatgtttgattttggggtgacaagaattgattttgagtaaattgattatctaaagtgatttgtgtttgaatacattatgtaaaagtgagttggacagtaaatttgagtgtaaaaatcaattctagaatcaaaagctacaaatcttagcttcaagtagaatcaattatggaggaaaattcagtcctattcgaaagctacggaacatgtcaaaatcaattctacacctccaaaagtggaaccaaatattcacgtggtgttgtctattgttcaattttaatgagtgcaaaattgaaataaaggcgtgctttattgaatgtgtggtggaatgtttttttgtttgaacttttgtagaggaattaatgcatctaaaggtgctaataggtgtgaccaaggttatttgcctgtgtctaattaaatttgtcgcttgtgtattggtttgacaactcaaaaagggtgtttggctgcatactcatgtcgtttatctgttgtttttaatgacattgatgacagttaacttattgaagaacggtgttgattgtttatgattatagatgtgtttaattgatgtttaactctttctcgttgctattggattcaggaaaatatcaaaaccaagcatcctcagttgttgta

SEQ ID NO: 29518 - DNA, 581 bp, Medicago truncatula
  Intron number 1 from transcript Medtr3g102230.1 (locus Med tr3g102230) derived from phytozome v7.0 (chr-ID MtChr3; po s 24874139 to 24874719)
cgtatgtgagtattttaatacatcaggctgaactttctcctttttaatattctataacaatcacttttttacctagttaaataaatatagatctcatactttaaaaataaatttcacataaaattgtgaaacttaggatgatttaatttgataaaagaatgagtgtttaagataacattaaaaaaaatttgtttcaatatttctcattacataaacttttcaaattactcttggaagacacgtaaaaacaatcaaagatatgtttttttttttttaaagttgtatttaattccttgaattttaataatcgatcatttaaacaaattatgaaataaaaattttatttttgattctttagcttgtacttttaaaatatttgttaacattcgtcttattttatttattttgtttttctcttttcagcagaaaagttttttgtatgtgttcatcttggtacagtttgtatgtgttttttaaatgtgtgtagttggtagaaattttaaaaatttcaaagaaaataccatgtgctattgtattgatctaagtatcatcccttctagctaggtggcacagactatagg

SEQ ID NO: 29519 - DNA, 876 bp, Medicago truncatula
  Intron number 1 from transcript Medtr1g031230.1 (locus Med tr1g031230) derived from phytozome v7.0 (chr-ID MtChr1; po s 7528092 to 7528967)
gaaggattcacaaaccaaggcccactttttacaaggttagagagaaaatttcatcaaatatttttgatatgattaagcaaaatttaccatagcagaaattttgatacgatccaagttataaccatatgaatcaacccccccactcatgtcaataacatcacttctcaacctgaaagtaataatgtatagtttaacatttttgaaattcttgaccctcttcatgtggctttcccgatatataaattcaagaatgaaatcacaacaaaaacaaacattagtttttagatggtttagtgcatttacataaatacaattcatatcgtataatgcatccgtcaagtagattttctattatttttaattgtgtattagtttgacatattttattgtactgttgttcggatcaattgaatgtagttgaaagtaaagtgataatttatctctaataaagggtaaatatacaagaagaaaatataagaaaaaaaatgttaaaccaaaatataagtaataaatataagaaacttacatatttttaagatataaatatatattgtgacaaaaataattacaattaaagttgtagttaagcagtttgtttgtttctatgttgctcccaaaactatggtttgattcttgcataacaatattttcattgcattttttgattaaaaaaataccaaaaatacgagtcaaagctaaaaatgaacaaagaaagaatcaaacacatgacctaacactaaaggtgaggtgcttaaccgttttgctggagtgtaaagacataatttgtgatgcagacgttaatatatataacataacattcagtaaaccaccaccgtattttaaatatttgtggtttaccgaagaaagttgaggttg

SEQ ID NO: 29520 - DNA, 389 bp, Medicago truncatula
  Intron number 1 from transcript Medtr1g031300.1 (locus Med tr1g031300) derived from phytozome v7.0 (chr-ID MtChr1; po s 7561238 to 7561626 reverse strand)
agtttaacaaaggttatatatatatgtcaaattcatttatttttttcacactttcttctcaatacataaacatattgcttaaatttttattcacttattttattaactttttttttgaggaattcacttattttattaacttattttgtaacttgaaaaccattcttagtaacttttttggcatatgctaaatggcacgatatgcttttggtcgaattgtacaaacatttaagttttattcacttattttccttggtttttgattttcattgtgcttattgttagttatattaattttttatatatagttatagttaagctctttgaaatataattctctctgaaatttcacaggtaaaaagagttacaccataggactaaatcagttt

SEQ ID NO: 29521 - DNA, 416 bp, Medicago truncatula
  Intron number 1 from transcript Medtr2g129830.1 (locus Med tr2g129830) derived from phytozome v7.0 (chr-ID MtChr2; po s 31508977 to 31509392 reverse strand)
cacacagtttctcttcaatcaatcatcacttgcaggtttctactctctagtgtgatcatttgccttaacatgcatttttttataatttcttcttttgtcttaaaacatgcaaagttagaatctttcatgcatattcttaactgggtacttaacattatttatagaatttatcatgttaattagatcatattaattggtgttctgtgtttatctcattgtgattggttttgcctctataagctaaaattttactgtttttatttcttttgattgtgttgaaacatcattaactgtttgttcataggttctgctacaatttttgtacactataaacatgtgaatttgttgtttgttttgtaaatttattatacttttgttatcttagctgatactatctatgatgcactacatacaga

SEQ ID NO: 29522 - DNA, 712 bp, Medicago truncatula
  Intron number 1 from transcript Medtr1g020690.1 (locus Med tr1g020690) derived from phytozome v7.0 (chr-ID MtChr1; po s 4590460 to 4591171)
acaaagattcatcaacttgttttcaaattcctcaggtatattataattagtttggatcctaagagatagttttttttttctttctattttcttgttgtcgttgctctctatactccaatactggttctattacttgttgtcgttgttgtctatagtagttttattacttgttgcactgaccttctttctattttctagttgtcgttgctatcaatttgattattttttctgttttgttcttttttattggctgcaccgttgtggtatttacttgttttatttttctttctgtttacttgagaaataagctcagtaggttccatgattttctttgtttggaatgcttatcagaaagagtgttagtgttatattaatgtaatgtagaagatctctacacttgtttttagtacttgatagtattccatctatttatagtcgacaaagaggaataagaatgtaggtactataatagggagtgacttcataattgccaataattaccatctgacacaggtatgggaccacttcagcctgaagaggagccagtttatgtagttagttttttagaattaataatagaaatattacttagtaactctctgttttcttcttttttgggaccatttttgttggctgcagagttgtgttcattttaggaatccacactctttgtttattctttgtttgactttttattgttaattctaggaat

SEQ ID NO: 29523 - DNA, 587 bp, Medicago truncatula
  Intron number 1 from transcript Medtr3g147720.1 (locus Med tr3g147720) derived from phytozome v7.0 (chr-ID MtChr3; po s 38312567 to 38313153 reverse strand)
caaataataaaaaataaataatactaatatcacaggtatgtatattttgtacactctctttaatctctttttctttctccagatttctcttctctttgtttgttttcccctaatctctttttctttctttctttccattttcgttcttcaattcttatattctgattttattccttaccaaaaatacacacatcagtgttgtgtgaacttctcttacataaacactagattttctcgagaaagatattttgcactagcgttgaaattttggtctatttttaattacagaatctcgagactcttgttacaacgttgtacaaacacaaacactacaccaatttatgtttttaccttaaaacaacaaaatgcacgtttagtttaaattacactccttagctcagcaattttttgttgttgttcttttttaagaagaaaaataaaatcacttagatgtaaatatttttttttcgtgaaattttatgcttatgtttgaaatttgagaattgggggattcagatttgtgatttagatgaggttatggttgtgttttacttcagatttgaagaaaattggaagtgattagaaga

SEQ ID NO: 29524 - DNA, 917 bp, Medicago truncatula
  Intron number 1 from transcript Medtr1g009460.1 (locus Med tr1g009460) derived from phytozome v7.0 (chr-ID MtChr1; po s 1278481 to 1279397 reverse strand)
cctctctatccccttcttctcaaaaacccaatttggtaatcactctctccttcaattcattcatgtttcacatcagcaaaagttttttattttttatttattttatataaacaattatttacacttgaatagaaggcaagcgggcaacaagctgcgccgctagacctttttggatggcaaaaccaatccttgtgaacacaattcatggacttaggagacatgacattgctatgcatgaccttttgaacctttttattttaagctaggaatgttgatttagttgacaaggttagacgttaatcacttttacgttgtgagctatgtatcgtacacatggacattggatacgacactaggtcctcatgactcatgaggtatgaagtacaaacatttgacacgacactgatacatagacaaatattgggttgaaaaaaatagaatgattgaatgtaaatacctatgtcggtgtcgtatcagtgtttgacgtaaacatgtcaaaaactagacacgtcatcttaaatgtaaagtgtccgtgctaagtagcttgtgagtctaatggcccaactcatcaaaacttttgttttgggtttcatatgggttccctccattggagataatcctattcgaggcagtgtcgggcaataaatgtgggcacgtctcccagctgagattttagcattagttagccctgatgtgggagactagttttttcaactagatcaacccccgtttgtaactcatcaaaacttttttaccataaaagtgaagattttaatcccataaagttttttctttgcctaaagattttaccaaattatgtgatgacttttgtgtacaatgtagttttagttaccagttatgcttcttagattcattatagagattttgataatcaatattttaattcaggttttgga

SEQ ID NO: 29525 - DNA, 896 bp, Medicago truncatula
  Intron number 2 from transcript Medtr3g020640.1 (locus Med tr3g020640) derived from phytozome v7.0 (chr-ID MtChr3; po s 4759775 to 4760670)
ctttgcttctcctgaaaataattattctgtttcaggtaggtaaacatcatgttcatgtagggtcttattgtctttttcctttttaacatttgataatatcaaagtgctgtttgatgtgtcattatgttctttttcttttttttattattccttttatatttataaaatggtattgtgatgtgtatgcttttttggcttttatcagaacaaaaaataatagtgtatgattagtccatttttaatataatataaggaaaatgaatctgaaaaatgaaatgtactagtctaaaatttagaacaaaacatttgacttgttaaatttcttctacttttgttgttagaaagagatatatgtcaaaattttgtcatggttattattgtcaaaactttgacagcattatttaccatgtgctttctaagagcacaaaattgggatctcactttaaacaaagtaaaatgtctcaaatatgttcacaaacaaattgatgattagtattttcctaaaataaattttcttaactttctagaatcatttactcattttagataactttaattcttgttcgtcattggtaaaacatatataggaaattgtttatttcacttatgaaattgctcaaaaactatcctataggcattaggcggttaattttggcttttctagcggcagtcaaactgtcattgcacacttttaagattgattcaatcattttttaagttggtttaagaagtgactgaatcaattttaaaagttttcaacaacagttacctgttgttggaaaagttcaacgattgccgcttgggtagtttttaaccaatttcaaaaggatccaaacatataagcttatctttttctaatctattgttttatgcattttcttcagctccactaaaga

SEQ ID NO: 29526 - DNA, 1040 bp, Medicago truncatula
  Intron number 2 from transcript Medtr3g151560.1 (locus Med tr3g151560) derived from phytozome v7.0 (chr-ID MtChr3; po s 40221912 to 40222951)
tgcttgtagtcaatcttggtttatcattatagaatttctttcagatgtgttttagttgcaagctgttaaagtattaagttgtgccaacattgtgtaatagcatagatttttggatttatttgaagtcattggactaggttaggtgtagatcaatttctgtagtaagtgcgaattcatgacaaggtttagattttgtggatggttttatctataagttggtatgaaattaaagttctatgttgatattttgtgttaaatgattgtgtataacattctgatttattattatgtacaatattggagaaacaaagattttttttttttattaaatatctagattttaaatcgggtgaactgatctaagttatatgattttaaatcgggtcaatatgaacctgaaatcagaaaaatctattgaacttttctaaatgcggccatccgatttaattaatataattttaaatcggtttaaccgatttataaacagattttaaatcgggtcaagtaaatagacttaaaagcaaaacacttattaaatcggccacctataagtcgggtggagaacaaatttaaaaagtctttttttttttttggtacaaaaaagtcttttttttacctgatttaaaaagtgttttctgcactagtgattacacaacttaagcagcaatcaatgcaccattctctctctcattaacttttatggtcttttctctgtcatattaattagcaattagtttttttctttctttcttaaatggaccatagaaacagatttcaacgttttttttaaggaagaaacatattttaacttactccccagaagaagaataaggaaatgcattgaatgaaaacgagaagatggagatcagtcttttgtgattctttcaattccttaaaaaaaaaaatcaatcaaaaataaaacttccattggaataattattgttgtgttgctggtggtgattcaatctaatatggtgttaaacaaggtttttccaaaaagcgcagcatcacagtccaattcggaaccgacgccgaaaact

SEQ ID NO: 29527 - DNA, 1000 bp, Medicago truncatula
  Intron number 3 from transcript Medtr3g136000.1 (locus Med tr3g136000) derived from phytozome v7.0 (chr-ID MtChr3; po s 34177778 to 34178777)
ggctagtgggtaagttatgttctttttcatctgttgattgtattgttagaggctttagttaagcatataggataacttgaatcgatttaacttaccttgtcatgcttgattaaattatcaagtgcatagcttttgttccaagaaacaagagattgtttgtcaaatagaatcgagtaaaagtgtgctcacataacttttgtctatttgttctcttttggttgtgtttgcaatatgactcaaatttcaggaattttgtcacaactaaccattttactgatgttaattttatactatgagtttttttttttttttgaagctatatggttttaaataaagagggaagagatacaattaagactttgatttattattgtggtttgtatgattgtttctttgatataaaagactaataatgaacccaaatgtatattattgtaagactccaaatccgtataaatatgcaaattaatcgtgaaagattgtttagcatataagataaaaaaactaatcctatgagataatctaacatactctaaaggtaatatcaagatgttttcaattttcatatattccaacagtttttatccctttgttgtgtcaatattatgagatcgcctttcacaagtataagttcaaagcctttaatgagttaattaatttgcttaatttaatttatggaacgcaattgcttgcatagttacaagtggatctatcaaacagtctggctagtttagacattgttttgttggcctatctcgacctggcccaacaaaactgttccactgacaaaacttcacctggcatggagaaattggttgtttaaacagacttgcccaaaatacatgtaaaacggaggcttgtccatttgatccatttttcttagttatactggcatttgaatttgtttcaggttgggttgaattatatcttcaactgtaattatatatatttattttgttttttccacggccttccacattccaccacaggaagcaggtgg

SEQ ID NO: 29528 - DNA, 856 bp, Medicago truncatula
  Intron number 1 from transcript Medtr2g077710.1 (locus Med tr2g077710) derived from phytozome v7.0 (chr-ID MtChr2; po s 17991722 to 17992577)
tggtaagatttctttttctttttctttattatgtcatttcgtttatacagtttttgcatattcttatagtgcaatcaaggtttaaaatcttgcatgacggtgacgatttgcaaggtgatttttgaattgtcgtcaactgttttttatgcaacttagatcaatcaaaattgggctgtggttgcgaagtcataagaaacatttatgacacgatttagctcaacatcacgaacatatattgttttagtttacttctaaagtgtaattaacttcaacaattaaccatagtatatctttctctatctgatttttgaaaccatatgtattttcattcattttcttgtcatttcattttggcgttcatattcaacatgtcaatcagaaaatgagagcaatattggagacaccaaatacacaaaattttcaggaccaagcaaaggagaaaacaaagtaaagtagattaacttcactatgctggttattcgtatgtaatataaatcttacctctaaaaaaactattttcttcaaacagtgtgaagggaaagtattgaaaaggacaagaccattcctacttctttatcacatatgaaggtactatgattttactccttgtccaattaccattgttgaaagattggacaacatctgaagttaccatattgtaaagattttatacccgtggatatatatgttaatgttttagtgaaaatcaaggaaaaatttcatcatgttgttgaccagacgaaacttttttaattgttttttttcagaatggttccacttcagctttaggttttacatctagacttgaaaccattgacaaaaccacctgaaagagtctttgaggtatagagaccac

SEQ ID NO: 29529 - DNA, 795 bp, Medicago truncatula
  Intron number 4 from transcript Medtr1g099460.1 (locus Med tr1g099460) derived from phytozome v7.0 (chr-ID MtChr1; po s 20322272 to 20323066)
tgttgacttgcttgagatagctgatttgaagaaaggtttgaatttatttacatatttaagtcacattgtttatttgttttaatattgtgaggtttggaatgtgattactgttcaggatgttgtaatcctcttgtttttgtaatcacagtagctgtttgttttcatggtagctagtcttttttggagctatatttgttagcttcaggttcaatgcatggtggcttttagggatcacacaaacaaacgcactaataataaatgttattctttttccagtacgctttccttctagttttctgcttccgtaactgttttatgtgtgttttaggttagctgttgcactaattcataatttgtacgatatctttctgccactatcccgaatctggacacggtcaagtattttgatatgatttaacatgttggttgggatattgcatattatatgcagaggccggggtccgaaccccggacaccccacttctccacatttaaaatgtgtgagctctggagctctagccactagactacttataaaaaaaatgatttaacatgttgcttgatgccttaaaatataatgtagaagagtataatttcttttagttaattgtgcatcatcattttcactgtatttgtgtttcccagctgaagctttttatgttagttacctatggaacactgttgtgattcaactgcagtagctaaggctttcaatagtttctacatttctggtcatatacctattctgaatgtatctaatattttgtcatgttgtttgatgtataataggagccg

SEQ ID NO: 29530 - DNA, 789 bp, Medicago truncatula
  Intron number 3 from transcript Medtr3g061510.1 (locus Med tr3g061510) derived from phytozome v7.0 (chr-ID MtChr3; po s 13767490 to 13768278)
ttaactcacacagaggtatttgggcattttagttaggtgggaacaaaacttgttgggagaagagcagaattccttgaaaagtactacccgagcccgaccaggcctgtattaaaagttacatttttttaaaaataaaatgtactatataatactcctataaataatatttttaatatttttcgcacactctcataacaaacaattgccaattttttaaatattgttattatgtcatgttaaaagggtcttcatctcatttctccctcttcacctcccatcagtcgttcgaatgagtcttacacttttttttccttttgaacattcatggagtcttttattttatttttctcactaatttgttcttttactttgcacatgatatttttaacaattactactcatcttattttaagaattttaactattcatgaaaccattattataggtaacaaaattttgtttgaattttaagataacaagaaacaaactttgtttttaaaaaaacaaacttttgattgcaaatataaaacattaataagttttatggaaaaagaagattaattgataaagggtataattgacaaataatactcttaaaataccaaaacaacatttaaataggaacgaaaaatccacattagaacgatgatgagtcatttatatgttattttaatatgctttttagtttagttttatttagattttatttagttttatattagtattatttcctttttagaatagtttactttaaaatgcaatttattatatttcagggaagaatattgg

SEQ ID NO: 29531 - DNA, 939 bp, Medicago truncatula
  Intron number 1 from transcript Medtr2g076880.1 (locus Med tr2g076880) derived from phytozome v7.0 (chr-ID MtChr2; po s 17514271 to 17515209 reverse strand)
ctggttatcttggcagtgttttagtggtgctttttttcctgttctgtttttgaattaggaattataggaggttttttatcgagtggtttggtggtgatgtgtccgctattttggcgctcatttgtactctttttcctccttgcgggttaagtgcatcctatgctagcctagcttaataatatttgctgtttcaaaaaaaatacaaaccacctttggtgggtcggaaaccggtgcgaaagccaaaaaaaaaaacaatacaaaccatgaaaaacaagccagaaaactgttacaatttgatgcagcaggctctgactcggtataaaaagttgaaaaccactaaatatgactgcgtgtctgaattatttcatcaaccactaaatgtgctgaaaatttaattttgcaaaaagatttgacgaagcaacatattcttggcactttttaatctttacccaattcactgaattccaattcaaagctcgaacacattgtactgcatatctgtttacctttgttgtcaatttgtaaaaatttgaaaaacagattgaatccattttacttcagatttggcgcctctaaaatgagtagagtgaggaaatcaatgattgatatttgaaatgtatattgtgtcaattcctaacacaggtcatagtcgctaatgtagtcgttcaacttttgcagattagattctatgttactggaaatgataccatgcgttgttgtatagtatgttgaaactatgaaagaatttgtgtgcttattagtgatgctaggcggtatgtgagtttagtcaatggatttggaataccgtttctttgttgtttattatgtcaaaactctgaaagaaattatgttatttgtgttccatcattagccattgatccttataatcgtgtatttactttaggttttgaaactgcgaggacagaaactcgaggtccg

SEQ ID NO: 29532 - DNA, 822 bp, Medicago truncatula
  Intron number 8 from transcript Medtr2g013660.2 (locus Med tr2g013660) derived from phytozome v7.0 (chr-ID MtChr2; po s 3126250 to 3127071)
caaaaagtgctccctaaaattcaacaggtacactatctcaaaatttcttgctatttgtgaaactaatattcattttgtgcttttatgctattgtgatgcactgaagttctatttaatgcatggtaggcattttatatccgaaggaagcgaattaggtttaggtgcatttcgataatctagtaggtaatattattgctcctcaatttccttggatcttatgtgatagggagtgtaccagacgtgtattagcaaccacagtcaaatggaggtggctggggttgaatgtcggcgacatgggttcatgataaatcgcataaaccatctgccatggtgttgcgcatttaagttacagtgcccatctcatggacgataaataatcctaaacataaatagcaacgattcattctgttaaattgcacataacttttaaattattgcatatcttttatgacatgcgtgatttatttgtcttctgttcattacggggtctgtcgaggatgctcacaaagtgtttataagccctggggaaattaattggattgttgtttgtagttaaatctgacatattgctggaaaatgacttttgtaaaccgtatcacataattatgctctgtttgctgaatattcattcttgtcacgattaatttgtttaatatactaatgttccttcttgttaaattttctttactattgagttcaggcttttcatttttctttatgctgttttgtctatacttattcagatatatctctgtgggtgtgttccttactctttattctattcagctaatacttcttctgtatcttgaatcctgtaggttt

SEQ ID NO: 29533 - DNA, 807 bp, Medicago truncatula
  Intron number 6 from transcript Medtr1g008710.1 (locus Med tr1g008710) derived from phytozome v7.0 (chr-ID MtChr1; po s 876901 to 877707 reverse strand)
ttgaagaagaactgtctcccattaggttattcgtttattcttttcttcatagttatatgaataaaaaatagagacgcatttgagatggtccataactcatttttatttggatgcaaaatttaacctccaagaaaaatttacagtatgtaactaaactaggcatcaaactctaggcgtacatcctacatagataactatcctacacttctggtttattgggtgggtaaccctaattcaagttaatcaaagattgtaacaaaagcaacttggcccttttcaaagaggcgtgtttgccgactctgaatgtgagaatgaatcaaagaaagcagagctttattgatgaaatctctgcaaatttatcaacggtatataggctctgagataaagcgatcaagatgcagaacaaagatggtaataaagatttgttttctcgcaccaggacatatcattgtctcgtctgtccttccgtttcactcttcagaaatcacacttacctcctaactaactacctcaacccccttttatttctaattacacatcagcattttgactgtctattagacaattactcgctgccactatgttccctattcttgtagcgtatcatatttaattggagacctataatagtgcacaagtaatttccagctctacccccccacccagagggaagtcagaaaaatgttaattatgggtatcatggagatcatgcatctcattaaataattttttttagaaaatgtactgtgccacacaatacataattatttattttgaattttagagaatctgattccaaccctgaaa

SEQ ID NO: 29534 - DNA, 795 bp, Medicago truncatula
  Intron number 1 from transcript Medtr2g095540.1 (locus Med tr2g095540) derived from phytozome v7.0 (chr-ID MtChr2; po s 21846843 to 21847637 reverse strand)
cttcaagggtcagcttgaagtgtgttcctttgtcctttatcattgttatgtctatcttgattttctgataatcctactatcataatatattatttacatagataaatatcaatcagcaaatgaaagcattagtgagaaagttgggtagcacttattacggaatagattgtcgagccccaccttatgtggtttagcaccggtaaaaagagtaaatcagaagaagtatattttaataagtgatgtgtgattagacatgatgtatgataggaattgtgatatgtttgatccataaagtcaatagtacctagtgagaaaacacttttgttatcattgttgtttgtctcaagcataggacacgattttgatgtagttcaattttctgacatagaagtgtttagtttcaaaatcagcagggctacaaatcgtcatgtcaatcaagctttagacaattgtatagtgttaaggaaaaaatcatttgaatttctactgaatggaagagcttgtactgttatgttctttttggttatgtcatttttagtggagcgtactgctattttacctcccattatgttccacttctaatatgtatgtactaacatggaatgaaacccatgttctattctagtctatttgaatctatctatcaaatgctacctcagagttgcttatttttgacgctgataacctttacccttaataaatcatttgaactttatactgtgaatttagtgcaaatttatttatttattttgcattgtgtgtgctaattatggacaatatattgtggcagctcag

SEQ ID NO: 29535 - DNA, 380 bp, Medicago truncatula
  Intron number 1 from transcript Medtr2g117400.1 (locus Med tr2g117400) derived from phytozome v7.0 (chr-ID MtChr2; po s 27572903 to 27573282)
gtggtgagggactgataccaccaaacacaaatcctttgaactttctctcttctcttcatcctctgtcaccactttttcttttcatctagttatatacacatagaggatacagacaacaagggcaagaagaagacagaagtggtgctgtagtattctactgcattttcagtaatgagagctcattgctctaaattctgtctatgctgtttgccctccaacacaaatccactcttcatcacttaactgatcatggtgaacgtatcttactagtcacactatctgggccaacgaaaagacaagaacaaaagcattttttatcagcgtccttttcaaattcaaattttgttttttaacgttgatttgattcattatggacatag

SEQ ID NO: 29536 - DNA, 611 bp, Medicago truncatula
  Intron number 1 from transcript Medtr1g025170.1 (locus Med tr1g025170) derived from phytozome v7.0 (chr-ID MtChr1; po s 6190189 to 6190799 reverse strand)
cttcgtgttagtttgttgccatttctgaactacagatgaattcaaaaaagcttgttagattatattgttgcctgcatattcttagagtttaccattcataatccttgttgtgcagctgttgatgacagtaaaattaaattctctccacatgatgaaactgacctacatacgtttgaatttaaggtcatatttcactatactcccaaacttttatagcctcttggcattcaaacaagatatgtcaatcactttcattttccccttcacaaaaaggacaagaagtttgacattgaacccctcttgttatgagtttttctctcgtctgcgatcaaccttttttggtactcttaacctccataactttgtccactcccctggttttctcaagtttacataaatcatatgaccatatttcactgatcaagtttcctcttggaacaacaacaccaaaaccagaatttagcttcactcattaatcaactcagttcttcatgatatcaaattggaagtttcctcgaagaattatttattaaagtttgttttttaggagatgttttcataagttctcctagagagtctcacaaaacaaggccaagagttgaaagggtttg

SEQ ID NO: 29537 - DNA, 928 bp, Medicago truncatula
  Intron number 1 from transcript Medtr2g104190.1 (locus Med tr2g104190) derived from phytozome v7.0 (chr-ID MtChr2; po s 24505299 to 24506226)
ggctaagagttccttcaaattggaacacccccttggttcgttcttttcacccttttgccaatttttgttttattaggttatattggatgatgcaattaatcgattttatgttttggttattagacattttatttgtttaattttatggtttggaatttgaaaaattgggttttgtcctattatgatcgttatgtgaattttgttccttaaagttgaaaatttggctaaaaaacatttgtaatatgaatccgatttttgtctgtccagcaaaagaatgattaaacggttattttggttcctaaatgtttgatgctccgtggttattgtccttgattgaatgtagattacaaatacatatagagagtgcccttgttgttaaattgttggtaattttatcgaccaaagtgactaatgaaagatacattccaggactaaactaaatatcgaaggaatggaaaatcagagaataaaaaagatacatttaggcatatttttgtaattttgatacgtttaaggactattgtgatagcgcctcacattggaggatgaaaatgattgtttacttgcaaaagatgaagttttgcaaaattaggtgcaaattgttgtgctttttctctatttagtttagttgtaagcaatgaattaaggtatattgcttgaatgcatatatactattttgtattgctttttcagttctgctatttggtttatctgatttgaatttcttatcaatgagagttagctgttgatgtatgaattatagcattggttttgtctttgtggggtgatatgattgtgtatccatcactaccaagttaccaacttatgctctctgatttgtactataaactttatgattcagagaggagacaggctgaagctgctcgcataagggagaagtatcccgatagaatttagaattccagta

SEQ ID NO: 29538 - DNA, 684 bp, Medicago truncatula
  Intron number 1 from transcript Medtr1g106120.1 (locus Med tr1g106120) derived from phytozome v7.0 (chr-ID MtChr1; po s 22034814 to 22035497)
tcactggtccttgtaaaggtggtttggtattaaaggtaatgtacctgcaatttttagttacataattacttaggcaaaactacacgagttgctttaatttaatttaatttaattaaagtttcaattcctttttctttcttttttttcatgtcaaataagtcatttatctttaaaaaaaatattaacattgttgaactaactttcattcttagtgtactttttgttacaaatttgtgtacaagatcattgcatgatggagtatattataaagaatgctttatcacttagcaccacaccacaccacaattagaccctcttcgttggcaacaatgatttcacaatctcagttaaaaagttacaaactaagaaagatcatgtcaattttgttgaattaaatattttaacaaccattataatgtaacttagatattctctttgaagaattgtaacaaccttaagtagttttttggtagcttatatacatagatgaaaaataaagtttggtcctacattgtgaacatttttaaacataaagtactaacttaacatacaaaaaaatactaatttaacacagaaaatataaaatgtatgcttgaaactttaaattaagtcaaagaaaactgtacttaattaaggttaaggttcagtaactgatgactttgctggtgtacatggagaaggttg

SEQ ID NO: 29539 - DNA, 249 bp, Medicago truncatula
  Intron number 1 from transcript AC235669_9.1 (locus AC2356 69_9) derived from phytozome v7.0 (chr-ID AC235669; pos 42 386 to 42634)
gagttggtatactttctctctcccctgtctctttccatctatatatattattgatttctataaatatttcaatttttcgttttagtcacattctaaattttttcttcaacttttgatcctctaaaattttacatcaccaatttttttccgcaatcatgtttagtacatcttaaaattctcctttgcaaaattttaattttgtttttgtcactagtttttgttgattattttactattattctagcagtg

SEQ ID NO: 29540 - DNA, 615 bp, Medicago truncatula
  Intron number 1 from transcript Medtr3g105350.1 (locus Med tr3g105350) derived from phytozome v7.0 (chr-ID MtChr3; po s 26360416 to 26361030 reverse strand)
attgtaagtatatccaatttacatactttttaaaaaaataatttttttaatgcatgtttagattctcgatgagtttaaattgtaaaccatcctaattttgaaaaagcaacattttggaacttcaacaaaaaaaaaaacatcatgattctaaacattcatgtgaataaatcatagttattagaaaaaagttaaattgcatacaaaaaatagattttgtttctaatttcatttcttccatctataattttcatttgaaattcattacaccatttgtcccacaataatcaatctatttgaccatttcacacaaatgaagaaaattatataaataaaagagataaagtaatacttttactaaattaccattattaagtattgttatatttatcattattataaatgcgaagtgaagtatattgaattgagtgaaatgcatttaatattaattagagtaaaatttaaaaatatataattaatatctccttcaaaatcaaaagtgatcgtcattttcaaacatttgtttatacaatagtattttctagagagatggaattaaacacattattcattccatttgcaggctgggttgattctaggtatctcatttgagctaaa

SEQ ID NO: 29541 - DNA, 960 bp, Medicago truncatula
  Intron number 1 from transcript Medtr1g149600.1 (locus Med tr1g149600) derived from phytozome v7.0 (chr-ID MtChr1; po s 33046911 to 33047870)
tgtgtgtagtcatttaaggtcttttgtgttcctgtttctttaaaactctttgatttggatcattttgatctaaaggttgtgatgagatcttgaggattaaatctggacctctggattcatccaacggtccagattaaatcttgctgagtttttttatttctttttggctaaaatatggttttggtccctgcaaatatgcctcgttttggttttagtccctgcaaaaaaaatttgttgtttttggtccctgcaaaatattttgtttttggaaatagtccctgcagggactatttccaaaaacaaaatattttgcagggacctttttcaaaatcaaaagattttgcagggactatttctctaataaatggttaagtcatcatgtgacacgtgtgcaaattatcacaaaattggagcgcaggggccaaaaccaaaatgagacatatttgcagggaccaaaaacaacaaattttttttgcaggggctaaaaccaaaacgagacatatttgcagggaccaaaaccatattttagcctttctttttttaactgttttttttttcttttttcttttttattttttttaaatactgtttttacacctttttttgacatttttgtgtttagaaaattcctaaaaatccttacatatttcttgatgtattttatttttattttttttctctcttctctttttctttttgattgtttctttttctttttcatgattaaaattgataaaaaaaatatgtgttttttttgtgtcaagaaataaagtgtaaaatattcctagaattgtgttataatgcttggcttgtatatgtccttatcatcatcacatcatagctcaaaatcaaacctcttttaaaaatggctatgatgagggaattataagtcatatgcatgtctaagtgttatacctaattctaggcatattttgtcattttatttcatttcattgctct

SEQ ID NO: 29542 - DNA, 968 bp, Medicago truncatula
  Intron number 2 from transcript Medtr1g149600.1 (locus Med tr1g149600) derived from phytozome v7.0 (chr-ID MtChr1; po s 33050025 to 33050992)
tctatgtatctttatgtcaatgtcctttttatttctttttttaaagagccaaaaaaaaaatcattatatacttattttggtaattaatattatgattagtgccctttaaaaaatagttttattctaaccaaagaaatggagtataaataaaaatcaaataaatggttcaaggtcagtgattttttccataaaaaaaaaaaaaagaaaaacaactagtgactttgagtatgtatgcaagcgtaaaccggatactcttacgtgcgtgtttttttatttaaaaaataaagaatttgactaaaatatcccttaaatttagttgacatacaataaataaatttggttttttagtaaaatataagtgggtgtggcttgctaacttgcatcttagtgttttgaggtgagtgtaaattagcagctcatatatatatatattgattgataattaaggtggtggtcccttcaaaaaaaaaaattggtggtggagaggtaagagtgagagcataacaaaactaagttgaaatgccacgtgatcaattatagaaaaatacaagaactagaaaagaaaataaacaagttttcttacagagaaaatataccgagcagtattgaaatggtcttgtgggtgttggtttgatgagttctctttgcacaaagagtgctcatactcaattgtggatgactgttttatcttagggacgatgagacaagaaagaactgttgcatcattgagacagagtcgcataaagttttaaagagagcggcctagcaacggttcagccagtatctaacagaattattttgtttgctttcaaattcgattatttgcaaaaataatttcaaatttccgcacaactgttctcctccccttgcgccgtcctactacccttgtctggtttctttttgtctcgcgtttcgttgtttgtttctgcccagatctgcttcagatctaggtggaagtggaggaggtt

SEQ ID NO: 29543 - DNA, 980 bp, Medicago truncatula
  Intron number 1 from transcript Medtr1g068220.1 (locus Med tr1g068220) derived from phytozome v7.0 (chr-ID MtChr1; po s 13532268 to 13533247 reverse strand)
cagtaacaaaggttcttcaaattctgaaaggtaacctttatgtaaaagctacagtattaatatttcttttctgtcataattcatgagctccataaatcaactaatacaattacatgataagaatgttcccgaaaaatacataaataaaattacaacttacagcataataaattgcaagtcccttaaatattttttatgttttccttagttccttaacatgtcttgggctgtcagttttgttcatagtattttctccctttgtcttatttaattgttactcttaggaaaaagagttgtctcaaatgatttgttactttagaatatcgagaattattaaaaaaaaattaactcccttgtatttcaacctatccaatattaattagtctttctacctaactcctgctaaatcaagggcattctagtgataaaagattattttactttgaaaatgagtataattaatgattttcttaagatatgtgtattaaattaaataagaaatagaatgagacaggtggagtattcatttttcttgcatggaatctcctgtaaatgcttcttttagtgcttagagaaaaagcgtattcagtgaactacttagcatttttcatgaatatagaaacaaatcacaatcagtttcagattctcaactattttaataggttcttcacattggtcagggaaaggtttattttaagccacaataatgtgttactttaggttatataaaactgccaatattcacttctgattctttaagaatactgatatatagtacatgttttttagtatttcatccaatatgccttaatatcatcgcttcagcagtagtatttttgaattgtcagaaaaagatcctgatcatgttttcttagctgaatttcagtcaaatcaaattggtcataattttttagatctgattactcttttatttaagaaatatgtatgaagaaaaatgctttatctgtatgcaggtattt

SEQ ID NO: 29544 - DNA, 652 bp, Medicago truncatula
  Intron number 1 from transcript Medtr4g005590.1 (locus Med tr4g005590) derived from phytozome v7.0 (chr-ID MtChr4; po s 324137 to 324788 reverse strand)
ggactaaaatactagtaaatgttagttagtatagaagaatatttatttcttatccacacaatcttcttcagctttcctttttatcttattcttagggcatgtttggataaacaatttaatttgcagctttataacaagatacaatgaagtcaaattgtttttgtttaagctttaagctgttttcgtaagctattttgaagaatttgtcaaaataaactgttaaatttaaacaacttttgaacataccatctcacctgattatgttagttaataagctaaaataaattaatccaaacatgcccttaatattatatgattagactgtcgcttatgaaacataatttaatcaaacatattttttattattaacattgagtttaatataatttaatcaatgcttcaacttgaggaattataagaaattgcgacaaaaaaaaaagcaggggctaaatataaaaattctgcttcaagaattatagcactattgtgtttctaaagatggattaaactgaaaaagatccgaattatcttattcaaaactctcttgtatactggtataatttttggtggtggaggatgttagataagagggaggcttatgatatcgagtcttgaaggctcgacacgggaaggagggaggccgtgtgaagga

SEQ ID NO: 29545 - DNA, 627 bp, Medicago truncatula
  Intron number 1 from transcript Medtr1g078920.1 (locus Med tr1g078920) derived from phytozome v7.0 (chr-ID MtChr1; po s 15659182 to 15659808)
cagattaaactatatcgtaagaattttccctttctttcttaattaatatattattatcgtttctctctctcttttgagttttgtttactcgtttaattcattctccattcttgcgttctaagttacggcctcctttctgttgttgtttaggatttatacgtacatatcttggaagtgtaacttactgaatgtatcgaaattacaaacgcatccacaaatgtctcttaaatcaattgttttggttcttgaatatgtttttaagtagtcggtttagttctccaatgtgtttttttttagtcaatttagtcaataaaattactaatgaaagaggcactagcaatgtgtttgcgaaacaatttttttcgcaaaattggaactcattgttaaatggagagagtattatttagattttagtgtcaacttgattatagaaggtggttctcaagtttgaattgatcatttagtggacaatagtagtttattattatttagcattgtttgttgttgttaccataagtatagggaagaaactttgttcactgattatcttcaataaactatttattaattaatatatggaattttttgacagcttttagccagtcgtcgagcccgcctagctcctct

SEQ ID NO: 29546 - DNA, 734 bp, Medicago truncatula
  Intron number 2 from transcript Medtr1g078920.1 (locus Med tr1g078920) derived from phytozome v7.0 (chr-ID MtChr1; po s 15660060 to 15660793)
gcctgcattcagggcatcttcaactccggttttgggtaatttatcatcatcattaggtggtaggttttctattggaaattttgatattttcccattttattaattgtcttgctcttggcaaactgtcttcatggaagcctttgaaaccagtttattggtagtgccaggtgatttgtgagaagcacaatagtttatcatattttttagtacttagctaatgcttttaggaagattttgtttttatgaaggatttgcaaacaaattgtctagctttggttactttgaatttactattattgtattttatttcttctttaatgaagttttcatgtgaattaatgggtgtgtgtatgtgtgctaaatcctgtttatcgatttgttccgcctttcccccacctccacagtccaccttgtaaattgttttcacgtacatgtaagtatatcgatatcatggggaacaacaagaacactatgaaggaatgtgatttctttcagctatatctacaatcctttttaaagacctaaagattacataacgactaagatatgtgttagctagtttatgtcatctttcttttgttaatatctaataatggtaatcattagcatcttttggcttagttttctcccttttttattgttattattatattttgcgttttctaattctatttgaaaaccgactctcttccttcccaggatcatcatccttttgccaggagccttcttttgga

SEQ ID NO: 29547 - DNA, 493 bp, Medicago truncatula
  Intron number 1 from transcript Medtr1g146450.1 (locus Med tr1g146450) derived from phytozome v7.0 (chr-ID MtChr1; po s 32373826 to 32374318)
acagtgtccaggttactcttttttctctttcatttcattaatcactgttttatttttttttactctttaattaaactcgtaggattaaccaataaaatttaatttttctattactttaatctttaaattaaccaaatttcaaaatagtatattaaaattgaaaatctgtaacagagttcaaatcccgacaaaggagataaatacttacataacaaactaattacaaatgaaaattacttttaatattttggcttggtcaatttagtagctgaaatgaaattgttcctgattgcttatgtggcagagaatttttcaagtttagatatcattttaaaatttcgtttactttaaagatataatttcctgactaacaatttcattactataatgaattgatatgcatagtgagtggtattggtatatagctgtggaatctttcattttttgactgagctgaatttcttgtctttggattgaataaaataataggaag

SEQ ID NO: 29548 - DNA, 223 bp, Medicago truncatula
  Intron number 1 from transcript Medtr1g013870.1 (locus Med tr1g013870) derived from phytozome v7.0 (chr-ID MtChr1; po s 2721973 to 2722195)
tcttgcgctggtaactaacttttaactaacttccttcatctttatatgtttgtattaaaaatttgaaaagaagacataaagtggaaagaaatttatgattttacatttgaaaaatatttttttttgtgaaaaaatgaaatggggttttgaattttgataattcattttgttccacaatgatttgaaataatgtgtatgtttgtgtgttgtagttttgttggtg

SEQ ID NO: 29549 - DNA, 522 bp, Medicago truncatula
  Intron number 1 from transcript Medtr1g116950.1 (locus Med tr1g116950) derived from phytozome v7.0 (chr-ID MtChr1; po s 24888966 to 24889487)
gtggttagtccctcaaggtatttattgtgcttttaaggtcttcaaacttgttgttgttgttgttgttgttattgttaaattcagataaaatttccaagtatttttcactgattaactttgcaaattaggggttttaaccgtttttttgttttagcagtgacttctttgcaagcaagattctctgtcaatttttttttaataagcgtctgtcaaacaatatctgttactgcgtggattatgttattttctttatatgcatgtatctggttttctgtaggagtacactcactaggattgttgttttaaccggaaggaatattctgatcttggaactttctaatcagtctgtgctttgatttataatcaaagagagcagtcttttcaaaaaattactgtttacaatggagaaaattgagaagtaggaacctttcaatctcataagataaatgttaaaagaaccgactagtcaagagtcagaggcactcaaaaaactaattcccctcactttgcttgttttaccag

SEQ ID NO: 29550 - DNA, 607 bp, Medicago truncatula
  Intron number 2 from transcript Medtr3g025770.1 (locus Med tr3g025770) derived from phytozome v7.0 (chr-ID MtChr3; po s 6793669 to 6794275)
tgaagcaagatttaaacctcatttgtcttctataagtacaattccttgcttgtacacaaattccttcaaataattttaattctgtttttcttttgttaactactccatcacataacatttgtaaaaatctgttttgagattaatgctaatttctacttattagtagtgaattctatataggcctctcacattgctcaacctctttaataagccgattgggagttatgctccgattcaaaaaacaacaatcaagtttcttcaaaaaaaaaaaaacatcaagattttatgtaatcgggagtcacgttccatctcaatgcaaaaattgtttttcattgttttgtttactttttgtcctttactagttacacttattgtacattattctcttattcgccgtgcttaataaagctgcctctgcttatatgtcagatcaaaaaaatgacatcatgactgtagtttgataaattaggcagtgcgatgttatgaaactcatggttttaatttttttttttcggttaaatgaaaatggtggtacgtatatacctaataatgattaaaaaatatgaatgcagggtggtgtaaagaaaagaggtagaagaataggagg

SEQ ID NO: 29551 - DNA, 1021 bp, Medicago truncatula
  Intron number 1 from transcript Medtr3g025760.1 (locus Med tr3g025760) derived from phytozome v7.0 (chr-ID MtChr3; po s 6791862 to 6792882)
cttttggttcgttatgctacgccgcatcattgcaattttccagcgtttcgtagtttgcagcgaaaaacgcttttggttcaaactgttttcgatcgtcagtttgaaagaattacaaaaatcgtgggttgcagaagtgattttttttggaaaagcaatttccgatgtgtttttctttctttacagaatcgcgtttgcagaattgatgatattgattgctcagttttcaatcagaaagagataagaaaagagcgttttagaaaatatttttttcgcgtttgtagcaaattatcctgtcacataagctgttttggaaaagcatgattcgcaaaaagcacgttttgagaaagccatctttttgttgaattcgcgtttgcagaaagctatttttgttggaaaagtgcttttgcagaaagctgttttgttgaaatgctaagaaagctatattcccacaaaggtatgattactttttaccaaatattattgaacaaggtgtagcaataatagcaaatgtattgtataacattagtattaattttcattctgttttaacaatgagactatgagagtttttaagtacaaatgatcaatttcacacaatcaccactgcagtatagttaattgatcttttgaagatttaccacgcaacaatctgtttatgaattgaagtaacgtttttaataggctattaagtcattgaattcaacaatttatgtggaatgaatgtgttttgtataatacactcaatgttagcaacatactcataaaagacttagtcaggattgtccctgggataatgatgcctattgatcattttataaaagaaatttcaaagataactactatgctctctgtaactaactcgccagaagccgtaactgcctcaccggggtaattttcagcaacggggttgaggcggttttatctgttgctcttgtagattttgaatcgttttagttttctctatcccatcctttggtttttcacagtttctcagaggttctctttggcgcgacagcgttca

SEQ ID NO: 29552 - DNA, 487 bp, Medicago truncatula
  Intron number 2 from transcript AC235665_41.1 (locus AC235 665_41) derived from phytozome v7.0 (chr-ID AC235665; pos 228334 to 228820)
tcagagtcaaaagtggaagtatatagttgggggtatgcgtccttttctttttgactgctataacattatatagaatgggttatggatggtctgaagtagtgttgctgtattagacttagctttaagatagtgtttttgttatacttgcacctatatcttggatatctgtaaaaatgtcagttcattcaatctagattgagttagcaatttgcctttattcatactcaagatgaactgaagtttgattttgggggcagaagagactggataatttattagattgtacgaaaactcattacgcagattgagttgctattcgggtcatataacgtttcaagttgttttcatgagccattcaatatctgatccattattgttcacatcgaaaatagtgttatgaaacatattatgattatgacaatattcttaaattttcaagtagatcttattttgatttttttcaggggtgactttggacggctgggtc

SEQ ID NO: 29553 - DNA, 894 bp, Medicago truncatula
  Intron number 2 from transcript Medtr3g147700.1 (locus Med tr3g147700) derived from phytozome v7.0 (chr-ID MtChr3; po s 38298202 to 38299095)
ctcaagaggctcaatttcgagctatatcaggtgaatataagatattctgttgcaaaacattaccttgaatatttttggcattttgtaattagcttagaaggaatgtgcattgtacataggtcctgtttggataaacaacttatttgcagcttatagcataagtgcttatcatgattagcaataagtgcttatctatatgaaatttctatatcaaaagataaaatagttaaattatttttgtatgagctataagctgttttcataagctatcttggagaacttttgaaaataacctgaacataacttacgaacaatgccataagctgttttcatcagctcacccaaacagtctctcaaaatttatgccagcagataagctcaaataaaccaatccaagcaggcccatagtatttaaatttcaaagagaatgtgatatttgtgatattggcaaaagtttatatcgcatttctatacaacatgcttttgtcctcaccaaaagatttgtattgataagcctgctattgtgttaggaaaggattgtaggataaatacagggttggcttgtgttaatctatatttttctagacatgtacaaatttatatccaatccaatgttacttgataagttgatattttgttctaaagttaaaagtgtgtgttgtgtgacctgtcgatcaaactgaatgtggttttatatcaggttggtttggctttaagtatgctggttgtgctattttgaagtttaaaatttcttactctccttcattcattcattcatcttttagagttgtattgataatctgatttctaagttttcatgcaaattgcattaaatatccttacaattcttcttatatgcaaatttgtaccagcgtaaagagctctgcaaacatc

SEQ ID NO: 29554 - DNA, 574 bp, Medicago truncatula
  Intron number 2 from transcript Medtr2g007880.1 (locus Med tr2g007880) derived from phytozome v7.0 (chr-ID MtChr2; po s 1298966 to 1299539 reverse strand)
aaatcaaacccaatcttcataaggtttcaaaggttgttttgtcttgccttgcaatcttgttctgatgttttgttttattttatttagagcctgtttgttatggattatgaaaatgtgattttgattagtttttggagatttttaagaaaagcagaagctgctctgtgttagtttactagaatgataattattgtgtttttctttcgtaaaattagttctgaaaatgattttctgagaagctactaaggggctgtttggattgattttttttttttatcatatgaaaaaatagcttatgcaaataaataatcttttatgttaattcatgagttctcactagctaaaactacgtcttcaccaattgttttttcataaactaccttgacaagcttctcaaatgaagcagtttttagatttttttgaaaatctgtaacaggattcaaaacttgtataagtgattattttgttttcaaaaagtgatttttcatgaaaaaagctgtaacaaacagcccatcgcatattttatgaatattttcttattgtactttttttttgttacagctattgcgtggag

SEQ ID NO: 29555 - DNA, 421 bp, Medicago truncatula
  Intron number 1 from transcript Medtr4g012880.1 (locus Med tr4g012880) derived from phytozome v7.0 (chr-ID MtChr4; po s 2379935 to 2380355 reverse strand)
gtgccttcgatatgaagttgggttctcatccgtatctacgaatctcgatggctttgtttgttgctagttcgctcaactttttagccgcctttggttcttgtgtttctaagttcctggattctttgttcaatacgaattaattttgcgttggatctaatgttaattcatatatgggcttgttgttcattgtcatttgttttagtgatcgccatgttggttttccttgaccaatgttgcgcggattgatgtctatgtgagttaatgctcacatgtgctgcgtttgagttattgttttcttaattcgagtacaatgtgtgtcatgtgttttgggcttgaagttgttgatgctttgtcaaaattcgtcacaggtttatttaatttttttttctttgcaatttggttttgcacttgtgttgcaggt

SEQ ID NO: 29556 - DNA, 928 bp, Medicago truncatula
  Intron number 4 from transcript Medtr3g024240.1 (locus Med tr3g024240) derived from phytozome v7.0 (chr-ID MtChr3; po s 5926936 to 5927863)
ttccttcctagttcgttagttcattgacagttataaaactatcaacaaatcataactaaattctgctgtgctcataattaatcattgtaatttgactattcagatcagaatttcatttcatgaatatatgaagaattgattttacgattctctcaattttctctcatttctattagatttcatgctggatagtgtcagatatttgtgagtctttaatttctgcatactgtgacactcttttttggtcatcttttccctagttttaaagtcaaacataattaaaataacatatagttttctcattgacacaatctttttatgaaaggtaagtaagctatattcccacctagatataactactttttaccaaatattcttaaacaagatgtagtaataatagcagctgtattttattacatttgtgttcgttttcatttggttttaacaatgacactaaaagaattttgaagtacaaatgatttatatatcaatttcacacaatcaccactgcagtatagttagttaattgaccttttgaagatttaccatgcaacaatcagtttatgaattgaaataacgtttttattaggctattaagtcgtcaaatttaacgatttataggaaatgaatgtgttttgtataatgcagtcataaagacttagtcaggattgtccctgagctgcatagctctctctgttgacattgcatcaaacagaaacagtggttgcctgtaaataaattctcatttcactctgctgtattcttgttatattccaaatatagatcatcaccataagttatgcatagcgtacaacttctagagcctctaatttcattgcttcattagcacaaattctttaataccatctcatggcattctttaaaaaaagaagggaaactcggtgtcggtgcactaaagctcccgcat

SEQ ID NO: 29557 - DNA, 601 bp, Medicago truncatula
  Intron number 1 from transcript Medtr2g014150.1 (locus Med tr2g014150) derived from phytozome v7.0 (chr-ID MtChr2; po s 3497006 to 3497606)
cttacctggtattagacgatcatcatttagtgcaagtcaatcatctagcaaacaagaggaagccccaaatggctatttttacatacaactttctgcttgaacagttgaacggcctagaattaaatccacactgcaaaaaagtcatatgaacgaaaacattacacagtaggattaactagttgagagaacttttgtgcatatcacaaatttcttttgtttattttgatgtttcctcttgagtggaaatcagaaatgagaaccgtacaaaactatattcttgtgaatttatcttttgttttttgtgtcacctgaaatacttgcattgcacaaacacaagttatacactgatttaatggacactgtctattacatacaacaaaactcgaaacaaacaagtctttacagaaaaacctttctttaacctgtaatgattttcaacttgatagacacatgagagaattttgtaaacaagtcagtagaagttaaattaagatgatgaaatgaatttatgacatgataaaacgtcttagttcttaacaattaattattaagttggattcttcttgtaatgtttgaagaagttagaggagaccataatcac

SEQ ID NO: 29558 - DNA, 787 bp, Medicago truncatula
  Intron number 3 from transcript Medtr3g139020.1 (locus Med tr3g139020) derived from phytozome v7.0 (chr-ID MtChr3; po s 35652123 to 35652909 reverse strand)
atgtatgtttatcttttccagaaaattactttaggcttcttttgttcattggtgattttactttcatgatttggagtattgatcgctttataggcctcatagactttttaactttagagcttatgatcaatttatttttgaattatatcatctggcttaattaggctctgtttgaataaacaacttaattaagctcttatcatataagagcttacatataagttatttctataataaaatataaaataaagtcttcaaataagctataagttgttttaataagccataacggagagtttgtggaaattagctgaaaacactttaagaacatgtcataagttgtttatataagctctctcaagcaatctcacaaatgtttgtataagtaaataagttcaaataagccgattcaaacaggcccttatttttattcattaatcatgggacataaaaaataacatagttaaatacttgtggccttttccttggcaccatgatctccatggccatccatctttactcaaaatggatttgcaagcacagtactgttattctctgggggtgtcagggatctgtgcactgtcaggaatctgtattttgactggttttttgttcaccattttcttttgaagtgtgagatattagtctgaaaagttacttaatttgattaatagcttaaattttttattgttctgatttgcgactcatgaatcttgcttataaacttgaatatcattgacttggagtaattagaataatatctttcattctttctatcatataggta

SEQ ID NO: 29559 - DNA, 508 bp, Medicago truncatula
  Intron number 1 from transcript Medtr2g126870.1 (locus Med tr2g126870) derived from phytozome v7.0 (chr-ID MtChr2; po s 30832843 to 30833350 reverse strand)
acttaatcttattgcaacaagaggtggaaatatgaaacctaacgaaacagccgttgttgcacctgtgaacttaaaagctgtccagatatttggaatcatggtacatccaatatatatgagaaccaacagaattgcggtcagccctagcgacctcttcctactttctgataaaggaggtgatccctcaaataccaaagtatccactgtttggcgtagtgagaaatgaataacagggaaaacaagtatcaaatggagaatgtagccgactcgaacgatatagttcaaggccgaactaaaccggattccaagatccttatcaaaattagtcaaaacatcagactcggtatcatccccgaataataggtaaccggacagcgccgttgcagcataaaccatgatgcacaaaattgtagtgacccttcctactcggttcatcttctgcggtgacctaccttcaagctcgttgtatatcggctgcacattaaaatgacaaacatatgcatttgtc

SEQ ID NO: 29560 - DNA, 611 bp, Medicago truncatula
  Intron number 1 from transcript Medtr1g093010.1 (locus Med tr1g093010) derived from phytozome v7.0 (chr-ID MtChr1; po s 18790629 to 18791239 reverse strand)
gaatttcgatcctttctctgtctctcagttgttaggtatttttttttttctttctatttttgaatggagatgcttttgaatgttaatctttgtgtagtgcattgcagtgatttgaatacttatttatctgattgtatcgtgattctttgttcgattgttgtattttgctgaatttggtttattagggtttagtgcttgtgacgactttgtgcttattacaactcaaatttttcgtatacagtatgatctgcttatgtaatttatattttttagggcccgtttggatggagcttattttgaactttgcaaaacagcttatgcaaataaataagcgtttatttattatttataaacatgttaaggtagtttatgaaaaaacaacttatgaagataaaattttaattagtgaaaacttatgaattaatataaaagtctatttatttgcataagcttaaaataagctcaatccaaacgggttaatcaactttgaaactgagttaatccatttcatagtttttttaagaagttaaattagaccatctaaattgacaccaagaaattgaacctaagaccttgatgaggagcacactctaaggtactaaaccaacaaa

SEQ ID NO: 29561 - DNA, 733 bp, Medicago truncatula
  Intron number 2 from transcript Medtr3g005340.1 (locus Med tr3g005340) derived from phytozome v7.0 (chr-ID MtChr3; po s 248434 to 249166 reverse strand)
ctttgcagactgttcaagaagtaatacagcctcaggtatattttgaaattcttttgagccagtttggattagcctctagttcattgaagattccccattaaaattcattgcttacaaattttttcatataagcttgtaagtgttgatggagaagtttatcaaaactgcctctaactccattcctgtagagtcctagtacaaatttataatgaacattgaacaatgctgaactaatttccaaacgagtaatgacatgtgtacacctattttgcgacaacttttgggacaaccttcttcttctctctttttatttcaaaacatgtaataagttgtttctataagctctgccaaacagtctaacaattgtttatgccagtagataaactcaaataaggcaatccaaacacgcccttgatcatgcatatcattctgatggcttattttcgattttctttgggatgggatgatattctggattttacaaaataaagagatttgcatttagggaacagtaaggaaaaaggcgagagactcttaaatttcaaaagggttttgattatgggatatctataacttatgaaaaatataacatggttgtcttttgacttaaattgttcattcatgattcatgtcccgaggttccttttctagtaactttgataatgacattgttaaaggttgtggttaatttaattgatttatgattaacagagacaaacaaaattggcccaag

SEQ ID NO: 29562 - DNA, 912 bp, Medicago truncatula
  Intron number 1 from transcript Medtr1g065900.1 (locus Med tr1g065900) derived from phytozome v7.0 (chr-ID MtChr1; po s 13252951 to 13253862 reverse strand)
ttggtaagcatattcataatttgaatcatcaatatacatgacatttatctttttctgtatatacatatttacaagttttaataaaatttatttgttttttttttaatataaagaatgtgttgtcaattcgagttggcacgagtagttaaaaaactcatttagagactttagtttcttaagagggagcgtttgaatctcgcctgaagttgttaaaatctctttaggtgctcaatccttttcgaagagaaaattagaaacattatattgatgtgagcgaactgtaatcagatccattgactaaggttttggtagtgaattttatagataggaagaaaaaaaatgctatacactaaagttggcatctaggttctctgacgtagattaatgatgggcgaagttaattggtcaatgttttgtacccaaaacattgtatctaaaaaatgtcctcctcgaggagatttcttggcatctagggtttattcaggagctacaaccgtgcgaaactgtttgcagttttggcgtgtataataatcccatgggattcttgctagtttcaacccctgcatgtcatcggtaatgtcagaatatttatttgtattaaattatttgtcattttatttattacttttatttttcgaatgttacccttatttattaaagtacttgcaagtatatggctgacaaataatacatgaagtgcaaagatattctagtctcaacataatagtttccattgaaaattggcttaagtaatcatattcttaagaagcgtgcccatctcaaatgagacacataacatgagacacaaggagtaattagtcacaaggaatttcaacattaagaaatacaagaatttctgaacttttcttttatgcagactggtttttctgttagtcgaagtctcttgggata

SEQ ID NO: 29563 - DNA, 580 bp, Medicago truncatula
  Intron number 2 from transcript Medtr3g135820.1 (locus Med tr3g135820) derived from phytozome v7.0 (chr-ID MtChr3; po s 34090670 to 34091249)
aagaaccatatcagaaggcagtggaacggtattatagttaatatttgttcaaacaatagttttttcccttgttatttacttacttttaaaaaaaatatatataggggagggagaatattatcttttttaaatagttaaaggttttttcttcccttgttgagtttcattgcatttgcattagaatgttgcagacttggtgcaatcaaaacaaacaagatgataccctattagttgttcatggttattgtaatttagcttcattcaaggaaatctggactttgcattgtttaaacattgacttattcctgattcagttttgtcaacttcaaatcagattgtcattgtcaaacctttttttaaaatgtggtgttacttgaaatagacaatggggaataatagaaaaagcccatactttcttaatcacaaccatttcctgtaccaagtttctgaatattcttgcatttttttgttcaatagttttagtttaagggccttcaataattacaagtattatttctttagcaatgtacatgtgacaatgtttttcttttgctacagactaattggtgaaggaaagcta

SEQ ID NO: 29564 - DNA, 510 bp, Medicago truncatula
  Intron number 2 from transcript Medtr2g021270.1 (locus Med tr2g021270) derived from phytozome v7.0 (chr-ID MtChr2; po s 5387408 to 5387917 reverse strand)
ctaggtaggtaaagataaggtctatttccctgtaagtgacaactgaatagaaagaagaaccgtagttaagaattaaaatggattatgtcatcctagactcaaggttttaaattgctatcatattttttttttgttgtcatctttaatatagtgaagtaaaatatggttgatattatgacaattgtacttgtgcgtaatttcagcggcgtttgccacttcatagacagaaaaagaaaaggattaaaaactttgacatcacatattcacggtcaaggtgcacgaccataatttaaataaaaacgttaaatgttacgaaacattgtcatcccaaaactgataagtgttttgatttttaaactcgcatcgtgtgtgtgaatagaaatgctttgttaccacaaattattgaaaagaaaagaaagaaaaatatactttggtggtcaatgatgcagttacttatgtttgtgtttgagtgcagtcacacttggtttggaaaatttggcaactttctcg

SEQ ID NO: 29565 - DNA, 699 bp, Medicago truncatula
  Intron number 2 from transcript Medtr3g025520.1 (locus Med tr3g025520) derived from phytozome v7.0 (chr-ID MtChr3; po s 6619032 to 6619730 reverse strand)
gtactgctaagaggtttttacttaactacatcatatgttgtgtacaacacactaattattaccttattacaaagtaaatgaaggtgtgttcgacactgacatgacacaaacacatgcggttacatttcaatcactttcatttgctcaaatcgttaccagtgtcgtgtctagtgtatatattgcatatgtatcaactatgaataggattagtcatggccatgtttacttgttgctaaggttttaaattgcatttttcttttgtgttaaccctcggttcttaggggaagggggccttggtaattcagagttcggctttgaggtaagtataacccggccaagaattgttccacctaggaatcgaactcacgttctcccaaacaatttgtcctttggtggaactcattaaccacttgagcccaatcacttggttagattgcattttctgtcataactgaaattgcgactgaaacctaagttttttgtgtttcccgccaatgcaattgcagccacatctgcggcagtgactgcaatcgcaatttaaaacctttaccatttcttgaaatatgcttgtaacccactaaactttttattatttccatttgttttattattacgtaaaatttcagagtggctgccttctctaaaacaaacttcaactatgaccttttctctcccttatgagcagatacataataggtg

SEQ ID NO: 29566 - DNA, 750 bp, Medicago truncatula
  Intron number 2 from transcript Medtr3g026530.1 (locus Med tr3g026530) derived from phytozome v7.0 (chr-ID MtChr3; po s 7159486 to 7160235)
cccttcatcattcagggagcatctttaattacgaggtagtactttttacatccttttttaataagaatccattcaataatatctattatctgatatgaaaaaaagtttgtttgtattatgatattcaataaagagagtagtttgtttgtatgagcattgtcttctcataatttttaaaacctttgtattggaatccattcaataacgcaagttatttgaatttttctatttaactctcaaacataggtaaaatatgcatcatccaaccatgacaagaacaaccaatttaataattgtgtgaatgtgttgaattgtgattgtaggaaatccaaatccattgacaacatggaatggagtagcttgatatattctgctcattatttctgctatgtttgcattgtttagtttatgatattcactaaacacaacacaatttaagaatgtctacttaattaccactatatttagctgttgaagagtgtcacttgcatttttgtgtgttagctttaattttattagtttttctttctatggttattttgagagtaataaatcacatggatggtattttttctacgacatctttaattgtatatgcttaatctttcataatttaatgtgctaaaatgtcaatatgttaaatttgatagttgatttatataaataaacatgatttggtttaatgctcttgcaatgatgcctttttctgttatagggtcaatttgaaattgtatccttatttgggaattt

SEQ ID NO: 29567 - DNA, 827 bp, Medicago truncatula
  Intron number 1 from transcript AC235675_4.1 (locus AC2356 75_4) derived from phytozome v7.0 (chr-ID AC235675; pos 12 388 to 13214 reverse strand)
gaagtgcaccaccttgtgacaaggtcctgtgtcggtgctgcacgcaacggtagtcttgtggtgactctatggatcaagttgcacgtgtgttctgttttagtcttttctttactgtgatagaatgatcacaaattcataattctgaatttcttagaagacgacttggaattagcaatgagcgtgtcatgttttggttgtaaaacagtatcatacgtatatatgaaaatgcatataagttttgttctaaaagaaattccaaaaattaatgtcagaaattggtccatttttcttataattagaacaaaaagaaaaacataattgtttcttataaaaagaactgttacttgatgttaggattttctcaatggttttggaaactgtttttcttttcagcacttaggatgacttaaagaattttgatctgacataatgttgaaagacattgcaaactgtctgaagttcggatgtaaattaacattacttagaggcagcgattggcgaattgagattgatttcttggaagtaaccattagttttttaatcttaaaattgaaggttactaagtggttgttcaacaagtacttgtgcagtgttgcgagttgttatcttgatgtaatgtcatagaactaagaagtggctgctcagacttggttgagcgattaaattaccatagttcctggaaatttgttgtgtttgccacatttctgttgtttttcatgttctatcctattttaaaatgtaaactttgtttatgctttaacagcttctcttgctttttgcattttattaaaggcaccaccacctgcttatccatatccggatcccta

SEQ ID NO: 29568 - DNA, 601 bp, Medicago truncatula
  Intron number 2 from transcript Medtr2g029800.1 (locus Med tr2g029800) derived from phytozome v7.0 (chr-ID MtChr2; po s 8008428 to 8009028 reverse strand)
ctgttggaggtaatttctttgaaattatattgttttttttggttttcaatttatttttgttcttgttaattgttgtcatcttaatttatttatttctcttatgtttctcatttttgaaatatgtgttaattctttgtatgcattttctgcattgtttgttggattcaaaaccagctttaattcaattaatactatgatgaattctttgaagattttgaattgtggtcctaaagcattatctaaaacagacaaatgtcattttggatatggattttacaaaaagaaaatgaaattaaacaatctgcatcatcttttatttaaggtcttataaatgtttttctatttgtaatttctgtatcattatatgcaaatgtatcaaatatccttctagtcttgctggtttttccttttaattatgttgtttatatatatagaaaaatctgtttcatgatttcattttgtgaattccaagtactaattgaatcattaatcattccaatgttcaatgtcttgtaacttgaccattggtttattttgaaactttacctaacttgtgggaaatttagaaactctggagccagaagtgaagattctgagcctt

SEQ ID NO: 29569 - DNA, 593 bp, Medicago truncatula
  Intron number 1 from transcript Medtr2g037770.1 (locus Med tr2g037770) derived from phytozome v7.0 (chr-ID MtChr2; po s 10427664 to 10428256 reverse strand)
tggtggtgtgagtgcaagtgattatcaagctcatgatgttatttggattcaaaacttgatcctacttctgaaattatgggactttgtggtattgctattgctgcaaaatcaccatatcataaattgtgtaccagggttgattgtgtctgataattaatttccatggtagtattttgaaactcatgatgttttttgcctttggtctgttgagtcaattaggctgaaacatgttgaaattgtagctcaaaactaatgttatcctcatccccaggtttccttttggagtcttcaacttgaacttccttgcaactaaaacctaggtgcttcataactcacattttctacggggcaccccatttttcttagattttggaactttcttaagttgaactattggacattagggaatttgttgtatgtttactctcttgtccatttgaagttttaaatttcattaattgctcatggagttctaataatgttcgatgtctcttttcattattatgttcttaaaaattcgtgtgagtaaacttaacatcacaaattccattggtacagtatttggttgtggacattgagcttggagaaggaat

SEQ ID NO: 29570 - DNA, 496 bp, Medicago truncatula
  Intron number 1 from transcript Medtr3g020290.1 (locus Med tr3g020290) derived from phytozome v7.0 (chr-ID MtChr3; po s 4571474 to 4571969)
aggccactttgctttctgttgatttcaaaaccaaggtatgtttgtatatccccctctttttgctgcaatccatgacatgcttttattttccattcaactaccttcaatcatatagttatgatatatttggattgccaaagctatattgatcaaagaaattctgtgtatgtgacgaaactttgttattcaaatgcctctttaaattttataaagagaaataactttcccgatcctttggcatacatgattgttcaactaaaactattctagagatgtatcttctatgaaaacgattgatgaatacagcttccctttccttaattttttttctttctagcatccaattaatttagaaccataatatatgaaaattagactaacaaaaagttaatttgttctattgaaatacttccaaaaagaatttatttgttctatagtggatttttaaatttgatttggttttaaaggctgttgaagtgactaaagaagggaattt

SEQ ID NO: 29571 - DNA, 1039 bp, Medicago truncatula
  Intron number 1 from transcript Medtr2g103650.1 (locus Med tr2g103650) derived from phytozome v7.0 (chr-ID MtChr2; po s 24195993 to 24197031)
ttgttactttcaagatcggtcatctcttctctctcgtattcctctctctctctctctctctctctctctctctctctctctcttccttttttcaattattgatcattctattggatctgatatatgatatcaaaatattgttattgtttttttttgtgatatatgattggttctattttcactgttatgtaagaaatttgatatttttaatgaatttttttatgaccctttatcgttgattgaatgattaggaaccagggttggataattaacaacccaaagagtggaagtttgtttttttgttagaaactttaaatgggtttttcgcttttaatgttgggtgtgggtagaaactaggaaaaatgagcttttatgtgtcatggtttttgtcaaattggggaaaaattgtgacctaatatgtatttaaataaggtatagtttaagttggattgtacaaatgatcaatgtaatgttttggttttttttggaggatgtgtaaataaggacttttacactatcaatcaataatgcttgttaaattgttaaaaacatttgtctttaatcattactacttataaaattacatatatgattagaaacaacaacattaaagagagagttggggtagcaccgatgggagaaaagattgtggagactaggcttaggtggttgggcatatattgcagagagaagacttgtagattatgtattaaggagagtagattagatggaaggtagtcagatcactagtggtagaggaagacctgaaaaaactataagagaaactattaggacagatctagagattaatgagttggatcgaaatatggcatatgatagaacattatggtgtagtttgatccatgtagctaatcccacttagtgggataaggctctctcggttgttgttgttgtcgacaatataaaacttttgacacaaatagtgtctcaaaattaaactcgtgtaaatattccaaagctcatgatattgtacttgttattaggatattcgcactattggggcggtagctggtcttgc

SEQ ID NO: 29572 - DNA, 1022 bp, Medicago truncatula
  Intron number 3 from transcript Medtr1g076500.1 (locus Med tr1g076500) derived from phytozome v7.0 (chr-ID MtChr1; po s 15273114 to 15274135 reverse strand)
agataactcccattcctgtaagtttagcttcttggtttatctattgaatcaataaatatgtactcggctccttttgatttctattttgtaccaaaaaactttttcactatgttctatttttgttaagatatagtgttgataatcttcattcgaaactacattttcagctaattacattatttaatactttatagtaaatcattaatttttttgtgaattgtaactgaattttcaaagcatttattcctgtggcaaaccaatcttcatacacaccaatgaaagaatgcagcttcttgtttgaatcttccactctgatagagagtggtcattttaggagggggtggagtggaaatatagaagatactaagtgcatgtttgatatcagattctgttttcatcacaagaatttcatgttgttttcattctatttcttgttttcaaatatttgcacaaaaaaagcgaaaattgaaaatgctattttcactttttcctgtgcaaatcattgaaaacgagaaaaatgctgaagacaaggtggcatttgttatcaaaaagaaaacaaagttttttttttctttttcaaatcaaagaaaccgtaacattcttttattttcgtcattcttgcacaacggcttctccaaacactcagttttagtatttctatgtgttgttatatgttttttatggtggttcatttctttcagttggttagaccattagttagtttgttagaaaggattagaaagagatatagataagggaaaatcagattaggaggatttattcagtacattttatagtttgtaaatgaaaaaagagatccatcataaagtggaaacccttggggaagagacctctgacatttctcctacgtactactctcaatcaattatttcaataaaatcacctttttttgtctttctatcaatttgtctgatattacaaaattcatttctcttgttaagttgtatgatctgcttaaaaatttctattttatcctcttgtgtagcacattccaaaaatca

SEQ ID NO: 29573 - DNA, 880 bp, Medicago truncatula
  Intron number 1 from transcript Medtr1g076500.1 (locus Med tr1g076500) derived from phytozome v7.0 (chr-ID MtChr1; po s 15274734 to 15275613 reverse strand)
tttaagccctgatttcatcttctttaaggttcttcttcttcttctttttttttaatgtttattgtattggatcatttgattttgttaattgtattccatgtttgtttgattcagttttttttttggatcatatttgggttgaagtgatattttttttttttgttgaattggtatgactttgttttgtaaattataaattgggttgatttgggtttcaattatggttcatcttgttggtagatagattcatagatatggatatggattagtttgtgcatgttgtctttttcataacatagatattatcaggactgaagttagttgatgataattaaggattattgttgtcaatcgcccatcgcggaaaattgtattttgttcaaattcagctgcaccatagtggtatagctgcaattcgacaatattttataccaaataacatatcgcaaaacaacagtgatttcatcaaattcccctatgctatagtgctttagagtcgctattgatccaggtaataactgggctggagatgttgattgtgatttttcttttggtcattgatggaagttttggtaggaagacttgtttgaagttagaaatacgccgcaaacagttctgatgtcaattttagtgaattatacaggacgaacaaatactgttatttgccgtctcttttttgagatttctattctttgattaatttctgtcctcactgatactctctaatttgacacgcaatatttggtttgatgtatttcatgttgtcatatgttcatgattttgtatatcattgtcttaattacagccaaagctccaatctctaaatgcacaacttacttttgcaggcgtggaatcatttcaaagaagacttttggattca

SEQ ID NO: 29574 - DNA, 254 bp, Medicago truncatula
  Intron number 1 from transcript Medtr3g148320.1 (locus Med tr3g148320) derived from phytozome v7.0 (chr-ID MtChr3; po s 38597369 to 38597622 reverse strand)
acacattgggtatgtatcatcacaaataatcaattaacatttttgttttttgacactaacacaacaccaacacatttaattatatttaatcactttgattttttttcaaattattatcaaaggtcgctgtgtgtccattgtttgcgcatatatacatattttttcttcatcatttgattgatggattaattttggtttgtgcatacgtaaataatgcagtgttcaagtatccccctacaggaaattccacggtt

SEQ ID NO: 29575 - DNA, 955 bp, Medicago truncatula
  Intron number 3 from transcript CU179634_11.1 (locus CU179 634_11) derived from phytozome v7.0 (chr-ID CU179634; pos 45574 to 46528)
tctacgtggcctggttgttggctgttgtgctgcaggtatgttatgtaacaacataactctacgagggacctcacaagttgttctgtcctgaattagaatttatatgtggaaaaacactagttttggacaaaaaattaattgggaaataaagatagcttgctccttgactctcaatcaagtcagcctgttttttgactagctaaattctgctaaagtcagatcttgagatttcaaatccattccaatcttcttttgcacctttcaactcaactcataacaatttccttatcaaagttaaaagtagatatacatagcctaattatttgctgctctgcaattctgtgccgaatgagtctctcgctgtttaaaatgtgtgtgttggttggagtattttcttcagatatgatactattttactttaattaataaacagtgaaaggaattgtgagatttcaccttaaaggtgttggagatggaaagaaagcaaattgattatttttcacacacttttagaatcaatgtgaaagcaaattgattatttttcacacacttttagaatcaatgtgatgctttacctcggaatgagacagtatcataccttgtttctgtgtaatctttaatgtacgcagtttatttctttagttacaagtacattttgggtcctggaaatgagaaaaattgttactgttcacagaggtgctgtttgcgctcaccttgactagttcacctcatatctgctgctgcctaccagcggtaaatatgcccggcaactttgtccaccaattcttagacagatgggaattaatcaactaacttattttaaataattcatgaagaaataggatggacaaggatgcaaaagagctctcatgtacaatgagatgagttgcttctctagtattcaagtaatataaaattaccattttactttgcatggacaggaaacttgggcaac

SEQ ID NO: 29576 - DNA, 705 bp, Medicago truncatula
  Intron number 1 from transcript Medtr3g135880.1 (locus Med tr3g135880) derived from phytozome v7.0 (chr-ID MtChr3; po s 34131737 to 34132441)
gaagttttcagaccacagagaaacaaacaacccaggtgggtttttttttcttcctctttttctttttcactttcccactctttggtttttcatcactgattatgcttttgtactgtatctattttcattttggttttgaaacttgtctgtgatttttctcacatgcatgttgcatttggggttaattgattatctttcagttctctctatttggtaaaaaagcttttttttttttttttttttttttgttgttgtttctcttcactttattttttatttaattttagtttcataatagtagttcatacattttgttttctgggtttctttaatcatgcagtcagtgacttatggtttttctgtgttgaagttttaatctttttttagatgtgatgtgatgaaatgaaactgtccatgtaacatttttttttgttgattctgaatcaattgattgttcaatttaatgtgtgttgggttgtttaatttaaaatcaattgatttttctgggtttattgaatcatgcaatcaatacctatgatttttctgggttaaagttttaatttttttttcttaattgtgatgaaactatttatgtaacaatgtttgatgattcagaatcaattgattatttcaatttaatgtgtatcgggttgtttgaattatgtaagaaaaaatgggtttttgatgaacaggtgtgttgagata

SEQ ID NO: 29577 - DNA, 800 bp, Medicago truncatula
  Intron number 4 from transcript Medtr2g076690.1 (locus Med tr2g076690) derived from phytozome v7.0 (chr-ID MtChr2; po s 17385530 to 17386329)
ctaaaaaagtaaatgcaactaaaactaaaccttatgagccttattaatttgtgggactttatatctgcaatgaacataatggagttagatgtctcggaacggttattggctacaatcctgaaaaaaataacaagctcatagtatgtttttctttaacttaaacacttacttggtttatctcattataattatcatttttttgttgttgcaacgtatgctttctttaataaagtatgaatgatgttgtgttttaaaatataaaagtaccacatttacttctaattacaagtcataaaaatcaaaagcattaaaaaaaatgaactcatttgttattttaaccttttgaaaaattacaagacattagatacaatttctaatattcaaaagaaaacaattttaaatgagggtgatactaggatattattagaaaaccgaataaatattttctcttgatattcaggtgggataaataatttgagataagaaaaatattttgaatgctaggcttatagtgtcgcatataaagtaataattagtgcacgtccatttataacgacgcatataaagtaccaattttttcactaaagtattcaaaatcactaacatttttatattactaattactctaccaaattctctataatgtagataaatttctataaattttgacacacacacacacatatatatatatagcttattaaattcattaaagttgttgattctactctctatatataaatatagttagctaaattactaatcgacaattatctggaagtaggttcagtataaagaag

SEQ ID NO: 29578 - DNA, 409 bp, Medicago truncatula
  Intron number 3 from transcript Medtr3g102540.1 (locus Med tr3g102540) derived from phytozome v7.0 (chr-ID MtChr3; po s 25009650 to 25010058 reverse strand)
gtttacgaaaaggtaacatagaacatgaaaatattactgactgatattttgctgcgtagcttcctagcctcatgttaaggaaccagtttctgttcttctgcaaatacggatgctgttgaatttgaaatttttattttaccgcttcagtctatctttcaaccagaaggatacttcagaagtacaggttatcgagcagtcgatgaaacattatttaaagcgactagaatcctatatgaaggtgtatgattcactggttcaggtctgttgcgatagtctcaaattcattcggacaatatttgcaatttgttgactatgttttctcatctcaccgactgagcagcttactatgcttgctttgacaaactgaaattcagcacattcaaagtttgcacggcttgaaagaagattg

SEQ ID NO: 29579 - DNA, 985 bp, Medicago truncatula
  Intron number 2 from transcript Medtr1g086690.2 (locus Med tr1g086690) derived from phytozome v7.0 (chr-ID MtChr1; po s 17229894 to 17230878)
ctgtctatagatctttgctcgatatttttccacaggtatacatacctattgagttatgattgtagattattcttttattgattttattttaattattatattattatacctttttgatgctctgtgatcaagttttttcaatttgttttctggttctgaatttgttaacttgaattgggttttctaatttcaaattaatcaaataaaatcaggtttataaatttaactttctagttaaggattacgtgcacagcgttgctactttcaaatccaagttccttatgtttttagtcccatgtagttatagcgttttcaaaatttgttgcttatagtctttattgggccacctgccgcgctttcaaataaaattggtttttgaatttgcaaggatgaatctaaacataaatacttacttgtagagattcaaaccaaaaacactgtaattgtaggatcaaaaatcatattttgatctaaattctgttataactattactttcttattgagggatggttatatcaatcatggattattagttgctatatatgacatttgagattgtcgaattttcaaggaacttaattgtaaattgatctgcttttgggaaaataactatagttaatatactggagtcattaggtgatgatcaaatggctcatattcagagtttgtgttttgaacttcaattactgagattagaatgtgaactattcaaggattttgttccactgactctagtcattgtattattttctgactgtaacaaattttggtttgtagctgatgtatgaatactaatttgatgctaatatttaaccacaaataagtcttcagaaatacattctattgcttcaatacaaatatattaaggagatattacaccaggaatgtggctggcctgttactgatatatgcttcttgctgatgcctgtttctttctttgtctgtacaggttgattcgaggttgttgagggcagtggctattga

SEQ ID NO: 29580 - DNA, 268 bp, Medicago truncatula
  Intron number 1 from transcript Medtr3g076170.1 (locus Med tr3g076170) derived from phytozome v7.0 (chr-ID MtChr3; po s 17557791 to 17558058 reverse strand)
ggttggtaccaaactcatctttaattttttgcctggtaagtataccttctctctctaggtcacggccctcgctgggattttgattgcatcgcctgttttttaaatgccctaaaacatcgttgtaaaataatcattaatgtcatttatgttaatagcgatttacttctttcgaatttttcttttgaaaagaatataatataaatattttaattaatcaaattattatatcttaggtatagccccagtaaattatcaaagggaggtgatc

SEQ ID NO: 29581 - DNA, 552 bp, Medicago truncatula
  Intron number 9 from transcript Medtr1g071500.1 (locus Med tr1g071500) derived from phytozome v7.0 (chr-ID MtChr1; po s 14429824 to 14430375 reverse strand)
agaagtttcttgggtttggctggttattaccgcaggtttatagaaggatttttgaagttagcacttccattgactcagttgacctgtaagggtaaatctttcgtgtgggatgctcagtgtgagaatagttttaatgaattgaagcgaaggttgacgactgctcctattttgattttaccgaagccggaagaaccttttgttgtttattgtgatgcgtccaagttgggcttaggtggtgttttgatgcaagatggcaaagtggtagcgtatgcttctaggcagttgaggattcatgaaaagaattatcctacacatgatttggagttggctacggtggtttttgttttgaaaatttggagacattatttgtaaggttccagatttgaggtgtttagtgatcataaaagtttgaaatatctgattgatcaaaaagaattgaatatgaggcagagaagatggcttgagttgttgaaggattatgattttgggttgaattaccatccgagtaaagctaatgtggttgcagatgctttgagtaggaagacgttgcac

SEQ ID NO: 29582 - DNA, 280 bp, Medicago truncatula
  Intron number 3 from transcript Medtr1g071500.1 (locus Med tr1g071500) derived from phytozome v7.0 (chr-ID MtChr1; po s 14435537 to 14435816 reverse strand)
ccttgtcggaacgatactcttttcatactacttcggtaagaccgtgcacttgcgtttttatctcatcaacctgttggtgtttgattaaatctttaaagatattttatgtttaggacatgtgccacaatttattggaagttgttttaatgttgaaaatattctgctacaatgaattattatgtttttccgaagactattatttaataaatagtattttattctatttatggatttttgaaaagcagtgtaacattccgtttgttgattactctgattattt

SEQ ID NO: 29583 - DNA, 821 bp, Medicago truncatula; identical to SEQ ID NO: 27995
  Intron number 2 from transcript Medtr1g043480.1 (locus Med tr1g043480) derived from phytozome v7.0 (chr-ID MtChr1; po s 10248892 to 10249712)

SEQ ID NO: 29584 - DNA, 733 bp, Medicago truncatula
  Intron number 1 from transcript Medtr1g107060.1 (locus Med tr1g107060) derived from phytozome v7.0 (chr-ID MtChr1; po s 22505886 to 22506618)
cctgctactcttgctcaggtatagtggcttaagaacaattaaacaaacaagatatttattcgaagataaaagaaagaataatgctagcaacacgctctttaacacacactttccaactctctctttgattggttaaaattcacatgggtcccctcaaatttatacgggacccacttgatttggtggcaactatgtgaatttcaaccaatcaaaaagactgtgtgagaaagtgcgttgctagctctcctttaaaagaaataacttcaactggatattaattttaagaaaaagtgttggtcattttaaatgttactataatcttttaaaaattatgaactttttttatatcttgtttggtttgagaaaatgtttcttgttatcactattaatttcaaacttgccctctgttttcatttagtttccagttcttcaaagatttttataaaaaatagtgaacacaacttttttggttttcttgttcacggtgcctgcacaaatctttgaaagcaggtaataaagttgaaatcaatgggcagacttccaattacaagtgaaaatgagagattaaaacagaaaacacactctcaaaccaaagagtcccttacattttggaaaagattaaggaattttttgatgtatcatttattatggacggttcactgaaataatggttaacttatgtattttgcctgcatcctgtatcagtactcaaaaattatccagaacccttctt

SEQ ID NO: 29585 - DNA, 583 bp, Medicago truncatula
  Intron number 1 from transcript Medtr3g149480.1 (locus Med tr3g149480) derived from phytozome v7.0 (chr-ID MtChr3; po s 39118986 to 39119568)
ttcgcgaactcgaacgagagaataaagcgtatcaggtcagtgtttacaatttcatcatgcattgtttgtttcagatctggatcgtgttcttagattttcatttctaacaattttaatgagattatcatgcagttttgtgaaaagtttcttagattttgaatcggaagtgttttgcatttttgaaatcaaagaatttaatctagggatttggatactgaaatttgtaatttcaaaatgttgttagcttaagtatgttttagttcatttatttattatataagtgattaattttcatttctaacaagtatatgagcttaattaacatcagtatttgcgtaaagtttcattataggttttttagattttgcattgaagcattttgaattttctaaagggaatgacttgattttggaatttctatactgagactgagattgctaatttcaaaattttgtaaaattaatttaccatgaacgaataatttatggtaagaattaagtattaatcgtagaagagggattgtttattggtgctgtgtaatattgcagactgagatagaggaattgaaaaaacaaaaggggaa

SEQ ID NO: 29586 - DNA, 829 bp, Medicago truncatula
  Intron number 2 from transcript Medtr1g121110.1 (locus Med tr1g121110) derived from phytozome v7.0 (chr-ID MtChr1; po s 26314862 to 26315690 reverse strand)
ttttagtcatatttattgcagtctttcagagtaaagtttgatcactgtcatattcatatttttttttttctttattcttagcttatccaattcctatgcatttttcatttaatgtgtatcactatcatggttgaaatgaagcatgtgaattgcacactgtactagtaactacaaaagataaaagaggtgaattctaaatgttaatatttctgactgctatctatctggcatgactgtctgattctgctaattttgtattgtgtactctgctgattttgtgctgtaaaactgtaaatagtgtttaacaacactcgatgaaaagtagaataacttagattttgatttacttttgttgctgcaaactgatggaagaaaggcagctagagtgcttgtggttttcacccacttttacagtttgtgatgcttaaacaccgaacaaaaattatcatttgttgataggaagaacatgtttgtgtatatgtatattctcagcattgaagtcttttttaacaattcgatcagaaagatcataatccaaattttaacttctattcttcttgcatatagactctacaaccaattgtgtaagtttaacttattattattggtagttatatatatttttttttacaaacatcacataattgttatagaaatcttttgtttgatactctttgtaaggatgcagatgaaatgctgcagctgtttcttttgagcatgtatttgatgttcaactgttgttgtttcaattttttctaacactaattgtataatgaaattttcttctcatacaggttttgtctctcaccgtacaagtttcgttactgaa

SEQ ID NO: 29587 - DNA, 750 bp, Medicago truncatula
  Intron number 1 from transcript Medtr2g018800.1 (locus Med tr2g018800) derived from phytozome v7.0 (chr-ID MtChr2; po s 5036507 to 5037256)
gctctacccttcacttcttcaggaccttctctctggtatgtaattgtcaaactcctagatgcatttttgtttctttttgcttcattttggagtgacacatacttgcttctagattttgggttggtgtcagaatttaatggattttgtttctcactatcttgctctatttgctacttgcaaattgagcatacttatttgttgttatctgtgtcctgtttggttaatcacagtatgattttttggtggaagagatactgtagtgtaattgttttaatttctcttataagtttctgctgactactatatttatagtcttggttagtttcaatttgtgcaatttaatgcttgatttttttagtgttgcaaactttgaccccctccaattagctttatgtttttcagattataatgtatttgtgattcagattgtaatgtatatgtttcctacatagactaatgtttgaataagttggtccaagactttcatttgattatctgaataaagaagcaggctagtaatcagaatatgagtttcaaaatatgttgttgttctctgtgtcttttctttgttttgtacagattgcttatgattaatatttaggattacagttcttgtaaaacaaaaaaaggttaaggattacagtactacttactatagctgtattgatgaaatgatttgctaattgtttttatatatttattaaactattcccagggataatttaatctgaaagaagttgcttcacatca

SEQ ID NO: 29588 - DNA, 901 bp, Medicago truncatula
  Intron number 3 from transcript Medtr2g005820.1 (locus Med tr2g005820) derived from phytozome v7.0 (chr-ID MtChr2; po s 420600 to 421500 reverse strand)
gacctttcgtctaaaccatataaagttcttaagtaagtattttcttgtagttaattgaaagcaattctaaaactcatgacatcctgttttgccagagtgccctatgcagattaaattatacaccatgtgctatcaatgcaaatgaacgttaacttttctgttgatcttgcatcatggttatcattttcattatttaaatccttaatttcacaactgccacctttttttttttactttgtttgtttccaattccaaagttctgtataagaaaccttgacttttttttattgttttaattattgtgtacaaatctttgaaaaatgaggaactgattgctgtatagttatcgccattgcagagtttaggggagggttctgtctattgtattttacctttatttgaatgataaaaaaggtcgttatacatgtgacctttcagcggaaggtcacacaactgcgagttcaactgttgagacaagattaaagaaacgaaattaaaagccaacatatttgtaattagaattagaagtaaacacaaatgagaacataaacctagcaagccttaagtttgactttgtatttatttttcctttaatttatggtgagattagtgttgtcttctaaatacgtctatctatattcattttggatttagactgtacccatgtcccgggaaacactattctttgaaaaaagactactaaaaaggagtgggaacaaaccaagtgagcatgctttgcctgcatcttggtgaacttctccagtacctaaaaaatgagctgttgtttatttgattggcagcaatttggataagaaacatcactgtctgcatttgatgtcatgccacagattttttataacaagttgatgtcattgcaggtgtcatccaaaagatattaaca

SEQ ID NO: 29589 - DNA, 912 bp, Medicago truncatula
  Intron number 1 from transcript Medtr1g108440.1 (locus Med tr1g108440) derived from phytozome v7.0 (chr-ID MtChr1; po s 23143709 to 23144620 reverse strand)
agttggtatatttttatattaagctacccctaataatatatatttggctaccccaagtttgcttttagatggattgatttttttttctttttgattttacttacttttcaattgaactttgaattacttgatccaatcttctaagaaccgaagggtgaacataaaaaaatatacatattctctgattgataatgaaaatatgacgacaacaacaataatctataactttctccaacaaaagaaattctatcactattggcccaaacataatttattaaccctttattataacaaacccattattaacactttgaattttttttctttacagctaaacaaagtaattagtaaattatagctttaagtgcattttataaagtacattttatgtacgtaatagtcattgagaatttattttttcttattggttaaatttactagtttaaaaaaaaaaatctttatatgtggccacctcataaaaatattactagcttcgccgctgctgacattattttattttctttctgttctccgactatttcttctttagtcaacatgttttttactagtactttattggttattttcttctccacatcagattaaccatcaaagaaatatctcattttttttaattaatatgaatttgatatagcaaaatgaatgaaaagacaaaaaataaatgagaaatcaatttgaatttgataatttattttttagaatgaaattaaagaagattgaataccattatgaatagattaaaataaatatcaatgatttaatttgtaaaaactttggaaggaatgactactaaactcacaccaaaaaaggggttacgatgtgctgaaaattgtttaattctcgtgctgttgaagagattttggaaaaaaaaaatcttttcctaagtcataa

SEQ ID NO: 29590 - DNA, 662 bp, Medicago truncatula
  Intron number 3 from transcript Medtr2g030310.1 (locus Med tr2g030310) derived from phytozome v7.0 (chr-ID MtChr2; po s 8372517 to 8373178 reverse strand)
gggaagtttgtaattttggttagtaatctctttagactcaattatatgctaaagtaactatatacataactaagggtatatatggagtgagttatttgaacttatatatctattggcataaacatttgtgaaattgtttgggagaatgtatgaaacaacttatgacattttcataatttcagcttatgaaaataggttatagtttatacaaaaacagtttgactttattttataatttattataaaaatagcttatacataagtgctcacatgataaacgactgtgatataagctacaaaataagttatttatccatacaaggcctaagaatagtggtcagtttcattttatttatataatcaaaaaatatttcatttcaaaattattctctttttgtttaattttgtacgaaaacttattttattgaagagtatctggagtactatcattaaataaggtgaaatttgtagattatgcttatattttggtcaccaaatacgactacattttctttcttcttgtatttgagtagagtaatagtaagtagggcatagagagaaatgtataagttggcagcacttggcatctttgattataattagtttgaatgttcttcaaaatttcaggtagcacacaaaaatccttgcgtttgaattctgtg

SEQ ID NO: 29591 - DNA, 758 bp, Medicago truncatula
  Intron number 1 from transcript Medtr4g021710.1 (locus Med tr4g021710) derived from phytozome v7.0 (chr-ID MtChr4; po s 4229039 to 4229796 reverse strand)
aactatttcaagttagtgtcatagcggcgtaagtaagctaatgttttttatcacgattataacttcatgacacgggtagtagaatagtacgaccacatgttttataaaatatggaggttgtgttttaattaattttaaaagagaatgtgatctgtttgatatcttaaaatctataatttagtaggagtttagaaagtttcaaataccaattactagaaacttgcttgaaaccttaaaataactagtatttttgtttgcacatttttgcgtgctcgctcgcgaacaaacactcattttaaactcaactaattaataattaccattcatttatttattttttccaaaagtataaaatttattgttcatggaattttgattgatttctgcccattgttagcttaattacaagtattcaacatcaaatcctcatcaaccctgattattaaaccaaattttgttttattacatggggatgatagcaaaaacaaaaaaagaaaaaaaatgtggatgctattcagttttacatatttttttggagggacatatgataaaaacagaagaaacctttggcattagaccatatttgcaaataccaacaattgaacaacaaacccactaaacaagtacccattcttcaatcctagccattgaattgcaatttttttttttcttcctgttttaagttggtacatttgggacttataatgatgataaggacaatagtgaatatgtttagtgataagattaagcaaaatatt

SEQ ID NO: 29592 - DNA, 925 bp, Medicago truncatula
  Intron number 1 from transcript Medtr3g025650.1 (locus Med tr3g025650) derived from phytozome v7.0 (chr-ID MtChr3; po s 6727839 to 6728763 reverse strand)
ttccagctgtgtttacagttatcggtgatgcattttcttcataggttttgtgcctgttctatggcttttgatcagtgttttttagactattaaattctccagttagttgtttatagtggtgtgtttgttctgctggtttttttggtgtattgttttgtttattggaaaggtgctttggacttgtttgtactccctgcctcgtcttttccacctgcacttctgtagtgttgtatattttttctcgtatttttggtacgtgttggtcttgggaccgagtagttccaattaatattttacatgtcaagctaattcattgatgcaatttcactttcctgctcgtggtctgcatttgagaatgattgaagactatctcagaacaatcatagtgaatgttatatactacttaatgcacagctctggttagatggcataagttcacaagaatgcttaaagcttgttgaatcgataaaactgtagaagtacttgtaaattcaagaggccatacttcgtgatggtaatttcataatcttcatcacaagttaaacataagccattaaaagtagcatacaggccatacattttccccaaggcatacaaattgatttagtttgatgatagacaattagttgtaatcaaattgaagtcattatgatttgtatgttatgtcactaatttaaatgggttgatacagatctcatttctaccacatgacatctcgttttgatttcttttctgttttatgagattttgcaatttccattggcaatcatagaagtgcaatttcttttctgtttaaaataggattttggatatttacctttacagttcaatccgatagttagcaaacttgaagatgttgatttgaaagcttgccactgatgatgacatgacttagtctcacacgcaggactaagacggggttcac

SEQ ID NO: 29593 - DNA, 920 bp, Medicago truncatula
  Intron number 1 from transcript Medtr3g103860.1 (locus Med tr3g103860) derived from phytozome v7.0 (chr-ID MtChr3; po s 25663493 to 25664412 reverse strand)
agctgagcaagaaatgtgcatacagacagatggctagattaatactagcagtagtcataatctttatccgcacacattgctcatgtaacatgttatgccgtgtcggcaagtagttcgtgattttagacaaacagtgcttgaaattctgataaatttgtctgtcgtatgggatagacaaaataaacggtcccagtattatttatctgtcacatggaactttcttccctgcttgaaccgtctaaatattggaccaagtggcggaaaaatcttccacatgaatctcgaaatcaaattacctcttgcttacatttttcactcattaaaaaactaaactaattaaacaacgaatgatttttgaaaattcacttcttattttaattaagaaaaaatatcacatgcaaaattaattttggttcccaaataattattaaaaataaaacctcaattttaatgacatgcttccatataataatttatttatttatttataattgacaattacgatctaaaatattccgttattattacgcattattttaggagttatttttacatatagtaagatacacatattatctgctttagcttaactaaggtcttggactcgatgaatctagctttttaaactatttttttagtatacgttaaaaaatacatcatagtctttaaatcaatattaaaagagtgtttgacatcttttttaatttctttttcttttttaaagttttctagtgagagaaacttcaacttctctctaaactttctttctccttcgttcattgaggagtggtggttttaggtcattttttgacctagaatcattcctctatatttttttcccttttcctttttattttttatttttttgtgatttcgtcgtctaagtacgacgttgtgttgttcgtcgtcttgtgcggcgt

SEQ ID NO: 29594 - DNA, 546 bp, Medicago truncatula
  Intron number 5 from transcript Medtr1g047440.1 (locus Med tr1g047440) derived from phytozome v7.0 (chr-ID MtChr1; po s 11419381 to 11419926)
tttttttgaaggatatgtatggtgttggcttctaacagatttgggtttggttttattcgttatagagcaagtttagcgttttgtttttggttgtgtttgaagtcctcttttattatggttttttctagctctgctttggtggtttttttgtacttccttgcgtgtatccggatactccttgttgttataattatattaaagatggtgatgcttttttttgtttactttcttgcgtgtatctagatactccttgttgttatattatagttatattaaagagagtgctgaaatgatgagatttcctttcatcataaaggtttaactattagcattatcttactgggaaagtagtcatggtccttaaaaatttgatttatgtttgtttgaagagaaagttgttggttggacgagactcacaactcaaccaatgagaagttttttcttaagttgtgaatgattctcctattagatcaatttaaataatatttccacttggttcttttatttacaggttgtcatcgtttctgtgtcactagactcccttga

SEQ ID NO: 29595 - DNA, 353 bp, Medicago truncatula
  Intron number 1 from transcript Medtr3g016700.1 (locus Med tr3g016700) derived from phytozome v7.0 (chr-ID MtChr3; po s 3302675 to 3303027)
ggtatacattgagacaacacctgtattgccaggtagctttgattacataagcactcctgctttaccattataccccttttgcttgtacaaaaaaaaaatatagtctccctatttagttaggtcatgattgtgtttgagatgtttagaacagcaaaaaataagtttacaaaaatggagagaaagagataaagggtgcatagaaaattcactaatcagtgatatataaattttctttgcttatcatttacggcttgcaatagtggccatataagctaatgaactcttgaatgcttatagaggagtttgttgaagttatagggttctatataaagaaagaagtgaaagagaaaaaa

SEQ ID NO: 29596 - DNA, 757 bp, Medicago truncatula
  Intron number 1 from transcript Medtr2g038640.1 (locus Med tr2g038640) derived from phytozome v7.0 (chr-ID MtChr2; po s 10833917 to 10834673 reverse strand)
gatcaatacttgagtgtggtatactattttattgtttggattttttttttaaatgatggaatagaagagaaaatgataacatttattccatctcatttttattgtttctcttcctttctatctaaattttgttctttatacaagtggcacacaattgaaagtaagcaagtggaaaaagaaaaaaaaataggagtgatatggcagttttttttttttgggtcaagtactttgacttcacaaatgaagatactgattggtttgtacttaagacttaagaggacagtgatatggtagtttgagagtagtatatagataagggtcatgttaacaaatactctaaggatattagttaaaaaatctaattaagaaatgaataaattgaaattttggagttgagaaaatttgtttctttaacaaatgcctaaggcactctttttaagtttcagattttgatagcatcctaaaaacatgagctagtatcctctattacccctcgcaagatgaaaattggtaaatgtttaccaaattcagcttgggcaaattgaggagagatttggtgaagaaatctgctaattgttcttgagaactcgcgtgtagaagaccaacttgaactttaccaaatatctacatacgctagaagaataatgaaagagagtatgttttgtgaccatggagtgatctgaatgagcttgtttgtatcaaaatagtctaacccctcaatttgattgtatcccttagccaccaagagggtttccaa

SEQ ID NO: 29597 - DNA, 739 bp, Medicago truncatula
  Intron number 2 from transcript Medtr2g113960.1 (locus Med tr2g113960) derived from phytozome v7.0 (chr-ID MtChr2; po s 26828153 to 26828891)
gggtaatatatctatggtcatttactttgaagctatatatatatatatatatgttcttgaaataatcattagtaaatgcaattttttagttaattgcatctttggattctcttagcgagagactaattaagtgcgtgtttggttatgtggcgacaaaaaatgattttgaatgaattgattctgagttgaattatttatggttagatacgttcacgtaaaagtggcctgattaatcaattctaggctaaaaatcaattatagagacaaaagctccaaactgtagcatcaagttagaattaattttagagactacatcaattctacaagagaacatccgaatgggaacatatgaaaattgatttttctagaatcaattttgattttctaaattttaacttttgcaaaattagagccaaacatacactaaagtgattgaacaaacataaaattttatgtcatatgcttgagtcttctttggtagaattattttgaatttcggaacgaattttaatttgaacttcagttttatagcttttctgatatattttatcatgcaactcacttttacatgaatgtattttagataaatcaatatatattcaacttatttttaacaaaatcagtttttgttaaggtagagtcatagaagcactaaatcttcaatttaaatgtatgatcattctacttaagagtgctaacattctatggatcaggttccggaggaaaagtcagtccattg

SEQ ID NO: 29598 - DNA, 578 bp, Medicago truncatula
  Intron number 2 from transcript Medtr1g020470.1 (locus Med tr1g020470) derived from phytozome v7.0 (chr-ID MtChr1; po s 4483108 to 4483685 reverse strand)
gagcttttgcaaaaggtgcatttttttcttctgatggaagctaacagaagttcatgaataaatttaacttttcaatccacaactcagcttatcatgaattacatttgatttttgtttgattcttatacatacctacaccatgctgaaaattttctgcattttataacataatcatgcagaatatctaaactgcaggtctctatttaagtagtacatttaagtgtttaaattctaaatcaatgcaaaacacgtttctttgaaattattaaaagggaaaacaattagaaccattagacttcactgtcatgcctttttcataaagtagattcaccaaaattttaaaaattgctacggatgaaggagattcatcaagtcggttcacactatttcaatccttgacagcaactccaacccgatacgttttctctttggtaaaatggtatgaatcaattttttattatttattgcttttgagtttttgaaaaaaaattaatatatcatgaaaaattgattgaaattttaattgttgcgttgtttcattattcttgatttgcagcttggattggaggtaattcctc

SEQ ID NO: 29599 - DNA, 565 bp, Medicago truncatula
  Intron number 1 from transcript Medtr1g020470.1 (locus Med tr1g020470) derived from phytozome v7.0 (chr-ID MtChr1; po s 4483688 to 4484252 reverse strand)
ccacttttttcctttcgactattccttaacttcaggtagttttctttttaattttttgaaccgtttggtttctggaatttgttgatctaacaatgtggttttataaagtttgttcctttaactttatataatactttagggtgctgaaaaacgtgtcatttgtttaataatgtgaggtctgttttatgatcattattactggatatggataagaaaacgatattaagtatatgtttggttccacatttggagaaagcaaaattgatattgatttcgacaagtagaattgattttgcatccggaatggattctaactttttttaacaatagaattattctaacatgaagctataatttagagtgttgcctctacaattgatttttatccttgaatttattgttcaagccactattacatgaatatattcaaacatactctttacatttaactcttttttggccggaatcaatttaatcaaaattaattttagacatttaagtattgatttgttgaatggtcttttgtttagacatttaagtattgatttgctgaaatttcttctga

SEQ ID NO: 29600 - DNA, 532 bp, Medicago truncatula
  Intron number 1 from transcript Medtr2g056490.1 (locus Med tr2g056490) derived from phytozome v7.0 (chr-ID MtChr2; po s 15464049 to 15464580)
ggtgagtgaattttctcttttggtatgcctttggtgttcaaagttgttctttaacgaaacatattataaactttaagttgttctttaatgaaacttggtgctgggagaagaatgccaaaaattttagttattcacttggggtattccatgatatttctctatttgcatatttgaaattctgcatttaacctatgatattagagtatgtttaacaaaataataaattacagggcatagtttgtcttggcttggttgattaggatatgaaacttggttgccttatatattggttttttttttaaatgtgtgtgagtcctatatgttgaggtgtgttgatgaaggaagaaatcaaaagtatattgtgagaattagagttgggtttgaatatgctttagttgagtttatgaattatatttgagtcttcataagttattgatttttgaagtacgatttgtgttgcaaatgaaacataatatttggactatttggtcaaaaagcatcttctgtggctcaagtggtaactactttacaa

SEQ ID NO: 29601 - DNA, 496 bp, Medicago truncatula
  Intron number 1 from transcript Medtr1g092830.3 (locus Med tr1g092830) derived from phytozome v7.0 (chr-ID MtChr1; po s 18694951 to 18695446 reverse strand)
gaatttcgatcctttctctgtctctcagttgttaggtatttttttttttctttctatttttgaatggagatgcttttgaatgttaatctttgtgtagtgcattgcagtgatttgaatacttatttatctgattgtatcgtgattctttgttcgattgttgtattttgctgaatttggtttattagggtttagtgcttgtgacgactttgtgcttattacaactcaaatttttcgtatacagtatgatctgcttatgtaatttatattttttagggcccgtttggatggagcttattttgaactttgcaaaacagcttatgcaaataaataagcgtttatttattatttataaacatgttaaggtagtttatgaaaaaacaacttatgaagataaaattttaattagtgaaaacttatgaattaatataaaagtctatttatttgcataagcttaaaataagctcaatccaaacgggttaatcaactttgaaactga

SEQ ID NO: 29602 - DNA, 671 bp, Medicago truncatula
  Intron number 3 from transcript Medtr3g087380.2 (locus Med tr3g087380) derived from phytozome v7.0 (chr-ID MtChr3; po s 20752304 to 20752974 reverse strand)
caacaatctggttggtttaagtgtacttgataattgtttctttcacaattgttttgggaactatacaatattctagttcttggagacacttattaagttgatgcctttcaatttattttaaaaaaaaaatcacttttatgtttctagttctttgatgacttcagactacttcttaattatattttaaattttaattatttgtattcttgtacctcaagactttttttttttgccgagatttgttccattatttctgaagtttttgaatttctgttaagaaatgtttgtgcattgattttaattcctgacaaaagactaatgacgtagtctacataccaagatagtttatgagatttatatctgattcacaactgacaatgatcaaacctcaaataatttgaagaaagtggtggtataattacaacaaactttcatcttcttgcagcgttagttaacttgtgttttttttattaagcgttagtctacataccaaggtatctgtgtttttttagttaactttgcagcaaactgaagaagctccttttaatgtctaattatcatctattgttaaggttaattgagaaagttaatgaatctgttattacacaacttgattttcaattattgtcttttcaggcagagttgtacagggtcaagaaggcatttgacaa

SEQ ID NO: 29603 - DNA, 668 bp, Medicago truncatula
  Intron number 2 from transcript Medtr2g091820.1 (locus Med tr2g091820) derived from phytozome v7.0 (chr-ID MtChr2; po s 20790858 to 20791525 reverse strand)
tattgtccctgaaaagtttaagctctttgttagtaattaagtacatgtatcaaatttgtttggtatccatctttttccataagataatttgttagatattttgatttcatgaattaattgaggctgtgattttttctttactatttgtttgatttttttataagagactattttattgataattcgaatggatcaatttttttttacatatgtgtatttttgttgtaccatgtatcatcatcataaactttacttataaagttccatacaaaatctcaactttagtcgcttggagatttccaataaaattagaacaatacaaagatgatcaactttggccctattcactattgcttcaattttggtgggattcattagatctgaagctaatagagatcatacatgtttttttcaagggaccaaataggttattgaatacttaatttaattttgtatgattgtgcttcatatattgggaaaaaatagtacaatattaagaaattttttgaactaatgatgaaaagttagagactaaaaaccataaaacacatataattccatgatcatgtgttagaaacgtcaaaattgaagattaattccgtttttctcggtaattaatttttttttaatagtgaatataatcaaaattcttccatctgtaggcaggg

SEQ ID NO: 29604 - DNA, 826 bp, Medicago truncatula
  Intron number 1 from transcript Medtr3g127760.1 (locus Med tr3g127760) derived from phytozome v7.0 (chr-ID MtChr3; po s 32464206 to 32465031 reverse strand)
tggattctttaacttctccggtagatgattagatatgattgttttttagtctaagctacactaaaaaatgcataaataaatacacgaaagtaacatgataaaaaaaagtatgaaataaacgtgtttaattgattgaatgtgttaattattatgatgtatgaacctctattacgctaatttcggaggtgttgtgcaataactccctagttagtgggatgtcacccaaattacgatgtctaacttaattatttcgacaattttatttgtgaagttatgacctgtgaacaaactagttaagaaaactcaaaccgatctatctgagtttcatgacaaattttggttattacattagatttttttttttattttacactaaaaaatatgaatgtaacaatacacttatctttaaaataattgttagctaagttgtttttttgaagaataaaaatattatttttttatgatttacaattataataaaatttaatttttctaaattttcgttaataaaatgtaaattttaatatgattttaaaaaaataaaagttaacaaataactttttatttcttcttgtaattttttttaatttccttaaaaaataaacttttttttttggtaaagacatccctaattttttttattcccaataaaattatcataacactttatttctaacacaaaaaatagatacgagtttcattcgaaaaattagtgttataagaaagacagaaagaaaaggttgacgtatgtaactgtactttttttattttctttcttttttcttttgaaggaagtgagacttgtacacttgaagggtccaatttt

SEQ ID NO: 29605 - DNA, 666 bp, Medicago truncatula
  Intron number 3 from transcript Medtr3g059160.1 (locus Med tr3g059160) derived from phytozome v7.0 (chr-ID MtChr3; po s 13245255 to 13245920 reverse strand)
tctatcgtgagtggccttgcctcactaagtcctaggttgctctgatacgtaacgggatggggtttatgatatgcatgcttcattcttttacgtgtttgtttatgatgttgaactgaattttatgagatgttttaatgaggcttgcgtgccaagactttattaatgatgataaatttatccgctgcgagtttttgaaataattatgttgaaagataatttgttaattatctgttttatgatttttagaagtgtagcattccgttatttgataattactctgataatatgttgaaaattttatattggaaaaacggggtgttacaatgctcaacaaccaccccgttaacacttgcttttacttgcttgattacctttcccatgtaggtaataggtctgacagttggggagagatagttgtgggtggtattatcacatacatagctaggcaattgggggtgggtgaggaccaagggataaacaaaattgagggtaacaatagacttaacatagagacccttatctctatgaacttcattaagcatcatccacccatgtcctacacactcaaactcgatgtgcctgttttaattatacttcctaacccatctcggactaacaccgaggtggaagaaaatttgttgtatgttgttgatgatccacaggtac

SEQ ID NO: 29606 - DNA, 845 bp, Medicago truncatula
  Intron number 2 from transcript Medtr3g059160.1 (locus Med tr3g059160) derived from phytozome v7.0 (chr-ID MtChr3; po s 13250109 to 13250953 reverse strand)
ttgaatcctgtgtgtgactttttgtgtggaatgtatatcttctgtttgaaccgttagatctttgatctaacggtcactgtgcttcctgcaattttacactatcttttgtgctcttttttggacccttggatctttgatccagtggctgtgatgtgatcttgagagttagatatggacctctggattcatccaacggtccagattaaatcctgctgagcctctttttaattgctttttaattgtgtttttaaataccttttttacactttcttggtgttttatgcttctaaaaaattttctaaaaacatttccctatcattttaatttttcctctaagtgttagaatttgtttgcttatttttgcatttattttctttactttgttcttttaattcttggtcattaaattccatatatgttcttgatgcattttttacatattatgatatttttgcatgtgaaataatgtgtaaaaatatctctaggaatatggtataatgctttgcttgtgtgtgttcttatgatcctcacattgtagcttaaattcaaacctttcaaaaatggctatgatgagggaattataagccatatgcatgtctaagtgttatacctaattctaggtatattttgccattttatttcatttcattgctcttttctttttgctattctattcaattttgtttatcttttttaccatttttatgccttatgatactaaccatttcatttcatatttcatccatctcatagtttaggcattattttttctattcatttctatatcaattgggtttgtaataattttaggtagactagttccctttttaattccttgcaagacc

SEQ ID NO: 29607 - DNA, 516 bp, Medicago truncatula
  Intron number 2 from transcript Medtr3g080910.1 (locus Med tr3g080910) derived from phytozome v7.0 (chr-ID MtChr3; po s 19195285 to 19195800 reverse strand)
ctcacccttcaaatttggaacaacaagaagctcaggtttaaggcttgatttgatggataacttttgatttcgtttttgtttttgtttaaatgtgaaaaatgtaatagcacacatgactagtgagaaaatagaaaacacctctaataaatgttgatgctatttaacaattttctttttatgaagttagttagtggttgcaatcaatgtatacgtctttttgcatattctgtcattcctctgatatattgaatatgattcttctttctatctttcttttcttcacttgttatatactatgagtcctatgaagcacggatactcctcgaattaggtgtgtcactatgtgacacggacaccacactgacaatcataattgcaccgaattatgtgattttctcaaattattagtggtgtcggcatgtcatgtccgtgtcatgtctggtgttgcgttacaaatctacaaaaccaagccacatggctttatattcattctaggttacatatctaacgccagag

SEQ ID NO: 29608 - DNA, 651 bp, Medicago truncatula
  Intron number 4 from transcript Medtr3g089860.1 (locus Med tr3g089860) derived from phytozome v7.0 (chr-ID MtChr3; po s 21223842 to 21224492)
atatttagagtggtgtttttggaggtttttttgtggtatggtggctgtttctatttctgattttggagtggagttatagttttgtgttgtttatgtgtgtttatgtttttttgatgtatatgtatggtgttggcttctaacagatttgggtttggttttattcgttatagagcaagtttagcgttttgtttttggttgtgtttgaagtcctcttttattatggttttttctagctctgctttggtggtttttttgtacttccttgcgtgtatccggatactccttgttgttataattatattaaagatggtgatgcttttttttgtttactttcttgcgtgtatctagatactccttgttgttatattatagttatattaaagagagtgctgaaatgatgagatttcctttcatcataaaggtttaactattagcattatcttactgggaaagtagtcatggtccttaaaaatttgatttatgtttgtttgaagagaaagttgttggttggacgagactcacaactcaaccaatgagaagttttttcttaagttgtgaatgattctcctattagatcaatttaaataatatttccacttggttcttttatttacaggttgtcatcgtttctgtgtcactagactcccttga

SEQ ID NO: 29609 - DNA, 425 bp, Medicago truncatula
  Intron number 1 from transcript Medtr2g090630.1 (locus Med tr2g090630) derived from phytozome v7.0 (chr-ID MtChr2; po s 20255398 to 20255822 reverse strand)
aggttttgaagctactactattcaccccgacgaaagtatgatatctatttctgctatagctactaaacaataaagaaacttctttcatttttttttctattctttttatctaaggattcatgttagcaaatatcatgtatcttttgctcataatttctttagaaattttgaataattacacacacactagtgtgaagtatagaagatttatatgatatctatttatatatgactcatatatataacaaataaatttctttgatctttcttttccatctttctttttatccaaggtttctttgatatctatttatatatatttgatgacatgtgtgtgtagtttaaaatatttttcagtacttaactgatagctctaaattttatatttagtgaaagctcttgaagatatagctaaatcacttggt

SEQ ID NO: 29610 - DNA, 1028 bp, Medicago truncatula
  Intron number 3 from transcript Medtr3g139890.1 (locus Med tr3g139890) derived from phytozome v7.0 (chr-ID MtChr3; po s 36105891 to 36106918)
aaagtgaattactagagactttgcaaagaggtgactatttggctggaattttactctttttctcttgactgtatttacatgtgatcgtgctctgctatgtttgaccaataatttgtggaccttctaaccttgttgaaggaattaagatttcccccattgaaatggaaactatacatatgctcgaagtgtttacaatttgactagagagctgagtgtggcttactactcggtcttatcatggttgtgccctaagtaaaaagactaaaggcacgattttatttgcattgcatttagaatcttaactcgctgagtgttatgatttgaggttaaacattgctacataattcacttgatgtagttgtcttctttttaatgacttgaatattaacacttcgctatcttcactcgtttacagacaactttttgatgatttatattttgcaggagtcattttagcacattttctgaataaaattacgacatcaatattttcttgaaatagtaaagtaattggtatatattttggtcctggatcttgctttccaaaaaccacttcaactctctttgtatatggtaaattatgtcatttgtttattgccaaatggcaacagtgcatttatgtggtagcagtgatcataatctttgttggggattatgaagtttgattaatatctaatcattgtgaacaagagattcacacttttatctttgttctaacgatgcaggccttcaatcacaattgtaatacttcatttgacctttcatttggtgataggaacaagtaaaatttcataaaacttacatttcatggatggtataaataaatgatggatggacgaaatcaaaatcttacattgtcttaaatccaaaatcttattagatctatgctggagtctgcagaattcaaggcattgcaatcgcacacttgtcgagatttgctatttttcgtctttacagaccacaagttatgacttgaggcatctgaattttcaggtatttctaattcagcgagaaaggaagaaaatatt

SEQ ID NO: 29611 - DNA, 513 bp, Medicago truncatula
  Intron number 1 from transcript Medtr1g008870.1 (locus Med tr1g008870) derived from phytozome v7.0 (chr-ID MtChr1; po s 940033 to 940545)
tcttcacattaaacaaaccaaattacaacatctatgtaagcaccccatgtttttttttccctgttcaataaaccttaaaaatgttttttttttctttcttcttctttccaaccaagtacaattttccttttttcttattaatttcttacttctaacatgacccttttgatttttccttaaaaatatcttgatgggttgtgaaaattttgatccttttcgtgttacaaaacatgggttcaattttcaattttttcaaaatttatatatattttattgttttttactaatgatttttgtgataaaaaattgggaatcattgttctttgtatgacttggttcaatgggttttgattgggatctctgttggatctcttggtttctgttttattcttatttttatcattttgaataaaaaattcatgttcatgtttgcaaatattgatatctgtgttttttttgtttgtgtgtgtatatatagtttgggggtgtagataaggattttgctacattccc

SEQ ID NO: 29612 - DNA, 884 bp, Medicago truncatula
  Intron number 2 from transcript Medtr1g114640.1 (locus Med tr1g114640) derived from phytozome v7.0 (chr-ID MtChr1; po s 24543906 to 24544789 reverse strand)
gcaaagacattgaaagtcgaagacatttttcacaggttttcatcttccactttatgccatgtctcccacaagctgtgtttcgtgatttcctgagttttgattatgcttgcttttggtaactctgtattactctttgttgtgttcaataattctaaaaagaatatttaaagggaaaaaagaatatttgaaagaaaacatgttgaaattaattttcttcgaatatggtgattatcagatagatctaattctgacaaaatagtctcttatatggggtaagagtatgttgattcaagagtaatgagtagccacaacagttcttcaatgttttgaaatttcaaaatagttcataattgtgcactatgttagtcaaaatagtctcttacgttaaaatgtttcgttaatattatcatattagtctctcaatatacttacttactgtcatatcagtccttataagtacttactcactgtcctatcagtccctatataaaaagagttaatgtcagcattgagggactattttaacatcagagactattttgactaacgaaacgcataatctgagactattttggaatttcgatacgttgatagactatattgtggctactcgttacacattcaggaaccaaaatgactattatccctttttatattaaaaattcttttggaaatagtttatgttatccattgaatggcatagcaggctcttcagttttgaaccctcaaatatttgagattaatatgttgtgatttcttaggttattttcttatgatttcaaaaatataaattacttgtgaaaatcatcaatgtttgcatatcttattgtattactttttcattgttcctttaactgtctaacaggttcgtgaggccctcaaat

SEQ ID NO: 29613 - DNA, 336 bp, Medicago truncatula
  Intron number 1 from transcript Medtr3g133230.1 (locus Med tr3g133230) derived from phytozome v7.0 (chr-ID MtChr3; po s 33711002 to 33711337)
ccactgccagaaaaggtacaattaatttacgaatcatttgttaatagtcaacattcattggtcacgtcacgcttgaaaacgacaacatgagtttctaatttgttatgtttcgcgtttgtcagcaaacgaatttttcgacactgtctgtcttgtaaaaaagacaaggaaaataaatgtcacagacagaatcttgaccccgcatattttatttgtcatttagtcattattctttgcttttgactgcatgttagcaacaatggcatattaatattataacgttttgattttattttttttttaggaaaaatcggaacaggagagaagtgagagtcccgt

SEQ ID NO: 29614 - DNA, 514 bp, Medicago truncatula
  Intron number 1 from transcript Medtr2g120520.1 (locus Med tr2g120520) derived from phytozome v7.0 (chr-ID MtChr2; po s 28364573 to 28365086)
tgtattgtgtatgtgcaatactgaatgaataaaagtttgatattataaaatttcatgttttgtgtgagattttttatttttattttttatttttattttttttatctttgtttcaccttcaaatattaatgttataaaactttaatttaattggtaatgattgatttcattctcttataataaaaccatatatttatagtgaaaggattaaagacacttttttaaagtcaaatatattttatcaaataaaaagttagacatattttaagatagaaacataactcttccatatttcaatgtcgagaaaatagaataagaagataaagataaggtgctggctagaagatttatatcatacatattccatgaccctctttttctactaatactatattatataacctccttcttactcccttgcacacacaactccttccatgtgattcctatttctcctaaacactttatgctttgccgccttcttgctggttgtggaggagtcatcggggagaaa

SEQ ID NO: 29615 - DNA, 954 bp, Medicago truncatula
  Intron number 2 from transcript Medtr2g120520.1 (locus Med tr2g120520) derived from phytozome v7.0 (chr-ID MtChr2; po s 28365101 to 28366054)
tgcggtttttcgaaaggtttgagtattttttttttttggaaggaatagtggggagtattttaaaggtttgaaaattgatcgttctcgtgggaataaaatattggagcttcacgtggacttttgagtagtagtatctactattacttcgacgaaatggggatcacttgcggtttgaagtcttttgtaaaacattagaaattattgagtttgaattggaaggtccaaatctgacactattacatagaagcaaatgcttatgcaaaagagttggtaaatatggcttgtgaggtttttcttccatcgattttatgagcattctccggctcagattagtttgttaatgttagctgattctaatggtatttccacgttgcggctaattaaacgatagttatctcttttctttgagattcggccctcttgtaatccaaaaaataaataaaaataaacgctttatgttttttaaaatagagggagccaaaaataaaagatcaaacaacttagttatggttactaaaccgtctttttaacaccattaacatattatgcgtgatggactaaaattatagtgttttaataatcattttaaaattttaaattttaaggatggttaaataaatttggctttaacaaccagaaaattgcatgtagattttattttgtagggacgaaaaagtattatttttagataaaaaaaaaatctaccctggatatttttgccatcttcaaccacaataattattatttgggaaataatattccttcacttatgaatttgataacaactaaattttattccattaagtagagcgtgttatatgtatcgaacgatgtcatgattttctttcatatactatatttctatcaaactcattaatctctacatcttttttaacagttttccttatagtatttcaaggtatttttcaccctctctctctctccctccccccc

SEQ ID NO: 29616 - DNA, 852 bp, Medicago truncatula
  Intron number 3 from transcript Medtr3g012670.1 (locus Med tr3g012670) derived from phytozome v7.0 (chr-ID MtChr3; po s 2168471 to 2169322)
agctggtaatcaattcattgctaaatacatgtacctctgtttaagtggatcgagtcaacttcctaaattttgaaacaatactgttttaaaattggaatatcttccattgtagaaaagatggtagagtcttatcatagttagaggtagattcagactaaaaaaagctataggaagtcaatggtatacatgatagataattatgcattgtttgattcatttagaagactccacctagtgggataaaacatctgtttgtttcagcagtataatcatacttgatagttggagattcatctccttttgatgaacttgtctttaatctaagatgcctccttggttgaggctcacaacatgactgtatctgtcccattaaggtgtttattgtctaatgatttttattggtgaccaggttatagaaaaatcaagggttgatttgtatcattttatttatgcctcgtttggtttaagaaaatatgttttattttcactaatatttacaaatactaccttgtttgtacttttttttttttttttggaaggatttatccagtaaatggtgaaaataggaaatgaaaacatatttgaaaatatgaaaaaaggaaactgtgactttttttcataattattagtgaaaatagaaaaggaaaacaagaaacaattgtcaaactaaaatatcatttttcgccttttgcattctatgtagctatacttgatgtacttttaattattgatgtagaagctactattggttatgattgatcatatctaagaagcaatacagtagtaacttactggctgttaggtttcattaactgagtttttcttgacttaattaacagaaagaaatagcag

SEQ ID NO: 29617 - DNA, 518 bp, Medicago truncatula
  Intron number 1 from transcript Medtr4g018940.1 (locus Med tr4g018940) derived from phytozome v7.0 (chr-ID MtChr4; po s 3750044 to 3750561)
agtaaatggcacttccatgaaaaaatattaaaaattcattaaaatatgtagttttttttttttacaaattaaacgaaattcatttattctaatgaatagaaaaattcttttaaaagccatgaaatgaagttttttattctcttcaagtaacattttttcttcttctttcaaactcacctagcttttcccctttttctctcaaatttatgatggctgcatcttcattttcatattctccatcttcaaaactatgtttgatcttccccctcttcctttacacaacccaacaaaccctccctttctataaactcatttgaatcctcaaatcccaaccccatctcagctcaatctttgagttcccccatatatatccccacaaaccatattttcaaattgtactaataagagaggggaggtcaggagtcacattgtacatattttaaaaccatctataaaatacttgatattattggtgtaaccaagggttggttttggaggcaaagttgttaaaggaagtc

SEQ ID NO: 29618 - DNA, 989 bp, Medicago truncatula
  Intron number 2 from transcript Medtr4g018940.1 (locus Med tr4g018940) derived from phytozome v7.0 (chr-ID MtChr4; po s 3750638 to 3751626)
ctctttatcgggtggttgctgatccaggtttagtaggaccctaggtctggtcattattgcttcctcgttttactttacatgtgtttaagccttatattagggaagatcgcaagtttgtagatcggaaggccttacaacatcatactttgggttgcttggctaaatggaaataactttatggtttcactaagttggtttgtagtgtgttagacgggtataatttcctaataaagctgtcaatttgagctaatccggtgcacaactcaagggatggctcattttgaatttatgcaagaccttcatatgtagatttaatcatgacattgcgctatgaactcttgtattattatagaaaaatattctattaatggaataaagtaagtggtcggaggtggatctcgagagctagctgaacatcaagaacgtagtggagtgcgacagagtaagagtgagttggtacaagttgatgtatttgatacaagttggtgccttccgttacaaaatataagtaaaagtgagtcataacaagttgatgtatttggaccaaattttaaagatgtggttatcttgtacaacgatgttgcgtgtgttttgccagacgagaatatacgttataaactagtttaatgaccttgtcaaatagacccttagtaaaactagaaaataacttagtgtaacaatttttttaactaaacgtacctctagattgaactacatatcactatagtatatttacgggcccgtttccggtgggagacctcaataggtctcctaccataggagacatgctattttttttttttttttacaaaaatgaatgtgagccattggataaaggtcaaccaacccttagatcaaaatgcttaccgtacaccttcaacattcaattgttttcttttattttaaattagtagtgtatttttcttgtgttggtcttataacttgcatttgtaggtcaagccaatattagttaccagttgttacaggtc

SEQ ID NO: 29619 - DNA, 726 bp, Medicago truncatula
  Intron number 1 from transcript Medtr2g008410.1 (locus Med tr2g008410) derived from phytozome v7.0 (chr-ID MtChr2; po s 1560732 to 1561457)
attatttcttgttatatatatgttacattttgtttaagctcatactgatcatcaaccattataaattgttactagcttatgctctgtccacaccacaatttattgtctaataaggtgtatttgtatattcaaacacacatgtcaatgacaatgagtaaatgtaatggaggacattagagaatggatcagtgattactgattagcattgcctcgtttatattctacatattgaaagtcggtagctactatctacaagaacataattgatgtatattctagtgcctctttttgcagtagtgctgtagcagaaaaagattatgaatctgaataagttttgtttagttgatgattattttcgttggcattgaagccatttgcacttacctttactggcccacattttgttttatgagatattacaatcattattattgctactatacttaagtttctaggatattttgtacccagaagaagtgtttctaggatattttgtataccatctttctagaaaggaaaaagaatacccaaaaaaactctagatatatatttggattttgtctgtctcactattaacattgttctttaacacccaaaaaatacatgaatacttttaatagtaattaactgtcgtttgttaaatgatttcaacgacagttaaatctcgttgtcgataacttttcagtattaggtctagactcttccacctcaaatttcatccaccat

SEQ ID NO: 29620 - DNA, 427 bp, Medicago truncatula
  Intron number 2 from transcript Medtr2g018290.1 (locus Med tr2g018290) derived from phytozome v7.0 (chr-ID MtChr2; po s 4787345 to 4787771 reverse strand)
ctgctcatcaacctacattatccggttgttgagaagtttaagacttagtaagtttgcattatgatttcacaatacattgttagagtaaattattattttacaatctaatttgatttctttttaccatgtttcttgaattgttgtcgtgaccttaacacttctcaagcttagagtcaaagcatcagtcagaacttaagtcagagttcgacttcttctcaatgtacttcgtacaacgattttttcaatctgtctcaagtaaggccaattgttgaatttataaacttagtcaaggtctgctttttttttatgtacaaacattctttgaattttttacgcacaaattaaaaatacatattgcattattctttatttcatgtgcatatttgtgttaggatacatattgcatcaccatttggaaagcaactaa

SEQ ID NO: 29621 - DNA, 993 bp, Medicago truncatula
  Intron number 1 from transcript Medtr3g083400.1 (locus Med tr3g083400) derived from phytozome v7.0 (chr-ID MtChr3; po s 19576771 to 19577763)
ctttggtttaggctttaggtttgttctctcttaccttgattttttgtgtttgtgtcattttaatgtaacttttaatgtaacctgttattacccttagtagcagggtgtgtttttcctgtttgtcattctttagaagtgggttatggctacttaggaagtgactttgctttattatcctttttgtctaattgggctttggcttagtcccccaatattgtacttttcccttttattgcatttttctagctttatcaaaaaaagaaactgtagaattgaccccttaaaatttttgaaatttacaaattgacctctaatttcaatttttaaatttggcccaaaaaattaaaatttataaaagtttcccaaaaatgatgacattgaaattttttattatccacccacacaaaagtattgagaaatgaaagaaatttaattgaatcatataaattgcctagaatttaaattctttaaaattttccaattagctcatccaaacattctcttagagtatgtttggatgggggaatgttttgaggaaatgtgatgttttgagggaattcaattactttgaggtgaattcaaacaatagaattcacctcaaaacagttgaattccctcaaaacattcccccatttaaacacactcttagagaatacgatagaggaattcccagaccatattgttcgccaatagtatttggattcttttcttcccaaatgcttaagtttcttttcaaaaaataaaagatagatacttaacttggctatcatcaccgaactaatgtactttacgtttggtaatagtgttctaaagaggttgcttatagtactcctattttactttattccatccctttttcttttatttggagtataaacttgtcggtacaagacatatatgatcagttgtaagaaatcaaaaaagaaataaaaagttcagctgcttttgtttgctgcagaacttgattggaagattgtttatacgatttgagca

SEQ ID NO: 29622 - DNA, 786 bp, Medicago truncatula
  Intron number 1 from transcript Medtr1g100280.1 (locus Med tr1g100280) derived from phytozome v7.0 (chr-ID MtChr1; po s 20755955 to 20756740 reverse strand)
tccaagaaattatcagacgaggttgtatcaaaaaggtatttcttttcaatttctgtaacaagtcttcctaactgagttgatatgtgatatggttcccatcattgtttttcctgtgagaatactaaatattgtttatacgtatacgaaatgttcaagaaattggtatgttctattctaacattgcaatattttgtataagattgtattcattttcatgttttttttcctacttatcatttctgtcacacactagagtcctgaaaagctttatttcactgtttctggtacaagtgtttgaaaacaggaaaacctgaaacatttgacagttttgcaattaaaagcgaaaacaaaatgagaacagaaaacatttcttcaaatttaaacggactttatgagacttgttttctcccgccattagtaccaaccacatgatgttggcatgtttaatttatctgtgaatttagttacaggcttatgtttatgatagaacattatggcgtaatttgatccatgtagctgaccccatttagtgggaatgtgggataaggcttagttgttgttagttatagcttccagcttattcaattgaccattttatttgctttatgtattaaaagattcctgattgtatttgtaacctttcacctgaacgatcaaccaatctagtgccttgttgtaaacattgttttgtgccttgctaagggcataattttccaataacattacacgatgtcatgagttctagtgtctactgctttctaacaagcctactctttctgttcagcc

SEQ ID NO: 29623 - DNA, 332 bp, Medicago truncatula
  Intron number 1 from transcript Medtr1g125900.3 (locus Med tr1g125900) derived from phytozome v7.0 (chr-ID MtChr1; po s 27942104 to 27942435)
cctttccactccaatcattcaccttatctactaacgtacgcaaccactctctccctttctctttttcttacacatatttctctgcccatttcttcaactttgctttttcactatatttcccaacaaaaatattgtttttatttattatttggtattggagtttttaattactgtttagagatttaattgaatggtgggattgatacgtgagatcactagttagttggtgtatgaagttgaattgctaatttgctatgtttatttttagtttcaattataattactttttcatttgaattaatcttggttgaatcatttttttcattccagaa

SEQ ID NO: 29624 - DNA, 482 bp, Medicago truncatula
  Intron number 1 from transcript Medtr1g146670.1 (locus Med tr1g146670) derived from phytozome v7.0 (chr-ID MtChr1; po s 32481712 to 32482193)
ggttgaaaagactcatcctagagttgcttatctctgtaagtatttcattcttccttaaattgcatgcatcttttcctcattctcatttctctacttcattataatttaatgctctattcgccaaactcagtaatctagcttacattgtacctcataccactaaccgctataagctacttgaatcagctcatcaaaaaccgctttaagctagtaaaaataagctaatagttcctgagaaaatgacggttaccaaacaggtctttttttaatcaaatgagcttataacacattatctataagctcaaaaacatgtcttaccaaacagaccctatagtattattctccacaagcttggttttgtatttgaacattttcccctttaactgtgtgccaagggccatgtaaaacactgtgattatttatcggtgtctgaatgatttactattctgaggatacatgttttgctattgtaggccggtttt

SEQ ID NO: 29625 - DNA, 669 bp, Medicago truncatula; identical to SEQ ID NO: 29029
  Intron number 1 from transcript Medtr2g006060.1 (locus Med tr2g006060) derived from phytozome v7.0 (chr-ID MtChr2; po s 508835 to 509503)

SEQ ID NO: 29626 - DNA, 821 bp, Medicago truncatula
  Intron number 2 from transcript Medtr2g103590.1 (locus Med tr2g103590) derived from phytozome v7.0 (chr-ID MtChr2; po s 24172607 to 24173427 reverse strand)
catttttatttaatcaagactcaaaccaacagaaggttttgatttcgttctaatctttttttattttagttggtgacatatctgcatacttttttaagtttaagttttttttaggtctagaccctcgttactctccgagccgggtggacgcacataaggcggcaaaacttttccagtgtgcctatgttttccattcacaagactcgaacatgagactgcgtaaagagattcatgctcactgcctcatcgacataagttttaaatttaagatagcacaccaatgatcggcatataatttgtgtgttttattattccgtcatttcaaaatatttatcgttccatgtactttcaaacatattcatagtattatcaccacactaatgctctcactcatttaccaatatggtgtgacaaagttggcagctaactgagttccttaagcatgcggtcatgaattcgattcctgaccgatgtgtacggaagagcacctgttgactgttgtgagaggtcagcccctttaatcgatctccaattagaagagttagtctctaagctcattcactcattcaatttagtaaaactaaagataactagagacatgaataaagttaaaaatgcatatatgtcatatgtgttttatgtgctttagtttagacgagttaaagaacgatgaatgatctgagctaagtataattgttgataagtgattaatatgctcatgttgatatgattagtttagtagtaatatggtaactgttgtgctgaaccaaaattgacaccaaatatttttcttcttttaacacattagcttcaaggattcc

SEQ ID NO: 29627 - DNA, 759 bp, Medicago truncatula
  Intron number 1 from transcript Medtr4g022030.1 (locus Med tr4g022030) derived from phytozome v7.0 (chr-ID MtChr4; po s 4354562 to 4355320)
ccactctttgcctttggacagttccttaacttcaggtagtttcctttttgttgtggtttcttggtatggtttgaatttgtctatgaagcacgcacacagacgccggacacgacacaaacaccgacacgccgacaccgataatttgagataatgacgcaatttagtgtaattataggtgtcgtgtcagtgtcgaacacagacgcgtgtccgacaccgggacacacctaatctgaggagtctctgagcttcataggaatttgtggatctaacaatgtggttttataaagtttgttcctttcattttatataatatatagggtgttgaaaaatgtgtcatttgttgaataatgtgaggtcagttttatgatcattattactggatattagtataagaaaacaagattaagtatatgtttgattccacatttggagaaagcaaaattgatattgattttgacaatgacaagtagaatcgattttgcatccggaatagatattaactgtttttaacaatagaattgattctaatatgaagctataatttagagttttgtctctacaattgatttttagcctcgaatttactgagaagaataccattttttttatgacagtgtatcttaaaaaaaaattgatgtgcccaaatattttcactgtgccttattttataattgtattgctttgaaatttgcctaattataattatgatattgtcaaatgacagggtttatcagcttcttggtgaagccggcacatact

SEQ ID NO: 29628 - DNA, 699 bp, Medicago truncatula
  Intron number 1 from transcript Medtr2g104150.1 (locus Med tr2g104150) derived from phytozome v7.0 (chr-ID MtChr2; po s 24486500 to 24487198 reverse strand)
cattgaagttgaagtggtaccacaacaattaatcaatgaaaacggcaatattaattaattccatttttgtgtctttcttgtgggtctcatttccttagatagttgcaacttcaataacacttccacttaaattgaaaattttgaataccttatatctcccattcaagaagcaagatcaagtgataacaaataacatgcataaccaagaaagggtccggtcaatttaggaaacactgacgtttccctctgtccaattaatttgtgtggacacaaatttgaacaacattatttagacacacacgcaaataaaacaaaaaaaaacatgtatttttttcacaaaattaaataacatgcaattttttttgtttctattacgtgtctaaaatattcatgcagaaattactcttcatattcattatgcctatggcgataatggaagcttgaaacttgtaagattagtttttttttcttccatttattagagtttggatggagacttccctttaatccttaaaatgtactcgctctattcctatatctaagcaccattttattataggtaaaatatgcttatatattgggatggagggagttttttttttttctccattcgctttttacatttgatttgacatttaggatccattcaaatccatttttatagggtggctgcaaattgctccaatcaaattggcattt

SEQ ID NO: 29629 - DNA, 789 bp, Medicago truncatula
  Intron number 4 from transcript Medtr3g133170.1 (locus Med tr3g133170) derived from phytozome v7.0 (chr-ID MtChr3; po s 33677584 to 33678372 reverse strand)
ctattcgtgaattaggtatgttttgaaccattttgactggcattgttaatttgtcaaaattttctcactaattgattattattttgtttcatgctcatgtacttttgtgcttaattgtttaatctgtttatggtggatgtgttgaatttgaaggggatattttctccttattttgatttacttttttcatttaaagaagctgtaagcttatgagcaagtagatactccctttcttctactcatcactgagaaaacctgtccggacctataaccagtttgatctgtgcatcagattggacatgctattgaactggatctatgactggtttggtgtggctcagctttttgcagttgattgatttaaccaaatgaaattatgaaaatgttcccactaagattcaaacacaagctaatatgtaaaaagaacacgaaccactgtgccagaatattttatgtataaacttgcagtgtttgttatttatacaataataaaaccaatgcaatgttaagggaactggcttatactgttaatctatattgagtcttacttttttttcactattctcaattatttttggcatgaaagttattgaaatcaatgtataccagttcagccatacgatttcatcagtgtgctttatttttttgctaggaatgcttttttgtttcaattctaaaatatggattggtatatccttccactctattcaatggggaggcacctgggttgcttaattttccctactatttactgtgccttttcatttttcttctatggagcaggtaaaa

SEQ ID NO: 29630 - DNA, 703 bp, Medicago truncatula
  Intron number 1 from transcript Medtr3g138280.1 (locus Med tr3g138280) derived from phytozome v7.0 (chr-ID MtChr3; po s 35340687 to 35341389)
aattgaaagataacgaagaagaatcgagtgagaatctctatctgtctgtaatctgattttgattaactaatttgtgaatttcagcttcatttgctacctaattggtaattgccactgtttatgcttaattgctctgtaattagtgttactgatcaagttttgcgagttttttcatgatgattaactaatttgagaatcttaaattcaattgatacttaattgtttgcttctgcatattcttgattactgtgtaagctaaacctaagcctgtataattatctcaaataatatagttcgtgtaaaataatccaattcttgaaatttttattacacacatgattctatgttttgctatcctctgttagttacagttaattttgctgtttgtcaaggttagtttgtgaaactctcatttcatagagtgaatcactgaaatgattttatttttcattctgtcatcatcatattcaatgagtagtaggggaatgcgatgagtgtttatctcaaattgagattctcaatacttttttctagtgaaattattttggaatttttctaaaaaaaatgtgctatctatgtttgttttcttgtttgtgatgaaaagaaaaactgtcttacccatttattgggtttgaagttaattttataatggtgcgggtgttatacagggcagttagattggaacaatacgtcgtttaagcta

SEQ ID NO: 29631 - DNA, 570 bp, Medicago truncatula
  Intron number 1 from transcript Medtr2g021500.1 (locus Med tr2g021500) derived from phytozome v7.0 (chr-ID MtChr2; po s 5471422 to 5471991 reverse strand)
ccttgctgaggtatgtatagactagtctctattccaacgtataaagtcccaactgatgcatggtcttcttatttgagatccttttgattgctttagagctacaaggttacttagacgagtttggggagatgccaaaggaacccatgtttaggggtttgtgtgagcattagacttactcattgtggacatttagattagttatcttatcttatttatcttaaagctcaatacaaatgcctaaacacgagttcttttgcattcccgtgaactcttctatgtgaccatgtagcttggaagaaattgaagacaatctcgaattaaaaggtctacgtcattggagactttgtacgctataacagagactagtctattggatcctcagtagggcatatcaaaccaggttgtgatgctttgtcatatcaatctatctatgttttttgtgaccttaaattaatatgtcaccagaagtgatccttcaacgaatcgatgcacactagaatggtaatcaatccacttgacatctacatcaaaggtatgaaaatctaaaggtggtggtggtatatatcttct

SEQ ID NO: 29632 - DNA, 766 bp, Medicago truncatula; identical to SEQ ID NO: 29296
  Intron number 1 from transcript Medtr1g096450.1 (locus Med tr1g096450) derived from phytozome v7.0 (chr-ID MtChr1; po s 19743636 to 19744401 reverse strand)

SEQ ID NO: 29633 - DNA, 693 bp, Medicago truncatula
  Intron number 1 from transcript Medtr2g088420.1 (locus Med tr2g088420) derived from phytozome v7.0 (chr-ID MtChr2; po s 19991973 to 19992665 reverse strand)
tagtgagtaatgagtttaaaagtattgaagtgaaaagtttttgaatttcatctgatataaaattaaaaaaatttacgatgtcaactccaacgtaagaacttatctttacataatatcccccttcccctagacttgaggtggaagtctgtttacctgtgttttttattattacgcgcaggatcaaactagaaatcttgggtcttgttgtgtaatcttttatccagaaaatgcgtgagtattcatcatattcataggttgcctaatgaatacaacaatttttgtataaaaaacaaaacgtctttcgacgggaatagaagcaaagataaatgcatgtaaaaaaggattaaaagtttaaaacacaaaaacttaaagaaaatgtaaaatgtgttgcatttaaatgtaaaggtggttcgacaaatcagtttacatacattctatatgactcttttctctagacgccggtacttcgagtgctagaattttataaatgatttgcgtcttgtttttcatatgaaaaactcttatttatacatagaagaaacaaccacaaaaactaaaatgccacgagttgcactcccacgatcgaaaaccgtttgtcccccacatcttactgagaaaccgttgctttttgaatttgaactataatttgtttcaacagcaattgcttggcttcgaccaaacttctcgactaaa

SEQ ID NO: 29634 - DNA, 856 bp, Medicago truncatula
  Intron number 1 from transcript Medtr3g163120.1 (locus Med tr3g163120) derived from phytozome v7.0 (chr-ID MtChr3; po s 42825088 to 42825943 reverse strand)
gtcttaaaggtagtagtttattattgttgatagtttaaaatggtaggttattggtggtaacttcgtacacttttagattgaccattgattttgttgagtctgtggttaatttcttaaatatttttgagattttttatggtaatttgacttctattgaaattgcttattggtgccatgatgtccattgaaattgcttattctagagaaagacatagatttttgttgaaatgtgactcttagttggttgtttcggctttcagatatactcacattgttcatcggcaattgagaaatcgttagctctattgtttaaatactattaatgattctctcttcttctttttttgacaaaaacaaaacgatattcattcgttcaacctgatagaatacatcagatacaataacatgatcaatcaacattgttaaaaacgtaaatgttaaatttacgaacaaactcaccactcccaagttaagagtatacaacgacaaaatgtttataaataataggcttaaatgtgtaatcgatccctgcactttgacaagattttggtgttggtccttacacttttttttatttgactttagtccttacactttgtaaaaaaattgcatttagtccctaccattagtcaacggttgaaaaaaagaaaggaaggataacatagtgccacgtgtcatgtaattattgggtgtttgcataattcattaatttggttacctatattcttgtatttttaattataaaaaatgttataaattaataataatattaattttcgtcaaaaacaattattatttaagtctggaaaaatgttctccagcgctccttcttcttccattccagtacaaattggtt

SEQ ID NO: 29635 - DNA, 752 bp, Medicago truncatula
  Intron number 1 from transcript Medtr3g079500.1 (locus Med tr3g079500) derived from phytozome v7.0 (chr-ID MtChr3; po s 18436860 to 18437611)
ccaaagaaaacaaagtctttcggatatgtcattttgattcgaattaaataagcaatatttcatgtgcaatacattttttatactatcctttcctatagatcattagcaactgttttagatttctttaacttctgccactatagtgtcagtctctactaatccattgacctttgaagaatgatgatcaatgttgttatggagagatgaaggaaaaggaatttacttacttgtttttgaaaattcttttaggtttttttttttaaactcaattccaagtggaaagatgtcttagtgaagttctctttcttttggccttaggctgtgtgggtgcataaggtgggaggtcaacatattttacgactttgtgtttgttaagccttgatgttttgtttgttgtaagtttttggtaaaaagaaagttttttagatgaaagttgattttaaggtgtatgattttgaaaagctggagtttgtgtttagaaaacaaactttgtaagtcaaagtgtcttagtttatattcttgaaggagcgtgtgaaaagataatcaaagaaaacaaattcttgcccattttgacaagattttatgtcttgcaagagttgggtgaaaatatgcggattgttatttggtgtttctaaattctttatgagtttgttattgcttaacaaatgtggtgtgtattgtggttattgtatatgtttgttttggatggtgacctttgtgtttgtgtttgggctgattgcctctttcagccg

SEQ ID NO: 29636 - DNA, 781 bp, Medicago truncatula
  Intron number 2 from transcript Medtr2g029650.1 (locus Med tr2g029650) derived from phytozome v7.0 (chr-ID MtChr2; po s 7948574 to 7949354 reverse strand)
ctacaagggtattctaatttgtttttggattattgctttgtcttcgtggttttcttgtattaatattgaagaatctatgaagcacatacacgacgacggaaacacaccggcacatcgacattagtagtaatttaagaaaataagaaaattgaatgtaaatcacgtgtcggtgtcggacactgagatgtgtcagataccagagacatatcttcaatcagaagtgtctatgctaaatagagaataactgcctaaaaacactgtgtatgctccctgagaagttatgaaattggaatactcgatgtattttttagagtaagcattaaatttcaaagaggtccctgactctgtcaaattttactcatattatttgagagtgccttacaaagtcaaaggcaaatttggtagtttactatttctttattacaccaactagcatatcgaacatgttttcagcctgagtgcgagaaaactggcttttatggggggggttcattaattcctatatataaatgaaagaattgcatttaagcgaattgtattttattaatagtatgatgaataccgaagccatcatgtcatggtaatgttgggtcaaaatattgagttgtttaattgatgattgttgtggacatgaaaagaggattatgtgtttgtcatgaagaaagtgaattattgcctctgggttgtaataggtcaattttgtttttcttttttgttcatgtgtgatttggtgttgcattgcataggagaagtacaagaacaggccttggctcttggagga

SEQ ID NO: 29637 - DNA, 971 bp, Medicago truncatula
  Intron number 1 from transcript Medtr1g008430.1 (locus Med tr1g008430) derived from phytozome v7.0 (chr-ID MtChr1; po s 735438 to 736408)
tctctccacaagccctaattgttgtaacttgtaaggtaatgtgaaattgaatgtaatttccttcaattctgattctgatttgatgattagatgttctttagtaatgtgaaattgaatttttttagttttcgattgctactgacatgaatgttctgcttattattatggtttagaacatgaactctgattgctactgaactgttacttgtgtttaaataattgtattgagtgtgagagacgaattccaattgaaagcctcggttttaaataattgttttagagttactataggtaattaagaaaagttaacttacttcctttgccaattttaatcatgtatggcaatgactttgagaggaggacgtaatcaataatcctaaatagtagaggtggaaaagatggaaaatgtaagcttatttgattcaaaaaaatgtaagcatatcttcaacttctagcatgcctagatgagctaatcttcctctatttttcatagtgtttggtttttctgtatatgactagcatgttctagcaacttgtcatgaaaagtagcaacattcatggcattttccatcataaagatctatcaaacctggctcaacttttgaattcagctatcatcgtcttctgtttatgaaaatcaagtgaaattggttcattttgaaatcatttatgttatttcaatgaaattgaaaccggctattgttatgaaatttgaatgttattagaattgatgtaacattgaaaccatgtattgttagttgattttgaaactgtttcaacaagaaaagttaagatgaaaagtcgggatgcgtaaagcatcactttgaatatgatgatcggtttttagtattattttgttgaaattttttatgaacgacaccgaaatgggtcgtattgtatattatatgatttatatattttagtttatttttaaagctgccaccccaaaattttaggtctggctccgccac

SEQ ID NO: 29638 - DNA, 817 bp, Medicago truncatula
  Intron number 4 from transcript Medtr1g008430.1 (locus Med tr1g008430) derived from phytozome v7.0 (chr-ID MtChr1; po s 737552 to 738368)
gcagcctagttttgacgctagaagcaattatactggtaatatattttgacttaaatttcttagctttctattagggagacatgcgacgaccagaagtgtgctatttaggcttgtaattttgtcggtatggcattaaaagtaaaagtttgtcgaagtgttcctatcttacatcttggtgattagcctttttttttcttttgaatttataaatttcattttaaatgaagtcatatatttattcagcattaccaatatcttacctagtaaccaggttctagattgttgtgaaaaaaaggtatcatggagatgattaacagaagctgttaatttgtgtattgaattacaaattgagaggaatgatggatatcgtataaaaattgctaaactatagatgctgcattcatgacaatttaaagtacaattcatagtatttgctcttatttgaatgtaattgataaacaagagatactctttatgaaaattagacaaatggaagtttttttcctccattgaaattactttcatatataaaatgatttttaaatgaaatttcgattatctaattttgatttttttttgttgatgagtgtcatgtctttaagttggctgtaactgttgccttttctctagtttgactaagaatgtacataactgagctactattatttggtgatcatgatgtttgacaattttttacaatgagtaaaccgtattaaatattatgtatatttcctcattgtgccattttcatccgtcctctacattttccatttcaagtttgcgtttctttccttcccaggtccaaaggaaaagaata

SEQ ID NO: 29639 - DNA, 385 bp, Medicago truncatula
  Intron number 2 from transcript Medtr2g091670.1 (locus Med tr2g091670) derived from phytozome v7.0 (chr-ID MtChr2; po s 20714121 to 20714505 reverse strand)
gacaaggtctgccactactaagacaccacactcaggtcattcttcattctttgctcgtaacttttctagtcataattaggccatgtttgtataaatagcttaattaagcacttttagtataagtgcttatcaatacttatgtataaagctatttctataactaaagataaaataaagtcaaactattttcatataagctataagttgttctagagagcttatggaaataatctgaaaacagcttatgatcatgtcatgagttgtttctataagcaatctcacaagtgtttatgttagtagataagctcaggtgactcaatgcaaatgcttaattaatgtgtctgaatgtaatttgttgtttctttgttttttttttctttttcag

SEQ ID NO: 29640 - DNA, 835 bp, Medicago truncatula
  Intron number 3 from transcript Medtr3g101710.1 (locus Med tr3g101710) derived from phytozome v7.0 (chr-ID MtChr3; po s 24665892 to 24666726 reverse strand)
cattacccctctttacttgggttggggccgtatgtggcttcttcttattgtaacatttttacgttttaacctcaacctcgttggtttctaagccactcaaattgaaccgtgtattgttaagtcaattccagagatgcatgagtttagacatgtagtgtgctaaattgctaaactgaagtgaattttattcgtatagattgtctgtgtaatttttttaaactgttaaccaatcgtgattgttagatgattaaaaacaccggacattcataactaattttgtagtcatacatataattggtagtgatttgttgacggttgaaaactttttacactgaaattgaaataaatcattaatgtatgagttcctatataaaatttgaagcttcaaatctatgtatttttgttgtatgttttgtggtattagtaaacttgatgttttgtggtattacccttatttgcatagcacgtggatttttataactcaagtgaacgtactaaagatcgaaagtacaatactaatttcttactaaattatgaatgatattcggctacatatctgtataaactaaggaagactttgttatatctgttgatgcttctaatgttgaggaacatgtcctagtttttccaaggaaatgtaatgaagcgtctctttatctctctccccctctagcatacacaggcattaatcttttacattctgcagttggataattttaggatagaaaataaagagttgtctattcatttgagtatgtattcatggtatgaatgttgttcttgaattagatatattatttatagaaggaagggctgattattttgcaggatcaat

SEQ ID NO: 29641 - DNA, 387 bp, Medicago truncatula; identical to SEQ ID NO: 29474
  Intron number 1 from transcript Medtr2g100390.1 (locus Med tr2g100390) derived from phytozome v7.0 (chr-ID MtChr2; po s 23383427 to 23383813 reverse strand)

SEQ ID NO: 29642 - DNA, 761 bp, Medicago truncatula
  Intron number 2 from transcript Medtr2g085680.1 (locus Med tr2g085680) derived from phytozome v7.0 (chr-ID MtChr2; po s 19371879 to 19372639)
aatctttggaatttggtgatcctctacgagtaaaggtattatgcgaagaattaacaaatttcatatttaagagtattcattcatagtgtttctgtaacatatgcagtcctttaaatttatattgatttttacttctgcgaatgtttcgattgataagattttggaccgttctaatgggtaacaatttagctacttcatggagtcctttaaattgtatatcattgttgatttgagattaagaaatttctttcttatatgattgattcctcttctcattgaaattcctcatattcattgaaactactttgaattaatattgaatttcatctgatagtttatcccatgaattaattaaagttggatgtatgttttccaactacatgaattccaaagaatctaacaacttaggtgcttcactgagtaatttcatctgatttgggacttacacattccataatttccctattgatataaggggttacatcccttgccgagacattgtatagcatcatgcagttccttctttgatgactgatcgctttttggtatatgtaccttgatttctgtttctcaattgttactgtaaccacaattctgtttgtcttgtttggttgcatacatttatatgctttcttgtgttgactttgttgaaaagttgcaccttgatgggccagctttctagttgctatatcttgtttttgtagtctcttcatttatcgatattgtttctgatttggttttgttggatggctgtaatacag

SEQ ID NO: 29643 - DNA, 878 bp, Medicago truncatula
  Intron number 1 from transcript Medtr3g005060.1 (locus Med tr3g005060) derived from phytozome v7.0 (chr-ID MtChr3; po s 106455 to 107332)
ccactcaaactcttcgtcctccttacttctccgaggttacgcttcttctcttttcttccttcgatctacacgaagttgatgttgattttttattttttttttagtgccaaattttagttttttttttttttcttttctttttttcgattttgtagagtttaatatgcatatactgttttacacctacaccgatattcaaatcagaaatcttcaattttgtttgtcatatcatcaatttcaaaattcacctgcaaaagtagggtgatgagaaattttattcaatgtcagtgtgaaactttgtggctgtgtatatatccttttaatgtttttatttttgtgtgtccataagctaggtgtgcgtattaagttattataagctgctagatgtttttgggaaattgacttatatcagaagctattatttaatacatatagttattgtaagattaagatcgtttgaaaacttagtgagaagttcatctacactgcctcttaatcttgatcgcatgtggatgatcgtgattgtctttacttaaattgaatcttgaatgttcgtttatgttggagggttaagaattactcacatgacaactaatcactgatttagtttgcttttaatgatgttgcatttatgaagcacggatacggtcacctgacacgacacggacaataacacgccgacaccacttataattcacataattcagtgtaattatatgtgccagtgtcggacacgacacatgtccgacaccaggacacgcctagtccgaggagtgtccgtgcctcagtgttgcatcaaagaatgttactatgattcagatttttatatatttcattttgaaggctatgtatgtgacacatgaacatatggttgcagg

SEQ ID NO: 29644 - DNA, 551 bp, Medicago truncatula
  Intron number 2 from transcript Medtr3g005060.1 (locus Med tr3g005060) derived from phytozome v7.0 (chr-ID MtChr3; po s 107396 to 107946)
aggactctcaagctccttccaaccaagcggagaaggttggaatttctctttccaagtttaatttgttatagtatttttatttctataactatgttgaagaaggaagtgagacagggttgcccaatgaaggatgaacctttggtttgttttcgagttttgtttgattctaaagctactgtcctgtttttttggttatcatgtttggtttgaaatgtttttgttttagaacttttttttttgttattgtatgagtggtaatatgattagtctcacatttttaaattctatttagtctttagtcaatgtaatctgtttttacatggatatagtacaataatgctaatggtttgcaaatggtacagtactacttatttttgcttcatattgaaaatcattctctgtttgtatttaattcaatttgattttcacccgttacattttagtttatcattcaattctgatagtcccttgtgattgttatattagttacattttttgctgacaccttctcttctttgaaacgaacaaggatttggcaccttctccaaaat

SEQ ID NO: 29645 - DNA, 1041 bp, Medicago truncatula
  Intron number 1 from transcript Medtr3g080420.1 (locus Med tr3g080420) derived from phytozome v7.0 (chr-ID MtChr3; po s 18902656 to 18903696)
ctgctgttagatctttgcttagagggcacactcaggtttggttttgttagtttattctcttgttcatttgttggtgctttgtaattgttttgtaattgggaaaattagagggaagactttaggggttaatactagtttaattgattattatgtttataactgttctagatttgatgaaaaaaatgaggctagattgtactttttatatgctgttagatgctttatcttcatgaatattaggtcaaaagagtttgtggacatatcgtaacatttgtataaggttattcatgcacttaggttattgcttatgtcaaaagttaagcttatttaagttccatcaagattcttctttatgaatgtgtgctttagtggtaagatgaaaaagatacaaatgtggatcttcaagaaagcttagtttttgttcgctgcatacaagattttagtatttcatttgaaagctaaaactgattttaaagtattatattgatggccactttattattttctcaagcatcaaattgataggactaaagtaacagatatcaacaattggcacagtagcacacatgatagattttcccactggcatttctttgctccttggtgaaatttatattgaagtgctgttgtaattttgtatgaaggaaaactttgtgttttgttaattgtaacagagttcttttccttatccaaaatttatttgctggattgctgctctttagttgatgaatagtttcattatttccaactctaatgtgatctaaatgtatgttattaattgaagtgctgttgtaattttgtatgaaggaaaactttgtgttttgttaattgtaacagagttcttttccttatccaaaatttatttgctggattgctgctctttagttgatgaatagtttcattatttccaactctaatgtgatctaaatgtatgttattaatggcataatcactgaaaggctaaccgttttatcctctaattaaatctctccttttttaattattctcagagggtcacagacttggcattctttgctgaag

SEQ ID NO: 29646 - DNA, 562 bp, Medicago truncatula
  Intron number 2 from transcript Medtr3g104660.1 (locus Med tr3g104660) derived from phytozome v7.0 (chr-ID MtChr3; po s 26079585 to 26080146)
aagggatactacaaggtaatctattttctcaaaaatgcaaacttgttgtctcttgtctctgcatatataaatgtgtgtgtgcatgcgtacgaaagagagaaagagagtgcatgtatatgaaaaagtatataacattcttattggacacctatagcacatatattacttttatatttcgggctttctaaagtagctcttttatactggtgttatagttttattcattaataaagatttgattgtcttccaaacttgacaattgggacaagggattataaaaggctcataatccagtgctcttttagtattcttgagacgaagagttttgtttgtcattaacaccttttccctgatgtacctactcgtaacttgtgtaatgactatagaggtcaaaactgttgtttacttaagagctcagatcatattcatgtcatggggtcttattgacatatgctggatcaagctgtgtcagttacactttaccaaaaaaaagttgtgtcagttacatatctctattcttgtatcagaatccttcagccacaaatcaggccatagacaagga

SEQ ID NO: 29647 - DNA, 595 bp, Medicago truncatula
  Intron number 1 from transcript Medtr3g033900.1 (locus Med tr3g033900) derived from phytozome v7.0 (chr-ID MtChr3; po s 9231941 to 9232535)
ttcttgcttaaggtgtttttagagacttttttttatcctaatttagaatctatagcatgtcctcttgttttaatctaatgttggacgatcttttcttatttggcccttagaatctattccttggtttggtttatgaccccatatattgtatttttactttttttattaatatattttaacttaaaaataaaacattaaaaacacaaactaggacaaagcgagagtctagggtcaacctttctacccacgaccttcattataatcctaaataaagtaatattcttttaccacaatgaagataatccacacttaaagtgacgaaggaaaacttgaaacggaactcacaggaacgacaataaagttgtaaaattgcaaaggataaatatcaatgtctaatttaaataagatgataattttgaatcaaatccaaaaacatatggaggttcacttgaaacgtctcactactacggcagtaacgattatattgccgatgaaagctcttgatgagaaataaaatagaaattaattttcaactaaataattaaaggtattctttttttttttttgaatagttaaaggtattctgatagacgat

SEQ ID NO: 29648 - DNA, 551 bp, Medicago truncatula
  Intron number 1 from transcript AC235671_1.1 (locus AC2356 71_1) derived from phytozome v7.0 (chr-ID AC235671; pos 41 62 to 4712)
aacgtgtaagaaacatgcctacacaaaaatatgatttgaattgtgcattttcttttagtttatgtgtaacagattgtgttaagcataagtccaaatgttgaaatctttttgttttctatttgagcacttacaagactcaatatctttgtcagtgacaatatttacgatatgaatttttcaaaatagcgtttcttgattcctttatgaatttcagctagtggcattgagctcttctttcaaatttgtttcctctttactctttttggaagttaactctcttttattttattgagtttttccttggctattttatgataactactttctttgtggttaaattttttcctttagcaccttttccttttattgcaaggaatataagcatgttagtgtctatcattgatcttgtataagtactaataattgaactccttttatagttaaaaacttctaattctttatgtttataacttttatgaagctgttcaatattctgacatgatctatcatttgtttaaatgtaatataattggtgcagcgcgaacagaata

SEQ ID NO: 29649 - DNA, 497 bp, Medicago truncatula
  Intron number 1 from transcript Medtr3g115030.1 (locus Med tr3g115030) derived from phytozome v7.0 (chr-ID MtChr3; po s 29233653 to 29234149)
gaaaaggtttttttttttttaatttgatttttgtaatctctgtgtgtgaaaaaaaatgagttattttgcttaacagtagcataacatacgtagaaaaaaaatatgttggttccttacggaattaataggttctgtttgatctatgaatgttattgtgttttgttctcttaactgaacattggataatttgctgaatagaatgaattgatcatatgtcaagtctttaatttaggtgatgaattctattgtcttactgaatagaatgaagagaactttttatgatttcaatcacacaaattttcccctaattgcataaacatgtttctcagatttagcatcattattttttgttgcttattggtattttgtgagcttttgcatctgtatcagtgtatgtcatgcaaaatggacttcttttgctagaaataagttgctgatgctgatccattttaaacctaacagaaggtgattcaatttccaatcctattgatcttcat

SEQ ID NO: 29650 - DNA, 1008 bp, Medicago truncatula
  Intron number 1 from transcript Medtr3g030670.1 (locus Med tr3g030670) derived from phytozome v7.0 (chr-ID MtChr3; po s 8365760 to 8366767 reverse strand)
aaataaggaatttaaataagggagtgtgaaatattttcttcggaaattgtgtgttaaacatacttcctctcaaaaaaaaaaaaaaaaaacttatttttttttagggatgttaaacatacttattaaaaattgataaatgaaaattattttactgagaatattgtattagaaatttaaaacttttaattttgtctaaaaattcttttttttgtttactgtctgtttcataagtattgtgaaattaaaagactcgttaaattaaaactttattcaatctaagtattgtttggttgtattgtatatgacaaggttaaagttaaatgaagttcaaataaaatgattattttcttgttaaaaaaatgattatttttctcaagttatttaaaactgatgggtttttgtaacaaaaaaaaaacaaaacactgatgggtttttaatttaattatcagtagacttagatcgaatggactagattcattcaatttagataccacgcttttcccgtgttgtgtggcactgtccaaaacttcgtcattctatataaataataattagttgacacaacttgtcaggaaaaaaaattagttgacacaagtaaagcaattataaaaataagggtggattagtcaaaaaataaataaataagagtggagaatcatactcgtatatgaggaaaaaatatgaaatttattttggtttttaagaaaatattaagttttcctttcaaaaaagaaaatattaggttttgttggatacgtgtgaatcattttaatgtcatgtaatttttttcctcaaaaaaaatgtaatgtaatttttatgtatttaacgatacacacgtaaaccatttttaaataaattttaatattaatttaattttatcggtaaagtatcgatactcaacaaataaattaagagcttgtggaagcgtaggaatttaaaattgtgacaacaacaaaatgaaacatgtgtgcaggttgtggaacgggctaggcacctcttagaagattg

SEQ ID NO: 29651 - DNA, 456 bp, Medicago truncatula
  Intron number 4 from transcript Medtr3g113550.1 (locus Med tr3g113550) derived from phytozome v7.0 (chr-ID MtChr3; po s 28544527 to 28544982 reverse strand)
aagagcaccgggtatggatgatgtctcctatttttgtactttgagactttgatgacatttgagctattttataatatttagtggggcatatctatgaattagagaagataaactatttcaacagttgagttagtgcttaaggaatcaatttattaaagttaaaaacaactagttgatagattagcctttgaaagtaatgattcttgatgatgaacgatactaaattcttattaagttcttgatatggattgtagtgttgatgctattttgaaaatgatgacttaaattgatattaggttgtttccaggtagtaacatttaattcatatttaacaatttttagttagaaattctcctactttatgtttgttcttttattaatgtactactttatcatcagagattttaagggcttctagaaagagtggattgatgtagaaccaagggtttagtgact

SEQ ID NO: 29652 - DNA, 958 bp, Medicago truncatula
  Intron number 1 from transcript Medtr3g135720.1 (locus Med tr3g135720) derived from phytozome v7.0 (chr-ID MtChr3; po s 34041741 to 34042698 reverse strand)
tggaacaattgtacaacaaccttttgctattggaggtatttgactgttaaaaacatgtttatgaatacaatctgcattacggtttctgtattcatgttcagctacagatgcgtatcctattcctgtatacatgtataaattgcttgtttgacttgctaaggttatgccttgatattttccttaagaatcagtcgtgctgggaaaaccttttgctaaagttgatctagatcatatatagatttcagaaacttatagaaacaaaagatggatgattaaataaaatccaattgctgaaagactactctctctttctgtctaatgtgaatgaaaagaagcaaagtaaaggggataattgtcacaagttattttccaacatcagcatgcatctatttaatgtcagagttactggatagtaaaaaatgtttccacgtagttatattgatatggaagaggcatatgattggttcatatagaggttttctttaagattttagtgaaaaaagcctagaagtagaaaggagatcagaactttgaattgcttatatgttatatctaaccagttgaataagatagtacaatacaaggggatcatgactagccagtagcgtgaaagtacagtgtgaaggatacaaatggtttccctataactaaaggtttgcatgaaaagtgaactttttcgatttatctatggtagaaaatttaaaatctgatgtaaaatttaaaccgcctgattttgattgaatatggtagaaagtatggaagaatatggtggattggttgtagccgcagcaatacaacaatggctttggattagttataactcttctatggttcaaatattagaaattctgaggttttttttggggggagggggaatttccatctcaatccttagtgctgacattgtatttgatgctgtacagtacgggaggatctggtcaaaaaggcagttttactt

SEQ ID NO: 29653 - DNA, 842 bp, Medicago truncatula
  Intron number 1 from transcript Medtr2g103090.1 (locus Med tr2g103090) derived from phytozome v7.0 (chr-ID MtChr2; po s 23871144 to 23871985)
attttgccatttgttctctttcaagaaggtaatatattactagaatttttttaatcttgtctatcctcaccacattgataattgttctaatcatatgtatatgatttacaattgtttttgtaaatcaaattattaattataagtaaattatatatatcactactttcttctaatgacttattatgattgacaacaagttttaaatgttcatattgctgccccatatccgtgttgggttgtgttccattgcttttctattgtagtcacttccgtgtgtggtccatggttttaaaaaactgtctcttaccgagataatgaccgcaacaaaaaaggtataagtagccgacattaccatttttctttgtttttacgtagtgaacaaaaatcaccacgaaacaccgttacggctgcaaaaaaaatgtcgttcatgacaaaagacatagaatctggatattttttcaattgagatagaagaaaatcatatttttagtacatatttgatcataaattacataagttatctccttatctagtttagaactccaaatctttctctggtctaagttatctaagttactatcattatttaagagttgtgcaatgttgtgattaattcacaccacgacaaccgcaatctgtatcgcaacacccataacggccgaaatcgcgaaattatttaaaaccttggtttgaggacatttgtatttcttggtggtcctttttcgttttggattgtgatatgtgtgtggttattcaaatatatatgcgttcacaacataaaacgtgtgttgcatgtatattaattttttgttttttgtgatttagtaaggattcctcattag

SEQ ID NO: 29654 - DNA, 721 bp, Medicago truncatula
  Intron number 2 from transcript Medtr3g147300.1 (locus Med tr3g147300) derived from phytozome v7.0 (chr-ID MtChr3; po s 38085879 to 38086599)
aggtagctgagatttttgccgatgattattttatgatagtattctcgctcatctaccaagttattgtatcaatcttccaactcaatcaatctcaaacagatttttttgatggtgtctgaggtttgaaccccggatatgacatatattatgcattgtcgttaataactgagctaaactcacgaggactcaaacagattgatgtaaccattcggcttcctcttacaagaatatcgttatactcttgccaagtagcgtttcaaagttgtatttcaacaaatagtttccacctccaattccatcaaaccaagcatgaagacgtgttgtacattttgaatatgttcatttaaaaaactaatactaacctcctatttattattggctctcgaagaatatgaaactctattccatactttaatattgtccttaactgatccccgtgagcttagctcagttgataagaataatgcataatatatgcaaggttcggggttcaaatcccaaccacaactaaaaaaaatattgttcttaaccgattaatattaatctcccggttagtattggctctccaagaatattaaactatattatgaaaatccttataatccaacgaaggctaagaaatctaaagtaagaccaataaactaattaaagtactactacggtttttttttttttttatcaagtagcttagtggctagagctcacacaatttaattgtgga

SEQ ID NO: 29655 - DNA, 928 bp, Medicago truncatula
  Intron number 2 from transcript Medtr3g139290.2 (locus Med tr3g139290) derived from phytozome v7.0 (chr-ID MtChr3; po s 35798965 to 35799892)
tttattagctcttccagttcctaacattctctcaagtaacactgcaagtagataaacttaagtaagtcaatccaaatagctctaaagtttaattaatacaaacacgatattcacatatccaaaaacttatcttagtcttccccattggtggtgcttaatggtacttgcccattaagaattgggtacttccattttagacgtctaggctatataggtactctcccttttagaatgcaatgttattcgtaagacctatttcgtaattttttttttgaggtgctagcttgaagggataaagtgcaaacatattaggcactgaattgaaaacgtggatgttagtgttgtatacacatgagaaccactttaagtaccaaaatatgagttgctccttcaaggatgtttttaaaattttgtggagccttgttctttgtcatgttattagccgaattggagtacatactccttttgttcattctttgaggatataaaaaaagagacatgcatgatcataggatattggtggggatgtgcatgatttgtttgatgatggtggtagtgatcgacttcttgaattgaaagaattgtctcttgatgaattagacatataagctgtgattattatctacatatatagtcacatattaaatatacgaaagtctctttacaaataatatgcaattatgtaaactataaattttttttttttaataaatttatgttaaagtgtctacgttgtatcatatctttagtccttgaattaaattagagtagcttttagatttgctttttataatttgtactgggtcttgtattattgacattaaacttaaattaatgttttgttcctccaaagaatgataattctgattctaatttgttcttaactgctctagaaaaaagctagagcctctggagacttacgtaccag

SEQ ID NO: 29656 - DNA, 848 bp, Medicago truncatula
  Intron number 1 from transcript CU651589_13.1 (locus CU651 589_13) derived from phytozome v7.0 (chr-ID CU651589; pos 80101 to 80948 reverse strand)
taaatattacaaaattgttgtttttttattccaaggtttgtgtctttcatccatttcttcttttatttatctctttttgttttagtgattaagtggtgattagtttttatgcttaggtgaatttgatatttgtttatgaaggaaaaaagggaaattttttattcccaatttgtttgaaattgttgaaaaaattgtgtttttgttaagtgggttggtttaaattttctatggtatgctaaatcactaggtgggggtgaatatttagttgaaaaagtttgagtgattactgattgcaatcattgtattctgctttttttgggattactgattgcatctgaaagtgagagtgatggagagagaaagacagagatgctgaagtattaggttgtgtttggctgtttttgtgttttagtgaaagctttaagtttgggatgatggatttgtaatatgatttaatgggcagtgttctgatttttcaaaatgagttcaccttatcagctatagttatgagtacttccaaaatttgagtttcttagcaagtccatttatggttgaccaaacagaacctaacaatttttaattattttgttctttttactttgtgtcaatcttgcaagataagtttagatggttttttttctttttcttttttctattgcttctttatatgttttatcttgagtttcttctatacaagaagctctacattaataattctcataaagttttctggatttttattagtgaagaagcaatagcaattggagaaaagaaaaataaaactaacttcaattttttatctatttttactgtgtagtatattggagacagccagaaggagaacaata

SEQ ID NO: 29657 - DNA, 892 bp, Medicago truncatula
  Intron number 1 from transcript Medtr3g083500.1 (locus Med tr3g083500) derived from phytozome v7.0 (chr-ID MtChr3; po s 19643031 to 19643922 reverse strand)
aatcttgataccacgtttgcggccaatccattcgtcaattatgaaccttgtttgatcctacagacgcttactcgtcattttttttgtaacctgatttcatacccgtacgcgagttcactgagttgcgttcgtaatgagtgattgttttgttaggattgattaaggttgatctatttggtttgtatttccatgatttattttcagcttggttgtaccaggaatatgtttaatgtctgcatggtctttgtatctctttatttttatttatatatttctcatttttattctttcacttaagtggcaaccacttagttcatcttctctataaataagagttctcagatagatgaactcgctattttttctaatatttaatatggaccatccaaaggtggacccttctttattttagtaaattataataaaatattttttctgttcttcatattttattaatataaatctcattgtttactaaatatagtaaaccacccttgaaccaattttaagaggtgcatattagtagacacactctaaaaaaatgtatttgtttaaaaaaattaaatgtttttagttcacataaaattattatgttttcttttttgtcccaacataaaattacttgtttaaaaaatccgcatgtttaatcatcctttgaattttaatgttttttgcaggcttgaacattattcatttaaaaatatatgctgacttaaaatcatcaagtttagattcacgaataacaaagatatacaaaatagggataccttgatgattttaccgtccccgcagttattgagttcaagtttttccaaatgtggaaatgtgaatcatttaaatttgatgtttgggttcaggttactcctccagctcgccgccgtaacggaggtcc

SEQ ID NO: 29658 - DNA, 600 bp, Medicago truncatula
  Intron number 1 from transcript Medtr1g016450.1 (locus Med tr1g016450) derived from phytozome v7.0 (chr-ID MtChr1; po s 3174685 to 3175284 reverse strand)
aacgcacggtcgtgcataaaacgcacagaccgtgcgtaatttcctgccattttgatccttgatgtgcacagttttcttcaacaacacgctaaaacgcacagaccgtgctcttcctcatgttttgctccttttcttccttcattcctgatcctttcttgctcaaacttgaaccaaaccttcatgcttctttgattaccaacctgaaacgaaaacccaagcttttgtagtaaaatagctcaagaaatacgactaaactagcaaaaacattattgaattaaaatgccaaaaacaataaaactacgacttatcatccggaactagtagtttctaagagttgtacgtgtgaactataggcttattataaatcagttgcaatatcaaattagttacgttacataatcagtgcagtggagttttattttaaataataggcttgtttaccacattgttcatctattatcgatcaaatacaattttaccttgagggttttaatattctccatgtcttacttatgcatataaccttcccccttttgatccatgaatttttaactatttcatgtaggcaccagaagagttgactggtcttttaacatccac

SEQ ID NO: 29659 - DNA, 346 bp, Medicago truncatula
  Intron number 1 from transcript Medtr1g129800.1 (locus Med tr1g129800) derived from phytozome v7.0 (chr-ID MtChr1; po s 29047867 to 29048212)
gtttcaatttcaacttcaacgcaccttctttcaaggtaaatattaatttctaattcatccattcttaatcaagatactgtgatacattcgtttttatttctttttcttttgagttggcattaattgtttctgttttttactctgttaatctttttctattctttgatttcatgcatagtataattgaaaaaccagaatgttaatgtatttgtttattggttgtgcatttcatgcataattaatcttctattctttgatttgatttgatttcatgcattattataatgtcttgttgttttctgtgttgaattcgcagatctttttgtgatttcaagtttaaggacta

SEQ ID NO: 29660 - DNA, 488 bp, Medicago truncatula
  Intron number 3 from transcript Medtr1g013740.2 (locus Med tr1g013740) derived from phytozome v7.0 (chr-ID MtChr1; po s 2639946 to 2640433 reverse strand)
cgggatttgagcatccttctgaaggcaaattatctgtacccttatatttagttattgttgttttcttgtttgagctactgtaatgatttgggaactagagatctaattttgttttgaatctttgtttcaaattatattttttgtcttgagtagaattgttgtcacttgtttttttttttcttcacttccatcttaacttgtgtaatttgatccatacagctaaccccacttagggggttaaggcttggttgttgttgttttttgatttgttgcaaggtgttattagttaataaaatcacaatttcactgaacttgtgtattttgttaatttttttgttttgcaggtaatacatctattataatcttgttttggagaactattgtgctttggtaactctatcaaatcaaattaaaagggtcagaaaggtttttttactgatcattggtttcttcgaccccaattttctttggttcatcatcagtgcaac

SEQ ID NO: 29661 - DNA, 669 bp, Medicago truncatula
  Intron number 1 from transcript Medtr1g064770.1 (locus Med tr1g064770) derived from phytozome v7.0 (chr-ID MtChr1; po s 12658580 to 12659248)
aaagagaaggtaagaagttataatataaactcagacggcttcttccatggacgttttcaatatgttttatcatggatcagttttttttgacatggaattccggttgccacttaatgttttacttgttacttccgatttatttcaattatttgtatttttaagaaatcgattttcaataacttaaaaccaagtttatgacgtcaattaacaataactttaccaaaatcaaaatccaagattttaacaaaatcaaaatccaagaatatttctccgaaaaaaataccaaattgttgcttcctgtttcctcgtttgtgcaaatcgttgcgaatctgttgcagtaaacattgttttgagtaagtatattttcttcgactatctgctgcagtaatctggagtttaattgtttatgaatatgaaataattagatcaaattttaaaggaatacatacatggtgctcagattgcaccatgcaacactgttgaaagtaatttctgattcaaaagaattaatgactggtgatgatcttgcaaatttgagttaaatcgacagtgtttgttgatttgaaatgttgtcactccttactaacaatatgcaaatttttgttaaatggtggattgattttaactgttaaaatgctttcttacttgtagcagaacattaacaatatc

SEQ ID NO: 29662 - DNA, 955 bp, Medicago truncatula
  Intron number 1 from transcript Medtr1g121670.1 (locus Med tr1g121670) derived from phytozome v7.0 (chr-ID MtChr1; po s 26567824 to 26568778)
gcagcgcagcgcagccttttctccttcgtctcaaggtaacaaaccaactctaaatccttcaatttcttttcttatcaatcgatcgatcaatgtattcttatcatcatcgattcattcataggttattcgtgttgtttactttacatctgcgattgattacattataatgcttttgtttttcgattcatgcacatgtttaatcgcaattctgaatcctatcgtttttttatttatgaatcgctagttttaaaatagttgatggttctgtgttctcatatatacttcattcttgcattttaacattaccatgccattattatattatcgtaatgttttttttagttgttattattacatacttgtttgtttggtattcaattatttggcttggattctgtatattttttttgtctttgtgttcatacctatgtatatggttttctatttgttatgacttatgaaggtattacttaattaattcatgtttgggattcatatattcccctaggtttttttgtttgttttgctatttgattcacatcactattaacataacaacagacatatatttgattcatatactattaacactaatagactcatatatgataattatgtgatttttgaactgtgttgtgtacatgccataaagattttatccaatgggggatgtagctcatatggtagagcgctcgcatcacttagcatgcgagaggtacggggctcgataccccgcatctccataattcactttaaactgatgtttgttttccgatcatgtcgtgcctgctctgtatctgctgaaatatagtgacatggtatgtgctttttgatttctcagaatgttgctgcaattttactgtttagtactcaagtttattttacttatgaattgttttctgtgctgaaaataatggcagatcttttttgtgcttttaagcttttaagtccaaat

SEQ ID NO: 29663 - DNA, 772 bp, Medicago truncatula
  Intron number 2 from transcript Medtr1g121670.1 (locus Med tr1g121670) derived from phytozome v7.0 (chr-ID MtChr1; po s 26569108 to 26569879)
cgacgaagttaacactcaactcgaaacaaaattcagtcaggtagctagactcattcatagatctctctaatttcattctcgttattgtatttatgattccgatttaccttcattttgttctcagatgctagatcggttgacttttaggttaaaattgaaaaactgattatagatttgaattggtttaagtcgtattatgtttctcttcatcatcaattttgaattggttgatgataatcatgttttggtgcattttaggtttttttttttttttttttttatcaatttattgagatatttgaacgcattaagctaatttcaagacgcgcattttgagttattgcatcttgttcctttgcaatcatgttttcgtgtttttgatgctaaaaaaaattaatgtttctgttgtgtaacatttagttgtacactttttcgttatgtttgaatacgagttttgctatacaaagtgattatgtatttagttatgagacttagaggcgtcttgaatatatcttgtgttcgaaatgctatacatattattttcatactttgaagcaccgacacttctgtttgaaggcttgtccgacacttgttattgtgtcgtgtctgactggtcacatgtaattacatccaattatgtagttatcaaattattaccggtgttgatgtgtcaggtgtctgtgtatatcattttatgcttcatagctcttatgtataacatttcttattaatcgcaggagcctgagcccatagactgggaatattatagaaa

SEQ ID NO: 29664 - DNA, 460 bp, Medicago truncatula
  Intron number 1 from transcript Medtr3g010140.1 (locus Med tr3g010140) derived from phytozome v7.0 (chr-ID MtChr3; po s 1657003 to 1657462 reverse strand)
cattttctgaaacataacaaaggtattaacaatgattttatttttttctatttaaaattaagtattgtactgctaaaaaattattcaataactttatttaggaagaattaaatgaaagataaattattgaatgtttattttgtgacatacatagagtaatataaatatgatagggttaaaaatgggtatataaaaatgaattttaaaataagaagacacagagcaattataatttgtagatgttcaagtatcttcaatattttaggtatataatgttttaattttttcttaaaaaaaatgttaaaattttgtaatctccagatttaaatttaattcatatgataatattgatgtcataacactatggcttatgtacttttatatatagtcatactaatcaaaatttctggatccgtcacttgcagaaacagaagaagggtcatttccaaattggttttct

SEQ ID NO: 29665 - DNA, 886 bp, Medicago truncatula
  Intron number 1 from transcript Medtr1g020530.1 (locus Med tr1g020530) derived from phytozome v7.0 (chr-ID MtChr1; po s 4504243 to 4505128)
tcatacccttttcttctttcatctttttgcttcaggtaaatactttagacaattatttgtgtttttgtttttaagaatgttataaaacattgatgttgtgattttgttatgtgtaatgtgtttgagacatttgggtgttcttatttaagaatattggaatacccctttagctaaagtatgtttttttttccttcttctgttgcttattgttcttgtttgtgtttgtgtttttttgggactaaagtcaattgctttgcttgcatagttaaggattttgatttgttttatcaatttaaaacctagtttggtgtgtgcttgatttcatctctgtgtgtgtgtgttgttctgtattagtgttgtaatttgctttctgcttgagtatgatggttacaaatttgacatcgaatttcgagaacaatttagatgattaaccatacactggatacaattaattaaccacaattttgaactttgttaaccatgattttcataatcataacaattatattaggctttgtttgttgattctggatttctggtatctttgtccttttgaatttttctgaatattgtgattgtttacaatgggacggtgtcagcatgtaagatgcatacaagtttcaaaaccctctcactatacgtttttattcttttgtgacatttagctcctcaaacattaatactctgaaaggaaagaatgctttcgttggtgtttgtgttttgcacttatcttgtatcagatgttgtcttatttatgtgcttcatcctttagatccttaaacatatttgaaacatatgtttgtcgtatgaagattgtcattgatgaactgattttatcaaattgatgacagaataacattctcacagaatctttacgctgtattgt

SEQ ID NO: 29666 - DNA, 519 bp, Medicago truncatula
  Intron number 1 from transcript Medtr3g089940.1 (locus Med tr3g089940) derived from phytozome v7.0 (chr-ID MtChr3; po s 21318009 to 21318527 reverse strand)
ccacgccaatatatgtatgtttgtaattcttatatttatattcattcagcttttttttttcaaaaaaaaaattcattcagttttttttttttttatgaaattaaatcacaagttacaggatcttgctaacaagtgttattatggtactttgttataaaaattcagaaaaaagaaataatcgataaattttatgttgaaaaaattactttttaatgagtcgatgtgtaaaatacacaactcacgaaataaaatttttcctttaaactttttatcaagtatcataaggatacttgataacatttctcttataaacagacaccttttatgtgcaaaacttatttttcttccaacaaaacaaagtttgattgtttcccttccgttatagcataagctgttggaatattttattatttattatattccaatatcattatgtgggcaaatatcgtaacaataattatattagctatttatcaattgtgagccttagttgattagtgatcaaattaagtaataagg

SEQ ID NO: 29667 - DNA, 692 bp, Medicago truncatula
  Intron number 1 from transcript Medtr1g118300.1 (locus Med tr1g118300) derived from phytozome v7.0 (chr-ID MtChr1; po s 25671781 to 25672472)
accaagtaagttttttttacaaaaatatgatcaagtaagttggtacgtttcagtagtataaattaaaatagtttgtgtaaattaactcagttgataaagacatatatttttaaatagtattttttgtgattacatatatttttgggtaaggacatatatagtaatatatgcaggcaggggtatagttcaaatgccggatagcccatctaaaattagcactctttaaagaaaagaaaaaaaactaagcaatatttagccaatttaatttaattaaatgggttatacttatactactttatatgtcggtttagtttattttgaatggtggtatcatatttgatgagatttttattttttctggttaaactttagtgaaaaaaacaagttcttaaattatcatgtttaattgcatgaataagtgattctataataatttacatgaatttgcacacatcaacgataaggaatgtgatcttgttttagtaaaagaaaaaggacgacttagattgaagttacgaacgtgtttgataatttctatttaatacgaactatttttatttagaacttgtttttttaggggaaaattattttaaagcttatgcgatgaacatgattgaaacaacttttttcatatgatttttttttttttttggataggttaggtcctgggctcacatcacgctagtgacgag

SEQ ID NO: 29668 - DNA, 300 bp, Medicago truncatula
  Intron number 1 from transcript Medtr2g074450.1 (locus Med tr2g074450) derived from phytozome v7.0 (chr-ID MtChr2; po s 17094044 to 17094343 reverse strand)
gccgtcaacaaagcctagggttcttccacccaagagttagttactcttcattatctcaatttgtttttgtgtcttttttgttgttgagggatatattatatttgattcaatttgattactcattagtcctctggaatgcataacatgattagttatgaattatgattaatgtgctaaattggctgaactcttacagtaaattatttatgggtttttcgtgttttgaatgtgttgattcttcacaattgttttagtgaatgatcttctttttgtgattgtttgcaggggtttataaaaaca

SEQ ID NO: 29669 - DNA, 983 bp, Medicago truncatula
  Intron number 1 from transcript Medtr3g034230.1 (locus Med tr3g034230) derived from phytozome v7.0 (chr-ID MtChr3; po s 9393890 to 9394872 reverse strand)
ctgcaggtctcatctcattccttattttcttttttatcattaaatttttgtaagggttaatttgttacatatgctactatagaatatgtacaatcaaatcaacaattggcttgtttgaaaatgttatactatatgttatatgttatacaagttatgtttggaataacatgtcatttttgtaagggttaaaaaatgtatactatgaagcataaacacatacacggacatcggatacaacacagacaccgataaaccgacacaaataataatttgagaaaatgacgtgattcactgtaattataggcgtcgtgtcggacaccgaagcgtgtccgacaccagaacacccctaattcaaggagtgttcgtacaataggacataacatgacttggtataagtttttatgaggtgcatacttcaatgttttaaaacgcagcagcgataacaaaagtgtcacaaatcttaattaaggagaatgatgttggagtcattcaaaatactgatgttgaattccaaatcccagtcatatacctttatttaaagactgcttcttttcccaccatatgagtttctcgcgcgccctatgcagtttgaattatagaatccgaacggcataaacaacccataaaaatttcggaaaacatgttgaaatatttcggattttaaaatccaaataggacgcgcgagaaactcataggatgggaaaaataacgaccttatttaaagccctacacaacggccttatttaaaatcctacacattgttccaagtttcaagcccaaaaactcttggccatgtgctaaatttgagtctacattaagcaaaggattgtgactactaaaatatttatctttacaatataaatattttaattactagcatctttttattgtacttggttgtgcaataaacatgactcaatattggtatgttttgtaatttgtttgcaggagcttccaattcatcaaagatcagaagcagtgaa

SEQ ID NO: 29670 - DNA, 833 bp, Medicago truncatula
  Intron number 1 from transcript Medtr2g073960.1 (locus Med tr2g073960) derived from phytozome v7.0 (chr-ID MtChr2; po s 16792998 to 16793830 reverse strand)
aagcgtagatcacgacggccagaggaagaagaagagtagctcgcgacggcgcagaggaagaagaagtgtttgttgtctgtttccggcaacagagatgagagaagagagaaagtgatggaaatttttaggctttaagggaaatcctcaaaataccctcgattttgtttaaatcagggtcacttttggttttccccttaaaatgaaataattttggacccgctccccgctccgcaattcctctatagcagccggccgctatttcaaaccgccacgatatgatggcagccggccgctatgggagtagttagagaaactctcacttctactattttactattttcattcgtatcaataaagcatcctattttccttaattatcatttgtttcatcttcattatttgctgtgttatagtggatcctttggctcctatcaaaattagactacactcaccattatttataatcttaatacgaattgatatgatttgctaattctaatcttaataattaatatcaggatttgattcattgatactaacaaaaagaaaattactttttttgtcactgtttaatgattccaggcatctagaaacgcaactagttgataggattagttgaggattctgggagcatacttgtgtattgattatactaagcgcttatcatataagcacttatgaataagctattgtaaatgtatataccatacactatactgaagagggaaatggaaaatatctataaaacataaaaagaaaagatgaaaaagaagagaaatcaactagaatcaatgtatcgttgatggaaaatcaacaggtttgaaattgcatca

SEQ ID NO: 29671 - DNA, 356 bp, Medicago truncatula
  Intron number 2 from transcript Medtr3g162990.1 (locus Med tr3g162990) derived from phytozome v7.0 (chr-ID MtChr3; po s 42721557 to 42721912)
gctccttacaggagagattcaagtcggggtttcaggtttttttttccgaactatttatttgccattctctttacctactcaaatgtactggttaggaattaggatggctggagaagaatgaaacagtgctgtgctagaagtggcattaaatgtttatagtgctgtttgtaaatcctttagcccattcatttactctttttatgacatgatatcttcatactctgcctgctgctctgataagttctttttatcgagccatttgacattttgaatatgtgtgcatttctcacagcggtaaccataatttgttttttttgtcagccgagacaatttgtgcaagaactgcaagagacctg

SEQ ID NO: 29672 - DNA, 721 bp, Medicago truncatula
  Intron number 4 from transcript Medtr1g031080.1 (locus Med tr1g031080) derived from phytozome v7.0 (chr-ID MtChr1; po s 7466598 to 7467318 reverse strand)
attactttactcacattcaagagggtgatttgaaggtgatgtttatgtccttattcaataaccttaaccatattatcatcgagatactacattaatacaaattggaaagccttgtaatacataatataagaattgtttgtaagcattatgttgggaattcctccttcattgcagtcccccctagccgcctaattgtggcatttgggttgccttcattgcatcctccggcagtttcattgtgttgggtgtgaaaggggtggatttagtcccacatttctcagagatatggcatgtgtagtgtttataaagcacggatagcccttgcctttaaagtctaagattgacttaggctcaacccaaaaatttaagacattataatccataattagttatatatgatttcatgtttcagcaccgattctgcactggaagcaaatgttgcattcgttataataataatcactacagagttctttatcctttatttatgaaaaacattcttatctttacttgatagcctaacaatttaacatcaattgtacctaaaaaaattaacatcaattgtgcttcatttttttttcaatgttcattcatttaaattgagctgtttttgaaatttgtattgataaggtagtgtgttacagatgtttttttgtcctttttccttccggcttgcttatttcactatacgttacaatacaggctgtcatcaagcctcaat

SEQ ID NO: 29673 - DNA, 508 bp, Medicago truncatula
  Intron number 1 from transcript Medtr1g111910.1 (locus Med tr1g111910) derived from phytozome v7.0 (chr-ID MtChr1; po s 23959840 to 23960347 reverse strand)
ttgtgccatcattctttggatcttttcaaatccaggtgaattatatataatatgaattttcttcatttttcaaaagaaataaatatatagagttttatcattatggttttctaagtataaatatataaaatcacacattttaaaaattggtgacacttattgattatttattcatttgaaaatatagtaattgaatccttcatttctaaatttctcttgaaaaatgaagatgatctctactccaataagatgatatatacttcaataacaaaaaatatgtttggtgacacttatgttagatctaagatccgtaggtgtgttggcgtttacgagttttcctcaacacatagctaggtttataatcataacaaaaaacatggatgccctaaattatatattttttattatagtttatttggttttttaaaagaaatcaaaacaacgtgtattttgatttaattagtttgattaatttctttatttgtttttggaaaaaatagaagtggga

SEQ ID NO: 29674 - DNA, 448 bp, Medicago truncatula
  Intron number 1 from transcript Medtr1g093470.1 (locus Med tr1g093470) derived from phytozome v7.0 (chr-ID MtChr1; po s 19003576 to 19004023 reverse strand)
atttgtccaactaacaacattacttccgaccccaagtgttttcctgacaccaacataaccaaaaaccttatcgttaatcccaattttattgaattgaaacaatcatgatagcttatatttgcagaaaattctttaatattgaacaaaccaaaccatgtataaatttgaactgatttactattatatgaatttatgtatttaattctgtatttaactgttttaaacttgttttcaaagttgtcaaatatcacatcagtttcagatttaaaacgagaaaagtctcatgcctgaatttttttattatgatattatttatttattttggtgccatgtacctattctattcagtatatatacctgaatataatgtacctcttctttatttattttagtgccctgtacatcatttgcaggtgccgaaggtcttacttttctccagctttccaag

SEQ ID NO: 29675 - DNA, 487 bp, Medicago truncatula
  Intron number 2 from transcript Medtr4g011960.1 (locus Med tr4g011960) derived from phytozome v7.0 (chr-ID MtChr4; po s 1875302 to 1875788 reverse strand)
taatctccaatattctcaaagagaggatcttacaggtttcgctctctctctcttgcatgtttctgatagttatattttttatataaccaatattagaaaagagaaattcttataaaaccagcaatgatttttcctatcattacttcaaattttttttaggtagtcaaataattttaatttttaggaaaatgtttggtagacacctaaacaccttaagcgagagagacagagagaaataacaagagtgatgtgatagatttgatatgttggtgatgtgataggaagagagataaagagaaaatgaagtgttaaatgagtgtttggaaaattggggtgtccaaatatcattgttttaatttttactgatcaaaatacgaataattatcttatgaggagtattatatcattgttaaatgattgtgatattagtgtttatttccacttttttacagaatttgactgtcgacgggggtggtagtgttttgct

SEQ ID NO: 29676 - DNA, 890 bp, Medicago truncatula
  Intron number 1 from transcript Medtr2g095420.1 (locus Med tr2g095420) derived from phytozome v7.0 (chr-ID MtChr2; po s 21800755 to 21801644 reverse strand)
gttgttagtgatcagactctcaattttcagaacacgttcgtttccaaacactctcatttttttctttcttttaatttctttatattatcttgtgaatttaactagttgttatattcattaattgacatgcaacaaatcactggataactttacactgtcagtgtatgtatagttattaaattattatgttgtttactgcatgatcattttgatagttattatgggttatatcaatgttaagttgcaacctatgaaacacaaacacaaacaccggacacgacataaacactgacacgatatagataataatttgagaaattgacataattcagtgtaatcataggtgtcggtgtgggacacctattcgtgtctgacaccggaacacacctaattcaaggagtgtccgtgcttcataggttgcaatgtagcacaaacacttgattgaagacaggtctgacatgtgttagtgtccaacaccgacacatgtgattatattcaattatatcatttactaaaattatcaccggacatgtcagtgccgtgtccattgtccgtgcaattatagcatttttttaggtcttttcaaattaaaaaattgttgcttttcgtgtcctaactcctaacatcatatgtgacccaataaaatcatgccatgtggtccaataagttgacgttgtggaataaaagcaaaccgttttgaatttgtaggatatcgagtcgaaaaaacttacagatattaataccaaaaaacactataattgctgggactaaaatcatatgtaaacctttttgatattctattgtttactaaataatgatgactttggtggtttttatgtgcgattagttagtgaatgttatgttgtggatttttttccacaggtttggtc

SEQ ID NO: 29677 - DNA, 724 bp, Medicago truncatula
  Intron number 1 from transcript Medtr3g136880.1 (locus Med tr3g136880) derived from phytozome v7.0 (chr-ID MtChr3; po s 34637165 to 34637888)
cctcttttgataaattgagctgttttacgtgataagtaataataatttttcaaaattgatcaagtaatttgactacaaatggttaatgagatttatcaaataacaaatcttttgtgagaatacgagttcgaaccattctcagtaagattttacttacattttttatcaaacttcggattactagtctctttcttcttagaatcgacaattaattaaaaaataaataaattaaagctaaatcttgttatgctttgtcatactccaatgatacgtttgaaatgatggttttagaagggaggagatgactttttttttaattaagctataaaaggtttctaaatataaattaaccttgattgaaatgttatatggtcactcattgtttctttcttatttttttaaatcacatataatttaaaatatggacttaaccctcaaaaactttaatctccaaaatccaacttaagacatactcaaagcagggccgacgaaactcttattaaggctaaaaataaactccaatgaaattcattgacaaaaaatagaggtcttttagttgttgtagttaaatgatttagttgtttttaggatttttaatacatttttggtgagatgattttttattttttttaaacaaagagggcctaagccaatgagagatgatttttaatacaagaaaaaaaaaacagttttttgagaggtctaaagcttttggaaggttgtc

SEQ ID NO: 29678 - DNA, 786 bp, Medicago truncatula
  Intron number 1 from transcript CU651566_3.1 (locus CU6515 66_3) derived from phytozome v7.0 (chr-ID CU651566; pos 20 271 to 21056)
aaacttccgctatcactcacattgctggtaacccctttttactctcagatctctttcttaaagtactttaatttctttaatttctttaatttttggaaatggtgtttgttcattttcaattttgctttagattttaggattttgaatggaatagaggaacatggttttcttttccagataatggagtatcagatctgatctgctttcacaaataagtgtaatatagggaaatagatttgtttagaatttaagctattgttttgatttattttttgtgtagtagtatgttggatctagtaatttagtcccataatcttattttttaaaaataacttttttaattaatggtttattactattattataatgttaaatgattgaccttgctgagtgaaatcttcaaaccagactattcgaaacaatagattgtttttactagttagatataagaatattcaatttcacatttttaggttttttatcattttttattattattattattttgaatattttgtttcgaatgcatctagagattaatcagttgaatacaaatatattatatgatagaacattatgggatcgtttgattcatgtagccattggttgttgctgctgctgtttattctctatatatacaaataaaatcagaacaacataaaaatgtttaatcagaagtataaagaagggaattcttataatttataatcctcatggagaacattttccatatggtagtttgttaacacaatattatgtttgattaatgaatctttttaggtgctg

SEQ ID NO: 29679 - DNA, 435 bp, Medicago truncatula
  Intron number 1 from transcript Medtr3g159450.1 (locus Med tr3g159450) derived from phytozome v7.0 (chr-ID MtChr3; po s 41726933 to 41727367)
tccttgatatctcatttgggaagtgttaggtacaaaacaaattgcaattttaattagatgttatatatacgtacatttctaaaacatttaccaaagtattataaagatttgatgtaggaaaagagcatgtttttttttcttttcttcaagagattaggaaaacaacattataattaacatgatactaattggaaccaatgaaggaaccaacattatgcagattaacgttacataatagttagatttataaaagagactgcgagtttcatagattaaccaaaaagagatttttgccaatatttacatcagacaaaatgaaaagaacaaatgacatcccaaaatcaagatagtttttgactacagtccaaagcgatacgcaaaatagtagaagttcaaatagttcaacaacaaagatctaccttggaacaactcgaa

SEQ ID NO: 29680 - DNA, 883 bp, Medicago truncatula
  Intron number 1 from transcript Medtr3g020260.1 (locus Med tr3g020260) derived from phytozome v7.0 (chr-ID MtChr3; po s 4547026 to 4547908 reverse strand)
caaaacaaatcagatttcacgtatccggggtaagtgtatgatttagctttcttaaaaacgatatctttgctgatgctaaatcttgaatattttatttataacttcttgttatcagttatatcatttgcgggttaataatgtaagacacatgtttttttttatgtaataacacataaatatgttgatattggcatattgcttttatctatttgcaaaaatcaaatacgtatttgtccaacagacaactcagttaatactagtgtaacaaaatcatctctataaactttttatataaatctgaaatatgccgttgacatatacagatttacgttgttcaataaagatgatgatgtttatcttgatgtgtctcaactctcaatgatataacataattttaaatttatgctaaaatttacagagattatcaatatgatatatacatttaatctagcggtatattttataaaatgtatttgattatagttattgagttgtgtaatacttgcactatctaaaggttacacctcggtaatttgatgtcttcataaaatacttgtaccaaatttctttcatgtatttcataagtttgttataatctataatctaagtttattcctctattgcaatatgaattaatttctctgtgttacccaggatctggcaccaccaccaccacaactatatatgtgtattttcaatgttgacgaacttagatgtttacttcgttagtgttgatgttctcttagctttacttcaaaaatcaccagttcttaagatactagctctcaaggttggcaattagttttttatccacttttctttttgctcttttagcgtcttatttatacttttgcttgatggttggtttatcattagggaatac

SEQ ID NO: 29681 - DNA, 459 bp, Medicago truncatula
  Intron number 1 from transcript Medtr3g059100.1 (locus Med tr3g059100) derived from phytozome v7.0 (chr-ID MtChr3; po s 13169901 to 13170359 reverse strand)
gaactaggaatctttgaactagaaggggacccaaagtggctgtcattgtcttctgctttaagtagacagcggggaaatcttaactgaacctaaatgatataatgcaaggatcttttatcatatgaagtcatgttttttccttgcacaagtgttcttgcaaatgttgaagagggggtgtagggcatcagtaatatggattaaatatgaattctgaacttttctcacgacaacatattgtatacaagtaatacattaacataaattgtatcacttattcaaaaaaaaaaaacataaattgtatcacgtcgtgttgtatcatagtttcctttctaaaagttagtctgacttttgagttatttgtttctagtaattctcaattccaattggattatttacttgtttttttacttaatactatgaaaacttttcttcaggtttagctctgatcctgaaacatca

SEQ ID NO: 29682 - DNA, 985 bp, Medicago truncatula
  Intron number 1 from transcript Medtr3g148490.1 (locus Med tr3g148490) derived from phytozome v7.0 (chr-ID MtChr3; po s 38657425 to 38658409)
acaagaacatcgtgttttctccactctcgctccaagttatactccttaatgttcaatatttgctaatgagtctcttgtactatgataacaaatgtttggaaaataagattaaaataagatgtttttatagttactattttattagtcatgattccatggccaaaaatcctccttttagaaagagagaaatgtcctctgaaaccgaaaacaagtcatccgcaaactatagctctcaaacaaacaaatatctcctccagataaaatttcacactcactcgcttcccactaaagttcctatatcacaaaccaaaaaccctagctgatctaagacatgaaagagccttggaaaacgaaatagacaaggaaacttaacccagtcactccagaaggtagtaaaatagtaattgtttatttcaacaaaaagtaggatcttgaaatcctaacggttagaatatatttggaggtatgcattgctttgcattttgattgtccaacttcatgactctagtcattatcaatgttaaattgattaaaacaattccatgtatttgaccaaccattatgtcattcaaatgcatcagcctttccttcttatgtagcatcaataaaaaatagtgtagtaaagttctgcctgctgctatggttgttcaaaaagattgaactgaaatcagctaactgacgggggctagagttttttttctaacaataaacgaaggatatataaaattaaatcaatttttttttttttacaagaacataaaccaaaatagtatttttacggaaaaaagaaaagaagtagaactaatagtatgtatattttgttggttattggccaagtgacaaccacatactcaaatatacatacacaaagaggggaaattgtgaaatacttgtgaaaagtgtttcaactgatctatttgcttaactgattttatatttgatatgattttataaaggttgttgaagtgattaaagaagtgaattt

SEQ ID NO: 29683 - DNA, 1028 bp, Medicago truncatula
  Intron number 1 from transcript Medtr3g114790.1 (locus Med tr3g114790) derived from phytozome v7.0 (chr-ID MtChr3; po s 29139027 to 29140054)
taacaagaacggcaaatttttcaacaaattttgtggtttgtttccttgtattagatgatcatgtttttgtatatgatattatgctgattttgttttcaatgacaaatgttagtatttttttgaataataaatgtcagtactttaatggttatgttagtattttctctgtcgtcaagattcaaacccctagacctttaactcatcatcacatttaatccattcactcaagctagtgagctacccggcatgaattataaatgcttcctgggcaagttttcatcatattgagaacatatactagtaaaagttgattattttccctattataaattgtagaatgatgaaactttgctagatagcattatttcaacgttgagtggctcctagttttttttttttttttttttttgtagtgtttcaatagcatacaacttgaactatatgcagagtaatacttgctaattagcgtaacataatgtgtccaaatcttgagtttgttataaaatagatttttcagaattagttgaatattgtttaaggtagttacaattacttgatagtttgttatatttattaccttaggatgtgatagttgttacatgtaggtgcatataaatcatgctttctgtaattttttttcctttattggcctctaacactcttctcaacatagtttttgctgcattctgcatcctttacattcgagctcgtgagtttaagcattcaactcattcatttacctgagttcaatttttagctaaaccttgacttatttacctcattattcatgaatcaaggtcaagaattaactgttgaattgaacttatttccattactatttagcatttatttttactttatgtacactgttttctgaaggtttaaccatagtttttaatttcttgaactataattcaacgtaccaatctagttttttttttttttttttttttttttttttttatctcaatggcttgtgttgtgcataatcagggaagattctccttacaatttctcttcattataag

SEQ ID NO: 29684 - DNA, 787 bp, Medicago truncatula
  Intron number 1 from transcript Medtr1g013530.1 (locus Med tr1g013530) derived from phytozome v7.0 (chr-ID MtChr1; po s 2521268 to 2522054)
gtttggtatgttttagttatctcgaatcctcattttacatttattatgaattcaaattcaaatctgaataataatgtatagaataattataaaatatttcatttattcactttaatttgacattttcttcgattgtataaattataatgagtgttcttaatatacgacgtgtttagcaaaatgggttctggttaataagtcgttcaagcgaggtcgccagtataaataagcatattagagttgcctatataatttctccatcattttttgtaagcacctctaattttttctttcacatgtattaaaaaaattggtttgtaaatttaatgtgtacattttatacgtaaaatttaataatatcctttgtattatttttaaaggaaaatacccattgtatctttaactttcatattttatttgggtaatgaattcctgcattatttttgtttagagaaaataataaaaaaagggacagctttgatggaaaaaaaatgcaccgagttttttgcaaatgagctcataattatatttagactaaaaaaattattcaagtagaacttattattaaagagggattaagtttcacccaaacaatcacatatattctaaaataacatctgtttaatattaaatttcattttgataggtacaaatcctgtgcaacaaattcagatatcagatggtctcaatgtgcaaccaattcagatactcacctctgatttggctgagcaatacagagaggaacaatagagtgagaaatatcttgatttacgcattgttggtcatt

SEQ ID NO: 29685 - DNA, 373 bp, Medicago truncatula
  Intron number 1 from transcript Medtr3g039430.1 (locus Med tr3g039430) derived from phytozome v7.0 (chr-ID MtChr3; po s 10429886 to 10430258)
atctcacagttacttattcttccccatctctccatgttagtcttcttccactcccaattcataccactaatttttttgattcaatcttgtttttcttgttttttagtggctagtgtattttttagttgtgtttttattgcttacactcataatctagtattgtttgttgtattttgtatgattttgattttgttagtgttaaactattaggattggctattcattgtcaattatgtagaatttctattttatagaatttcaatttcttgaatatttagaattaggtattcgattattaatttaatcattttttatgtggaatattatgctctgattaggtatcctctcatcaacccttatctagtccacgaaa

SEQ ID NO: 29686 - DNA, 1002 bp, Medicago truncatula
  Intron number 1 from transcript Medtr1g147310.1 (locus Med tr1g147310) derived from phytozome v7.0 (chr-ID MtChr1; po s 32779199 to 32780200 reverse strand)
attcatattattcaggtccttctttcaatattgtatgctttaaaaaaaaatgctgaaatagcagtgcttaaatcaattactactttctgaatttattcttttattttgaaaatattcctaactgttatgctaaaggaaaatgctaaattcagtgaagaaaatactcacaaaacattcacgattaaatgtgattggctattaatcactactacttgggtgaattccaccaattcctggattcagccaaaaaccgttatctgcagtttactttttaactaaaaaaacaacactcgtgtagtttcctgaaaaataatttgctacatatagcattgctgtatgctaaataattgtccattaactttattcttttctagtataactacctgatgaatgcacctttaaatattccattatctcttgtcattgaactcctcacctacttattctgaattctatctaatcaaaattcctcctcatcatgatcactgcatttcttagccctcaatctccctcatctcccttggaatcttctgtagttttagtttgcaacaaaaaaaattgttacaataatggcaatttgtttaaacattaagatggtggaaatttaggattttcagatttcgtggcttgattgataggcttgaagtgaaattattatgatgtcgtttgatccatgtagcctatcccacttagtgggttaaggcttggttgtttttgttgtaggtttaagacagtgtagtaaatgatgatttcagggttttacttttaggttgtgaagtgatttgagggttttacttttaggttgtgaatataatggtgtacttgcaaaagtacggtaataaaatctagggttagactgtttgtctcctgccttgagagtgctcccaagggtggtatttatagcctccttgtgggcttgttttagtgttacttcagccctaaggaagctgggctttcggtgttttaggcggtttctagaggtttctagaagcttagagaggc

SEQ ID NO: 29687 - DNA, 1019 bp, Medicago truncatula
  Intron number 1 from transcript Medtr3g064800.1 (locus Med tr3g064800) derived from phytozome v7.0 (chr-ID MtChr3; po s 14942145 to 14943163 reverse strand)
atccagtcaaagttttgaaaggtgagatgaatttttgtattttagaacttgaatttcttagttacttggatttgagtttcaatgaatttgatgtgataagtattccatccattcaaaacaacatcacacattcctctaaccttttctaccttgacttacacccccccacttttactcttcacatggataatctggattggctttcaccacattcgtcgttgaaatatctcaaccttagttggattgatcttcataaggaaaccaattggcttcaaatagtgaattcacttccttcactattagaattagagttgagtgggtgcaacctgaacaacttcccatctgttgagtatttgaatttgccttcacttgtaactctttctctttctttcaacaacttcacctctcatatacctgatgggttttttaatctcaccaaagatctcacctctcttgacctttcatatagcaatatacatggtgagataccttctagcttgctaaaccttcaaaatttgagacaacttcatctctctaataaccaactacaaggatctattccttcaactctaggaaacctgtcatccttaatttccttatcgattggctctaataatttctctggtgaaatttcacaattttttttttccaaactctctagtttaaatcatttagacttgagtaattcaaattttgaattccaatttgatttggattgggttcctccttttcaactccataccctttcattgaacaatataactcaaggcccaaactttccatcttggatatatacacagaaatcactgcaaaatctcgacatatcgagcgcgggaatttcattggtagatagatataagttctcgagccttatagaaagaatatccttttatattgttttgtcaaacaattcgattgctgaagatatatctaacctaacacttaattgttcggtgttaaggttggatcataataatttcacaggaggactcccaaacctatcaccaaagcctgcgatt

SEQ ID NO: 29688 - DNA, 898 bp, Medicago truncatula
  Intron number 1 from transcript Medtr1g034330.1 (locus Med tr1g034330) derived from phytozome v7.0 (chr-ID MtChr1; po s 8193600 to 8194497)
atcaggtttctcttcttctccattgttttttttcttttgttttttttttcttctatcattttgattttttattgatgaaaatttaggtaagaatacggtgtcttaatctaaggtagaaaaaccttttctgaatctattttggttttggttatgtttttattttattttttaactgtcagatattaatgtagtgtgtctgtacttgttgtttgtagatatttttttggcaattaattgtttatagattttaggctctactaaagatggaaaattaagttattttttgttaatttttccataattcatttttggttggttttctatttttggatgctaatttgtctcttttaatttactgcttaagattgattgattcttctttagctgttattatatatctgaatttagcagcttaaagtagaaatcaacttcaataaatataagtaaactattaaaataaactctatcttagttattattttatttttttgttaaccctctagttcatggaaggaccctgataatccgaagttcggtcataaattatgtatcgcatgaccataaattgttccacatagaaattgaattcagattctaccgaatgtttgtcctttgatggagcttattaatctctttggtttatagttattatttttaaagcaaagtgtttttgttgtctagatttggaaaatttaggttgtgattctgtgtatgttgtaaatttaacttaaatgttccatgatttgctcaacacctatatatgctatgatatttgtagtgtactatgaattggagaggaagattatttgatagtagaataatctgtatgactatgatgttgaagggaaatcatggatttaattttttttttcctagatatttgtggcttctagattga

SEQ ID NO: 29689 - DNA, 620 bp, Medicago truncatula
  Intron number 2 from transcript Medtr4g006300.1 (locus Med tr4g006300) derived from phytozome v7.0 (chr-ID MtChr4; po s 724810 to 725429 reverse strand)
gaaaattcaaaactgacgttttatattgtatagttatgtgctttaatttatttacgtgtgttctccgattataatgttcttatagatgtaatttttttttaagaaatcattgtggttcttcataagattgtcaagacaacaccaatggagactggaaagacaccgtgtacgaacattgtgttgaaagataaaaagtattattttctaatttgtcagcatcatatgatagaattttatataagtttgataatgatctgaaagatgtatttccttatgcagtgggaatatggttgatgtaacacaatggaaaaaatacttcgtagctttattatttaccatctatttaccttgagttctatgcttccattttgtagtcaatggcaacccaaatatatgtaacaattggtcaggttcgtggttgttcatcaacctacatcaaccggttgttgagaagtttaagacttagtaagtttgcattatgatttaacaatacaatgttagagtaacttattatttcacagtctaatttgattgttttttgaccatttttcttgaattgttgtcgtaaccttaacacttctgaagctcagagtcaaagcttcagtcagaacttaagtcgg

SEQ ID NO: 29690 - DNA, 706 bp, Medicago truncatula
  Intron number 1 from transcript Medtr3g024320.1 (locus Med tr3g024320) derived from phytozome v7.0 (chr-ID MtChr3; po s 5978322 to 5979027 reverse strand)
gtggtgcgtgacttaagtcacacaaagcttataaggtgcgtgagttaagtcacgcaacgtgacttaactcccacagtgatataattgttcaaatagctgggcgcgagcaaaaaatacaagaagaaaaacagtattttaataaaatatgagtcttctgaaacactttaaaacttattggtggggcatttactccgacttaattataaaacacttacaatttcattatgattttgatctcaatctttttgcatgtgtatgggttgctgtctacttttattttattttctttttgactaaatgtattcttcattctttttaataaagtatcatgtgtgcaactcttatgtatacaatttttattaggtaattgatactatttatttaaggaattgaattttttatatatattttcttaaaccattactgttgtttttttaaactctcagttgtgggacccctctaatcatagctctacttttttttttttttttttttttggttttcgcaccggtttccaacccactaataatggtcgactaatccggctcatgcgtagaggcatgcgcactggccaagcgttgttctccctgtgaatcgaacccggtattccccagatacgtccttggaaggagctccttgccactagagcccaagcaacttgatctcggcagatcttctttggaggaaggacgtgcctctttaaggt

SEQ ID NO: 29691 - DNA, 822 bp, Medicago truncatula; identical to SEQ ID NO: 29532
  Intron number 2 from transcript Medtr2g014350.1 (locus Med tr2g014350) derived from phytozome v7.0 (chr-ID MtChr2; po s 3635259 to 3636080 reverse strand)

SEQ ID NO: 29692 - DNA, 373 bp, Medicago truncatula
  Intron number 1 from transcript Medtr1g089510.1 (locus Med tr1g089510) derived from phytozome v7.0 (chr-ID MtChr1; po s 17822101 to 17822473)
gaattgcaaggttagtgctatatttattttattcaatagagaatatttgactttctacaagataaacatttatgtttatagaactacttttaatataatatgaatggaatcgattattgatattagcaaataaatgtatatacacatagattcacttttttgagaaagtaaagtgatttggaattctaaaattaatttttatcaattatttaacatctttagggttcttgaatagaattattttgtcttcaaatctcgatttgattatatttgaaaaattcatttttttgatttaacttggaaattaatgccggatttaacgtcaaattcacatttagggtaacaacatatatacaaatacaataaggggcga

SEQ ID NO: 29693 - DNA, 387 bp, Medicago truncatula
  Intron number 1 from transcript Medtr3g030710.1 (locus Med tr3g030710) derived from phytozome v7.0 (chr-ID MtChr3; po s 8378004 to 8378390)
ccttatcttttaaaccaaatccccgaaatattcaggttgtctacctctctcttctttctatgtttctttttatagattggcatcttaatgatatgatcatttgatttaaatttttggaaagtccaagtattgatattaactttagtttttatacttttgttatctttatagttgagatatatagttaatcactatttacaaatatcatgattcaaaatcaattcatttttcattcattcgtttatttcattcataatcatacaaaaatcattcattcaaaatcaaaatcttgaaaaattcattcatactaaagtgtgtgaagtcattttgatgagactaattgaatccaaagactaaaggtggcgtacggctaggagtgggtggtag

SEQ ID NO: 29694 - DNA, 1013 bp, Medicago truncatula
  Intron number 2 from transcript Medtr3g151490.1 (locus Med tr3g151490) derived from phytozome v7.0 (chr-ID MtChr3; po s 40180500 to 40181512)
ccgttggattgtatctgaaaaggaggaatacagtaagtagattcgaatcgattttgttttgcttctaattcaagtagtttgatttttgttttcttcttattattattaattgtgttttggatttatgttaactttgatatatcgataacttttgaaagaaatcggtttctgctgctacatgaagtatagttttgtttttgttgaaaattttcaattataattgagttactgctgttagatttaagtaaaacctaatctgttgttgattcacgatcacgcatcgtcgtaagttggatcaagttattctgaattataaattatgaatttcatgcaattgaataagcaaactaattgctattttggtgatttattttgtattttatgcataactaaattaattacgtctaaattatctaaaacttggtgttagtgtgcaatacatatacttgcaagtgatcatatagcatacatgtgtatattattgcagtctagatttggattccacttgatttccttttaaaaattataaaaaccaataggaatattttttgaaatataagaatgatttttgtggcaatgttgaggggttgttgtgtaatatgccacggaataataatgaatgaccgcacatcaattattatacaaataaaaagtaaggatgaatgcatagggaattatttgtcaaatctactattaatgaaattaaatagaaactaagactatatagtatttcatccaacctcgctttcattttaagtctgttattcattctggggtgcatatctcatatctgattcttaagactgaagctgttaagtacagttcagtttatcttgcaagttcaataaattttgaaggtttaaatccagtgcatatacacgatgcaaacccgaatctgtttcgtattaattgattttgatatgtatagtctatccaacaaattttgatgtacattttgatttttgtattgggtatcaggtgtctggaagcattctaagagtgaggggcacgac

SEQ ID NO: 29695 - DNA, 600 bp, Medicago truncatula
  Intron number 1 from transcript Medtr2g117940.1 (locus Med tr2g117940) derived from phytozome v7.0 (chr-ID MtChr2; po s 27829277 to 27829876)
aaacgtttgtgttttgtcgtgtctcgtgccattcagtgtttttctttctttaattctatttttaatcttttaacatcaacccttgaatttgtttctgtcacatgtcaaacatctatgcattgaaaatgagtgaatggagcatacctaaatgaagcaaagtttaaatctgattgctagatataggcatctcttcactgtcccgatctggttagcattttcagttgttagctttgaacgtttcatttcccacacatctagatcgttggatctaaggtgttgggttgtttcctacgcgggctttactcattataaatagtgagaggtttgaagtggggggttttgaattggttgatggttgcaccgtcccaactgcatcctaattgttggggggctttatgagggacttcatcaagatgtgcgagtactttgatctcgatggcagccaacagactcttccatgtttttgggattcgatgcgataactcgaaagccacttaccgccaagggttgacctccttctgtcaacggttgaagttttttgaatattttgattagtccttgaaaaactttaaataacattacgtcgtagtgaggttgttg

SEQ ID NO: 29696 - DNA, 910 bp, Medicago truncatula
  Intron number 2 from transcript Medtr1g068460.1 (locus Med tr1g068460) derived from phytozome v7.0 (chr-ID MtChr1; po s 13647201 to 13648110)
catttgtctccatctctccaacaaaccctaactgagtaagtgtatattatttttgtttttttgtttggtaatgatactggtgtttcctattgtttggtgatgtatttggtgtttgatttgtttttcaatttcaatttttctataaccctaatcaaaacaaaaaagggaaaataaaaaaagaaaaatcaaaaactgaaatgttgattcctcaattgtaatattgatttataatagttttgaactgcttattaccatttagtgagttttgaactgagagtgatttttcagtgacttttcctatataatattaacttgtgtatgctatctttttttctgaagtgtttttcttttggtgtgagttttgttgtatggcaatgacttttgagaggaaaatgtaataaataatcctaaatagtagaggtaaaaaagatggaaaatgtaagcttatttgattcaaaaaaaatgtaagcacatcttcaacttcaacttgtagcgtgcctagatatgctaatcttgttgcttcctctatttttgattatgtatggtttttctataactataatcatgttctagcaacctctcatgaaaagtagcaacattcatggcattttccatcagaaaagttctatcgaacctggctcagcttttgaattcagctaacatggtcttatgtttatgaaaatcaagtgaaatataaattggttcattttgaaatcatgtacgttatttcaatgaaattgaaactggcttctgttatgaaatttgaatgttattagaattaatgtaacattgaaaccatgtattgtaatttgatttttactttttttttttattttgattttgaaattatgttgattttgaaagtgtttcaacaggaaaagttgaaaaatctcttcattttttaagagga

SEQ ID NO: 29697 - DNA, 1041 bp, Medicago truncatula
  Intron number 3 from transcript Medtr1g068460.1 (locus Med tr1g068460) derived from phytozome v7.0 (chr-ID MtChr1; po s 13648737 to 13649777)
catattgtgagagttgctcattgagactctttgaggtatatttatcgacttacaattctcaattagtgtttatttacacatgaagattcgtttagaaattattttgtaggttagaatggataatgtagggattttatggttaactctagttagagaagtggtagaatgagtttctaattcatgagaaaatattattgatgttcagattcggtggaaattgctccggtggtcattcggaaaggcatcactaggaattgatattttcacgaaaattgaattttttatactttctttgaagttgattattttgatttcatttcattaaatccgatttttatattctatttggatttctattatttcaattccttttcattatgtgtgatttctatattttctttaaggttgcggatttgggttgacctctttacaacattgggatttcgatataatcttatttggtttgataaatttacaaagttttttgaattttcatgtatacacttgattgtgaattttcatgcgtataaacgattgtggattacttaaattttatacggatactagttttgtaaatctatattagatttgagaaagtaaataattgtgcttgtgtgtttcccttctagttggtggtgattgttgtctcctcactaagtctttatgacttaccccttcttcttatatttttttcagattcaaagtcaagtgcgtagaaagcttgtagcagagttaaagatctgtcaatgtcattcttttgggtaggtctcctccctttgtataaactgaatggtcgatgtatctgcagctattggtagtcgacaaatgttttgttttgagttgtataaacatctagttatgtcactttgagattctgctgataatacaagtatataggcaggattcatatcttggaaagtattcaaaatatagagcatacgctgtcgaaatttctgtggatatcattataagtgaaagtaaatttgaaaattgtttaaattatagtttgtcaaggattgtcaataggcttgccggactagg

SEQ ID NO: 29698 - DNA, 1066 bp, Medicago truncatula
  Intron number 5 from transcript Medtr1g068460.1 (locus Med tr1g068460) derived from phytozome v7.0 (chr-ID MtChr1; po s 13650284 to 13651349)
caacagaggaaagaattttatacaagttattaaaggtacactctctttaggaaatgctatgtgacattaattgcttgagtggaatatttgcatttcttgtttcagactcttgctcctactttaacaccttattttaaagatttcatatttttactcttagtctattgataaagttgttgtcgcgtgactcaaaggtcactagctcaaggcttggaaacagcctcttgtgtaaaaaacatggtaacgctatgtacaatacaccaaaatggtaggaccctttcttggaccctgcatatgcaagagctttaatgcaccgggctgcccttttagtttattgttaccggggtaacaatgatctcatccaagaacaagggtggagcagaggtcgtgtctattagtggtactaaagagaagacactatatcatgacattgctaaatgttttctaagtctttattacattgctaaatggttaatgttatcttggtagaacattatgtgtctcacagagcaagacttttattgtcctttatgaaggtcaatcctagaattcctatctacaagttgtacattctgtagttaattacttgttttctagtattcataacacttcaatggacctctgatatgagtatcttatcttaaatggaaggacctaaaagttataaaattacaaattttttgaagtttgtgtagatcaggttaacgccggttagttcttctcttggcttgtcagttgtcaccataacaagtactcgtatagaccttcctgcttgatttttcggttataatattttcatttttactcctgccattattaaatcaaagctgtcctgcactaaattcatttccatcacaccaagatccatcatttttggtttttatctatgttgatgtcatatttctttaacctttttatttcattgttttgaattagatatatataagtcatatttatgtttgtcttactgctgtgtattttatgtttattatgttagttggtgaatatagaattatttctttctaatgcaggctcggaaaaaagaagagagacttcgcgaagctct

SEQ ID NO: 29699 - DNA, 443 bp, Medicago truncatula
  Intron number 3 from transcript Medtr2g025530.1 (locus Med tr2g025530) derived from phytozome v7.0 (chr-ID MtChr2; po s 6789237 to 6789679 reverse strand)
aagagaataatttctctcaaaaatttggtattataatttcttcttgtaaactatgattctagtcatataccttctcaacttaaatcaaaatgtttcaagttttaaaatgcatttgtggtcgtaattaatgaaattggaggcctaactcatccttaaaaattacatataaatgtgaatgtagctgatattctggtcgtgatgtgtacatattgaggcctctattgcggtcagcatgactgcggaccacaattaaaatccatcttatacaaatcaagaatcacatttaggtttttagttttatattttcatttagtatatgatggtatgcatgttaaatgttaactgcaattgaaagtttccaaatttatgtagatttgagataacatctatatgtttatgtacatgtagagcaagggcaaccaaagagagaaaagaaacattac

SEQ ID NO: 29700 - DNA, 394 bp, Medicago truncatula
  Intron number 1 from transcript Medtr2g025530.1 (locus Med tr2g025530) derived from phytozome v7.0 (chr-ID MtChr2; po s 6789929 to 6790322 reverse strand)
cttgtagccaaaagcttctctgtgagcttgatttaactacacttttttctgtttgatcttctctgtatggtttttcttgtctgtctcattttcatctctttctgacttgcatctttatacttgaacaaaatcgatgtactgttggttcgttcatcattgcaccaactataaattttttgattaattatagtagtgagagaaggtttaattgcagtgagaatgttatgtgcaaacgcacaatcaatcataattgttatcgttagatcattcaaaatatttgaatttaatcatatctaacttatcggttatacaaatgataatgtaataagttttacactcacaatacatcaaaattaatcttaggtgcttctgtcagtgtcaggttcgtttgttg

SEQ ID NO: 29701 - DNA, 552 bp, Medicago truncatula
  Intron number 2 from transcript Medtr3g094070.1 (locus Med tr3g094070) derived from phytozome v7.0 (chr-ID MtChr3; po s 22485413 to 22485964)
acaaaactggttctctctctattttcagaattgaggtttgtcttctttaactttttctctttgtggtcaaaagtagggaatatattgatgccaacataatgattaatcacaagtataattctagcctaataaaatgttcctcatgattaatgatgacacactaaggttaaaaaagaatgaaaatacaaaacctgatcagtgttgctattagaccacaattgatggactgattgatgattatttcatgtttgtttgatctataaagcccttttgaaaaaccgaacttcatttcgaatcggtgagatctcaaggtcatgattcaactaccgtaattgaaccacttaaataaccaaaccatagtaatgatcgattcaaagttcaatcaattgaatcgtttggttcggttcgagttttaaaacatcaatacaaagttacatgtttactaatatgaaattggaatattgttgcaatatatagtaattgaggaaggcatgttgtgggccattgaaattgactagctagcggaattgtttgtgtgtgtgcaggactaca

SEQ ID NO: 29702 - DNA, 752 bp, Medicago truncatula
  Intron number 1 from transcript Medtr3g119690.1 (locus Med tr3g119690) derived from phytozome v7.0 (chr-ID MtChr3; po s 29927899 to 29928650 reverse strand)
gttctagtgcttccttttccctccgtgcactacaggtagccgactccttatctcccctcattttgtcaggcccctgagacatatctatacaatatttcaaaaatgaaaaaatcaatgattttttttttcatacggacatggtgtcatttctaacaattcaacaacaacactaggcctaatgatgcggagggttcatcttcacaggcggatgcgccctagatagtggacccaacgcagtatcagcatcatcatgaggagtatcagcaggaggcgtatcagcctcagtacgagcagcctcaatgtgagtagcctcttcagatggaggctgaggatcaggtggagccggctatggagtatgagcccggaccgcagggctttcccgggggggcttatgagttttcgcttttaccgaacttgttaaacacgtggcatgcaggctttaggtcgataaacaagtaagtatacttgctttattttctttgatggtatgttacttattattttccttatttaatgtttatgttacaatattaaaatttacttattttaatgattattttacttatttcatgtttatgttagaatatttcatgtttattttacttattgcttttttaacggagtttgttagaatacgtgacattttttttaatgatatgttgtttattttacttagtaaatttacttatttaattgttttttgtttttgtatttcagtttcaaaaggaccataagaggaccggtgtcttgaa

SEQ ID NO: 29703 - DNA, 483 bp, Medicago truncatula
  Intron number 2 from transcript Medtr1g146980.1 (locus Med tr1g146980) derived from phytozome v7.0 (chr-ID MtChr1; po s 32654658 to 32655140 reverse strand)
actttcaggccgtcagatacagtcattttcttcaggtatctttcttcttttcacattctcactaatcaatcaatcaatcatatattatacagaattagatcgctaactgttttccaaaatacttgctaacaatatttgaatctaaaacattgtcatccatcctgtatctgtcattcaaattcaatacatagtaattcaggttcataaaacagatagatgtggatcatacatgttgcttgttcctcatactgattaatttttgctatctattcaaaatatgacattactcataagtaagtacatacagagaatgaacaaaatactggagacaaaacctaaattcactacaaccaatggaagggagctcccccatcacgctgcaatcgtgatgggttttcgagaacaagactgctcgaacatgggcaaagatcacaatttgttttttctaattattaattaattttccaggaaacaattgtcagc

SEQ ID NO: 29704 - DNA, 422 bp, Medicago truncatula
  Intron number 4 from transcript Medtr2g008560.1 (locus Med tr2g008560) derived from phytozome v7.0 (chr-ID MtChr2; po s 1651401 to 1651822)
gttgatgtaagttgaaggttctttctgttgaaaatatataatataaatcacatttattaactctttgagtataattattgtatatatatttatgatctttataactatagtatatgaaaacatgttgtcatagacagaaaattctatcatgtttgtttaacaactatcccctagcacaatggataaaggtatacttactcaaaaaaaaaaaaactattaaggatcaaaatccaaataaaatgaaactatagggattaattgtttattttcccttatttctgttatggaagatgtgttttcctatgcttggatttctatgtacgatatatagctaataaacatcactcttgttctacaagagaaatatttgttgatttggttaataaaatatgtactcgtatatggtgttttgcagtttgtgc

SEQ ID NO: 29705 - DNA, 690 bp, Medicago truncatula
  Intron number 1 from transcript Medtr3g068340.1 (locus Med tr3g068340) derived from phytozome v7.0 (chr-ID MtChr3; po s 15895499 to 15896188)
ttgaatcaaagagaacaatcttcaccattcacaaggtatattcaattctcactcttttttcttcaattcagattctttcactcttttttcatagtatttttttttgttacttttttcttgcaatataagcatgacccacttaatttttcctcaaaatttccaacaattggatgaaaattccaaggaaaaattgaatttttcgaaatgggtttgtgttaaattgtttgatttttctctttttcctcacttgttttttacccacttttttaagggcctgtttggattaacaatttatttgcagcttataacacaagactttatcacgataagcgcttatgtatagagataaaaaataaagttaaattgtttttgtatatgctataagttgttttttgaagctatattggagagcttatgaaaaataagttttaaaaaacttatgaaaattgtcattagctgctttcataagttctcccaaacagtctcacaaaatttatggctgtagataaaactcaaataagccaatccaaacaggtccttaattagcaagaatggatggagtttggtttattagtgtttttttgtcttagaaattttgatgataaatgttttctttttgatgtgtcttatcgatcctttttattttcttttgtagtgatttgtggtgaaaattagatttctgggctgatt

SEQ ID NO: 29706 - DNA, 346 bp, Medicago truncatula
  Intron number 1 from transcript Medtr2g009380.1 (locus Med tr2g009380) derived from phytozome v7.0 (chr-ID MtChr2; po s 2056508 to 2056853)
aacttcgttgttttgagcctgtaacttgtcatcaggtaacttttccaccaaattcaaggatttcggttgtgtgcattaacccgcatcttcaattaaaattagacgatctagatttcaatgtagactttgatttttcttttctaaatctaaaattgtgactacacacagttcagattctaaattcagatttgaccatgtttaaataaatattaatgcttttcatttttaaggaccagataggtttgtgtgttttttctttcagtttgcccttcactctaaattaaagcctaagattgggttattgtattattactgtgattatttcaggctgtaataaaagatatag

SEQ ID NO: 29707 - DNA, 482 bp, Medicago truncatula
  Intron number 1 from transcript Medtr1g064730.1 (locus Med tr1g064730) derived from phytozome v7.0 (chr-ID MtChr1; po s 12624216 to 12624697 reverse strand)
agaaaggtcctcaaaatcgcacaaaggtgagaaattgtttgtgttggttaattgattggaattatgttgatagcgggcgacacagggaagacttgggaagaaaagacacatgataaaaattaatgtgattcaatcataacaaacaataacagcaatacttccaacaaccctgatagtgtttatgtattgatgatagaaaattttaaagaactaaccgagcaagaaattacgtaaaggcggaaaactaaagatctatcccataaacgacaggccccattgttttaaattttttagttaacttctgtcagctggttagcataatctacaaactaggcctagttggctatgaccaaattgcacatgtagagtggtattcttgtcacctgggaagttgttgtcaatggatattggtatattttggttttgtagtttcaaaactcttttgattgctaagaaccttgtgttcgcctatttttggcagg

SEQ ID NO: 29708 - DNA, 415 bp, Medicago truncatula
  Intron number 1 from transcript Medtr2g009470.1 (locus Med tr2g009470) derived from phytozome v7.0 (chr-ID MtChr2; po s 2084562 to 2084976)
aaacgtgagtttcctatgatccaatagaattttgatttcttccttaaaattgattttgatttattcctatgaaacttggactatatgtgatgaaagtttgaaaattgtgttttacatcaaatttgttttatgtaaaaacatcctaacatgaatgactttatttcagtcatttttaaccaaattaattttatatattgatttcattcactcataattgatagacactcagaaaaggaactatcatatttatgacattttcatacacaacaacaccaactatgtaatgtgtaaagcatgaaaggttggaataacacatttctggtttaagtggtaagaagtttagttttcttttaacattaacgttaaattttctaaagtagaagcatacatcaaaacacacacagagaaggaacaa

SEQ ID NO: 29709 - DNA, 576 bp, Medicago truncatula
  Intron number 2 from transcript Medtr3g009360.1 (locus Med tr3g009360) derived from phytozome v7.0 (chr-ID MtChr3; po s 1331473 to 1332048 reverse strand)
acccacattttaatccagtaatatattccttttttttttgcacacaccctctctttccaataaatttaatatgttatttttcgctggtaacaaacatttgttcgtttctatttgttcttttactttgcacttgaaattttcaacattactactcatcttaaggtgacaaaatatagggtagcacttgggtgacatagagttgggtgacattggtgaacacaagcattgtgacaatttgattggccaatgtcaccaaactctatgtcacctaagtgctatcccaaaatatatagcattaattagttttattgaaaaatataagagtaattgacaaagggtatagttgaaaaatcatacccttactttttttacttttccaataacttgtttggtgatcaaataaatattttaactatacattaacctccgacgctaaatgtatattccatctgatcattattataagtaaatatattttgttaaattcatctaataattaatgtatcttacttataatatactctcttcgttcctttttaagggtcgttctagtgcggatttagcgttcctatttaa

SEQ ID NO: 29710 - DNA, 296 bp, Medicago truncatula
  Intron number 1 from transcript Medtr3g009360.1 (locus Med tr3g009360) derived from phytozome v7.0 (chr-ID MtChr3; po s 1332372 to 1332667 reverse strand)
tatgtgagttgagtctacttgttcattttttctctatttttttttattaaataataagtgtttggtttagactttttttattaaataataagtgtttggtttagacttatctaccattataacagaagaaaatgtatatatatttttttaacttcattgaataagcccctccaaaaaaaattgaatacatgattgaaatgaattattccctctgtttctttttaagtgtcgttttgaaattttaacatcaaaacattgaagtgtatttttgcaaattttcttcctaatatacgacc

SEQ ID NO: 29711 - DNA, 925 bp, Medicago truncatula
  Intron number 2 from transcript Medtr2g006760.1 (locus Med tr2g006760) derived from phytozome v7.0 (chr-ID MtChr2; po s 803741 to 804665 reverse strand)
gctcagattagtgggataattgcagccaaggtgtgaaatattttttacttgcaatatttgttgagttagaatttctcactgtctgtagtcgactctgaaagtttagtttggcttgtgttgatattccttcattgttgttattgattacatttagttaatgagttagggtattatgacagttttattttatcatgatacgattctttaccattccatcctaagcaacaaaagttcatctatctggacattgcacatattctgaattagtccctgatattgaagtttattgatcgtattagtagtccttttcgatccgtcgatttagtccttgaaattgttctttagggacaatgtgatcgagaattctttaaattatgggaccattttataatttcgttaacttcaaagactaaattgacaacaccctacaatttccagatttttaaattcatacctatacatggctattttgcaattgaaataaagatttaacgggattcttctaatttttttttttgtttcaccaatacacatgctcatatagatttcagtttgacttaatggaagagtccctttattgtggttaatagtgtggatcatggactgtgagaattctgcttagtgtcagagacttgatatcactatctggatcccatagtggtctacttgttttaataaaatcttcagctaatctgaatactgttttgtccttgttcactttaatgtcttaatacactttcaagttaatcctagttggtaattttcttgaatttctggacgggtgaattaagtccattattgccctttgcacaagtatctaataaatggtgcacttttaatatgaagatacagatacttgttattttatttaatagtattgttttctggtccttgcaggagtgtgtgaacccttttgattattgtg

SEQ ID NO: 29712 - DNA, 726 bp, Medicago truncatula
  Intron number 1 from transcript Medtr3g151260.1 (locus Med tr3g151260) derived from phytozome v7.0 (chr-ID MtChr3; po s 40081432 to 40082157)
tctgctagcttggttttgttcgaattgttaacaaggtgtgaatttttcagcttcaaaatatttatgttttttcttcggtggtttggtttttatatctgtttgggtttatgatcaggaatctcttcatgttcatgtttttgatctgttaatgttgtttagattagatcctttatgaaaatttatgtttttttgttcttgatctgtttgttttttaaggtttttctgtgaaattctctctcttcatgtctgattttgtgatagaaccgatgtggaacattgtaagcttcatgtagatgattttttatttttgataaaaaaatagagaattttgcacatttctaaggatgggtttgtttcaattttctataaatattgtttttggcaatcaattaggtagttggtaggtaagaattctgtgctgtcctttccttctggtagtgtttagttgaaggtacaactatatttgtcctaattttgcactaatctctttgaattttgcaattgaatctagaaatagagcctctaaatagggtttctttagtgtattatttttcccactttccttttttgttttgagggtatgggttgatcttagtagaggtctaatataaatgttactttttgggtgagaaatgatctcaagttctgtttatgccaatgtcacattttatttattgttttctgttctttccttcttaaagcatgtgaccttgaatttttcaacag

SEQ ID NO: 29713 - DNA, 439 bp, Medicago truncatula
  Intron number 1 from transcript Medtr1g140550.1 (locus Med tr1g140550) derived from phytozome v7.0 (chr-ID MtChr1; po s 31087123 to 31087561)
gccagttttattgtaaacaaggtaaggtaccatctcaaattactcaaattattatactctattcttgccacaaattcaatccagattaatgttgttgggaatttttgtttcgtttcatttctgttgttgacttttatcaacaaaaaaaacctggttgacttgtattttttatttaaagatgataaataagtagaaaatgaaaattttgaatttattaaggcctcccattcgaccaactaccactttacaacgtttacgcaatgttctttgagattaaaagtcttaacattttttatttttttttgacaagaaaagtctaacatgttaacactgattctgagttgacatctcttcagaaattatgttgttatattgctgaatctttattttattttatttggcagagaaatctaaaaagacccgtcttaaagtgacagca

SEQ ID NO: 29714 - DNA, 301 bp, Medicago truncatula
  Intron number 1 from transcript Medtr3g140350.1 (locus Med tr3g140350) derived from phytozome v7.0 (chr-ID MtChr3; po s 36298741 to 36299041)
aacttctaaacaagcctgcagtgaaatccatcaaggtatgcaattccatatatctctgccattccagttagacaatcagtttagattttacattctagacaaatttatttttatgaatatgaacaaatatctgcagtttagaatttattatatatgcacgtaaatcaaatcgtttagttagtttattttttttgaaacggcgaaaatattattaatacacgctaagaatattatgccttagaagattttgaattgttgtgtcgacagacaaatttgacttcatattttatgcagagtgaag

SEQ ID NO: 29715 - DNA, 862 bp, Medicago truncatula
  Intron number 1 from transcript Medtr1g099620.1 (locus Med tr1g099620) derived from phytozome v7.0 (chr-ID MtChr1; po s 20422658 to 20423519)
ttaagaatgtttttgattatgccgttcatattacttgcttatggtgtttctaaagtgcttctgtgttttgccattgccgcaacatgttatattagctagccaatgtcgtacacttaccttaccaaattaagtactgtatacggtatactattccacacgacacgggcgttgtacttttccccctcttttaacaaaaagcgatggaagtgtgcgtgtacgagggaataaaatgtaagttttcatcactattgaggacatcggatgagtaggattttgtaaagcatatggaactggcttgcagacaaagatttcaagctctttcaagtgaaaggtgatttcgaatctcaaattgacatactaacatggtgtgttaaatcaatggaagcttgcccatcattcctggcgggagagcaatataagtgcataatggctcaccaattttagttttttctttgaatgacttacatgttaaagttcttaagactcttcaaggtgaacttaatagtgtcattcgaaacttgcatgcttaaaaatgttagcgtaattttgtaattcttttcttcttagatttttgttgtctcttttgctattaattaattaacgtgacaatcattttttaatatcaaaagagacatccatctttttggtctggtggagaattgaataatggagagctaaagtaataaaaataagaaatattttggtccgtttaaatgtgaatgtggtgtaagaaaaaggaattaatagtaatgggtatgaaaccgggtcaacccggttaaaacttgggaccaaattcgggttattcacccgttggcgaatataactccatttcccggttcccgcactgtgaagagagaggtgg

SEQ ID NO: 29716 - DNA, 709 bp, Medicago truncatula
  Intron number 1 from transcript Medtr3g104160.1 (locus Med tr3g104160) derived from phytozome v7.0 (chr-ID MtChr3; po s 25799826 to 25800534)
ctcgagactggtgttcctgaaatgatggccaatttctctgtttttttcttctttgcctaaaagctcttttccttgtttaagttgatggctggttcattgactgtttgtttcataatttgaattgacgactcttcttttgatacaactttcattgaaagtagtaatacgaggatattctttgggttctggagcatctgttttgttgccttgtttttgtaaaatgtctttcataataatgaccttaattacgaaaaaaaagaagttgattgatgacaatacttgataggctcaggaaactattttcatgattaaatgcccaatttcatttttgaaattgcaaaatgttaatttcctctattactacatgaataatacgatagacgaatttgataaatgataatagattcaaacagacagacaaatctgattaacattttgtgattttaatgatcattttttattattaacattgcagagggagactaggttaatatgatcatccagttgagtactaaattggatgtttattttgaggggtaaatattatcatttttaatcattttagaatgtcagaacgatgttcatgtcgaaattgaattggcaataataactggcaatatgaaaagctcatctactgccttttctagtcagaccggtccagactaactgtcccagttgacaaaattgatgtaggcagcaagcatttgcc

SEQ ID NO: 29717 - DNA, 446 bp, Medicago truncatula
  Intron number 1 from transcript Medtr1g065310.1 (locus Med tr1g065310) derived from phytozome v7.0 (chr-ID MtChr1; po s 12935675 to 12936120)
agtgtaaggtaaagtgcaaggaacaatgtgattttttcatttgttataatcaatgtaggtatagaatgtgtcgttgctgcgttaaccatacccctgcttgtgtatagtgattaaggcttggaggctcgcaacaatatcaaacaagtatatgtatgttttgcaagacttcacacaataaaataaactcattaataaataaatgaattttaacttgtaatgtccaatggccattctgtttatcaattttttttttcatattatattttatattctttgtttttagagtaaattactcttccctacctcctttaagggtctgtttggtttagggtagtgataacatgtcatctcacgttattcttagcatatttttcagttatttttatttagttttaataaaaaaaataaataaataaaaagatagaggagtattagaacacttgcct

SEQ ID NO: 29718 - DNA, 854 bp, Medicago truncatula; identical to SEQ ID NO: 28348
  Intron number 1 from transcript Medtr1g125380.1 (locus Med tr1g125380) derived from phytozome v7.0 (chr-ID MtChr1; po s 27646580 to 27647433)

SEQ ID NO: 29719 - DNA, 677 bp, Medicago truncatula
  Intron number 2 from transcript Medtr3g029160.1 (locus Med tr3g029160) derived from phytozome v7.0 (chr-ID MtChr3; po s 7617323 to 7617999)
gatgttcgttttctgcttctgcttctgatttgtgcgtttccaaagggaattgtgtcatctttattgatgacgccatcctcaattttaattttgaaaacattctatatgggaattgcatttttgacttggttgaaggtcgggtttcgcctttgtgtgactgtcctgaatattttaacttgttctggccacctccggattggatcgtcaaaagaagctgaatgcataactgagtatgttatcttgcattaaaagctttttaatgtgattgtgatatagcttttttttacgcttagttaatgttgttagattcgaataaactttttattgttggattcgaatgaacttttaatgttgttagattcgaataaacttttcaactagtatttgtagaaaaaaaaaattgttatgatgttatcttcactatgagattctctgactaaatgcacttccaatttttcacaagatcttcatttttttacatgcaactagattttacttaaatcttgatctatttgatacatttcgttacactcttttgtgtcgtaacttatatacgataaaatgtaaaaatgaatacaggtctccatgacaagttattattatgaagtttctgaaatagatttaacaatgttggtttgtttgtttatcttcttttatttgttccttttgcagactat

SEQ ID NO: 29720 - DNA, 732 bp, Medicago truncatula
  Intron number 2 from transcript Medtr2g021460.1 (locus Med tr2g021460) derived from phytozome v7.0 (chr-ID MtChr2; po s 5448092 to 5448823 reverse strand)
ctcacaccaccaccggaaggtttccattgaagcaggtgaattacaaaacacaagcactataattcatattaagacaaacatagtttttacaccgtctcttaagttatttgatcggaggtgatcagaagaactgcactcagacgctcaaatctgtatgagagccaagagttttgaatttttggagttagaagattgtaccttggaggacatgggatgtactcttttatagttgactcagagtaatggttggagagccatttgctgaagattatagacgatggggtctgtaacaatcgaacattgcattttgaatgcatgcggaggaggcgttacagacttacgaaatctaaacatttgctcgatgtagtagcaaaatgggaggtgtgaagagtaagggccaaagcgagtttgggcgtatgtgaagaagatgaaaatagttggaagaccattatttaggcctatgttccaagtatatgttgaccgaattagatcattttcttccactcaccttctcccatccacaatttatgtccatatctctctctctctctcttgatattttctctaaattttagagaaagatagacacatattgtgaaatgagggagagagcaagagtgagtgaaatgagagatcctacaatgagaacaacctttttaggaacattattaactttgaatttaattttttcttgcagttgccagcttatataattgctcaggtcgttggctc

SEQ ID NO: 29721 - DNA, 833 bp, Medicago truncatula
  Intron number 1 from transcript Medtr3g086140.1 (locus Med tr3g086140) derived from phytozome v7.0 (chr-ID MtChr3; po s 20107937 to 20108769 reverse strand)
tggtcattttcctcttaaacctttcttcattagtaagtaatctaccataaattcacttccaaaggaaagttccaacttccaagtctgataggaccttgccaattctaaattgttctgaataaaagattcggagtaggaccaggagactcaatgcgcatcaaagcatacgtcagattttatagaaaattagccataagatgataacttccagattggtatgttattcgaattgcagctagaaggaggcactataccagcaatttttttgacatatctcactatgtgacaattttgacaaaaactgtgggtatttgttttttcttggtagaaggagaaaaaaaaaagaagatttgtttagcacttcctatttagcacgagactttattttttttccctcagtttatgaataatatttgttcttgatttgtcagtttgggttagttgttcaacctagtttaaatgattggtattgtctggcgctacttgttattttcccactaaaaagtcgagagtcacccgtttatgcaaatttgaagttttttttttttttgttacacaaatttttgaaggatttgatgagaaaattgaaatattacaagtatattttaaaattaaaaaaaaaaatttgtaccaatttttttaaattaagttgatacaattaatacaaacaaaaatcaattcaaaggacctttcgccattaatgcccttttaattgtcattattttgctagggagttatagaaaatattgaagagtccccatgttttagaaaatattgtcataatttactgcaaaacaggcctccttgcagctgcaaacagcagtgcaggcgga

SEQ ID NO: 29722 - DNA, 708 bp, Medicago truncatula
  Intron number 1 from transcript Medtr3g157200.1 (locus Med tr3g157200) derived from phytozome v7.0 (chr-ID MtChr3; po s 41394226 to 41394933 reverse strand)
gcgaagtcaacaatatccgacatttatcaactcaggtatgcttctgtgcgtgattgtttcaaatgattaacttattgactagttttaaaatcaaaatcaagtttgactctgacctatattttatttttcatttctttacttttcatttttcatgaacttgctacttgatatcagagttttactgttttctattcaaaaactttatgtctcctacagtgttttctattcaatcttccgtgatgcttgtgcgtgcatatgtaatccattcataagggtttcttaatttctttgatctccgtctttaatcaaataagcacttatcttaatttgttgtcaaataataggcaacatcactgaaacataacgtgaacttttttatttttagttttcattctattaaaataaacaaaaaaaatttgtttgctgtttctaaacgtgactgcgtgttatgttgtcgcaaaaacaccgtgcgttttagtatagtgaacaaaaaccacggaaacaaacgcgacagaacacccttattcacaaaattccactgcggtcgtgtgttgtgatttattccaccttaatccgcaaataaacatgcgtagaagccgaatctcgaaatccttaccgctacttgaactgagattgttatttaaaaccttattctaacggcaaagttttacaggtgagaagaataacaaggttgagagaaagaccggc

SEQ ID NO: 29723 - DNA, 964 bp, Medicago truncatula
  Intron number 1 from transcript Medtr1g025570.1 (locus Med tr1g025570) derived from phytozome v7.0 (chr-ID MtChr1; po s 6371204 to 6372167 reverse strand)
gtactactttatcacaaggtacttgtttgttacatatattctcttaaggaagtttatagatgtctaaaaatttaatttgttatgttttgaaaaatgtcttttattgaaatatttatttatggataaatgatgaggggatgatattttctctattggttatgcaaatgcttccaaggttttcaatgaaatgctgctttttcaaaagcaaaatcacgagcaaattatgtggtataggttgcctacaattcattcatgttaaggaagaatataatgatttttgtggtccaaatgcgttaactgttttaggggatgtctttaaatttttgctcaacttcttgagtgcatagattcataactaaaaaaaattaaacaagcagtaaatgttactttatcaaagttgaagaatttgaatccttaactcatttagttattttatcactatgagaaatgttgtaccaaacagaatcactgtgacaaaagttgtaaaaaataaaataaaaaatcactatgagaaatgttactttgacaataattacaccaaatttgtacaaatttagtttttattgttttttttttttttctttcaaagtcacatctataattataaatgatgtatatttgtataatatcaacttttttatattcaaagaacattagtgcatcactattcttaaataaaacaatgttatttcaacatctaaaaatcaacaacaaatttgaaaatcgtataaaaatatataatttatcagtaatgatatgactagagaagagagaaaaaagcaataaaaatccaaatgacacctaatctgtataaatatacggtgttggacaacattttagtcgtcaacttgtcattactccataattaaacaaccttattgaaattgttaatagtattttattatcttggtacatatgaaatatcacacaaggagagatttggtttgtgcaggaaaaagcaaca

SEQ ID NO: 29724 - DNA, 345 bp, Medicago truncatula
  Intron number 1 from transcript Medtr1g031210.1 (locus Med tr1g031210) derived from phytozome v7.0 (chr-ID MtChr1; po s 7523986 to 7524330)
ctaaacctttcaaaaacaaagtttctctcaaaagggtaatttttctttgcttttttcctctgttttgaattttgttgttgattgttttgttttttactttcttattgttctatgacaataatgtctttctgggtgttttttattttacttttatttttgtgaattattttgggttgatccacgatgtggaaaaatacacaagtttttcggtatatcagttacggcaaataccctgtatttttttatttttatttacttcattaacatattttaaaattatttatttcttatctgatttttggtttatgggttttgtgtcaacagaagagagaacactatcttaat

SEQ ID NO: 29725 - DNA, 856 bp, Medicago truncatula
  Intron number 1 from transcript Medtr1g068530.1 (locus Med tr1g068530) derived from phytozome v7.0 (chr-ID MtChr1; po s 13685441 to 13686296)
gcaattgtaagtgtcttattatcttacctttgctttaacattgcctagataagtctaatattaaacaattgtggcatatgatggagcacatctcgttcatgcctaaaggtaaaatgaaaattttgcaattcaccctgccatcaatctcaaatctttattattcatattgcatagtagatatcgttctttgccaatttttgctattattttttattctggacaatttcgattttccttgtttggcgtttgatgccattttttatacactgtctgttatccttgtcatttctgtttctttagcaaaacaaactagactagcttgcttagtttataactgtctaggttttaggatgtggattagacaagtaaacagttccgacaacggattattgataactcaaaaattgtgaaatttatgtaaaagtgaaaaggaaaatcaaccaaaaatggttttcttattgtgctattaattttcgctctggaaaaatgaatgaatcagctgctatagtgttaggtatcggatggtattgatagggtaaatgttgatgcagtcggttattttaatatacaattatttaggagtagtttttggtggtgtccaaggttcgaaccccggacctatttttggtggtgtccaagatttgaaccccggaccttgcatatattatgtattgtccttaccaactgagctaagctcacggggacattattcaggagtagttaacagtttgtattatatgtagtatttgtatttattaggagcagttataggcagtttatgtcctgctattataaataacgtcatttggccacaactgtagggaaggattcatatttatttagtttggaaccatat

SEQ ID NO: 29726 - DNA, 628 bp, Medicago truncatula
  Intron number 1 from transcript Medtr3g029430.1 (locus Med tr3g029430) derived from phytozome v7.0 (chr-ID MtChr3; po s 7754408 to 7755035 reverse strand)
gtgacattaattgaagtttatagttactataacctttgcatttgaaattcaaatgataagaatatgtaaagactataaaacacacttcaacaaatcacactaatttctctctcttttttctttaataaataattagattttcaggttaacatagttttagagggaattagcaattaatgatgcattttttaaaatatttttgaaattcaaattgcaaatgccttaggagggaaatatttttaggttaactcattagcattaaatgctgcatttttagagccaaaaatttagggttaagttgttgctaacctaacaactttaaggagtaagggattacttgaaagcacaagatatttgacgtagaaattatatatgataagttcgaacctgttttgttttcatcattttgctgtttgtttcgtttgaatggtgatgatgcttcccgtgatgttgaatggtgatgaactctgtgatgacgatgaatgatgatttcgatgacggtgatgatgatgatgattccgtttacggtgatgatgatgatgaatgacggtgatgatgtttgaatggtgatgagtgatgcttcccgtgttgttttgatttcgtttcgtttggtttcacttggaggtgt

SEQ ID NO: 29727 - DNA, 795 bp, Medicago truncatula
  Intron number 1 from transcript Medtr3g034020.1 (locus Med tr3g034020) derived from phytozome v7.0 (chr-ID MtChr3; po s 9287536 to 9288330)
ttgaggttaatgactggatatcttagtggagcaatgagtcgaagatcgtgacatattttatccaaaactagagatcgaagacgttttgatttaatagatactgaaaggaacataatgatctttttaccttttgttgagtagtgctagaagtcctttgatgtatatgggaagaaaacttatgtgattaaagtgaaattgaagttggggaaggagagattgaaacagtgaaacaaagaagtctttggatatttgctcataaatggatatcttggatgcaagcttgtattttttgagttcaaaatttgtgctagttaatggaagtgcgatagaggagtccaaggtgtggaagggactaagacatggtgatcctttgtctctgttccactttgcgatagcagctaaaggcggtggatattggagcttttaaaagttataaggtaaataatgaattaagtttcgatatactttggtctagtggtgttgacctgggtcctcagagtgtattttcccataaagtttttagttcggttgtctctgatgttaatttggattaactagtttagtttcttcataaaaaatgtttcgatatacttcaatatgcagatgatactatattgattacgacggattatgggaaaacttgtggagcatcaaaactattttgggaagtttcgaattaatatttggatgacccctttatggaggtggcattatattttctttcttgtaacattgatagtgtgtcgttagttatgcttttaagtatttcgttaggtgctaacacaaaaattgatt

SEQ ID NO: 29728 - DNA, 459 bp, Medicago truncatula
  Intron number 1 from transcript Medtr2g126400.1 (locus Med tr2g126400) derived from phytozome v7.0 (chr-ID MtChr2; po s 30613846 to 30614304)
gtttagctctttttcagtatagcagctcgaatcaggttaacagattttgttcttgataacttaactaattttttcagacactatgcaattgtattagtagaatttacttaccatttccataggaactaggttggaccttttctgttcatccattcagtatactttgtttgaaggaactcaaatagctactctccccattcctaaactttggtagtttaagccttttaattttgtttcaaaattttgagtgtttcagaaactcaagatataatttacaatagttcttctaactatacccgagataccgagagtagattggatgcataaatatggaaatttgtaagattctataaggtattttggtacagtacaggtgatattttgtattttgaggtgttaacatatatctgtattttttaattggtttgtgtaaatattttaaaccatcaaaatttagga

SEQ ID NO: 29729 - DNA, 778 bp, Medicago truncatula
  Intron number 5 from transcript Medtr3g128150.3 (locus Med tr3g128150) derived from phytozome v7.0 (chr-ID MtChr3; po s 32732749 to 32733526)
agtaacgattttgagctgttctggcagtcgtatgttcacatcatatattcaacattaacttttcccccctgattttctcttattgatccatcacatgtttgatttgcgtatgtctagaataggtcaaaggttgacatagagatgataggaaaacttgaggtggggagaaatagaattacataaacccaaagtagacgttgtagaggtattcgttaatgtaacacctaaagttcaatagttcttttaaaatgaaatcattttcaccttgaattctctaatgtgtaaatatcaagcaattaagtattcttcagactatgttgtggttagtaactcatgcctacttttcattttgttcaattgacaaatgctttcaatttcagtaaaaccagaatagtgagaagttaggtgcaggtttataatttgatctgaagtacgtttttgtaatttatgttttcataccgcattaaaacaaccttgaaatgaaaaaaaaaatgtagggcagtttatgctttcgtatctatcaaaataatcttttaatgatagaaaatgtagggctgatataagttagcctcgttcttgttctctctgcttttaatctatttatttatctgggcagtcaaattaagtttatgaatcatgtgttataattatgagacgacgatgagtgtttgtttttttatacaaggaacgtttattatgttattgcagtaaactttgttaaagtcaataattccatcagaagtctggatatttttgttttaggtttttgtcacaacta

SEQ ID NO: 29730 - DNA, 453 bp, Medicago truncatula
  Intron number 1 from transcript Medtr2g132690.1 (locus Med tr2g132690) derived from phytozome v7.0 (chr-ID MtChr2; po s 32163362 to 32163814 reverse strand)
ctggtggaaaatcttttatattttcttcaactgtaacatcagaatcaaacaccaaaatcaagaataatcacgttttgaaatcgcggtttgggaaagctattttgattttaggtgcggagttcagagttatgtttctgggtatcatcgtgtttcagaatcacgtttcaaaacttttctttatatagtcacaattgcagatagcgcgtttgggatggaaaagcacgattgtagaaagttcgtttgggttgaagaagcatgttcactgatttgctttgaatggtaatgttgcagaattgctttgcagaagcgtgtttggagaagcattttccaacaatagtgttttctgagaagcgtgtttcgattaagctgttttagagcacttctgtagagctgattcaagaagttatgtggtttgtgatccagtgtttggaaaagctattttttggggaaaag

SEQ ID NO: 29731 - DNA, 982 bp, Medicago truncatula
  Intron number 2 from transcript Medtr1g028550.1 (locus Med tr1g028550) derived from phytozome v7.0 (chr-ID MtChr1; po s 6986345 to 6987326 reverse strand)
tggttagttttcaatcacttgattattccttttttttttgtttaattttgtaggttctttttaatttgttgtgtatggtttgtggtgattatttgtttggttaaacttaattcatgaattgaatcgaatcaataatggtttcatatatatttatttgttcattttgttcatatattttgtacaagttttcatttgtttgtttatttatttatttatttacacgtggattacaaacctggtgaactgaatttgaattgaatccacatattggttgagttggttatggtttgcgtatgatgagataaatttgtcaatcagaataaatggaaccagttgttttagaatgattatcttaattttctttgactttgtaaataatgaattttctaaatcaaaattgtttaagtgctgagaatttctgatcataatgtgttcctatatggagtagagttgaatcacttggcttgcgatgattcttcttagctgtttcaatgggcaaacacgctctgatgtcaaagtaaggtagactataagtactttcttttttaaagatagaagtgaagtgaaatgaccatgcctaaagggctcactccctctttacagtagttagattctgagaaagacttgcagacttgatctgttctgggacacgacccccctagagtcttttctttgaaacataagtgacctcttttgattatgattatttctatttcagaatacatttagctgacttagttttttaaacctgaggtcaaagatggctggcttccaagttttatcctcatccataatattataatattatgctaatctgtagaatattgaattgaatttccccttaaactttgtgtccatgcttgttgtattctcatttgatgtccattttttttattgtaaaagataccagaatgtttcaatcattgatgtatattaattaatggctatgaatcttgcagtgtgatccagaggaacgtggatc

SEQ ID NO: 29732 - DNA, 507 bp, Medicago truncatula
  Intron number 1 from transcript Medtr2g121450.1 (locus Med tr2g121450) derived from phytozome v7.0 (chr-ID MtChr2; po s 28827239 to 28827745)
acgcgaccctcttcttcctcaaaattctcataaaagttcgtttttttttattctttttattcattctcttcaacacatcaattcctaattaggtttttctctataatatcaatgctttttgtttcttttacaatttttcgtttcacatgtttattattattattattattttttgggatttcacatgttttgtttcataaccatgtattgttagcttacaaaaacccatgaatttgatattttttgattatatataatttaacatgtttcattgtcaatatgctagctttttacaatatgaatatgctgtctgttaattctatttagcacaaacacttctaatggaaggtgtgtccatgtcaggatccaacacaacactgacacgtgtaattatgttaacttttcaaattattattggcgtatcagtcttcgtgtcgtgtatgtgcttcatatgttaattgtaattgttgtgatgttgttcgtgtttacccttttaggtaaattgaa

SEQ ID NO: 29733 - DNA, 967 bp, Medicago truncatula
  Intron number 1 from transcript Medtr3g111150.1 (locus Med tr3g111150) derived from phytozome v7.0 (chr-ID MtChr3; po s 28178040 to 28179006 reverse strand)
aattttggagttagtcagtgctgagcttgatccaagtaagtttatgagattaattttaattaattgtatctgtaaaaaaaattataccgttgataaatcataattattcatgcttgttactttagaaatagttataattaacgttaacgttttcaatgatcttaatcatttgaatcaaaagtttatgtaacataaattaagagttcaatggacatatatatagtgtctggccctatgggagccctccatctttcaacgtcacaacttcattatcagttgcaaacgtgctaaaaaaaactattagtaacaaaagtggagtgtcataaactaaacaattgagttcaaatggttaatgaacttccttaaagaaagaataatttagaagaatctgagtttaatttatgggtgaaacaattcttggtcaaactatctttacatcagtgcccgaacttcatattactaacacctattcacctaagaacctgagagtcaacgctaaaaaaaagagtgaaataacaaagtagtatatttttatgagatgattttttaatacctttaaaaaatttacaccaatttaacatcctttattctctctctatatctcttcatcaccttcctatcacatctctctatctatctgatctctatatcacttaagaataacaaagtttatttatactttgtgatctctatatcaccttccaatgacaatgcatatcttttaaatccataaattaaataacaagtttatttatctattgatttatctatgatgatgaaaaatgacagccataaattatttatttattattagaaatagtttttgatagaatatattattacaaatataaagtcgtcaaaatagatttttttccttttataaattgactttgattctctttttatttcccctcaaccttatttgcatgaagaagcaaactccaagggagagacaataaaaggaacc

SEQ ID NO: 29734 - DNA, 708 bp, Medicago truncatula
  Intron number 2 from transcript Medtr2g017900.1 (locus Med tr2g017900) derived from phytozome v7.0 (chr-ID MtChr2; po s 4588833 to 4589540 reverse strand)
tctcttcattttcaacctctaaccttgatactgaggtgttgtgttcttattcctttctcaactttggttctacataatgctcattgccataaaatgaatagtgaataccacttagtaacataaacactatttgttgataacattaaagatttagtttcacctccaactgtccaaggcaaatgtacttcttgtaaagtgactatcaactactaataggcgggttctactatggaccacaatggatcggtacttaaaaatcacttgaaactctaacgacaatcatcgatgacgctcctgagatgtagatgttcacggtcctcctccttattcttacgactgagacgatgacctgataattgtcgattcaacaaaaacaaggaaaaacaaatatgaattcgtttcccattgtttttgtcgaaccaacaccaatcaagtcatcatctcatccatgaatagagaaagatgatcgtccttctactttcagaaggcagtgtttgtcgttgtttgagtttcaaacgattttcaaataccagtctatggttgagacttcaaagaatatgttattttcacttttatgtgcaaatctatgaacactttatgttttatttatatgcttgtaagcttgtctcctgcttacaatttattctacttcttcttttgtggccacaaccagtctacagcatctttcttcaaagacaacagtgtatc

SEQ ID NO: 29735 - DNA, 544 bp, Medicago truncatula
  Intron number 1 from transcript Medtr2g010430.1 (locus Med tr2g010430) derived from phytozome v7.0 (chr-ID MtChr2; po s 2534999 to 2535542 reverse strand)
agactcgaccactccatctcattcccctttctccggtaaccatttctcttaatcacattacttaatcacaatttcatttgtagtttctgagctgtttgaattcagattgttaaaactatatacattatacgtgttgttgatgtgaaattgatctctgcatgatgcatagattttttcttattattctgagtatagattgtaaaaacgacgatgtaggttaaattttgttccaatttcattttgtttttttcgttacctattgctttaattctttgaatcatgatattcttcatctttagtaatgatttcacagttgaataatgtcttgacttcaggcttttagttctaggcatattttagttaagaaatcttttccacggacaccggacacgacgcaacactcacactgatcaaattttgagaaaatgacataattcaattatttcaatttaattacatgtgtcggaaaaaaatgtaattcaaattttgaaaaaaatgaattgatcttaacttgtttagaatgaggccattattgtagatacaa

SEQ ID NO: 29736 - DNA, 535 bp, Medicago truncatula
  Intron number 1 from transcript Medtr3g113950.1 (locus Med tr3g113950) derived from phytozome v7.0 (chr-ID MtChr3; po s 28735826 to 28736360)
gaatcatctgcagatcattggttgcaggtaattatattataccatgcacattgtataccatttccctctcattttctttatcatgttcatatatcactaacacatgcatcaaacaaatcaatggtgtagtagtttggcaaagagaattttatgcttaggtttctgctttctaaaaactatgttttttacattaattagtttaattagattcatgatcatttgaattactatagaatttaattaaaagtgctttgtatagcttcttcaaaagaaagtgctttgtatagtatatgttgaactccgttctcatgattaaaagtgaagtagaacgaaaaataaaagaagagaaagctaagaaaaacaaaattaggagaagctagctagaaagagaacaaaaagaatgaaaaagaaaaagaccatgtaaaataatccaattccaacaagacaaattaacacatttttcacttttactttttatcataaatatattaacttctagtttcttttatacaaaattgtcagggcacaattcacg

SEQ ID NO: 29737 - DNA, 551 bp, Medicago truncatula
  Intron number 1 from transcript Medtr2g045360.1 (locus Med tr2g045360) derived from phytozome v7.0 (chr-ID MtChr2; po s 12510553 to 12511103)
cttggcaggttttaaggtattgttactatgctatgctagctagaatattttcttttcttaattgtggtcaattctatagtacacaagtgagacatgtttttttgtcgaaattgcttctatcaaggcattgaaattggtattgttactatgctagctagaatatttcttttcttaaccaagtgatttatatcaaacatgttgtgtagtagtttagattaaaattggttttataaacaatgtgtaaacactaaaaagggtcttaacttatacttgctccattttggatttcactttggtgattttaaagtttcgtgactttgatgattttagcgtatttagaggatgaatgaatattgaaatttaactatttaaataaaaaagaatgattaagagagatatatcttatcttaccatattcgcatcatttctccatcagtatttgtgttttgctcttgcatttgaaaccctaacgtttcttttgagtttcttgttgattcctcttttttgctatggcaggcactcgaaactcttggtggtgctattgcatcttc

SEQ ID NO: 29738 - DNA, 458 bp, Medicago truncatula
  Intron number 3 from transcript Medtr2g019090.1 (locus Med tr2g019090) derived from phytozome v7.0 (chr-ID MtChr2; po s 5160100 to 5160557)
ctttagttgttcaaacaatagcaaaggccattgatgtatgttttattgcatccaacataataatgcatttatatgaattagcctttatttgatcagaaattgatgttggtaataacattcacacaatacattgttagcgcagcctctatgcttgtttcacaagctaggtttttttttgagtttttgtttttattggatttgagagaatgagaagaatagagaaggagaagaattgagttttatgaaattgtgaattcattgattggtgaatcacaaataagcaaaaatataacaaacttgtaaccaactaaacttattgtgattactaagtgatcttaatcaaacaaccttgattaaatcactaaacagatattctaacttgaattaacaaaactaatatacactcaattaattattggctaggaattgattgctgaaggagcagtggagcttttggt

SEQ ID NO: 29739 - DNA, 700 bp, Medicago truncatula
  Intron number 1 from transcript Medtr3g068670.1 (locus Med tr3g068670) derived from phytozome v7.0 (chr-ID MtChr3; po s 16193406 to 16194105 reverse strand)
ttttcgaagtctcttgaaaccttctttcttcacaggttcgttttcttttcctttcttcaataattatgtctctgatcttttattttttatttagttttcacctttgttttttggaattttattgttaggtttgagaaacatgttacatggatgatcatgatctgtctaacgttgtcgtgttttcctttttttttttctttggttaatgattttgtatcttagaattttagggtttttgttcatatatcatccaatgatcatgtgttaatctgtctttgatcctttgtttcgtagaattttagggttttaatgaaatcaattcaaatttctattcaaatttttattgaaagcttgatggaattttctgtcttaattatgccacaaattttctttttataaattggtttgagtttattttcttttgagtgtcgtgtcagtctgacacaccgacacatataatatgttaacgatgatggcgagtgagagtctgttttgtgtccggtggtgtctgtgtccgacacatataatatgatttcttgtatgtcataaactagcttagattcatgtacaagaattaatatgaattcttttgtaaagctttcatgtatggtgaaatttttgtttcttatctaaacatgtttttgttaccttgcagttgctttcattgtccgtgttccgaagttcaaatcaagcaaagtac

SEQ ID NO: 29740 - DNA, 902 bp, Medicago truncatula; identical to SEQ ID NO: 28570
  Intron number 1 from transcript Medtr2g025090.1 (locus Med tr2g025090) derived from phytozome v7.0 (chr-ID MtChr2; po s 6579206 to 6580107)

SEQ ID NO: 29741 - DNA, 675 bp, Medicago truncatula
  Intron number 3 from transcript Medtr3g101250.1 (locus Med tr3g101250) derived from phytozome v7.0 (chr-ID MtChr3; po s 24490444 to 24491118 reverse strand)
aattagtggacaaggtgaagttactttttttttggtggctgaagtcgaaacatgtaaattttgcttttagttatcactgttggtggcttaatcctttggcatgtttgggtatcaccgtgtaatttttcttttcagtacttgtacatagtagatgaactttgtaaactttgtttgttctctgttttagcactccttgtgctagtgagaaagagcgttaatgtgatttatgtcggaacctgctccacctgttaataaaatatatcaataaatcatcaacactatttttgaaagattaaactatatataataatcaagatataagttattactttagacttgtttctgatcccatgcaatactcgaagctagggccgaactttggggtgttcaaagagctcaatggagccggacctccctatagtatgggctttagaaaaaaaattatagctcaatagtactattaagtacaaccccaaataaaaaaaatccttattctctttctctcatatcacgtattttatcaccatcactccatcggactttcattttcttgtaatatacacacctccgcataagatggttttcattgaaatggatgttgactttttcaacgggtttttcatgtcaattacaatctcaatgatgttatgtatacttccttgctgagttgagaaa

SEQ ID NO: 29742 - DNA, 717 bp, Medicago truncatula
  Intron number 1 from transcript Medtr3g117350.1 (locus Med tr3g117350) derived from phytozome v7.0 (chr-ID MtChr3; po s 29544657 to 29545373)
ggcactgcagtgccttggcgtcaaagcacatgcctttgtccccaatcaaaatctatcacgtgtcattgcctatttaaaatcagtgctgctatataatgtgacgaacatgtgttaaattaaagaatcattgtatccaatccactgattctcaattatatttaaaatttgaaagtaaataaattattaaaataaacttaatgccacagccccgcgaaagcagttttcagaatcaatagtctcaaaacctcctctatcctcatagcagccgttgatctacaaacatcattgttgatatttgttgtggccaagactttctctgataatttcaattttaatattttatatacaagtaagttgtttacttttttttttgaaggaaagtaagttgtttacttattagtatttaatttattctgtatcatttctagaaaagtttgtgccaattaattaattgatattccatttgtttacttgtttagtctattaatatggaactttttttaagaacattgttgtatcagtgcaagaaaggtttggaaatcaatactcatcaagaatcacactgttacgatagactaaaggaattgatctaatacaaagcttatcaggcgatgcattgtgaagggacaaatatttttgaagatatcattttctatatttacatttccttgctttttttcaggttcccccagctgaattagagcacatacttcatac

SEQ ID NO: 29743 - DNA, 420 bp, Medicago truncatula
  Intron number 1 from transcript Medtr2g055790.1 (locus Med tr2g055790) derived from phytozome v7.0 (chr-ID MtChr2; po s 15036580 to 15036999 reverse strand)
atttgttctgaactgaacgtgttttgcaagcctattcacaacttttctatgatggacaattatttgaaatgtttgatttcatatgttttggttttatagtaatggcacacaataaaattattaaattatatgtttgtttatttaaccctttggctattatttgtttgtgttgttctattgtctctcatcggtaattaattggcaattacattggatatcttcttataaccaaaataatagcataatatctttaaattgttggtaagaattaattctaaatcggtgcaattaattgattgcacttcttttacgggagtatattccttttataatgttacattctatataaatatataccccatgttgccaaacattcacaggcgatattgtaatgatgttttgtgtctgagggtcaaaggg

SEQ ID NO: 29744 - DNA, 956 bp, Medicago truncatula
  Intron number 1 from transcript Medtr2g090760.1 (locus Med tr2g090760) derived from phytozome v7.0 (chr-ID MtChr2; po s 20317204 to 20318159)
aactctgaacgtactgtttgatcttttttttcggaatgtactgtttgatcttttttttttgcgcatgtttataattttgaaactcatcattttcatcatgtttccaatgcatcaaggttggactataatatctcataattatattggaggaaaatcttgtcaaaaacataaaacacttgaaagactttggagaatcgtctataaactttacatgaaacttgacaaatatttagaaaatagttgaaaagtgaaagatacaatatgaaaatccaaactctagactccttgtgatccagcttcgacctgacttattgaacaactattgagtacttgtacctcacattccttcaatgtgtattgatacctgaaaaagaaacaataaaatgggaaaagatatactatctcagtgaattttcgaataaagataaaacataaaattgtcctttgaaatcattagttcaaactcatattaaagtaagtaatcttattatatataaatttataacatcatacattcatatttgtgtcctttaagatttaagatgaaccacccgttaattgagatttataagttaactataagtaatgcatattatttgaacaccagatgatgaagaagatttgggtagcacttgggtgacatagaatttgtgacattggtgacatttggagtttgaaccacaacagttgcagcaaggtgatagcgttgatgaacattctttttcgcctgttgttggggatcttgattccatggctgactcgaaccgttaacaaaacttgcgtatgtatgattatccacaagaaatacgagagtcctgtgccaggattctcaagctgttgctagaggagatcaacgctacagagacgagcgaagcacttccgacttcagacgaagttgttgcatctgcttaaccaattaaggaacattctgtcaccggtgaatctgtccaggtgaa

SEQ ID NO: 29745 - DNA, 618 bp, Medicago truncatula
  Intron number 1 from transcript Medtr2g015100.1 (locus Med tr2g015100) derived from phytozome v7.0 (chr-ID MtChr2; po s 4034766 to 4035383 reverse strand)
cttcgaacgagttttaaggttacaacgtactttttgtgagattttgattttagggttctaaaatgtggtatttatactattagatagattatttaattaatatataaagttttataattaatataattttttatataattaatatagaaaaaaatattgaaaatcccatatttaaagagaaaaatctagcttttagtttgtgataaaaatatccaatggatcaatttaaaaaaataaataaataaggaaatgcccgcattcaagaaaaattataccacgagaagatcacgatgctagttcattaattaatacccctcctccaccttttcaatctttggtcacccatgttttccacttgagccaagatctaacggttttaattactcgtgatattttcgggacattttctttcgaatagcacaactttaaaaaaatcatatgacaaaaaattagtcttcaattatgtatgaattaattttttaatatttaattaatagaaaaataataaacatatttcagaagtggtcagtgataaaaatataatcaaacacttttacgtttttctggtaaaaccatatttcagggtggagctagttgatctttacagcggtttccaat

SEQ ID NO: 29746 - DNA, 576 bp, Medicago truncatula
  Intron number 1 from transcript Medtr2g088470.1 (locus Med tr2g088470) derived from phytozome v7.0 (chr-ID MtChr2; po s 20017084 to 20017659 reverse strand)
caggttagttttttttttttttaaatggcaaataaaagaaggttagatcatgtcttagtattacccactgctaaaaaaatataaggattaaatgcattttagttctcacatttcccccccttttttttttgaggtagttctcacatttcccttaaaatgaatttttagtcccctatttttaaaataaattttttggtccttcgttaatcaaattttgggattttttttatcccctactatttttgatgaaatggtgctcttattaatgacatggcagtgatataacattagcgagttggaaaaaacgcagccacgttaacatagaaatatggggaccttttttaaggaattagtaagagtaaaagtgcatttaaaccaaaatataaattaacgagaaaaatttagagagaaaaaataagttttttttcttcttctaattttgtcggtaaatattatgacgagaaaactagagaataatgaccatatttttcgtcactataatgtccgttgctaattttatatttttttctagttgggaccaaaattttaggctaatttgatcattgaaattcggtg

SEQ ID NO: 29747 - DNA, 585 bp, Medicago truncatula
  Intron number 1 from transcript Medtr1g099850.1 (locus Med tr1g099850) derived from phytozome v7.0 (chr-ID MtChr1; po s 20547628 to 20548212 reverse strand)
cttgtttaccaggatcttcttaccggtaaacccatcaacatctttgagatgttttgctttagttttcatttgtgtttcttttcatcggattttgatattttgatgaatgtttcatacttgttccctgtatttaatgaatgaatttattgttatgtttttatgcacatgttgttcataataaacctcactttggttttaaataattcttctttatcttgttaggtaattaatatttttctagctgtgatgtgttttgtttagttttttgttccaaaaaaacagaagttttaaggttttcaaaagagtatgaagttttatgttgtttgtgttctgttggtgtaatttaaagtaaaagttgttgtgtttgtgttgtgacagaggattaaatttatggtttcatgacaaagtgctaaattaatattttcaacccttaatcatgatcagcttaacctaatacttgattatggattctagtttgtgagattgctaactgcttcaaatatttgtgattattgtttttgattgctgatggattgagtaaaataatgctgctaacttttgtttgttgatgaatttctctaggtg

SEQ ID NO: 29748 - DNA, 1006 bp, Medicago truncatula
  Intron number 1 from transcript Medtr3g041050.1 (locus Med tr3g041050) derived from phytozome v7.0 (chr-ID MtChr3; po s 11359751 to 11360756 reverse strand)
gtcgtagaggcggcggtgaaagatcttttcaacctgtgagttatcaatccatctcgccgatgagttgctgttttcttcctcctttcaaaattccacatcgtaagactactgttgtacaatcggtaagtccgattgtgttgttgtttgttctgctgaaaccacaacgctcaaagaagcttcgatcaaagcagtacacaggttatattttttattcacgatatctagtatctatttatgttgcttctgcgtaacgatttctagtatctatttatgctgcttctgcataccacacgatttctatatatataaattaaaaataagacttctggtgatatataacaaaaggtaatggtagtttttgatatagtttccaagcacttttctcatggacatattttttgaagtcgtgtttgatggcgtaattgttttatcctgttgtaagttccattatcaaatattgacctatatgtgcctttgatttagtttccaaattaaaaccactcatgagatctttaatttttgctatttgtgttactatctattgttccattgcgctaccatatgtttttaaacctttctgctattcattaatgaaatttccaccacatgttgttaatctactttatattcattaatttaactaataatattggacagatttataacgttatattccccttgttagtaatttattcatcataatatgcacactcctgagtgtatagtttttaatattgttgcttcttggttataataaagcgtgcctatagtgaacctacagtgagcttattcagttactatttacacatgctcttagttttcttctagaaatcatcataatttatggaacttgaaatatcaacataatactggagattctcactcatttatttaactatttattatgtgtatttgatttggccggtttcgatatattgcacaaaacgcccttggaaaagacaaaaatgcagtgagcgtggatccggtaaaacggacccgggctaca

SEQ ID NO: 29749 - DNA, 747 bp, Medicago truncatula
  Intron number 1 from transcript Medtr3g028660.1 (locus Med tr3g028660) derived from phytozome v7.0 (chr-ID MtChr3; po s 7423793 to 7424539)
ctattactaatcataagtaatacagaagaaaaaaatatataaatatatacaactcctgcaaaaaaaaactctgatgattacaaacgtaatcaacaacatattaaccatagtgcaatattatttgtcaatggctgacttgatttaaagtatatattacaaccaacttcttgaagataaaagagatccagtactgaacacaaactaattaacatgataaaaaataccaacataccttttaaaaacaaatcaatggttattaataaaacaattaaatcacatgggttgtctttttcctttcattccttcttcataaccaatatcatcttcctttctcacaacacaccaactcatctcaacccatgatgttcaaatttgtgtgtggtttttcatcacaatttgtcctttttcatccaatttgcaatttcattagatgattcggctacaaaaaataaaagagaatgaaaaagaagaattagaagtagaagcagagatggagtgtaaaaatcaatttcccagcgatcaatctaaaaccaacttcttatgaaacagtgaatttgaatctccttctctcacacactctctctctctctcaatcaagaaaataattaattgatgtttttgaagtttaatgaattttatcttttaatttgttgaagaaagaaaggtggaaaataaatatgggagtgagaacaccaccgctgccgtggtgcagcgcctctcaactccaccgcgcggccatcacttgtg

SEQ ID NO: 29750 - DNA, 855 bp, Medicago truncatula
  Intron number 1 from transcript Medtr3g151640.1 (locus Med tr3g151640) derived from phytozome v7.0 (chr-ID MtChr3; po s 40259949 to 40260803)
tcgcgtttccgggagcctttctagcaggtgttcaggtatgtattgtatacatgcctttgggaatttaggatatataatactcatggttatgcttgatcattttactttacacttttactgtacaatttgtgattgtgatcagtgaaataagctagggcatttcattcaagtcaaagtcataacactgaaaacgaactctttcgtgttgagacttgaatgaaaactcttatgtaagatggatccatactgttggtttgttattcatattttatgaaacaagactctctgttaccagcctactaacaccaggttcgaaataagtatgaggggactttcatgacacataattattcaattttaatcatgctctatgtcgtcaatagcgtgatacagtgccccccccataggcacgtgaagctccttttagagcagcggtgcaattgtggcgtcatactcggtttgatggccgctattgcaattttggggaaaatcctgtaaaacccctaatttttgaacttatttaatttgttgagggtatattgatacgtttgcaccctttgagtgacctaaatttgtaacccacatgtttgatcgttcaattgtggcctctctctatcgtcgtgccctcgtttttctctgctctcgtttcaatatttctttgctttgctcgagttctgcttcgttgccttgctctcgttcgagttcttctctgtttcctgatctgctgccattgttgttctccttgatcgttcaattgtgtggcctcttgttcgtgctctgttttgtgttctgctatcatcgttgctctgtttaagtttagggtttgtgcttcttctgcgtgttttgtttgcctta

SEQ ID NO: 29751 - DNA, 524 bp, Medicago truncatula
  Intron number 1 from transcript Medtr3g086670.1 (locus Med tr3g086670) derived from phytozome v7.0 (chr-ID MtChr3; po s 20366097 to 20366620 reverse strand)
cggagatcagaaaattcgttacggagatttttgtaagattttccctatcactaaattttacatattcacattctttttagcaatagttttacattttagggtttgttaactagattgcataagacacttctgatggaatgtgggtctgatatatgatacaatgtttaataccaacaattaaatatgtgattacatttaattacatcattttttaaattattattagtgtcgaggtgctagtgttgatcttcgtaacttggtgttcttgatatttaatttcttgttattcgttgaattgcattttttttgatttgcctatttaattgtacagatgagaaaaatgataaaatatttgtttcatagagactgtatcatttctctgatttttccgatcactttccatgaatttccacaagcctaaagtcaagtcaattaacccaattcatacgtatgttcacaggtattgaaaaagcactaagatcattctttcatgtctttgaaagcaccagtttgaatcaatgaac

SEQ ID NO: 29752 - DNA, 381 bp, Medicago truncatula
  Intron number 1 from transcript AC235668_18.1 (locus AC235 668_18) derived from phytozome v7.0 (chr-ID AC235668; pos 58394 to 58774 reverse strand)
aactctttcctccaggtacacacgtatttgcttaagattcaaaaaatttatagtaggtacgtagtagggttcaactggtttaataaacttagacaaatcttcagagaaaacacgagttcaaattctaacaaaagtagttattctccaaactctagattatcatggctcttaattcctaagaatcaaatgataaagaccaaaaattgtttgtaacattttacaatacaattaaataaaataacatgtgtcaatgacacgtaaattgaaaacatttcgaattgagatgtaaattaaaaacattaattggcaatgtatgttttaatttgtgtaaatgaaatttgcagaggaagataatatattgacaaatcaagcaacaaagaa

SEQ ID NO: 29753 - DNA, 757 bp, Medicago truncatula
  Intron number 1 from transcript Medtr4g012040.1 (locus Med tr4g012040) derived from phytozome v7.0 (chr-ID MtChr4; po s 1899598 to 1900354 reverse strand)
tttttgtatatgtaagacttttttgtctttcttttggtgctcatgtttacagttgagtgatcaatttttttcgtctttctttgggtgctcatgtgcatggttgccagactaatatttcatagtggcaatttcttcaaaaaaatatatttcatagtggtaattaggcacaactttttcttgagttacaattccagaattagaactttcaaatttctgccattacaggtaaagttgggaccattgtctacttctattgtcaccagttatttatttgcatttaaaaaaagtttgttaaaagctttcttaggatgattttattagaagctcacaaaagaagccaatcaaaatagctttccaataagggacgggcttagttagcaagatgcttaggattgaatatgtagggttctataaggtctcgagttcaactgtgtgttctgaaacacttgagctactttgccacaggagttgggctaactaataatctatctgctgtttcattttatttttccttgtcaaagatgaaaaatatatttaggatagttgtgcgcactgtgtaatgtataattaattactatggaatgtgaatcatatgtgagatatccagctaatattatctttgtttattgaaggttctgtggtaaaatactaaactctggatggatgcaactatgccattagttcatgtatcttctcattgtttttgtgttgtttttgtgcatgatggtgttcctattttctatttgatttagttatc

SEQ ID NO: 29754 - DNA, 774 bp, Medicago truncatula
  Intron number 2 from transcript Medtr3g005500.1 (locus Med tr3g005500) derived from phytozome v7.0 (chr-ID MtChr3; po s 316539 to 317312 reverse strand)
gacgtcggctgtggaactggcatcctcaggtgagaaacatacttgactcttgtgaaatcttagttcatttaacagtctctaatctatagcatcattggattatgctctcgtcttcaaaacaaccatcctgttttaaattaagcaaggtgtttcttagaaatgagaaatatatagaaacaatcaaagtaaatgaataattttattgaaaataccgagaattggagaaaaaattacactccaagggattccccttacgacagggcttttgctcagttcttttatctacattcttgaatgccttttgtctaatttgctcctgctatttagaccacagtactaaccaagctacacgtccccttggagactctaactgtaattaactaaactgacaactaactgtctaactaactctaaccctgttcccatgtattattctggcttttataagtggtcctgttttgacttattgtatggtagtaacagaagccagtaaccatgtttcatatacaaacccaaattgataggttactatataaatttcttatgttagttgattttaggaagtaatgtttatgatgtacaacacatttatgaagtacatattattcttttgtttatgatgtacaacacatttatgaagtacatattaatgttttggggctatgtattcacattccatatttgattgcgctcaattttttgaatttttctgacatttatatattattatatattttagccttttttcagctcaagcaggggcttcaagggtca

SEQ ID NO: 29755 - DNA, 439 bp, Medicago truncatula
  Intron number 4 from transcript Medtr3g150540.2 (locus Med tr3g150540) derived from phytozome v7.0 (chr-ID MtChr3; po s 39692373 to 39692811)
aataggctcttctttcgtcctgatcaagtgagtactcaaatcttcattttcttgtcttcaaaataagaacgggatatgatggttttgttgttgtatatgtttatttttgcaaaaccaaaaaattgtatacatcttttatttacaaacattcgaaatttgatctgatattatggtgttgtttgatctatgtgacaaatctcacttaataggagaagaatttggcggtggttcttgtataaatttttattatttccaagcattatgtcttttaaattgaacgagaagtcatataagtaatcatttgcacaaattttctcttcatacttcatagttcgcgcagaaaattccaatttaaaagtttgatctagacttatgtgctgactacattatatatataggcttccaaaagtaaagtgtattttttggctttcaggctggt

SEQ ID NO: 29756 - DNA, 915 bp, Medicago truncatula
  Intron number 3 from transcript Medtr3g110290.1 (locus Med tr3g110290) derived from phytozome v7.0 (chr-ID MtChr3; po s 27767276 to 27768190)
caagtaactacatttctattcatgttttatatctatactataatgtttattcacttgggttatgattgttttcgtttaatatagacttttgttttattatttcgtaaaagacttatttttataggcaaatgttagtaaggttagtggttatgatagttttcaggatcgtaccgaggacctccttcagtgtccccccttagctcactgaccgaacaacttaggcgagacttcttgtatgcattgcacttgaactttcactgttagctatttctagattgatgctttatgattttgaactctcaaaatctgtttttttatataaatgatgcttttgaaatctttcaatgattgttttcactagaacagtcttgttgaaatgtcttcctctttgacatatgttagttgaagattgaaatcaatatcagatcttaaatacttttaaggctatgtttggatggagggttttagaggagacgacttatttttcttttttaaattaagaacattacagtaaaatgtttttaaaaattaattaagtctgattgaagtattgtgttatcatgttgttctttcgattttttattttttttaaatatcaaatatgtattcaaatatagacttggctcccaaacacaccttaacacaaaacagaacaagagtggtagatcccaatgttgttggcttctctcagttgaattacagtttacaataacatatctaaacatatgttattaatcttaattatcactttcccatgtgaagttctttttattcggtagaagtggttccgtcatttgttcataatattcatttgcttttgttttgatttgtagaattttttatttcctgtttaaaagtgtattcctaatgctagattctaatgtctgtcagatttaaacaaacttggtgggcttc

SEQ ID NO: 29757 - DNA, 666 bp, Medicago truncatula
  Intron number 1 from transcript Medtr2g082930.1 (locus Med tr2g082930) derived from phytozome v7.0 (chr-ID MtChr2; po s 18938392 to 18939057 reverse strand)
caaacttgttagatactggtaattttcttttaacaaattgtattctttttcctctttctctatcttagatacaatgtggaagtatgctttgaattctaatcatggtatctgaaagatttaattcagatagatacgctgttggtgtaaagatttttccctctttcaatcaatcgtttgttagatcattaaaagcgtttgacatcaaccatatctacttttaaagtcacatatataaatggatgtgatttcttcatgatgtacatttttacattgttagaatatccaaatttaaactcatatctgaatagggaataaatatgaaatatccaggaattagattaaagttttatactacaccaaatgaaaagtacactacatttggaatagtgcccggtttgtactcagataggtgatatccaaactagtacttggcaagaaatgtgctagttttttagataggttgtaaaataaatatttaggtggggttacttgttgcaatataaatatattgaaactttagtatctattatttaattgaatcacttcttctataacattattgttatggaaaattatctgtttgacatagagattattatttcttaaaatttgagctctaagtggtttgcagctctgggaattgtcaaataatccactggaggctat

SEQ ID NO: 29758 - DNA, 446 bp, Medicago truncatula; identical to SEQ ID NO: 29717
  Intron number 1 from transcript Medtr1g065410.1 (locus Med tr1g065410) derived from phytozome v7.0 (chr-ID MtChr1; po s 13002004 to 13002449)

SEQ ID NO: 29759 - DNA, 658 bp, Medicago truncatula
  Intron number 1 from transcript Medtr3g113560.1 (locus Med tr3g113560) derived from phytozome v7.0 (chr-ID MtChr3; po s 28548094 to 28548751)
agattaaaggtgacgtgtggtcttttgttcttgaggtataaagccattaacattctagttcaatagggttcacttattttctaattgttgttcataaatttgagcatatttttgtttataatttgagcatatttttgttcactaatttgatgtataaagccattaacattctaatttgatgggtttatggttacttttcatctggttgctaaacaatttagcgggcatatatatgtctctcccttagtttttttgaatcattgaaatagtatcagataagttcaaatgtttccaatttcactcatgtacatatagttttatccaaaagaagtatcattataactatttatttttgtcgctatttcaactgaagtttcaatgtttaggtgtctcattatgtcaaaattacttacactgtcttcatagaaattccacataaaacactcttggctttgttttaactactagctagtaccaatcaattctttcatctttcatattttagttgaaaatttaattgtcgtctttaaaaaatgtatgaaaagtatatttatataatttactaaagaattgcttgattgaagttatacaatttttagttattataattattgtcctttcaggtaaagaaaattccagaaacatttgattcgccaat

SEQ ID NO: 29760 - DNA, 557 bp, Medicago truncatula
  Intron number 1 from transcript Medtr1g031490.1 (locus Med tr1g031490) derived from phytozome v7.0 (chr-ID MtChr1; po s 7640042 to 7640598 reverse strand)
gttggtaactttactctcaaacaaataagaataatgaaattgatgttttttttctagtgctccacacggatttgttttattcatgcatgtagttttttttttttttttaagtagtgtagaagttggtctcgcatactttgcgtgaagaagtggaaaatctcatgcttaaatctaagtctatatatattaatacttacttgacactttgatgtagtgttttaaatcaaggaacattgatgtagtgccaaaattacttgttgtatcattgtttcttaccccctcattacaggagtttgttgaaatacattcatcatgatttcaaattgtggttgttattatgtacattgtgagcattgcggcctaaactcatattatgtttgtgcctagtctatctcaaattccacatctctctagaattcattgattgaaattgtcttctaattgtgtcatccaatcccttatttttcagctctaaatctactaaataagaaagagaaagaatcaaagaaaaataaggcatgttccttttcagttaggttggggaacggttgggtact

SEQ ID NO: 29761 - DNA, 921 bp, Medicago truncatula
  Intron number 5 from transcript Medtr3g149710.2 (locus Med tr3g149710) derived from phytozome v7.0 (chr-ID MtChr3; po s 39254402 to 39255322)
cttgtgggcttttctgggcaaatagggtaagtattcatcatccatatgttttgttttgggcagaaaacctcttgttcatgttcatctatctaaagcagttgaaatcgaaagcaaaaaaaagataaactttttcctgtctttttagtgctatgggtcaaacggtgggtcttggatagcacttcactttgttattaaagaatggattgtccacctgcagtgtggacaaacttttcttcccaccagatggaattgatgtagaagtgtcagtctcatatcactatatcagtagaactctcattgtaagcagaaggctccctcagccttgctgttaggacctagtgacggactctgcatcaagtcacctgttctttcattttattggaagacttgcattttcattccttctaaaatatcagcattctgaactctttctccctaaaattattgtgtgatatctgctttgtctgtgatcatcaaaacctaggaatgctctgtttattaatatcaatttcaatgcgctattttaactattttcttcatgagtggcaaatatttatctaaactcctttacctcccatttcaaagtggattgaaattgagtgactttatggagggaaagttatggtgacttgagtgtattttagggtgttttgtgagagaggaagatgaaagacaaagggtagttaagatgagagagatagatagagaggaagtcatggcaactttccctacacaaagtcacccaatcctaaccctttcaaagcatgtcaagggagatgcatctatattcctgtaagcattaaatcatatttatccaactgcgaagctaatgactcgaattgtggatctgccagcaatcacacattctgacattgaaattttgtagggtactttgagggatctatctactgctaggagaaa

SEQ ID NO: 29762 - DNA, 992 bp, Medicago truncatula
  Intron number 1 from transcript Medtr3g039320.1 (locus Med tr3g039320) derived from phytozome v7.0 (chr-ID MtChr3; po s 10343605 to 10344596 reverse strand)
cctgaaattggtgaaacaaaggaactaaggaaaaggtatatatattttttcttcttaagttataatattattgattgatactttttattatagctttcttaggggagtaaatagtcaatttctcctctgaaattgtaagtttcatcaattacccccctgaaattaacaaaacttcaattaccctccctgaaatttcacaacgttagtcaatttaccccatccgtcaaatttttctgttagtgaacatgacgttttgcaaatactccccagaagttttgcacttatgtgcaaaatgccccccaaacttaaaaatttatattatttttttcttaaaaacaaacagttaatagttaaatattaaagctaactcttaattttggagtttggaaaaactacatacatatttacatcaaaatagggaaaaaagtgtatttttaaagtgacaataatagttatttctaatagacaaattattatttttagaggtttataaacaaattaataatcagatttaaatttatattttctccttcaccatcttagtcttttaactcctccaactccttcaacaatttgctcaaaccatttaaactacacaaccctcaatattaatccacaaatcatcccattattgtcactttaaaaaatacatattttttttccattttggagcctattttgatgtatatatgcatgtagttttcccaaatttcaaaattaatagttagttttaatatttaactattaattgttttgtttttaagaaaaaaataatataaatttttaagtttgggggcattttgcacataagtgcaaaatttcaggggggtatttgcaaaacgtcatgttcactaacagaaaaatttgacggaaggggtaaattgactaacgttgtgaaatttcaggggggtaattgaagttttgttaatttcagggggtaattgatgaaatttacaatttcaggggggaaattgactatttactctttctta

SEQ ID NO: 29763 - DNA, 718 bp, Medicago truncatula
  Intron number 2 from transcript Medtr1g096590.1 (locus Med tr1g096590) derived from phytozome v7.0 (chr-ID MtChr1; po s 19782846 to 19783563)
gaaccttgctctagtgtcaaagacaggtatatagatttcttctttctgataatttttttgataaatatagtattagttgcatatgaaacaaaattagttttgtactgtttaatgtagtaagttagttgtgattagttgtagtacctttaccttaggagcattatataaagtgatcatacacttatctgtaatcaacttcttcattaaatcaattccaaaatcaatctttctatcatttattcttttttttttttgttggtctctgccatgcatctcaacatcatcagaaaatttgctagaaaagtttccctaggattctctagattttctgcttaactgcagaaatgtgtttgacagttgacactgttgtttgtattgttgataatgagattgatttcaattggtttaagttggatttgattaagagatcattacaattggcatagtggaacataaaattgtggtgttgaagttgcattattaatatctatgacttaattctgtttcatgccaaaagattattctaattcctgaatgtttgtgttttttttttttgagtaggcaaatgttagtaagttagtggttacattagttttcagggatttcactttggactacactggtgtctgttagctcaccaaccaaactacctacgtgggacttgaatatttttttgttgctatataattctttcatttgatgcaggataggatatagc

SEQ ID NO: 29764 - DNA, 893 bp, Medicago truncatula
  Intron number 1 from transcript Medtr1g089960.1 (locus Med tr1g089960) derived from phytozome v7.0 (chr-ID MtChr1; po s 18069490 to 18070382 reverse strand)
gacagaggttttggagtcaggtggttattcctttcttgcttttagatttttatttttttaggttttggcattcacggatctaaaaattttaataagtggggtcaagttatatcataaaaatttatataaaactttctaaatgcgtgcgaaaattatacaaattatatttataattgccctaaatgttgattttttaataaatatttgtctagcgtcaatcacaacttttttcaacaaatataagaatagtttatgtattgtaattatatatagtaactatagttttatggtctcgccaacgataattggttaaagatttcattaaaaaaaaatcatctgttatttgtatcaatatgataattataacaactttttataaaataaactatttcttttgattttttaactagttcttagaacacccattaggattcttcttaattttataatttttgtagtctaataaatagactatgtgaagacaatgatactatataaagaggagtttaactatagatatatctaattttgggttgaaaatacaatacacatgtggaggcaagtggggtcgcttgaccccattgcccccaccctagatccgtgggtaaaattgaatttcaagattcagctagtgtatttattttttaatgtttggtgaaatgaactgggagttgttatgggatcatgcctgtttgattattgaaaagttgttgttgatttgatgatattttgcctttcatgttacagttttacatttcaaaatggacctgtattttatatttctgctatcattaacaaaccagtatttgtttgaattttggtctttgattttggtgctttcattgtgctcaaaatttttggtctttgattttccatttgtcaggagttccata

SEQ ID NO: 29765 - DNA, 695 bp, Medicago truncatula
  Intron number 1 from transcript Medtr3g103730.1 (locus Med tr3g103730) derived from phytozome v7.0 (chr-ID MtChr3; po s 25602735 to 25603429)
aagaaaactacgttcaagatcctcttgacgctgatgtacgtatcaatatcattcttcattcttaacctaattatttatatttcttctagttaatttactcgtttgcatgttatttccgaattcgtgagggtttcttttacatgtactgtattgtacgaaactgtttctatatgtttgtttttttcgttcgtagtctttgtctcattacaatacggaaatttcaccgttggtaaatatgccttttagttttagaataaacctcaggtttattagaatttgattttttctctataattgattctaactttatgtagagtttataatgtctgtgtcctatataatgatttttacatttattgttcaacccactttaaattaaacgtatccaaacataaattattttaccttcaattcatttttaattaaattcaattcgttcggcagttggatccatgcctcactagccgtcgttgcaggacattgaagaccactagccataaaaaagtcttttaggtctacctatttaagtagaatgatttatgctaaatgaaaatcaattttcgtcgccataaaactgaacaaatgcacaatgtgtatgatcatatgtatatgtatttatatttatacagaatttgagtatatgtatttatatttatacagaatttgaccaagtggggagaagctttgatagagtt

SEQ ID NO: 29766 - DNA, 440 bp, Medicago truncatula
  Intron number 1 from transcript Medtr3g059060.1 (locus Med tr3g059060) derived from phytozome v7.0 (chr-ID MtChr3; po s 13146044 to 13146483 reverse strand)
tggtaagataaactataaacaatatcatacataaaaatactttattatatgattttctctcttcttaatcctctagtttctagagaaagggggcctagtaattttggtggataaatatagtttgatcaaagattattcaagtcagtgatcaaactcgggtggtcttaaacgctttaactttaaccgaaacttattaacaatttgatctcaaccactttgttatatgaatttaattaaacaaatgctcaatcatatcatacttattaactattgtgcataaagtaataaaccttaatgatatatggtatattgttcttactatataattttatttgatttgagtttaatcaattggattaaataaataatctttctgttgattttgttttgaaaatgaaacaaaagggagctgctgggcattttcaacggtggctgcaacc

SEQ ID NO: 29767 - DNA, 905 bp, Medicago truncatula
  Intron number 1 from transcript Medtr2g049210.1 (locus Med tr2g049210) derived from phytozome v7.0 (chr-ID MtChr2; po s 13425949 to 13426853 reverse strand)
gttggaaccgttcttgttgttattgggagccaagggtgagggtttttggttctgttttacgtgaagtagaaagtgggaaggttctgagaagtctcctccctaattgttgacttggtcttaattataaagacttatgattgtaaaacacagttttgccattactctttattttcttctccataataaccttatttcttctatcccactaacacactcaaaaactattattttaaattaaggtgatgtagtaaatagtagctaataagaatatacgattatttttggggtgctacaagtatcatttcaatagtaatcaatcatttatgcaatatatgattttaagatagaatatgttgtttatccaaatatggttttatttaagcaattatatctatgtattttatgatatgatgagtgcatagatcactacaactagattcatctccattcctgactgcctagagatcgaacttgtttttttgagatatctattatctattatatttattcaatttgtgaaaatgtgtttgttctgttgtaggttgaaatcagtgttatatgggatgaaattgaatcttttttggaattgtattgtaataaatgttgctgttgtgttttcagagagctgcaacatgaattaaatgatattttgatgtaatattttatcagtttcttctttaaagtatgtggttgtagaataagcttttgttggacttgtagaatatgttatggttttacttattttattggattcatttgttttgcatatcatgtagtgtgtagtaggattgaaagttttaacattgcaaataaatgaatactttttggttactaagcatgtgaatacattaccctttcaatacttcttttggattgatatggtagcggacaactttcaactgcat

SEQ ID NO: 29768 - DNA, 792 bp, Medicago truncatula
  Intron number 2 from transcript Medtr3g133100.1 (locus Med tr3g133100) derived from phytozome v7.0 (chr-ID MtChr3; po s 33638877 to 33639668 reverse strand)
acccaggtacgcactcaatcttcttttccatttcgttcctctttgagaggacctccaattgtaccttcaactcatttttagctagaatcaattttacaaattcaattcacttaaaatctattgtcaactctatctatgcttcttatttttttttttttgtattcaattttacacttaattttttagtctacttccggtgttgaaccattcacttaggaattgtgtggtaatttcatcccaattactagtatattctatgcatcacctataaaatcaatagtagattttggcaacttcatatctgtaatactcgtttctgttttatttaacattgtacatgattttatacaactttccattagaaagaacacataacttgccagcccttttaggtcttcacatttcaatataccaatagaaacaactcaacatttgccaaaagtttctttaatccattgtagtctattaaacaaatgtcaagaatagttaagctatggacacacaaatggtcattttacaatggatgaactgttacagaattattttcgttggtcattatatggtatactaaaattgttttacacaattaattggtttacaatttgtattattagtcagataatttgttttgtttagaggcgtgtgagaaatagtctagtgttttactatcaatgaaagattggaagttattattttttccttctacgattctatttagggtatcttcctactgttgcctggatcttatcttttccccaatttttaatatttgttattttggaaattttttag

SEQ ID NO: 29769 - DNA, 716 bp, Medicago truncatula
  Intron number 1 from transcript Medtr1g031920.1 (locus Med tr1g031920) derived from phytozome v7.0 (chr-ID MtChr1; po s 7847805 to 7848520)
tactgattttggactctccattttccttgaagaaggtgcaatttattactttatttacttttcctttaatttaattactatacttttactcccattctctatattcttcaactgttttttgttttttagtatctgttatactcgattagttttaatttccccctctagctgcatgtgtttggttaaatgtgaaataggaaatatgacgtattgtccgctttagatgtaagtcattcaaggttttgtcatttataaaagatgtctcattaggttgagaagcgtgaatgttacatataaactgtcattgacctcaattcctgaacaatgcgatgttttcactaaattttgagcagggcgtctatgaagtaattctcatagatttatagtgaagtgagctaaagtccactcacaaaattccttgacttttgggcttgggcctaaagggcctgtaacatgaaaacaacttctgataatctcatggaatagaaaagtacgaaaccagtttcccactgacttgagcaaagcgtactaatgcaaaaagaaaggaatattgcttttatgctatgtgactatgtgaggaccatcccaacccaaagaaaaaagacaaagcataaattgaaacttaataccataccataaaatacatagttaattatatatacataaataatacccttcaagtttatataacacccttcaagtcacaaatcaatctc

SEQ ID NO: 29770 - DNA, 405 bp, Medicago truncatula
  Intron number 1 from transcript Medtr3g124180.1 (locus Med tr3g124180) derived from phytozome v7.0 (chr-ID MtChr3; po s 31402179 to 31402583 reverse strand)
aaattttccttctttctcgtatggttcatctcttactctcgcattcaattttagcttcttattactatttatatatttttgttaaaaaacctatttgtcttctctccatgtctcagcttctctcttgctctaaaattttattaactcacattttttgtcaaggaaacttagtgattaaaattcactatttaaaatcaataagtaaggtgtatgatattcgaattattaagtcatttttaccgtatatatatttttttgttgaaaataataatctattttctttcactatagtaacaacgaatagagtaatatttgatttttggagggattaactaacataataagaggagatagatatttagagaggcagacgttgacgcggtggaaacccgtggcaaaacgttc

SEQ ID NO: 29771 - DNA, 1001 bp, Medicago truncatula
  Intron number 2 from transcript Medtr3g125260.1 (locus Med tr3g125260) derived from phytozome v7.0 (chr-ID MtChr3; po s 32089862 to 32090862)
attttgagtgagtacttgttgttttatatttgattcttgttttttgtggaagttctattgatgaatttgattcttgttgtgtagggggattttaggggttttttttttttttttttgatttgggggaaaattgtgtcgatagccaaatctcacgttgaagttgttaattttggcaaaatagaattgatttacttcttttcatccttttttttttgagtcatacttcttttcatccttgtttacttctttttgtaatttttttaactgatactgacacttttttctcattgaactttaggttggtggttgatatttcagcaactacagtgaggttagtttcaataaattgctttgtcatgctattcaatgtgtaacggtacatttcattaggtaaaacaattcataaattgattatagaatcatcatgtaagtggattttttgttatcaatatttacaaagttgctagaaatcagacaccctttatggaattttttaaattggatttctctgtttctagataagctttagactaccttgattatagactataacctattgggatttatcaactcaattactcaataacttgataaaatgtcatacattatgttcatgttcagcaggggtattgagttgaatattcactatcatttatatagttacatgacaagcttggtataatgaacacatagaggaaagttagacaagaaagcatcatagatgattccctgttacaggcaaacaactggtatatatttcttttttcaaaagttaagttttgaaactataattttctttataattacaccagtgcgaaaattcagattaccaatagaatttagagtatggaaatattgtctcatgttgtgtgtgtttatgtcttagcttgatttggatagtataattttgatttctgtaaaagcttatgtatcatgaagtacaactaatttctttaaaaattgtaggtctttgtattgctaacgtggttcaatctaggttt

SEQ ID NO: 29772 - DNA, 492 bp, Medicago truncatula; identical to SEQ ID NO: 28350
  Intron number 1 from transcript Medtr2g006880.1 (locus Med tr2g006880) derived from phytozome v7.0 (chr-ID MtChr2; po s 849949 to 850440 reverse strand)

SEQ ID NO: 29773 - DNA, 473 bp, Medicago truncatula
  Intron number 3 from transcript Medtr4g018630.1 (locus Med tr4g018630) derived from phytozome v7.0 (chr-ID MtChr4; po s 3630255 to 3630727 reverse strand)
acattgggtcattttcaagggtcctgaaaatatgtctattctaaggttgttaaaggagcatgttacagtttagttaatgattagagacgtaataaaacttatattttatacaatttgggttttatgtcacattaactctataattaacatgacaaagcttctgcttgcaggaccttggttctctaaaggtacaaaatatgagtggtaggggtggtgaaggttcggtttttgaagaaaaccaaaccatcgtaatggttttcaaaaactgaatcaaaccgtgtggtttggaacaaactgaaccaaagttatggttcagttaaccgtttccttgcctacgaaccgaaccaaaattagcattttaaaccaaaatgttttttttttttgtccttttgggaacataattgtggtgttttgtcatttttttaacataattgcaaggtactcgaagatttttgcaacacttggagttgttt

SEQ ID NO: 29774 - DNA, 701 bp, Medicago truncatula
  Intron number 4 from transcript Medtr1g129440.1 (locus Med tr1g129440) derived from phytozome v7.0 (chr-ID MtChr1; po s 28915105 to 28915805 reverse strand)
catcttcatcagacatttctacagataagcttgaggtcatttctcttgcctagaatgtcaatctcaatttttactattttttatgttacatgtcctgcttttatatgcttgatccccttttaaaatgatatttagttctgttccaggtagagcttctaggatctatactggcagtgtcccgtgttcaagatcagtgttttgtgtttaggttaaatgggtgacttaggttttctttgttttgatcttcctttttatgctattccttctccccatttagctatgatttccactgtcttggcagcctactaagctacggttttggttgagggatccttggaacctgcgccattttggattctactcggcccatgtcatacaaacccttgccgagtaccttattaattgggccgagtaaacagtcacagaccaagggtgttgaaataagttgcgatttaattccagccattcagttatagtgaaatgttttatgacggttcaggtttatgtgtgtgtgtgtaagatgcataataaaggtactcaatgtgtatttgtatattatatataaaactctcaaccagggagatgcataaatatatatgattctcatataatctatgcaacagtttggtttagtagtagtataagttatttgaaaaactgaagaaccaaatcttggtgttagttgcagaaagcaagttcaa

SEQ ID NO: 29775 - DNA, 803 bp, Medicago truncatula
  Intron number 3 from transcript Medtr3g169360.1 (locus Med tr3g169360) derived from phytozome v7.0 (chr-ID MtChr3; po s 44190218 to 44191020)
ttgaaattgctcactttgctctttgctttaatcaggtttatattccttgtctcattttttctttttcttcttctgttcttgtgttgatttaaccatacttttcatgggaaaggttaatgtttgacggaacaacatactcttgatcatacgataatgtaacataacactgttttgtggtccttgcaaaaaatcatagatcgatttgaaacattattttttcttatttttagtataatttagttcatagtttctttgaaattttagccacaccaatatctaaggttagtataattcattaatgcttatagcttctgaatcattgcatatagttgatgtgttcttgatgttaataaatgacactagttaaagaagcttattgatgataaatttcagcaactatgtgctaattgtgttttatatcaatcaaaacttgaagtaaagcaaatgtcatttgtggctatacaactttatttaacaacaaggtgctgccatggttttttggtgttgacatatatgtagttaggttttgtaatcaattgatactatatttcactctatacattttattctactctattggtgtaatttttaattttaaacttttacatagtatatccctttcataacccttgatagaattttacagccgattttccaactaaagtataataaaattacatcagacaccttatgctccactagtgtcatttgagatgaacattttgtacacaaatacacaagaattccaattttgtgtataatcttggttctaacttcaatagaggaagtctcttggtttacat

SEQ ID NO: 29776 - DNA, 892 bp, Medicago truncatula
  Intron number 2 from transcript Medtr3g163370.1 (locus Med tr3g163370) derived from phytozome v7.0 (chr-ID MtChr3; po s 42929939 to 42930830 reverse strand)
attagtaagggtggccttgtggtgttgtcgcacgagtatgcatgtggtttgtcatatgtatatgcctgcgacattactcttttgttccattttgtgtaggggtggtttttaaggggtttttgttcgagccaaagtttgtgcggcaaccgatttccccttgcttgtttttttttttcttccacccgagcttaataatattttggttaataatattttgtcgattcaaaaaaaaaaaaagttagatagagcatatttaacaacatcgagaattagagaagaaggctacatgtttacatgtccttttggatttcactactttagagcctcatcatctctcagcgggtgagcttgtaacggttgctcctttcaaaagtttttttttttttttgttgaataagctaaattggtccatttaaattgacaccgaagagaatcgaacatgaagcacactctcaagttctaaaccaaaaccaccaggtcaacgtaagtgggtttcaaaaaattcaaaatcaaaacaatcattaagttaaatataagattttttaaagaaatcaatcatttttgttttgaagtaaatcatatataggttagaatggataatgtgtccgtcgtataaaaatgttagattattttgatattattttttgtattaaattaggctaaaaaaaaattgtgaagaatcaaattggatctttaatcttatttttatatatgtaaaattgacaaagtaaaaattatcataaattaaagtgacacgaatgatagttttagaaatttctcaaaaagatttaaactcttaatatcaaataaactaacatctcacaatttctttcttgttaatttaattattgttactatttatttatttattaattactataataggtggtct

SEQ ID NO: 29777 - DNA, 922 bp, Medicago truncatula
  Intron number 1 from transcript Medtr2g037290.1 (locus Med tr2g037290) derived from phytozome v7.0 (chr-ID MtChr2; po s 10075277 to 10076198)
aatctgtttcaactgaaacctctctctttgaatcggtatgtttcatatcaaatttgtttgggtttttgtttgatttgtgatttgttttgaaattttgtattgggttttgttttttgagctttgatcggtgaaaaaattaagaattggttaagtgggtcggtgaaattttgtatttttgtttgtttttggaagattttgtattgatcggtgcttatttgaatatgaattgggttttatgagttttatgtgtttgttgatttgtttgtcagttttggcgaagatgtaatttgcttcgattttgaattgggtgtttttggttcattcttttgcatttaggtttaggacctgtttggattgacgtattttttagcttatgcataacaacttaagcttttaggtattattcataagcttgtcaagatagtttatgaaaaagcagcttatgaagatacataaaagcttatgaattaacttaaaagcttatttatctgcataagctgtttttcataagctcaaaattaagctaatccaaacgggtccttggtttatgtaacaatcatataaaatggttagagaaagaaaaaaaaacagtgatcaagcttatatgttttattctgttgatatagccgtcaattatattagtaatttccagatttcaattgcttcatgatgatatggctttttagttgttaagagaaactattaagatatatttagagattaatgagttggatcgaaatatgggatgagagttggttgttgttgttgttttagcttagcagttaagcttttagtttatttgttaatgtctttcttaaatccttttcgtagttttagttggattgtttttatgctgatctgtgttttttttgttgtgtttgttttagactgtgagttgctcagaggtgattaaagaatctat

SEQ ID NO: 29778 - DNA, 955 bp, Medicago truncatula
  Intron number 2 from transcript Medtr1g146060.1 (locus Med tr1g146060) derived from phytozome v7.0 (chr-ID MtChr1; po s 32198106 to 32199060 reverse strand)
ggagtcccttgacttctacagagacatcatcaaaggtaggtagttgtagctcacacctagtcaatcctttgaattttcttcaaggataacgtgaatgtcattttctatattcttgttttatgaggcactcattttctaaccttagaatatgaattgttatctttattataatatatggtttaatagcagttttaacccctcaagttttaagaagttgcgattttagctccttaagaaaaataacaacaaaaccgtcccctaagttttgattttcgccccctatgccaattttgactcggtcaacgcccctaagttttgactctgtgacagttttggtcccctaggagtttatttctatatactagtttattatttgtgagtgaaaacatatgaatttatcattaaaaaggagttttatttctatatactagtgtaattttattttacacatacatccaatccaatgttatattaccacatcatttaatgaatatgataattcatatgttttcactcacatgatgtctacccgaaaaaaaactcataacatgatgtgacaatacaacattaaatttatttgtaaaataattttatgttgatagtgcatataaattaaattctttaaaaaaatagtggagttaacccgatttttaccaaacataaaatctgataatatttcggtcttaattttaatatataagaaaaatgtcaaattaaattgagagttaaataaaatctaatcaataattattttgatcatgatttaaacatgtggttttctgaataatccatctttaaccaaagcttaaccgaaactcgttaaccacttgattattatatttgtttgtgatcataaaaagttacgatcaactttgtattgaatgattgaataatgaaatatgactcctattatattataggtccctttgagaaattgattcgagggggaaagtta

SEQ ID NO: 29779 - DNA, 526 bp, Medicago truncatula
  Intron number 2 from transcript Medtr1g065460.1 (locus Med tr1g065460) derived from phytozome v7.0 (chr-ID MtChr1; po s 13020057 to 13020582)
aagttgttttgagcaagaaaaagtcgaagaagttggtacgtagttttttctaaaaatttcttactgttttgtacaaaattttgctaccttggtgtatttgtgtgctgcttttttattcaattgctctttgtatatattcattttattatgtgtatctaaatatgaataaatcagttattattgttcttattttgtcaaaattcttaattgttttttcttctttcaattaaactaagtcaaatccttctgagcttaactcagttgataaagataatgtataatataaacaacgtttggggttcgaactccaaacactaacaaaaaacaaattaaactaggccaaaaatcacacaaaaatagaaatcacgcacatgaatcatcctctaggttgtgtggtcgaatttgttaaaaaaacatgaaaattattctatgtgctccgtttattgttttatctacgaaataagccgatttaaagttacaccgatctaaaatataatgattggtttgtaattattatagattttgt

SEQ ID NO: 29780 - DNA, 646 bp, Medicago truncatula
  Intron number 1 from transcript Medtr3g069040.1 (locus Med tr3g069040) derived from phytozome v7.0 (chr-ID MtChr3; po s 16431252 to 16431897 reverse strand)
tagaagaaaaagttgaagaagatagtgcggtaatagtgcttaatttatagtgtttctgttttctctctctagatttctgttgaaaatttaggagagagaaagtataactaacaaacttaactgtcaaactatcttcaacagaatctgatctctttctctctctatatattgatagagagacaaagttatttattatttatttatttttagaataaaataaaatttctaggacactgtctgtatcttaatctatctgtgttgttaaatagcggctataacaagtgagtaacattgttgtgtagcggaatttgaagagacttaatttttgtgctatttacgatcttcgataaaaggcgtgtccgacactgatatggcaccgatacatgtgattacatttgattgattcgtctttttcaagtttgtgtttgtgttagagtttcaaagttcgtgattaacatcaatggagtctatatatatttttggtactttaatgaagtctatgtttgtttgtggcagtatcagttttttaatttttatgtaagtgtaattttggggctttgaatgtaaataattgagtattttttgtgaatgtttgtttctaatgatgacagataaagggtacaaaagttgattcaaaagggctcca

SEQ ID NO: 29781 - DNA, 1009 bp, Medicago truncatula
  Intron number 2 from transcript Medtr3g111130.1 (locus Med tr3g111130) derived from phytozome v7.0 (chr-ID MtChr3; po s 28092830 to 28093838 reverse strand)
cgcttactattactatctcaccaagaaacccaaaggttccattttttgtcttcttctttctttttttatacgtattttcaattgggttttgtctttgttcttatttgtttaagaaaattgtttgtgtttgtgtcttaagtggatgtttcgtgccaactttgtatctgacatgtgagattgctaggtagttcttgtttgtttccgcaaattcttgaagaatctttcaatttcatttgctcataatatggcaattttatttgtgtagttttatgtatttggcgtacatgtgtgttgtaatgttctccgtcaaatgcaactactctaggtttaatttaaaggatttaatatctatacaccgacagtgtaaaacttttttacacgtacatccaatcaagccagaccatgtaaatatatgtggggatattttaaaaactaattcgagtataaaagttttgcaccgaaagtgcatatgacttaatctctaatttataattgaattatagttggttcttgacagagtttctaaattctgaagtcctattagtaatttaggtatattttgaaaatgttttctatttatatattgtttaatttagttttgatatagtgaaaagttttacagtgtcaacaaatcacatttgctatacaaatcttgtaagacaagaaacaaagtatcttttgcaagcaaaagtgtaaaacaggaaacgaaaaaaataaaggttttctcaaactatggatgaccttagtagggtttgatttttattaacgcctccctgttctcctaaataaggaatgaatgaattttggcacaaagcaagttgacctatatattgcccacatttcaagcaaaaaagaatcttgtgtaatggggcttggtaggtataaataccattgataacctttcatacaataattcaagctttagggagaagttatttcttaacaataattaaagtttctacatttattgctagggtgcttggatcctgagaatttcaaggaatttaag

SEQ ID NO: 29782 - DNA, 525 bp, Medicago truncatula
  Intron number 2 from transcript Medtr2g008700.1 (locus Med tr2g008700) derived from phytozome v7.0 (chr-ID MtChr2; po s 1736189 to 1736713)
catctcagccttgattctatctgtcgactttgtcggtatgcccctttttttattttacattgtttcggttcttctgtgagggtttgataattgttattgcttctcagatattcatcatattgttttcacacctttcttcaatgataatttagagtttttcttactttcaatgaaaattgatttttgtgtgtgtcgctataatttggtttgtcaaaactgttttcaaattcctaaaactgcatttataatttttagtttttaaagtggccagttttgaattcgaatttttgctaaaatcatgtttttcctttatcttagtttcttcttttagttttagtttcgaattgatgcttcactcaatcagttaatcttttctgttctattttggtttcgtttgtttgataaatattttgtactcaacgttatttgtttaaagctttaatgtttgcacatgacatttaacatttcttttgctttcagttgttactaaaatagtttgaataactaacttcacatctttttcag

SEQ ID NO: 29783 - DNA, 563 bp, Medicago truncatula
  Intron number 4 from transcript Medtr1g093110.3 (locus Med tr1g093110) derived from phytozome v7.0 (chr-ID MtChr1; po s 18841644 to 18842206 reverse strand)
accttgcaattcgctattacttgattgccattgaggtatttattcttgatttgtaaatgtagtttgtcatgtaatggtttcgtgaacttacgtgttgctttggtctagtttttatctttttgtatcattactctaaattatagaatttcattttcaattattgttgtccaataaccaaaaataagattgactatatcttgtatgaattaagtactaacaaaaagctggattctgttggttaattttcataacatattattaattgttgctgtcgttagtaatggtaggtcacaaatgttagccgtgttcggagtcattaatttaccattataaacaaccatataagcctcaccttgagtttttttgatgccaattattaatagaaaatgatgcatatatgttataattattatcattttcaattgttagtatttcccccatatttgatgcttttttttcttccttttttgctatgtcatacgctttgttccattcttgattagttgcttcaatatttatctctctgttggttctgctgctgcagcttcgtcccaattttgctg

SEQ ID NO: 29784 - DNA, 875 bp, Medicago truncatula
  Intron number 1 from transcript Medtr3g159870.1 (locus Med tr3g159870) derived from phytozome v7.0 (chr-ID MtChr3; po s 41956321 to 41957195)
aaatccagtctaaaaaaagggcttctggtaactcactttttcttttttccctattatttttatagagtatgctccaaacaatcccttttagagtttttttttcttcattacattatgcttttttccccttaaattatcattgtattttactatgatctcttaagtgttttcatctgaaagtgaaatctaaaaaataaagaacgaaaagtgtaattaaatcttaaaactaagctgttttttacttttttttatcttataatagaactgcaatgacttttgtgttgatcgttgaacattttaaattgcaaaacatgaccgggattgatggatatggatccatggttgtttatatttatttatttatttttgtcaaattttttacttattcattcagaataaaatttacttatttattgattaccacgttgttaaattacttttttcctcccatctcttgttatactatttttctatgtatttttcttgttaatttgtgtacaaattcgacatatattcaatcaaataacactataatgtcattttttaggttagtttataagatatctctataaatagctattttatatgaattaaattgaacgcatgtgtaaagtgttacacttccaatgtacaatattaatttatttatttttcttttctccaaaaatgcaatttatttcttattttttttcagtattccattgcaattttgtagactttagcttttttttgacaaacaaaatggtcctggatgggcaaaaagttttcaatgggaatgtagactttagctattttctcatttttaatgtcatattttttgaatatatgtgatgcgctcttgtggaatctttttgtaggatctgtgagacttgcta

SEQ ID NO: 29785 - DNA, 885 bp, Medicago truncatula
  Intron number 2 from transcript Medtr3g086080.1 (locus Med tr3g086080) derived from phytozome v7.0 (chr-ID MtChr3; po s 20088684 to 20089568 reverse strand)
ttttggaagagttgttgcaggcggtggaaggaaaggtgacttcgaactcttctgatgcttggtcctggatatggatgtcaatgggtatccatgggcacaattaatatgatatttgtccctgctccgctggacaaatatggtatccgtgcccgtctgcatacccgtgtgggtatctctatatgggtaatccacgggtatttagatactcacggagattcgtgggtacccattgatttttgaattttttttgtacaaagaaaatatttttttaattacctacaaacttcgacttttaaacatccatacataacatattccattgaaatttcatgttccataccataatccaaaaatcaactgttgaaataaaatccaaatatacatccaaaatttcatatgcaaacaacaatcaaaatactctatttatctcaaatctcaatccctacaaaaaaatatgtatagatgtattagatgacaactcacaagagagaacaattttgaaacatatattaattatgttttttattttaaataatctagaatactcttagagtaatgttatatgaacatctaaaaatcaacaacttttgaacaactagtataaaaatacatcaattataactattgatgtgattataagagagagaaacaactaattaaaaaataatatagtatctatacggtatagatatacgatgttggacaaccaaaaggttgtcaatatataatttctcatacttaacatatatgttgtatcatatttaaaaaagatatcttattatagaccaacagaaatgtcggcactaatgtatctgtctatgcatattttctattgtatttcatatatatatatatctctctctctctaaacacaaattttcagac

SEQ ID NO: 29786 - DNA, 563 bp, Medicago truncatula
  Intron number 3 from transcript AC235665_43.1 (locus AC235 665_43) derived from phytozome v7.0 (chr-ID AC235665; pos 244366 to 244928 reverse strand)
atgtgagttaattaattaatcataccctatttatcttttacaagcattcctccttgtatttggaatattatcatgaatgaaatgtgtttgagtacaaaaaaagagtttatagaatgtaaaatgaaggatcgaagagagatttttttaatcaaaaaaacaaagagagaatatttaagatttatttatttttgagttaaataagatatattaattaccattagtgggtctttagaacaactgaacaatcttgttagaaaaataattgattaatcaattaatttgtgaaaattttaatattattatgaaaatttgagaaatttaaacaaataaaaagacattgaagaacttaagtataacaactaaaaaggaggattgatattgtttaaaaataaaaaaaacattgatggatcaaaaacatgtctagttgaaatcagatcaatcaaaagtaaaattaagccaaaatacctattagcatttgtcttacttagctaactagattatttttaatgagtttattttaatttgaaattgattttgggtgacagggaaataaaaaagtctag

SEQ ID NO: 29787 - DNA, 545 bp, Medicago truncatula
  Intron number 2 from transcript Medtr3g058560.1 (locus Med tr3g058560) derived from phytozome v7.0 (chr-ID MtChr3; po s 12785195 to 12785739 reverse strand)
cttttattgccttaccaggttagcatgcaatttgtgtattaatttctagcattttatagtcatagcgtgaagaaattaccatatttcattgtttgattcctttgaaaaataattgtttcaccgacattttcatatttttttgttgtttacttggttgctttttagacataatggtttctttttgtctagtaaagttgtttaactttctagactaatccaaatgttgttgtgttttgtggggtttatttctttgctaaacctttttatcttttctcattgcttcaatctactaattcctaaacaactgtcatggctttctttcatacgttccaatgtttatatgattaataaggaagaacaacccttcaaagcttacttgatactaatgaataatgatagtgaccttaccttaccttatcccttaaaatataaaatattggactgaaagtcatagcttttgtggctctgatccaattgatgatttatgttacattttgattgctctggcagccttgtctcccatcctcaataacgaccagagctac

SEQ ID NO: 29788 - DNA, 987 bp, Medicago truncatula
  Intron number 2 from transcript Medtr3g151790.1 (locus Med tr3g151790) derived from phytozome v7.0 (chr-ID MtChr3; po s 40324245 to 40325231)
tccatgttagtatatttaaaagcttaattactcttgtattatcgctaatcaaacattttttaattaattaatatttaatactactattgtcctaattaactaatagaagatgtaaatttgtttttcacggttttgtacaccatcaattaagaagttatgtttactttctaacaacattttcaatttttactttgaattgtaattgtgatgcatataaagtgatagctataattagtgaggatacgtccctccagctgaaatcgatgttttgaatatttcaatctcttttttcgtttcttaatactaatatttattggtgttctgtaaataattgtcggggtgattttgtgttagcatagttgtgatgacttcggtttataaacaaacaatgcccttcaacactaattcttgtttaaaagaatgttttcaaaatttcagcattttcaaaaacttttatgttatcttttgtagtgtattacccgaaaaagaaaacggacccgtattcagtctagattaataaagggaaaacaaaggatgcatatttattcttaaaatacaaagacaaactctttttatgatgtttttcaccactgctaattgaatatgagaatgaggaagtgtgaagactgaacagaattgagagaatgaatgttcttctgagttcattcatcattcattgaaacttcttatacatagcatctatacagactacactatctcactgccccactaagctaacggtaatgtatcattcactaaaataacagaaagtgaatgagtaatactactcctttcaattttttacatgctttgttgttatctgtgatatcaaattgataattagaggaatatgatattcttttcctggttttttttattaaatttgtgtgatgaagatatcacaaaaatagttctttctttgtttaattccctatggcttatgcaatggtaggaggagattgagattgataacaaggttctacgagt

SEQ ID NO: 29789 - DNA, 626 bp, Medicago truncatula
  Intron number 2 from transcript Medtr3g025880.1 (locus Med tr3g025880) derived from phytozome v7.0 (chr-ID MtChr3; po s 6868396 to 6869021 reverse strand)
aattcttctgaagctgctgaaagcataaaaacagcgtaagtacatgtcttcattgaattcatgaatttggtttggttgcttctgcgtgattttttgtgcacttttttcttgtagtgtaatattgaaagtatcatttctgacttgcttttgcttggagcgaatgagcaactatttaataatgaaatttccaaaaaaaaaaaaaaaaattacaaatgttagttgctattttgatattggggggagttgattccatcatgacacccttactccaacccctatgttcctctcgcaaacaactaagccaccttatcagttatcactccatgatcttgtttgttaatttggtgttgtggatagagttcttatgttttgttctggcgcgttctttcattaggattctgttccaagagatgaatatgggactatgggttatttgtttttgcttgagttaagctttcctctggatgaaattaagtctgccaccttgtttgtcgaagacacagtcatatctttaaaaaaaaatcattacatttacattttctggttaagagttatgcgaaatttaatgttatttattccggccttgtgcagctgttttacaacagagattctggagggatttgacg

SEQ ID NO: 29790 - DNA, 457 bp, Medicago truncatula
  Intron number 3 from transcript Medtr2g129970.1 (locus Med tr2g129970) derived from phytozome v7.0 (chr-ID MtChr2; po s 31567929 to 31568385)
aatctcttgacaacatcttggttgaactctataaggtataagggttgtttgtttcttgctttttcttgtcatagtttgttaattttctctacatgcatttgaatgataagctggtcaaattaacatctcatgcaagaaccttagctgtttgtattttgattagcatttgaatagacttaaaaaaaggaggaaatttggagaatcaagaccttgttaatttgtaacatttaggatgagtttgaaaaacactttgcaacacctagaattcagacaagtatgttagaaatcaagatgaacatataaggctatgatgtttgtaactctcaatcttgtactgtaggacttttcatataacaatgtttttagtatttgattgttgaaggttacaaaaccaggtgtttaacattaatggcttatacatgtatattcttattgttgtagaggtcaggaagggttg

SEQ ID NO: 29791 - DNA, 482 bp, Medicago truncatula; identical to SEQ ID NO: 29707
  Intron number 1 from transcript Medtr1g064840.1 (locus Med tr1g064840) derived from phytozome v7.0 (chr-ID MtChr1; po s 12703288 to 12703769)

SEQ ID NO: 29792 - DNA, 421 bp, Medicago truncatula
  Intron number 1 from transcript AC235757_16.1 (locus AC235 757_16) derived from phytozome v7.0 (chr-ID AC235757; pos 42599 to 43019 reverse strand)
catgtcctcaattgtggcaaattaatttgactaattttctagtgttgggattttttttaaggaaacatagtgtttgcataaccattcaaatgattaaggaaaccaaattcaatttaagagagaagtcgattcttgggaagcaattcgcaactttaggaggaagaacaacatgcctataaaaatacttatcatattactcgatcagacccatgctttcaaaaacaagagattgagagaagcttgatttgaagaagtgagaatttttctttgagtgttacttttcctatgtctttcctcgcgcgccctatttttttctaaaattattctcggagcaatccagattatataatccggaatgatgtttttccagaattttttattttaagttttctattgttgtggaattggttgctaacccttc

SEQ ID NO: 29793 - DNA, 884 bp, Medicago truncatula
  Intron number 1 from transcript Medtr3g031000.1 (locus Med tr3g031000) derived from phytozome v7.0 (chr-ID MtChr3; po s 8602774 to 8603657)
gcttgccctttaaagaaagtcttgcctaatcagaggtatttgatataatgacatgttttacctcttaattgtgtaatttatatatcctctgacttggctttctttttgtttttgatatctttcgctacaacatataatcgatatgtaattttctgttaaattcctaagaatgatgacatctttgttcctttgctcctaagatgattttgattcaatgttttgttcaattccaatggggttatggtttgtattcaagcattataaagaaacatgtttcactaacttttgtttcatttatttctttccagtttcctgattgcaaagtctcctgaaactattattttattattttatatatttatattttgtgatagaatacttttatgttcacttatactttgaagcatgtgtattcataagttagagatgaagcattggcttacattctgatcctaaaaatgcatcaaccaccttgacttaaactttgtatccagttttcctgtcattgttattctattttctgaataatctttctaaatgtgcaaaaatgaatgctttactaaaaacatcaatgttttccaattgaaagcacaattttgttttgttagtattctgactgtgttatttttttgaagtatttgtaacattaattgtcttcttttctctctgtgtctgcccagaacacatcatactttagaaaagaagccaatttcaacaaagagatcacgactgtagtttgatcaactaggtagtgtagtgttatgaaactcatggtttaaaattttttcctgttaaaagaaaatgctggtaacatacctaataatttgttaattttttttggatgcagagtgctgaagagaaaagaggaagaagaataggaggaa

SEQ ID NO: 29794 - DNA, 582 bp, Medicago truncatula
  Intron number 1 from transcript Medtr1g093370.1 (locus Med tr1g093370) derived from phytozome v7.0 (chr-ID MtChr1; po s 18963829 to 18964410)
ttggagtataataatcagttctatatttatttgtttcactgttggagttacttgctgtaaatttgaccttaaattataatataagatgttgtcgcttgtgaggttgaattgcatgattgaggcctcaatcatgttgtacttgatccctgaccaatgtttgtactccaattgaagaacaaacaacgagaggcgtttggaggaagcttgatgcaacataaaatttactgttgataactgtgattgtaagcgtgggcgggatgcacaattacaactgatgtattccggccttgtatgatgctcgagcttaatttgaacgtggtctgatgtaaatactagcaatgtgtgcaacctggactctattttattttagctgcctttgaagactctcatgcatctgtaatcacaaagctaccatattctgctagctaaggttatctccttatgcaagtttttggtatgttatgaagactggttttcgttcgatttgttttgattgaatttttgttatttttttagttgtgatttgaattttattgacagttggttgtgtgaattgaatgtaaattgtgcaggttttgaatc

SEQ ID NO: 29795 - DNA, 996 bp, Medicago truncatula
  Intron number 2 from transcript Medtr2g013960.1 (locus Med tr2g013960) derived from phytozome v7.0 (chr-ID MtChr2; po s 3367722 to 3368717 reverse strand)
accagctttttaacctatatgtatgttatgtttgatgtctattttatttactgtttttttgtttttacatctctgaaactaaatagtgacatggcttacatggctttatgtttgatttcattgttttagtttttattattctgaactagggcttctaccatgttataagtatgtcattatacttattttttttcctataataattggacttagatttatgaaaagctgactatatgtgaaaatgagaaattagaaataccgttgcaattattcttacagggataaatgtcaatgacataagattgttgttctcttgaatattcttttattactgaatcaaaaagggtttaaaagtagttgttctcttaaatacttgacataagattgttgttctcttaaatccaggtctttattttgagtctttttcttttcctgttacggggttctttgaattttgttgtttgaaacttttttcaataacattaacttatatctctttcttcaatgtagtcttcactcttaaatgtattttttttatagtttctctttaaatgcttcacacacttacactgaattgctttccttttatgctttgttagttaggcataagtctgcccgcattgttaaacatatagttgatatacttggaaatggttcaaaggtttaattgtgttaattgagttaaattttgatttggtgtgtgaggagttgagataaatggtgttaattgaaatgttttggaatatgtttgcttcatccttttcaggtttcatggtcgatgttggcttttatttttcattagtctcattatttaatataaattaactaatgtgtgtcaaaaactatttgttgctgagtttttgagagctgctttttgtgccccccctgtcatatgtattttttgctaatttgcttctggtttgtaaggcagctggtttgttacttacaaggatgtccaatttttggtgttctgctttattcatttaggggtggaga

SEQ ID NO: 29796 - DNA, 1032 bp, Medicago truncatula
  Intron number 1 from transcript Medtr4g012470.1 (locus Med tr4g012470) derived from phytozome v7.0 (chr-ID MtChr4; po s 2109287 to 2110318)
gctggacttgctggatttgttgtcctaaattccaggttatttacttactctctctctctctctctccattttcatatgctttgtttagtactctcctcactcccgaaataattgagtcatttactaaaaaaaaagtgttataaaataaataagtcatttcacttttaatagtaattacttggctaaacttcacttttcgccctctaagtttcaaaatgttgcgattttagctccctattaaaaaaaatggcaaaagtgacaccctatatttagggaaatatgctcttttgaccttctaacataagggaaatatgctttttgaccccttatctttacaaaaagttgcgattatggccctttttttgggacacctggcgtcttctcagcaattttagaatgaagggggccaaaattgccatttttttaatagggggtcaaaatcgcaacattttgaaatatagggggcgaaaagtgcactttattacttttttccatttataactctaattaatactattttcatcactcccaattcaatatattttttttgtatttatgatagtgaagaatccaccaatacttaacaaaaacacttaaaatcatctttctctctccttcatttatatatttttcttaatatatatgaaatgagtcaatgactcagttaattcgggacagagggaatatattttgggcatttaaggaaatatttagatacacaaattaatgatagtattagttttttctataacaaaagataaactattttgattagcttattttattagtttatctacggacgtaagcatccccgtgaacttagctcagttggtagagatattgtatattatatgtaggggccatgatttgaaccctggacactccacttctccacaatttaattctatgagctctagccactaggctacttgaccaaaaaaaatctacggacgtaagcaatagtgagatagcaaatgaaaacaacttatagctgatataggttgacttaattttatgtttttttttgtagga

SEQ ID NO: 29797 - DNA, 402 bp, Medicago truncatula
  Intron number 3 from transcript Medtr1g007370.1 (locus Med tr1g007370) derived from phytozome v7.0 (chr-ID MtChr1; po s 405791 to 406192 reverse strand)
cttgttatcttcttcattatctctctggtggattggtaagctctcaactcttcatatattacttggttaagaatcatcatttttaaggtaaaaaaatttgagttgagactaaaattgtaataaacataatatttgaggaccaaaacaatttgattttaaaaggagaaaactattttttggaagatcaaaatgcaattaaatttattattatttatgttggaaatatccttgtccatacaattgaaaaatatttattgatacaaatattcttgctttttaaagggaaaaagataataaccttctttgtttttattgtttgaaagctaattaaaaaaatattgcacattgaatcttgcatgaattacagacaactccagctcatacacttgcaagtggagtagg

SEQ ID NO: 29798 - DNA, 770 bp, Medicago truncatula
  Intron number 1 from transcript Medtr2g123030.1 (locus Med tr2g123030) derived from phytozome v7.0 (chr-ID MtChr2; po s 29695918 to 29696687 reverse strand)
gctgctccattggcctctgttggttttcaggttaatttttcactttagttccttcattatcaatctaattcttagcttgatcactattataaataaaaattcaatttataagttcattcaataaatggtgtatatggtctatatatagatcatatacatcatttattgaatgaacttagaaaaaaatggatttttgcttataatagtgatctgatggtgtatatataacatattttaagtctgtaaattccagctcaattaaaggaaaaaaaaaaatgttgaaattattaggtcggatgtcttaaccagttttggatctcgaatccaccacttatatgtatgagttttcatccctaaaaaataaatgtatgggttttcaataattattgtcatttcatttatttaaaaaaaatcctcaatgttttttattttatgcacaatcagtttcatgttgagggtatttttttattttttttttattgtttcattgtgtatttttgaaacgatttgaatatgttttaaacaaatagttttaatttattcataaagaagaactgggtttttcctgagattccaatccatttcttttatttttttttttatctaattaattatatagaaaaaattaagatgttttggtttgaatattttgaaattatattttatctagatgttaaaatacaaatgttaggtcttcactattgagtggttaatgaatgacaatctttatcccaatgatttttattgtgtttattttttttggttgtaga

SEQ ID NO: 29799 - DNA, 786 bp, Medicago truncatula
  Intron number 2 from transcript Medtr2g118350.1 (locus Med tr2g118350) derived from phytozome v7.0 (chr-ID MtChr2; po s 28125879 to 28126664 reverse strand)
agcaatatccggttagttcatgttctcccagttatttgcagttctagaaaagtttttggtctgtttggtttatgtcccctttctctgttttcactctttcgtgtacaaatctttatttaaaaacatgaaacatagtaaaacagtgtggcattttattaaaagtgaaaagattaaatgaaagtagagatggaaataaaaaaccaaaaggcccttaaatggctttagttttttattttttacaatgaaaaatcattgagctacttctgcaactaatagaatttaaaggatctcgtcactgatttttatgaagatgttcatcaatcatatttgtaatactgttaataacttacacttgtttatgcaagaagagaaactaaccaaagacttcaatgttttatatctatgcttattgatttccattttaattgatcttcgaggttctgtatcaatccatacacatgaaaaatcagtaaaattactcccgggggtctatgcacttaatttagagttttggattagttctttaactctgttttctctcttcccaaatcgatactttgagtttctggagtaattttgcgaggtaaatattttggcaacagcaaattgatactttgggtgcatctgaatgtatttgtctctctgagacatttatgtacgagtaacttgagcaattcgtgttacatgtcgttgggaccccttttcagtttccctcccacatcttacatatttgttttcatgcaatttccagagtggacacgacagagttcgagaactaactcaaca

SEQ ID NO: 29800 - DNA, 961 bp, Medicago truncatula
  Intron number 1 from transcript Medtr2g021310.1 (locus Med tr2g021310) derived from phytozome v7.0 (chr-ID MtChr2; po s 5403755 to 5404715)
gttcatatagttgtagcagaaccaattcctaagtaagtttttgcaaattaagaagacatttgtgtataaatagccgccgatgtataaaaaatattcatgaaccaaatgagagacataatattttcttgtatcaaatggttcacatagttgtaacaacacctttaccaaaatgaatcaatttgtagttcaattattaataagggttctccttcaaataccaaaggaattgggagcaatgcatatgggtaaattgaaaaaccagaaacaagtcaacacattaatttttaacaacatattcatatgaatggataatagctacatccacctaaaatactaatttccactccctctatgaatggataatcccttgaaattgctacaagcctgctaccttctaaaccatcattcataaatcatatctctaacactacacaagaactcctattagttggatgatccaaagatacaaaataagaaagtcaagaggacattcaagctgacatgaattccaatgtgtagaaataatgagttgatcaaggatcaatgaatattgaaatacacgattccaaaacttgatcaagctaaggaccccaattcaagttctttggaaattgcaaaatcttagcttcctctgcccaattatttgtgtattttccatacatttccccattccccaatttttcttcaataagacttttgatatagaagaaatacccctgttttctttgcctataaatacgagttcttttttatcaatcacatccagattttcagtttactacccaaaacatcattttcttttgttctctcctctcaaactctcgtttgtcgtggcaataacaaaaagaaaagccattggcatcgacattggcacaacctacagctgcatttgagagtggcaacacaatcatgttgagatcattccaaacgaccaagaaaatgtagagagaaggtgagaaaa

SEQ ID NO: 29801 - DNA, 657 bp, Medicago truncatula
  Intron number 2 from transcript Medtr3g142500.1 (locus Med tr3g142500) derived from phytozome v7.0 (chr-ID MtChr3; po s 36532341 to 36532997)
aagctgaagttggagtagctgctaaagtatgatcctttttttttttttctttgttaagttatagttcaatcttttattggtttatggattatttcttttagttcattcttgttggaaatattgaatttttttaaaatgtgattataaatttggtttgtcactcgtagatcaatttgattttacattataatttgttcacctggttcattataaatcagaagtgacaacattcgagaatgttggagtaacacctaccatagaaaagatggtggaaactcggcttaagtagtttgcacatgtagagagaagacttttagattctgtagtaaggagagtagctcagttggagggtagttaaatcattatagacatatgaaggcctagaaaaactataagagaaacttttaagaatgatctagagattgatgagttggatagggatatgatatagaacattatggcatgtcttgatccatgcatgtagctgatcccacttatgggataaggcttggttgttgttattgttgtattcatgtaaatgcttatatttttcttgcataaccttatttttacgtggcatagaaaacaagggatcttgttttcttcaccaatttaaaattattttgcaatctaatgccactgtatgacagagggagg

SEQ ID NO: 29802 - DNA, 681 bp, Medicago truncatula
  Intron number 1 from transcript Medtr1g059880.1 (locus Med tr1g059880) derived from phytozome v7.0 (chr-ID MtChr1; po s 11780063 to 11780743 reverse strand)
gcaagttgatacatctaaacaaaaaaataattaaggttttcatctctttctctttgttttgatctgttaaagtttcttatgatatagaaaagtaataatcttatgtgctcaaatatagcattttaatttacctccatgtatggttctttgcctctatttgctattactatgtttggaatttgtattgtgcaagagaatttttttacacattacttattgagcattttaattttattccagaagaataatgatgatatggacgaagaattttaagatttggaagtacaagatgaagagatataaatttggtgttttttttcttctgatagacattaatggtcactttaagatgttatattgaatgtgatcaatgataattgtcaatatctgtttttttttggtagtataattgtcaatatatctaagggtattcattagaaatccaaaaaatttattattttgaagatgttactttcggtgtgatcaatgacgattgataactatttccttttctgcaatattttaattaagtatcagattacaattttatatgaataaagtattttttttatctatgttattgtccttctttgacattcttttatttttaattcatttaagaaataactttttttaaaaaataaagtgtgttgcaacgctttttgaccgttggggtagata

SEQ ID NO: 29803 - DNA, 603 bp, Medicago truncatula
  Intron number 2 from transcript Medtr3g046540.1 (locus Med tr3g046540) derived from phytozome v7.0 (chr-ID MtChr3; po s 12667537 to 12668139 reverse strand)
ataatccaccttcaagcgcttttaggaaataggtactacctaacctcatctttcatttcaccttctcttctatatttccagattcttttgcaatatttatattctaaagtttgacaactttggtgataaattttaaatttgttcttgaatttttaagttctgtaaaccagacaatttttctttaataacaaatatttgacttttaattcccaaattttacacatgaattaagtcggtgatgattgcaaaatgtaccgtccttccaaccaatttgttgaatatgaattatagctcgatctaacaattgagatttgactcctaagatcgtccgttttggatattgttgcggtataacattcataaatattaaaagttcttcgatgaaaatgaaatatggtctgaagatatgcttataacttaagtaaagacacttctcaccttacaaactgatattatacgggttgagttagtttacttcaaattctaagaattaaaagcaatagatagatagatccccaccatttttttccccaaatgaatttaaacaaaaaatgaattaaatttttttacctttaattaattttctgacatgaatttatgtag

SEQ ID NO: 29804 - DNA, 729 bp, Medicago truncatula
  Intron number 2 from transcript Medtr3g132750.1 (locus Med tr3g132750) derived from phytozome v7.0 (chr-ID MtChr3; po s 33457992 to 33458720 reverse strand)
ggaggtcctcctctgtattctcaaagaagaggtcaatattctttattttattttttattattcatatttttatttattaaaccttcatacttcaccagcattagaactataaacaaacagtcttttttttatagaaacacttttagttttttaacttttcagaaaaataaatacttttaattagtgattactattttactgattttttttgtactcaagtaagaaaacaatatgatagattttttcaaataaataaataaatactatgatagatatatttagaaaaatactattaatttaacacctactaacaattttttttagtgtatgtgatttagtcaatgatactcttctttattggatgcttagtaaaatgacaggttttgaacttactacaaaatgagtttataagtgattattgcctaagctttgaaacttatatttaggtccttatatatctctaataaacgtgtggcttagttcattttgctattccatccacttatcttgtttattttgtccttataaatttcaaaattgatttttccccctattgaaatggaaagttttagacaacagaatcacagaaaatggaaagaattttatatattgatatatcacactgaaaatagagtaataataaaacaaagcaacttgaaattcaaaatctttgatgccgtacttcacattacaggacatcctgctctaattgctagacatcgaccattt

SEQ ID NO: 29805 - DNA, 613 bp, Medicago truncatula
  Intron number 2 from transcript Medtr3g135930.1 (locus Med tr3g135930) derived from phytozome v7.0 (chr-ID MtChr3; po s 34154907 to 34155519 reverse strand)
gatatcttgaatatacactgtatgttgttatttcttaatcaatattgtttgatacttcttggtacttgttggtactttgtggtttaggtcatgtttggataaacacaacttaattaagcacttataacatgaagtcaaagtgtataagtgtatcatataagtgattgtgtataaactatttctttaataatataaaatgaagtcaaattgtttttgtgtaagctataagtcctgaagataatagcttattgaaataagctgaaaacagcttaagaacatgtcataagttgtttccataaggccctctcaaacagtcttacaattgcttatgtcagtaaataaactcaagtcaatactaacaaacccttagtctttgtacttcaatgtagtgttccaatctttaattttgtggtttttttcccttgttagaatttatatggatttgatgctgaattgtgatgaaactttgaaagagaatgatttaaaaaaatgtgaaattatctaaagggctaatttcattccatctctttcatcaagttgttttgaaatatgaaaagattaatacatttgactatatgtaattataatttgacatttagatactggtgttctt

SEQ ID NO: 29806 - DNA, 621 bp, Medicago truncatula
  Intron number 1 from transcript Medtr1g047310.1 (locus Med tr1g047310) derived from phytozome v7.0 (chr-ID MtChr1; po s 11383325 to 11383945)
atttcgggttacacgcaggtaatgttttaagggaataggaaatggatttcgtatagttgggatattttgcattcacgcaaccggttcattcgactggaatggccgaccactcatgtgttgactttgtgaatgcagagtctcctgactacatggaattcatattgcaacatattttgtggacccagatttcttattgtcgggaaaactacacagtcgtaccgtcaaggagtcttgaccgttagatgattataagatgacatgtattttgacttttaagatacatttggaatttgaaatgtctgatttttatctaacggcgggtgagatcctcaaccgtgtgagtgcatgactagatagaaactaaatcttgaactgtcttaaactaatgtgtgaagaagagtttaatggatatacactagcagtctaaattagttttatactagcatcaagttattttcatggcattcacttaatttaaaatttaaaatacagttacagaagtgaggtggtgtggtaaaagagtgaatttttattggatgtcaaacattgaattgaatcatatattcagttttgtactgttctaatatgtttaccaaatgtctatgcaggctcataatccga

SEQ ID NO: 29807 - DNA, 712 bp, Medicago truncatula
  Intron number 1 from transcript Medtr1g016720.1 (locus Med tr1g016720) derived from phytozome v7.0 (chr-ID MtChr1; po s 3294382 to 3295093 reverse strand)
cggagaagacccacaacgttgcccatttgaacaaggtaaatagctattttcgaccagtctatattatcatttgtcttccccattacgtcacatgtttatttttattttttgaaagtagttttggaattggttgttgatctcaatgaatttgaatacgattattgccttaagggatatcactgttgttaattgttattccttctacattatactaccatgcagaagggtactagcctgtctgcttttctcggtaaaaataatgaatgatacaaaattttacgtggttatttaaaaaagttcagttatttgattggattagacaaaacggtaaataaaattggttaaacgaagggttaaattgaaaagaaaaaaagttacaccaaagtttgatatctcctttaaccataaacgggagttgggaaaaaacggcaaactaatctcattttcaaaatcttatgatagttcaaatcacaatactaccatactgtattgccatctcttaaaaaaacctcattgggaaatcaaagtgaaaatctctctttatcaaaaagcactttagtgaaatccttcctaagatttatggaagctatcaaaatgcacgagaaaatggcaaattatgatccaaagaaattcatgatttgacattaaaatcatcatagaaatctttttggttttcttatttttgcctccatctatagttgtagcaactctg

SEQ ID NO: 29808 - DNA, 594 bp, Medicago truncatula; identical to SEQ ID NO: 27849
  Intron number 1 from transcript Medtr2g123230.1 (locus Med tr2g123230) derived from phytozome v7.0 (chr-ID MtChr2; po s 29788219 to 29788812)

SEQ ID NO: 29809 - DNA, 514 bp, Medicago truncatula
  Intron number 1 from transcript Medtr3g159510.1 (locus Med tr3g159510) derived from phytozome v7.0 (chr-ID MtChr3; po s 41756619 to 41757132 reverse strand)
aaggtttttctctttctcaattcgatctgttttctatcatcttctcgctcattcattaacttttttctcgatttccagatccatgtttcgtttccaattctcgtttctgtagtagttatatcgtcattatcaatatcattcaattgatttcgattcgttattggatttgctacataatttgcaatgtagattattgaatgaatcagttttttcagtggtgagttgatagtgtatctgatccaaggtgtgtgtcggagtccgtgtttgtgcttcataggctctgtcacgattgctattgttgctaattgtgaatttagtgttgtgaaaattgattttgattcattattgattttgttacataattcgcaatgcagatcattgaatgaacggttttttttctagtgacgagttgatagtgcatagatcttttagctttgtcgcgattgcgaatagattgtaattgttgctaattgtgattttggttgttgagtgaacagctgagtactcccctttc

SEQ ID NO: 29810 - DNA, 262 bp, Medicago truncatula
  Intron number 3 from transcript Medtr1g146150.1 (locus Med tr1g146150) derived from phytozome v7.0 (chr-ID MtChr1; po s 32223924 to 32224185)
tacccgacattacaaattccagacaagtaagtttgattattgacctctcaaaaaacgaaaggagtactagaacaattggtaacttgagcattaatcctacattatgtatcgcgattttttataagcatgacagggtcaatttattggaatcttcttcatatgttataccaaaatatgttgcttttcaggcctaatttttctaactactaataaatttcatttggtggactatgttatcaggtgcgcagacgataagcctttg

SEQ ID NO: 29811 - DNA, 515 bp, Medicago truncatula
  Intron number 2 from transcript Medtr2g007050.1 (locus Med tr2g007050) derived from phytozome v7.0 (chr-ID MtChr2; po s 929975 to 930489)
atagcgcagttaagaaaggttggaatgaatatcatgctttctgaaatgtagactactacataatattttatattttgaatgtagatgcaattttgttttaggtcggcaaataattgatgataattactttattcttttcattttttaactttggtcaacaatcttgaagtgtcactcttagagaaactttgcagtagtttttctttttataagtttttgtttaaaatctcaacgtttgtgttgttgttacttttggagtttgattatttagttacttaatcccctttcatgaagctattgattttggaaacagatagttgaaaagaaatgtttcccgattttaatgaatttttgcttaaattttgtattttttattacacagtttattcaaataaagcggtgaagaatttttttaataaacaggtataggttacttgtagttttgaataactcccttattaatacggttttgggttacaggtgtgactttggaggatcctcgcatcgaagatctt

SEQ ID NO: 29812 - DNA, 324 bp, Medicago truncatula
  Intron number 1 from transcript Medtr3g076180.1 (locus Med tr3g076180) derived from phytozome v7.0 (chr-ID MtChr3; po s 17559514 to 17559837 reverse strand)
cgagagagtttgagaagaaaacaaaaataacgttgctgttggaagaaagaagaaacattaatttttttttgcctttgattgtgggtgggtattggttataatttttgttgaggtctgtcacataaattaaaaaaaaaaaaaatagatattgacacgaaaatcaaagcaataaagaaagaaaataaatataatgtgattataatagagaaagttatcacaaaaattatcataaaatagttgtacaaatattttctcttgtaataatgaaaggttaaacaatttggatgagacgaggtggtacttgtgatatttcggcttgggacg

SEQ ID NO: 29813 - DNA, 634 bp, Medicago truncatula
  Intron number 1 from transcript Medtr3g143170.1 (locus Med tr3g143170) derived from phytozome v7.0 (chr-ID MtChr3; po s 36873798 to 36874431 reverse strand)
tggtcttacaggagatactcaaattgcagtcccatgtcccttgccttctatttaaattaaagttataactgcttaacttcagaaaagaaaatttattggtgttcagttcaattttctatgcagcataataagtaaagatgtcctaccaagcctcgtctatttaaagcatcatttagtgaggtaaactacagtggccgtttctctcatacgcaagcttggctctcactctatggttgatttcttagtgaaaaacctttttcatatcaatggcagagcaccaaagagattagattttattgaaattaagttggttcctccaaaggttgggagtatcaaagtgaacatcgatgtttagaattggtgcttgtgttgtctggattacgtaatctggattgcatcagcaccatgaaaaaaaatggtgtttagggctgttcggattatgtaatctgaagaaattatgtaacacaccctatttttttgagatttttagattacataattcggaaaaatccgtcactcattcgcgcgagaaaagacatagggtgcgaaaagtaatgctctaaaatttatcaattattctatttttgaatcctgcccagtaaaaaaaccacgacaactggacccactaacgaaa

SEQ ID NO: 29814 - DNA, 364 bp, Medicago truncatula
  Intron number 2 from transcript Medtr3g079940.1 (locus Med tr3g079940) derived from phytozome v7.0 (chr-ID MtChr3; po s 18695743 to 18696106 reverse strand)
aagaggtattaattgtactatctacatatcttttcttagccaaaagcttgatgttttcataccagatatgtatcatattctcgtgtatgtgtgtttgtattgggctttgttgtgattttcatgatcttgataatttctgtaattaagtcagacaaatgacagatgcttaattggttggaacgtatctacattacaattgcttttccctactgtaatttcatgatattcatatttgccaccaccacctaatagtatagttgcacaatcattttttgattaagtacagtacttaatctaaaaatgattaatctttatgtactatttataccagtgttttatttttgtcaggcgaacggtgcacttg

SEQ ID NO: 29815 - DNA, 349 bp, Medicago truncatula
  Intron number 1 from transcript Medtr1g140920.1 (locus Med tr1g140920) derived from phytozome v7.0 (chr-ID MtChr1; po s 31297262 to 31297610)
caactctttagcagaggcgttttttctactcggtaatttcttctttgatctgtgttttactattattctatttcttaattagtaccaaattacatgtttcttcattctatcaaaattaaatttcaattctgatttctcaatctttaattttgttttaggtatatttcaaggtttattcaaatccaatatttttgtgttattggatcttactttactactgtgatgtgatttgtgattactacgatgttgtgttatatagtactttggaaatgaatcatttgagaaaatgtttttcaatgtgtatgttgtactcaagctgttttttattctttgtctttgctagtaaaac

SEQ ID NO: 29816 - DNA, 813 bp, Medicago truncatula
  Intron number 1 from transcript Medtr3g123780.1 (locus Med tr3g123780) derived from phytozome v7.0 (chr-ID MtChr3; po s 31208400 to 31209212)
aagttgaaagtgtttgtggatttgaggtaagggttaaatttgaaagtgtttagtagtctagtaattagagctcacacagttaattgtttattgtttatgtatatgattcaatataaaaaaaatagaggaacctgcatgtaacactagacataaatataaaatttgtcattttgtgcagaaaataatggtttttagtacaggatatagaaaatgttgttaatagactatgcataacgtgtctgtcattcatttgtggagtagctcttaaattatgaaacaagaacgtccctgagatatgtctgatctccctagtgtataattttttcatctttcattgagtagtagtacatcttagacatattttttagattgaagatatgttaaaatgatatgctcaattagggattaaatacatcttttttttgggttttcaactttccaaagacatcagttttttaaagaaaataagacattaaattttattgcattattttggcaaatccatgaacaaaagtgaaagaatataaattactaagaaagattgaggattgaaaggtaaagagttttggtcccaatcattgcaaactgcaaaggttaagatataccagcagcaagtgatttacagtggtacaactgaaataaatcaaagttttatttgtggctatttatttgtatgatttcttcctttttatttcactgttgttgcttatactaaagaggactgacattatgttctactagttgattagcaaaagctgactgtatactctgatttcagtggctcgtcgatctacatcatcaattcgcaattct

SEQ ID NO: 29817 - DNA, 1026 bp, Medicago truncatula
  Intron number 4 from transcript Medtr1g121240.1 (locus Med tr1g121240) derived from phytozome v7.0 (chr-ID MtChr1; po s 26369488 to 26370513 reverse strand)
aggctttccttgttcttgagagtaggggcaactaggtatgtcaaagtgcatgtcagggagtgttctctgcatgaagtagctattgtttttcttatctcttatattttagccatgtttttaaaattttgatcacaactttttaatataaattctccaacctatatttattctttttataggatctacctactgtgttttcagtttcatctgcagactacgtctactatgtagtgaacaacaagaccctcttagttgaaaaaattaaaaagaaaagtgccaattgtttattatttgattaaatccaaacactcagtactatgcatctaaaactcgtgtttcctatgcagtaatgcactttccatttgaacttaggcatctatacaagaaagataatgctgtaatgcactctcctttgggttaaagcatgttgtcaaggagcttagttagttgtaggatcgggagaggcttggatatagggccactgttttaacacaaagaaagcatctgatttttacaaaattgcctcagtattttgacttttttcctttcattttggtgctcatcaataatattctacgcaacttactaggatatagtattttgggggatattaggtttagcaggtgttcactcaattaggaagaacagaaacagtcatcactcatatcatatgttgatatttgctacacatctcaaaagcctctacattatctctcaaaattatgtggaattcaatccacaaacatgctcaaagattcaagtatctattgcaccaacatatactgaaacatttaaaggaatattttttaataatttctgttattgtagcatggaagttttttttaacaaattaatcatgaaagtttctaaccattgttaagtaatgcattttctaccaacattgaacctctggcctgttttagttacttgatgaattgctatttcttttattctgtatatatagcatctcatacttctgataccttgtcaggaaagccttgcaactagtaacttcaaatagtgaga

SEQ ID NO: 29818 - DNA, 1037 bp, Medicago truncatula
  Intron number 1 from transcript Medtr1g129860.1 (locus Med tr1g129860) derived from phytozome v7.0 (chr-ID MtChr1; po s 29086759 to 29087795 reverse strand)
gcacagtttaccccctcaggtttttcttctttcttttcttttttttatttttttattttttattttttttatctcttcatagtgttcttcttatattcgttatttggattggaacttgattttttcagctaaagattgaatctttgagatttttctgatattgagtttctgtttttattggatttttttcattgtctcagatagtaattttcccccctttttatagcgtttgttcttgtgatttccatgcttgcatgcatagaaatagaatcatgatggtggggtctctgtgtctgtgattagcatttctatagtgttctatacagttgttgatgtcaagatctgatggtggggttatttgtttctgtttatgtgggatccatgtgatttgagctgggtttagtttttgacactgtattaggaaaataaacgggtaataaaaaaattacatgattttaacatgtaattatgtcatacttaatttttttttgtcatagaagagcttctaatattaggaaaattgatgggtaatcaaatttttgatcatattctttttagaatgaatttatgtattgttgctaaataatttggccataccaaaaaaataaaataagttaaagcactgttattgattgttatgaaaaagatgattctatgttaagcttgcttgttaggtgatgaattgaacatgtgaaagataaagtttaataaatgggtctaaattttgaattttatcaagctttaatgaatttagttgtgatctaggttacaaactggtttgtctaatcaccaattccacatgaaggtcatcatggttggtaaagctttccatgttatagttgaattcaaaatacatgtactttatgaagtttggctatttgctattttggatgtcatgttacccatgtgaaatgattcttttatttcatactaattggcataaggacgttttgtggcatttcacatgaaattatgtcctatttttttttaacttttctgtagtgcttccagtaaaattttcttaacccaaaattcgt

SEQ ID NO: 29819 - DNA, 656 bp, Medicago truncatula
  Intron number 1 from transcript Medtr1g059700.1 (locus Med tr1g059700) derived from phytozome v7.0 (chr-ID MtChr1; po s 11722197 to 11722852)
tcgaagttaatcggaatcggatcacagtgtctagagttaggatctccatttgtacctggatttacttatttttgaaaactttgtttacattcatatttaagtatttttgacgtaagatgtaaatcattttatgttcgtctaacttttcaagacctttttataaaatttcaaattatggccgttgtgaaaagtattttatcgatgaaattcaatttttaaaaccttggtcgttacggtgccagtatttcggtccaaataacaatcctgtgctatattctctgttttttttgggtccaaaaaggctatattctcttctccattaaaaagatctccttatggcgaatatctttatgccacacagtttactttgtcgaatcaacagaaaataatgcgagaagagcatatttttgttggggttataatcatataggaaaataatgcgagaagtgcatgataattcctctcaaaagaaaaagaaaaaaaaaatgttagttatattgtatttgacatttaaattatggaagattaggaatgataataattaattttttttttttgcattttcttaatacgtcctttgttacttcatctcttttttttttttttttttttttcaagtagcctagtggctagagctcacacaatttaattgtgga

SEQ ID NO: 29820 - DNA, 973 bp, Medicago truncatula
  Intron number 1 from transcript Medtr3g010360.1 (locus Med tr3g010360) derived from phytozome v7.0 (chr-ID MtChr3; po s 1756175 to 1757147)
ctggcctttctgccggtcaaggtgttaagctcattgtattatccttgtttccttttatttggatttaattacataaagttatttcatttggttagcattaatattcttggtagagtttagccttttgatcttgctcctaggtctttatggggaagttgagttcacttttactattctaataatcatatgtagtcttccatttatttcttgtatctatatagttcaactttaagcttctcatatcatatcttgtactgaaagactcgttcatattatgataaaatgttaaaagaaaacctgtacagaaagactaaattgtctctcaatattttctctatgacaggtcaaatgttttatgacatggctaaattgtctttcggtatttttgtttgaaacttagtttctctaaatctacaaagttcataaataagggtgtgtctacccttgttttaatttaaacttttttttttttaatttttagcatttatttgataccatcatgaatgagtttgacacaaaagataaataattcaaggatcggtttaatagcgagtgacatagttctgagaccaacttgatttttaataaataatccaggtatcgatttgatagtgtaacaatttgtaataactttcgttttaaaaaaaaaaaaagtaaaataaaaaactcaaaaaattcgatcaaatttgttcctggtggaagctgacttggaactccatgtcagtgcttaatgtgacatgtcagcattgttaacgacgaaacttaacaaagagactaaactgatcgacatccataaaattcaggaacctattaaatatttcgaaatattcaaggatgaaatcgaccaatagatattataaatttgaggactaaatagcatattccctcaaatagatacattaaagcatttgttgaaccttttgtgttgatattggtagcatattccctcaaatagatacattaaagcatttgt

SEQ ID NO: 29821 - DNA, 988 bp, Medicago truncatula
  Intron number 1 from transcript Medtr1g108330.1 (locus Med tr1g108330) derived from phytozome v7.0 (chr-ID MtChr1; po s 23068758 to 23069745 reverse strand)
ctggaggtttgtgtttcaaaacttttgaactctatcttaggatggatacttgatatgttcattgattttgggtattggcgtacttgaaatttatcgaatttatgccagtgagtagtgacttttacaatatgatatgatagcgttgttcatttaactaactctgcttagtggaaaaaaagtcttttgttgttcgtaattattgtcactatttgtcatgttaatatgtctttccactttgcgcacaccttttactgaaagatttatatttatttggtcagttggggtaggcaacatatagaataatgatggaagaaactatacttttttggtgtattttgaagtactctattaatagactaattacttgatttctcattgttttacttgtttacttatggttgtaacctcttttaagaactttccaactccacttatgattaacatacctaaagaatttgttagttggcatccttaaactgtttaaaattgttgaatcttgctacctcacaatttgaaagaaaacacatattggcatgcataaattcgtccatatagttcaagttacttgatctttaagcttatgttggacagcaaaatcatttgtttataatttgcaatatagaaagggagattttaaaggtacaaaggttttaaaaagaatattgcaataaaatgacatttattctctaaaatttaattggaaggaaaaagtgagatttacgtgcatgattttttatttttatttttgtatatgtcaatgctggaaagttcaaagagttgtttaatgagtgagttgagtgctgcgatgacttccttccttttgaatagtatttgaagctgcagtatgtgtattgttttattctgatctgcaattgctttttatattttgacgggctttagactgctgatcactattatgcctataactctctataactgtgcttaatatttaggtttgggacctggaacactcgttggttctgctgcg

SEQ ID NO: 29822 - DNA, 391 bp, Medicago truncatula
  Intron number 2 from transcript Medtr1g024380.1 (locus Med tr1g024380) derived from phytozome v7.0 (chr-ID MtChr1; po s 5781856 to 5782246 reverse strand)
cttagaaagcaaaaatatcttgaggcattggtcaggtagttaagaattttatgctctatatatgtgcaatggcaaattttattgcaaatcttatgtaaaacgttttgcaccaaaaaagacaggttaaaatttctattttaaacttcttaacatgtgcaaatttgcacatgatagaaaaatcctaattaatttttggaaggtaacaatgactatgttaagtgtatttagtcattgtttgaaccaaatataaaacaaagtttttcaatttcttctttttgaattctttttcccaatattttagtagttaataatcatgatttttttttcttcttattctaagtttttgtattatttcattagcaacgaccgtgccaaggcttccaatatcctc

SEQ ID NO: 29823 - DNA, 609 bp, Medicago truncatula
  Intron number 4 from transcript Medtr3g132830.1 (locus Med tr3g132830) derived from phytozome v7.0 (chr-ID MtChr3; po s 33493692 to 33494300 reverse strand)
atttgaactcaaaactagaggatgtaagttgtacacttggctagattgtttaattttgtttagaagtaaatctgagttttatgactagttcctattcttgtttgtgtgtgtgtgtattattgcaaaagaagtttttgcagtcatggaacttaatttactcttttgaaaaatacttatacttagtttatttatattttactttttatttcttgtctttttgcaaaatgagatgcttattaagtaaacaaacacattctgattgtgatcagcatgctcagaagttacctctgctaacttcttttatctgtataattcagtccacctttactacactcccacaactaccacttcctaaggttattcacattgcctattttgggtcattgctgttgttctcaaaatcatcgtcactagccaattgtgcagttgtcatgattcatggccgctatgggcctaactacttaatgaaaaaaaaattaagatattattctttatatttctaaaatattcatctataaccatctaatgatgtcagtttgttatcaaaacataatctttttgatgatgatttgacttgagcagtgtattctccacaggttcaaaagataa

SEQ ID NO: 29824 - DNA, 432 bp, Medicago truncatula
  Intron number 1 from transcript Medtr1g107190.1 (locus Med tr1g107190) derived from phytozome v7.0 (chr-ID MtChr1; po s 22546318 to 22546749 reverse strand)
gtaatataattttaaacttcagttttgattgttttgtttaatacggtcaaacctagcatatagtttggatttggtcataggattattattattattgggttggaattccggtttatgttcttttgtgaatatcaaatagggctatttattaataggaccaaacactagcaaccccgtcttcagatagataaatttcaaagtgtgtttccctgagaaagaaagtaaatttgtagttgttttttttttgaagaaacgaaaataagtaaatttgtatagttatgataagggttttgatggatggtgaactttttgagaagaattttgttggtaccaaggctatgtttgccttctcgctttgtttctcaattcattcattgcttgagcatgagatccgacctagggttgtgagataattgggtgggaaagagcgca

SEQ ID NO: 29825 - DNA, 690 bp, Medicago truncatula
  Intron number 2 from transcript Medtr1g126980.1 (locus Med tr1g126980) derived from phytozome v7.0 (chr-ID MtChr1; po s 28431963 to 28432652 reverse strand)
cttggtttaggagacgtatcacattcttaccctcttagaattattactctatgagtctatgtgttaactgtttctaacggatagactgtattttattgcttacttcacatgaaggagtatgttgctttgcgtttactgatatgaacttttcttccttgttttcttgctaaaccatgttttgttacgtgttatgtgggttgtgtggattttcacttactatgatttttgaataccttcatggtgaaatattctgccatatatcatgcaagagtagtgataaaagaacatgaaaaagaagaggttgtcattgttcacaatactgaagtttttactgtaacctcctccccctctcctttctctaacttctcttgcatcaagtaggttgaattgggcatattctgccaattttgtctaatttgagtgaaatttttgttgtgagttatgcaatatttacgtaggggccagggagcatattgtgatcgaagctttctctgtgcttcagtgcatcacgtgtgtttgtttgcatacacaccatcaaatactgtggcttaaagcttaaaatatcattacagttctgtgtcgacctaagctaatcctgaattcaataaagtttgctagtcccacttcttctaagcttctgtatttggtgtttcatgatgtttgcttatctttttgtaggccatccctggg

SEQ ID NO: 29826 - DNA, 439 bp, Medicago truncatula
  Intron number 1 from transcript Medtr1g126980.1 (locus Med tr1g126980) derived from phytozome v7.0 (chr-ID MtChr1; po s 28433528 to 28433966 reverse strand)
gaagggttctctcaaacctctttcaacagtccaaggtagtcccgaaaccctaatttcccaatttcagatcacgcctttaatcttcctcttcaattttgatcgtttcttggaaaatcgatccgtttaatcgatttaatgggttgattagggtttttaggtatgttattaggtttaattactaggtagaaagaaaacattgatcatcaaattaggttaaaagaaattataatttcaattttttctgttgggttcgtttgcttcagatagttcaagattcaaagaatgttaaatttggttgtagtaatacaaaattgaacaagggggttctggaaggggtgatttttatttatttattttcaataaaatgcgtgcatgtgtttataatcttctttttctatatgcaggttgcacggttttaactgtttaggtttttgcattc

SEQ ID NO: 29827 - DNA, 569 bp, Medicago truncatula
  Intron number 1 from transcript Medtr3g114180.1 (locus Med tr3g114180) derived from phytozome v7.0 (chr-ID MtChr3; po s 28830705 to 28831273 reverse strand)
gaaaggtttccatcaacattctgctaagttggcagtagggatggtaagggctgtgtgattcaggtgaaggggatagtgagagagctggtatttactgagattagactgttattagttgggacttcttgttctgggtgaggcttagcactctcgaattgccttgggccatttgtttttctggtttctgcattttctgctttgtagtttcaggatccaggatctgttatcaccttgatataggtttggatatttcccagttatagagtttcagtgctcttttttactcatttcctggtgcctatcaatgcatattgccttgcatgatttattgccagtttcatttccctttttttgattcacaagagtgttagaaccggtaacagaattaataatatcttctttttgattcatgagtattagaactggtataacagaattggtaatatctctgattaacgatccttttctgatgaattacaaggaacactaccagaaaacatagacaaaacattgaaacataatcctctgtttcaggatagataggaaaacgggaggaaactttgattgca

SEQ ID NO: 29828 - DNA, 994 bp, Medicago truncatula
  Intron number 2 from transcript Medtr2g085410.1 (locus Med tr2g085410) derived from phytozome v7.0 (chr-ID MtChr2; po s 19247253 to 19248246 reverse strand)
accttcgaaaacaggtgacttgagaaaatccttttcattttgtagtagtttactatgttagtttggactcttccttttcattttatatttacacactacaaagctttatacaaaccaaaatttctgtatgaccattcagattatggtctttgttgctggtttctctttctcctgatcatttgctagggttgtgttcaatttgtcttcttttctcacttgagcctggattggtcattggtcttctcacatgatcaaatcatcttatgcaaattccatgctggcaacacatttgccttgcatgctttttcacattggatgatcaaatgatccccattgaatcacgtgggtcccacataaattttggtggggttgatataaatttaaaccattagaagagtttgtgttgaaaagagtgtattagagagtgtaatttatctttcctatcttaactttcagttgaatatcttcccaacactcattaacatacaacattgttgccttggattttcattagtattctctgtttagtctcttaggtagacagcaaaccaatatccacccaacatgaaatttatttgtgattctctcttttctagaacaaggtttctttctccttttcttatatggtatctagattcacattctgaatcatggccaatccaacttctgagacccctcctccacctccacctctgtcgcacacaaggaagatcctattcgagctctgccatttcacgcaattttcgctgatgactctttgttgaaatcttctaatctaaattttgtgctcaatatctcttggaagttgaatgataaaatcttttatatatgacacaatctttatgagctcttcttgtttgtctgtcaattcctcctcaatttttgtccgaagccgatggtcgtattgggaaagaaaatcccgcttttcaagtttggagacaacaaaatcaaatgttacttttgaatctttacaggtgacagtacttttgaaaga

SEQ ID NO: 29829 - DNA, 1052 bp, Medicago truncatula
  Intron number 1 from transcript Medtr2g049510.1 (locus Med tr2g049510) derived from phytozome v7.0 (chr-ID MtChr2; po s 13541273 to 13542324)
tctcaaagaagtcagacaataagggctcaaaatcagtcttatagcaacacttgatatggccaagaggtatatcaagacactatgattctatttgatttttctctcctatatatatattttgagacttctctaatctacacaattaaaattgttttgcatcatgttcaagtgtgtgttttatcattggatcaataagtctcaccgtatcatgtgatgcaatggtaggatttaaagatccaactaaaactaacttatatatgaacgatgaagacttctcggttatcacatttttttaagagactatttatcacaacatcgaattggcctatatattagatgtttcaaatttttaaaaatgtttgaactaaaaaagattaatcattataatgtttttgacatgaatcgtcaaagaagtagcgacatctaagcttatatttatgttctttcacaaaaaaatgtttccattttgatttgtgttctttcaaaaaaagttttgatttgtgtgttactaacaaatctcattcctcctaacaaaataactattgcaaatttgcctctaaaaattgtttttgaataaacttaaatcataaatgatattaagaaaaatagaattttaaatcatttaaaagtaaatacaaagggtatatatattttttttgttttgttataatttaaagcttataaaatattttagtttgaaaatatttttttcaaagttcaaggattcaatcattatgaattttagtttgaaaaattaatccaaaattctcaaccaatttaaggaaaaattgaattagtatattctatcaatgtacaattattttacatatgcatcggatgatatgttgtcacatcaattaacaaaaataaaaatatgtaaattgtcataatcatcaatttatgtcgtaacacatcattgaatatataaattaaaggtacactaacagagtatactaatgttttattatttaattattaaacctttatattttgtatcgggacattcatcatttaaaaaaaattgcaggtcctttggcgtgtggaaatttcat

SEQ ID NO: 29830 - DNA, 706 bp, Medicago truncatula
  Intron number 1 from transcript Medtr2g008720.1 (locus Med tr2g008720) derived from phytozome v7.0 (chr-ID MtChr2; po s 1747527 to 1748232 reverse strand)
tgaggataagatcaaggttaatttcatctcacaaggtaaaaataattcactgtttaattcgaaattttccctccacattgaaccctaaaatttaatcttttttaatccaaactcaaaccctagcaatcacctataaaagaggtgttttgggtgaaggaaaagtcaccccagaatttctttgtgttgacattgcaattctttgctcccctcttttagtttacaatcttgcatttacattttaactgtttgaaaaaaaaaaaatcaaaaacatacatttctcattcaagaaaaaaaaaaaaaagatgtctaacacatctgatttttcagcaatttctgagatttgcactgaaaaaactttttggaacttgaagggtaaaatcattaggctttggcaagtgtctgatttcaatggaaataggatgcctttttccattgaaatggtcattcttgatgaggctggtgataggatacatgcctcactcaagaagactctgatttacaagtttaggaatgatctctttgaaggaaaatgctttagttttgaaaatatgggtgttgccaacaatggtggtggttatagaaccactaagcacacctacaagttgaactttcagtttagttcaaaggttaaatacctccctgcccttacaatcactaagtcaccttatcagttggttccaatctctgaagttattggaggaaccta

SEQ ID NO: 29831 - DNA, 705 bp, Medicago truncatula
  Intron number 1 from transcript Medtr1g025860.1 (locus Med tr1g025860) derived from phytozome v7.0 (chr-ID MtChr1; po s 6480287 to 6480991 reverse strand)
ttctccttgctggaattactcggtagtttgaagtaaattctcacacactctcatttgccatatatttgcatcctgtgaatttctgaattttgcgttaaatttttttatttattttttttgtcttttttttcttgaagtttatctctcaaaggagctaaattttgattttctaatagattacatgttttaagctcatataattattaatattgtatttttgtatacacatctttgattaaaaaattacacttatagaccctctttgggtaaacaacttaatgaatcgcttatagttatagaccctctaccggtaaacaactcaatgaatcacttatagctataagcacttacaacaagagataatcaaattgttttcatatatgctataagctattttcataaactatcccgtagagtttatgtgcataagctgataacaacttatagacatgtcataagctgtttacataagcaatgccaaagattcttataagagcttatgtcagtaaataaactcaaataagtcggtagtttttatgcaaattaatgcctttatagaagagataaacaatacttgtaactatagcattttgttatttgaattcagagaagttaaaataacctattttgttttctgattcttggatcttttgtctgaatatatctaaagagaagggaacaatcccagtctccttgcgtaacgga

SEQ ID NO: 29832 - DNA, 1014 bp, Medicago truncatula
  Intron number 2 from transcript Medtr2g097150.1 (locus Med tr2g097150) derived from phytozome v7.0 (chr-ID MtChr2; po s 22707446 to 22708459)
gtctgaattagacgcacaaattcctactgcctacggtaagttggaatatctatacctattgatgcgtgttgtctgtcagattaattgttctgttcatgatatgcagtcattctggaaagggtagtcataagttgtccattatattgtgtatggttgggttccttgaaaatgctgtctcagattattaacacaagcatatcttttgttttgaatttttattatcttttgttttgaattattattgtttatacctgacaattgactagtaaattctgttatctcttttatgttaaaacgtagatgtattataccttcaactaaactccagaaatgataaatttttctattaactcttgtgttaaaatgtagatgcattataccttcaactaaattccagaaatgagttgctttcttactgatattgctttacttggacatgatgttgaccctattttttttacttataacgataatcagtgtgttaatagtattgttcttgcaaatattaaatgttaattagatgtaatttcattatttaacaagatgcttaaaagatgccaagaattgtagtattgtacagaattattttctgaaatagttttttctggggtgcttaaggtggttgaagattgggtttttaatgtttgatactttgggttttatcgtgtgtgaaggtttcgttccattattgaacaagatgcttaaaagatgccaattatgccaattattgtacataactttgatctgaaatagtattttgggggtcttgaggtggtttaaaattggatttttaatgctttgattcttaggatcttaacgtttgtgaaggttaaaaatgtaaaattgatacttacagcctcagacagcattcattatgtggaggaagaatagaaatagatggtttctgtgtgatcatgataattaagtttgactattgattatcttattacgatatgatatatgactcctgtgtgggatgtgtggcaacaattttagatccttttgctgaggcaa

SEQ ID NO: 29833 - DNA, 510 bp, Medicago truncatula
  Intron number 2 from transcript Medtr1g024220.1 (locus Med tr1g024220) derived from phytozome v7.0 (chr-ID MtChr1; po s 5667572 to 5668081)
ggatcagtctcagcatccaccttacattcctccatgtatgcaaattcttcgtctttattcaatttgtttcatttccatgctttttatttccagctgcatcaatttatgcctaaaaattgaatttttaatgaaaaatatgaaattttaggtttattggtactacccttttgctaattttgagtcaaaattgttccttttgtgttctagaatgatttaattgcttgaaattttaaatctttgaagtctatttaatattttctttagctttttataagggttttttagatataagctacccttttgattattttgagtcaaaattgttcctttcatgctttagaatgattttgctgcttgaaagtttaaatcttcgaagttcagtcaatgttttcttcagcattttattgaaggggtttttagatttaattttgggattcatatagtctgttaaaccctagattttcatgtgttctgacttttttatttgttatttttttgggggtatagttc

SEQ ID NO: 29834 - DNA, 626 bp, Medicago truncatula
  Intron number 2 from transcript Medtr3g036510.1 (locus Med tr3g036510) derived from phytozome v7.0 (chr-ID MtChr3; po s 9676044 to 9676669 reverse strand)
ttataattggtgccaaaacccatttgtgtgcgtgggtatcgcctaattaatgcttcaaattgttgaactgttatatttgttagactatcttctccgggtacatcttgtgctgggttgatttgttgttgatagtaatatattttattttgatctttaaaaaaaattaataataggtgttggatatgctttatacattcatatacttttcaagaagcatattgaacgaatgaaaaatgtgattgactgattgtcattcgaaagtgtggagagcctataaagttaaataacttcatccatactgtacattagctttgcttattctttttccaattgcattgcatgccattagataggaccacacccattttgttctttctaaatttacaagataatattctttttgtagaatagaatcatgtctaattggctctgatcccaattctccttcttttttgttctttcaacatttcatgcttgagatgattgtgttatgagtatatcaatttggggttttttttttaattagttttttattttttattttttataatttatttgttaactagtaaagctaatttagttaaatttacattataggcgtctagaagtcctacctcaactgacaa

SEQ ID NO: 29835 - DNA, 729 bp, Medicago truncatula
  Intron number 1 from transcript Medtr3g097220.1 (locus Med tr3g097220) derived from phytozome v7.0 (chr-ID MtChr3; po s 23181057 to 23181785 reverse strand)
taaatctgctaattccttcaaactcgctaaatcatgtaattcaatctttctttctctttacattttcatttttcgtcaatcgatcaaattactgaaatttttgttattattatgatcggcgagttttgatttcaggttttcgattcttgatttcaaatgcggaattattgtttgtttttacctaatttgttaatgtataaatttaatttgattttagttgaaaaatttgttgacctaatttattttttgatcgattagttacgttggaatcgaattttggattttttttgagataccttgacttattatcgttttttcactgtggatgagattttgcgatgaaataagtggatactgtgtattacgaacgtgattatcaatttttgttgcatatttttttttggtagtggtctttgtacttctgattgaagatgtttcgacacatgtcacgataccagacacataattacatttaatcgtgtcattttctcaagttattatcagtgtcgatgtgtccgtgtttgtgtttgtgtcggtgcttcgtaactaaatgattaaccatagtattttggctacctaccttaaatttggtgactgatcattttaatttgttgtaaataattgtgattaactttatgattgaggatggaatagttttgtatgttgttctgattcgttcgatttggcatttcaggggacaaagcggcagcgacatacctaaagttggcg

SEQ ID NO: 29836 - DNA, 816 bp, Medicago truncatula
  Intron number 1 from transcript Medtr1g089720.1 (locus Med tr1g089720) derived from phytozome v7.0 (chr-ID MtChr1; po s 17937130 to 17937945)
gcttgtggttgtttttagttaggcatcgaacttacatgaatgtttcaactttagtattctttagttaaaatttatttatcacttatgtaactatgtttaagagatagtacttgagtgacgtagaattggatgacattgatcaatcacaatgttacaatgcttgtgtttttctctctttcacaagcattatgacattgtgattgatcaatgtcaccaatgtcatccaactctatgttacccaagtgccatctgttcaacaactagctagtgttaaataacacaaaggtctaatgaaaataagaaaacaaaatattgatatatatggcaatataatttgataaaaaaacgattagatgttttttttttcattggtttcttccatttccgataatatcattgagggttagatatctctcttagtcggaattcaaacattgattcgtcacattatgagggtttaatttattccgttagatccagtttaattggtaatcaaatgttcttctaattaaaaatatccttagcacattaataactataaaatcataatagtaaaataacaactttatttcattacactatcctttcccttcagacaaggcatcaaacttttagaaagagatgtaaacttctcttaaactctcacgcattccagcctataaataagttgaaccaatcgatcaaaccaagccatcattcatttgctcttaaatatacaaatcatcaaaaggtcactactcctctgatattaagtcatcatgtccctttccaacttaggaagtgccactgccccctgacagtattttgaaccaaaag

SEQ ID NO: 29837 - DNA, 265 bp, Medicago truncatula
  Intron number 1 from transcript Medtr2g091280.1 (locus Med tr2g091280) derived from phytozome v7.0 (chr-ID MtChr2; po s 20556070 to 20556334 reverse strand)
tttacacaagcaaacatcactcggttgtacgctcggtccatacaaataaaatacataacaaatatttgtgactcattaaactctccctctccaacaagtcggccttaattttttctctctaggttttctcttactgtttcttcattgaggggtggttttgggtcaattcctcttcatctttttctctctatttcaatctaaataagtgattttcacatagatctagtttttttctttttgatttcatcagtggcggttctactgt

SEQ ID NO: 29838 - DNA, 893 bp, Medicago truncatula
  Intron number 1 from transcript Medtr2g053040.1 (locus Med tr2g053040) derived from phytozome v7.0 (chr-ID MtChr2; po s 14487673 to 14488565 reverse strand)
tctctcacagtttcttcccttcacttttgcttctggtaattttcatcctttttcttttatattctgtttgcttttatattattatgtgttatagtttttggtctgttttcttattgttattgattgatttcaagttgcaacctgtctgtaacaattatttgtaagactctacttacctgctgaccgaaaacaactcttagtaagattttactttcatcagagatgaacaccggattactaggaccttttcacgtcgaattggatgtttaagatttaagaaaatagtagcagattttatttttttagaaaaattcgtgactatgctgtactcaatatgtatacgttttatatttttaaaaattcagtttcaattggaataggattatgatatttttttgcttcttcaaaaaaaggattatgatattttttagggtttccttgttgatagtgtattgtgtaaatgaatacaggatttaaattacattgtgtttgattggtggaagatgaactgtataattaattacagatattattttttaatgtattttgataacggtattcccaagtttctcaatggggaagaaagaatccaatccatttggcagaccttccaatatcttcgccgcaagatgttatgtctgtcttaactaattttatttatgtgcagactgctcatagctgatatgatctattttactttgatttttctctctaacaacgaacttcaaacaaagctctgctaccacattgggagacaactatgcaggtttttgggctggttttcatagattactgctttttatggccagctggtttttaaactacgacaaaaggatccgtaactagtttttaggttggttttcacactcttttttgtttggtgtaggcaaata

SEQ ID NO: 29839 - DNA, 752 bp, Medicago truncatula
  Intron number 2 from transcript Medtr2g096990.1 (locus Med tr2g096990) derived from phytozome v7.0 (chr-ID MtChr2; po s 22578495 to 22579246 reverse strand)
agcggtctttcatcagatttcctctattttctacggtaagtgtttgttaaaatgtctatgagaatgtatgtttctattttgtttaggatatggaagaaaactcaaagaatgtttgagttatgtagtttatgtacctctgtagccgaattagttttcaaatgtgattatgttctattagttttcaaatttttatcggtgtcgatggatctgtgtcaagtgtcttgtccggtgccaacacatgtgattcatattttcaaatttttaccagtgttgtgtcagtgtttcatagagtttattagtttaacttttaactttttattgacaattcttttccaccttttttcatctcctatgaataaaattaactaattttcattttgttttcttgttgtctgaaaggtcttgtgttaattgttagttggttttatgttagtggttagtgttcgaaacttggacctgattctccgactcttagagtgacttagcaatgttgtcaaatagtggcgctatagcatagcggagcttgaacaaactgttattgtttatgatacagtatttagtacatagtgttgtcacatagaggctattacaatttacaacgctatagcattgtagcatagtgaaatttgaacaaaccactattttctccgatcgacaacattggtccttgcttggccacttgagctactactagtgtattgttgttacttatttcaggtggtgagtcagtcaagagacctgatactgagaaa

SEQ ID NO: 29840 - DNA, 847 bp, Medicago truncatula
  Intron number 1 from transcript Medtr3g132660.1 (locus Med tr3g132660) derived from phytozome v7.0 (chr-ID MtChr3; po s 33396900 to 33397746 reverse strand)
gtacccttgccaaaattaaaggtggacacattaaggtactttccgaatatttccctttctatcaaatcaaattacaccatgctagctagctttataagttagaatttaattgagatttggtcgtgaaaatggtttgtagtcgagcctaagtctatgttttgattggtcttgagtttgaaaatatcatggcagcaccaatatttcattgaaatttttatcaaaaaaatttagttgcacactatcaaacatactctaaaacaacaacttcattattttctacgaatgattattgataagatgtaatgtgaattttgggttatggtggctctagtattagttggttggagaattttgttgtactttttttaattattttataatattttctcgatggtgttcaatttttttataaataagaaactaatggtggaacctaattatttcctttttgctttatacatcaagtgcaacttacatttccttctctatctctctctttttatatatttaattaatgaaatgaaatggcttcttaatttgttcccacctctttattttttcttggcaagatttttcatcattatgtgatttcaatcaaatcatggacgaaagcacaattggttaattttgattattttaattccaaagctaatcaacaaaaaaaaattggttaatcattatttgaatcatgcttggtgggatttcccattattatcttcattagattagattgttagggttgtcaaactaaaatttttgattgatgtgtcatgaaaaaaaaacgtaaatatcgattggttattggtgtgtaggtacggccaagcataaaacggttaaaacgtcaaac

SEQ ID NO: 29841 - DNA, 499 bp, Medicago truncatula
  Intron number 1 from transcript Medtr3g087460.1 (locus Med tr3g087460) derived from phytozome v7.0 (chr-ID MtChr3; po s 20834856 to 20835354)
caacgttatagaaaaggtcgtcgccaagttgttgggttcgtttctcaacaccccttttgttttcttcaactgggttttcattcaaaattgttttcatccttttttttataaaaaaaattgtgacttttattgtggggttttggttttttgttgatttctgaaaccacttttgataattttgatgtgcaaagaataatactgctaaaaagattgtgtaatcatgtgatttcatcaaactcaccggtgaatatgaagcactgttacagacatggacattgacacaccgataccactaataatttgaaaaaatcatataattcagtgtaattatatgtgtcgatgttggtgtcggacacgacacacgtccgacaccgggacacgtctaatccaagaagtgtccgtgcttcattggtgattctaaagaaaattgcattgtttcgctattgaatttgacttcaatggtactaataattttgtgtttacaatcatttttatgcag

SEQ ID NO: 29842 - DNA, 625 bp, Medicago truncatula
  Intron number 2 from transcript Medtr1g065040.1 (locus Med tr1g065040) derived from phytozome v7.0 (chr-ID MtChr1; po s 12790312 to 12790936)
catcatcagggctactcgtacccaagctgttctcggtaactcatttcatcaatcttctttcaatctgatttatttttgtttcattttcggttttttcttatgatttatgcaattgttgtatatggttacatgatttcgtcattttgatttcatttgtttttccctaatgataatgacaatgatttttttgttcttgttttgttttggattttatatatgattgatatatgaaaatgttatttatggttatgaatatgtgattttagttttatttgtatttttctcctctaattatgtatgataatgattttttacttaggttttttctagatgttatgtatgattatgtatattaggtttttgtctagatgttatgtatgattgattatgaatatgtgattttagttttatttgcattttttcctttcaatatgtataatgaaaaaaaaaatgcatcataatgattttcttacttttttttttttttctttttcttctagtgatatattatttttgttttaatttgggttttaatcatgtgataaatgatatatgatttgcgttttattttgcgtttttgtgatttataggcgagaagggaaggaggattagagagctgacctca

SEQ ID NO: 29843 - DNA, 805 bp, Medicago truncatula
  Intron number 1 from transcript Medtr4g015660.1 (locus Med tr4g015660) derived from phytozome v7.0 (chr-ID MtChr4; po s 2964314 to 2965118 reverse strand)
aggtggtggctggggtggtggcagaggtgctgggggtgtagttattagggattgattgtattttatttacttttaatgtttgaacatcttggataatttttggtgatgtaacatttgaatatttttaatgttatgtaatcttggataatttttaattacgtttgtttaatattatgtttgcaaaattatattttgttgatgattataacttcaatttactgttagaacatgtcttcgatttacagaggctcagcaaaaacaaatggcttatgcctttgaaccgatgcattccggattataaattccggattatataatccggaaccatcattcaccaccccgttttattgactttcaacagggtgatttacacctttcggattttataatccgaaaattctctaaattgttcggattgtataatccggatccatctattcataactttacatcttcatccatcaagatgatgaagtgccaaaaaccacaaaacattccggattatataatccagactgtggatattttggggaaaaatagggcgcacgaggaaatgcatagggtggaaaaagtaatagtctaagaattttggataggtaagaaaagcgatcgggtacgggttacttcatggtttaccacgtagacctttgatccaacgggtatatttacgcagacacgttggcaagaaccgcttcaagccgttagatatcttcctctggaaaattctttgttataagaagtgggtttctttatttcactttcactttcagtttcaaaacctcgtaggttgctcctttcccttctt

SEQ ID NO: 29844 - DNA, 596 bp, Medicago truncatula
  Intron number 1 from transcript Medtr3g114880.1 (locus Med tr3g114880) derived from phytozome v7.0 (chr-ID MtChr3; po s 29184997 to 29185592)
agaaaggttgttttttttaatttgattttaataatctttctttatgtgtgtgaacctgttctttctgtatgttggtaccttagaaatgaagttaggttctctctgatatatcaattttattcttcttggatgtattttattgaagagattgattatatgtcaagtcttaaacttagctcaggaaaattttgttcttaatttggatgaggttaaaaattaaacattttctttgttatggagtttttaaaactgaataggattatcatgaaaacctttaaaccaaatcctttacaaatgtttgctaaaaaaaaaattctcctgattgagaggatttgaatgatttcaatcacacaaataagggatgtaacctcacattctttttagcattgatttctttctttctttcttgttgatattttgtgatcttgtgcatatgtatcagtgtagacatttttttcttcggttttttattaagtttgagacgtactttttatgtcatgcaaattggagttctcgttctagaaataacattctgatgctgatccattttgaacccgacagaagatacttcagtttcaaatcaagtcgatccggat

SEQ ID NO: 29845 - DNA, 795 bp, Medicago truncatula
  Intron number 3 from transcript Medtr1g083810.1 (locus Med tr1g083810) derived from phytozome v7.0 (chr-ID MtChr1; po s 16653815 to 16654609 reverse strand)
tctatttcatcacttcgttcagttttaaattttgtacatatagcttttccctattaagctgaatcttaaattggaagagatacgacatgaacatgactttatagagctagaggcaatccttaacctataaaccgattttgtaagattgagttagacctaaactaatttctaatatggtatcgagcttatccaagatccattgtgtcacttgtcatatggttttcgctattattagaatgtataaaggtcagagtatgtcatattagcgcaactatgtttcttaaaatgcaagcaatctcagaattagggtttgatggaggaagaagaaagatgaaggttgttagagtttgttggaggttgctaaaagagaaagaaaaagaataatagaaagttgttatttcgttgattgtaaaaaatatgagttacaagaatatttatatacatgacttagagtgcaagtcacttgtaacaaactaacaaacttatccaaaactaaagttaaacacaattaactttcttctaaacataccatggattaatcacaaattaatatgtatgtcgtaccttacacaattaactttcttctaaacatatcatgacttagtgttgcatttcattatgcaagaaacatactgttacaaatgttttatggggctagatgtttttttacacatcccagccttagtttttgggaactatacattttttaatatctattttattccaattttgaatttaatttgggcatagtttgttggagcaaattcccatcatattattgtggcaacctcctag

SEQ ID NO: 29846 - DNA, 891 bp, Medicago truncatula
  Intron number 3 from transcript Medtr2g041680.1 (locus Med tr2g041680) derived from phytozome v7.0 (chr-ID MtChr2; po s 11518034 to 11518924 reverse strand)
aatttttcactggggattcctacgtgatcttaaaggtaaaccatatttttcaagtgattattcatacatagttccatacaatgctagcctcaaattggtattttttttcttcttattttataattgttttccatggattttgaactttgaaaaaattgatgttcccagcatgacaaaaatcacaacattgatatataatgactcgtggaattgatttctgtcttaattttttctttggcaaacattcattatgtaacttctgtacatttttcagtttgtccttgctttaaattgatgttagctgtatttacaaaatcaaaatatattatcctctctttatcatatatgagcatgagtttagcttaaggaggttgttttcttcttctcagttctgttcctttttctaaggacaacaacattcattttggaactttctctcaaaaaaaaaaaaaaacattcattttggaacttctatacatttaccggtttcgatacaaaatgtgtcctcaagttaaaagaatgatgtatgtatttacaatttacattagtttttcttaaatcatatgcgaccatgagtttatctatagagcattgttggcttctttcccacgagctctgattctccttgtcgagaacgatagtttatgtggtctttgatacaagtctcatatattcatcagcagcgcgtatttttggcaagattcacattattctcttgtttccttttgattttggtcataattactaaccggatagtttgttccttttattatgctgcttgtgcatactatacatgatgcatggttttttctagtatgaatataatcattttggattttttttcttctctttttccgtagacaactgcctcaaaaagtggtgctctgcgtc

SEQ ID NO: 29847 - DNA, 851 bp, Medicago truncatula
  Intron number 1 from transcript Medtr3g087150.1 (locus Med tr3g087150) derived from phytozome v7.0 (chr-ID MtChr3; po s 20653301 to 20654151 reverse strand)
tctgtgaatttcaccgtgacaataccggctctgtaataatcttccaaaatatcaaatgaaaatagattctctatctttgatatttgtcaaatttggtgacttaattagttgatatgtgaaaataattattaaaataagattatcacgtgagaaataatagttgatttgctgatacaatattattctttcaagcatccgaagtaggacataaatacaggacatgttggttccacaagttcctcttatgctttaaagtataaatcacaacaaaatttatatgcagttgttagaaagtgttaaccatgttaacatataattcatcattagaatcttcaattagattaattgctaatttttctcaagattctataatatcaacatgacttctgcaactgttgacctgtgcaatgtttactgctgttgcacattttctgttatcctcaatcataaatgcttttgagcaggtagttaaaaaatggttatacttcttgccactgaagcatgacttatatatgcacatgggctgctttctaaattgatacaaaggtgttgtagtattcttaattcttcttttgaccactttcaaattattattacatttattctttggtgcatgtattggtctaagcaaacgttgtaaacttgttcttaatcaggtcagatgaacacctatttggaagttataatgagaatcttcccaagattatttcggtcgtaaaagaagtaagtagaaacaattttgtttactttgtgaaatagggatttatttgaattaatattttgttcttgtatgtgtaatatatattttctttatagattttatctggacataaccgcctgggaactgagga

SEQ ID NO: 29848 - DNA, 947 bp, Medicago truncatula
  Intron number 2 from transcript Medtr3g097710.1 (locus Med tr3g097710) derived from phytozome v7.0 (chr-ID MtChr3; po s 23476215 to 23477161 reverse strand)
gttctggttctggttctgcttcaagaataaggggtgattgatgattaaattaaattaactcaaggcttcatgataattcttgttaatcggatttggatcctcttaagtttgaatcctacataagggggttatattgattatctaaccattcaatttattggattctacgacttaaaatatgtttaagtagggttcaataattttatgtgagatcatcaacataactctctcattttagattcaaacatggaaggatctaaatctgatatgccataagttacattctctgcaaccaatattttgccgcacattcgctcatttgacatatccccagtctgatatgccataagttacgttctcttccaatcttgattcaacaaacacggatgtgccaaatgcggcaaaatattggcagcaggggatcttgatcccgcaaatgcattagtaataatttaagaaaacaaatgtgattgaatgcaactgtcagtgtattgttgactgttgtatcggtatcggatactgatagatgctagacacattttcaatgttttatattacatacgtttcttcttcattatggtgtggtctttgtcatgtcatggtttactttttaatatgcatgtgataattgataaagttcattatttatttccgcagctaaattcattgattgcaatatttttagctagattgattatataaactgaatccaagcacgatgcacaaggataaaataagtgaatttaggatattttctaaattcattcacgtgcgtggcctgttttaaaattctccagataataatttttgaaacaccagaagaaatcgaaaaggatgcaaacattgaactgaaagtgcatgtttattattgtgggttgaatctcaaattcatatttgtgctcattttttcagactctaatccaaggcggcaatcttgctgcattctg

SEQ ID NO: 29849 - DNA, 698 bp, Medicago truncatula
  Intron number 1 from transcript Medtr3g087750.1 (locus Med tr3g087750) derived from phytozome v7.0 (chr-ID MtChr3; po s 20970415 to 20971112 reverse strand)
acagtgtctgaagcacgggggcgtgcttgggtgaggtggtgtgcaccagagttagggtgtttgcccaaatgatgtgtgttgatccgatggacttcttgtccacgtactgtcagcattgacttgactttctagccggtccaaaacggttgccccctataagtcgttgttgcctttatggcgtaatgatttagtcatgtgaggcattctgactaggcgcccttgaatatttggcgtcctcaaaagtctttaaaaaatttatttgccaccgcgtactgggtataatggcgtcctgaatcaatgagtgagagtagtttgcattaaatgatctgaactagaacattcaagatgtgattattgttcagttttactttccacgtgtcagcttcgtgggcaatccattatggtttgtgcatgtatttttttttatctgaacggacttttttttagtgtgaacaaggtttttcgtgtagagattaacctcgagttgtaaggtaccacaacaaacatttaaactcattcacaactgacaaagcaaacatgagagtaaaagtgccttttatcaaccattgaatcaaatacaagttcaaattaaaactcttattttagtgactcatgtgccttaatttatttattttttcagttttaccatcatatttgtttgtttcaagttttctttgtctccgttctttacagcaaac

SEQ ID NO: 29850 - DNA, 601 bp, Medicago truncatula
  Intron number 1 from transcript Medtr2g129500.1 (locus Med tr2g129500) derived from phytozome v7.0 (chr-ID MtChr2; po s 31325216 to 31325816)
ttgttctttatcttctccatttttccttgtttgaggtattcaatctgttaaattcatctaaaaataagatagagggagtgagagaagatccagtaacagggaaagaaaacaaaaaaaaaagtagaaaataccgtataaatatacggtggtgtctgtattgtgttggttttttttttgtgttcacttatcattgctgtttcaaaaaaccataataattgaatgtaaccatatgtattacttttgttagtgtgctacatagtttaagatatgctttcaacatatgttagtgctacatagtttaagatattctaatgcacatgcagacaaacaagtagggaaaatttctagttcaatctttgcattaatgagagcaaattattttgaggcgttcaattttggagttgttaatatttgtaactaattaatagtctctaatcttgcagagtgcttttcaaatagcttattacatatggctataaataaatgagcatctttacaccttaaatattgttaatttgttattttgtagtatggtaattggctaataattaatgatgatatcttaatttgcagagttcattcggtcggattgcttgtctcg

SEQ ID NO: 29851 - DNA, 841 bp, Medicago truncatula
  Intron number 3 from transcript Medtr2g104570.1 (locus Med tr2g104570) derived from phytozome v7.0 (chr-ID MtChr2; po s 24698058 to 24698898)
gcgatcttctttcaaataaggtaagaataatcgagtgttctgcatatatattcatattcatgttttacctcagtatatatgcaagttagaaagcctagaagattttgattgtaccaatttacaagattttcagactagttggtgttaatgaatgagcttctgtatagataaccgatattgtaattgtaatatccaacaattgaatccaatgtgcttttctgtttgtattgcccatgagatcttgctcaatttagcaatattacaataaatgttggatatattttgaatctcctgaaagtaagcctctcacagtttaaatcaaagaatgataccggtgctcaactgttagaatagagaatgtggcttcgaacttgctttctattttgttgtcttctgacgttcttctttgtttacttatttttatacccttttctacactagagtttgttaggggaaacaccaatcttggaccaagagcaaaatctatattattttctttctatgcacaagtttactgtagtttggttatttgagcccctcaaaattataatactttgaatcttctcgggggcatacatcaatttgatcatatggccagcaattaaataaggaagcctgctattttttctctctcttcaatttatgcatgtctatctataaggaaacatgtttgataatataaacaaattatatatgcctatgttctctgtttttgcatattcagtttcttttttgcttgcctgcattttaaaatttacatttatacattatttatttatttaattcttgttaatatttatcttcaggagccaagtccaaagtcacgttggcaatcttctct

SEQ ID NO: 29852 - DNA, 778 bp, Medicago truncatula
  Intron number 2 from transcript Medtr1g024890.1 (locus Med tr1g024890) derived from phytozome v7.0 (chr-ID MtChr1; po s 5969064 to 5969841)
ccacaccccgccgccaccactctgctcctattcgggttagtgaactaatcagattccaccattaaataaaaagtctcgatttttatttcaaccctaaccctattttcttcaaattccaagttaatcatattcttgtgatgggtttagttctttattcgataaatcttattttgggccattagttttaggatttttttggttgttgatggtgtgattagttttttgggactgtttggcttcatccattgtgttgcttgtgaccaacattctaggattggggcaccaatatcattgttttttatgttgtgttaaagctaattctatatttgaatgtatgtaatcacacgtgttggtgtcagacattgacacgtgtgggacactcctccaattcgaggtgtcgatgctatacagcttttctctttaatcactgttgggaattcaaggatttttttagtaatccattgtgacactaaaaatgcataagcataactctcttggccggtatttgaattttagtctagccacgtcttctagacccaaccctgttggtataataatataatttttatgaattctgttttaaatttttattgttattattattattattattattattattattattattattattatttttgcgatcatttgttatggtgaaattaatgttacaactttagatggtagtttgagttagtgacatttattttgtttcttcatatatcttgtgagttttgcaggcatattcggagaatcccaattccacgcctattca

SEQ ID NO: 29853 - DNA, 973 bp, Medicago truncatula
  Intron number 3 from transcript Medtr1g024890.1 (locus Med tr1g024890) derived from phytozome v7.0 (chr-ID MtChr1; po s 5969870 to 5970842)
ataatattgtaagtaatgtatcccctacttctttttattatcgtgtttacctattgctcttcgattattctcttaccagttctccaatctccaagggttgcgagttttgtaaacataggttctgatcttagtgccctaatatataatttgatgcacaattaaattagtttatatttgcttatgttgagagtatattacaacttatttactctccattcctcaaatttgactactctctttgctttaagctataagcccaactctgtttttcaccatttaccaaacaataatgagtgaatgccaaaaccctttataacccttccatccaatttttcacatcatcaaatcaagcaacaatgtatgatgtcagaaatttattgaaattatgaattcttaatcgcatatgcaaggccactctgttttacctatttgatatttagaacaatttattgtatttaagatgtttcatatagtttctgtcaaaacatagatgttctctatggtttggtcgttgccatgatgttgctgattgaaagtttgtgtttgggtgatgtgtttcaatatcatgttcgttagatgctatttttgagaaataaactcttgttatttttctgaatttttataaactcaaggtcactggggtttgttgttatgggagatccatttttctgcttagtagtttatatgagcgaagatgattttaatttaagcatttcagtttttgtttggcttttgaacttgtttttgtttcacttatcattgagaggaataaaacagaaattgagctcatgtaggatggtcctcccagcagaaccattacttatatggttaatctttagcctattaggtgctttattgggtttctattgacaactatgatttcctggttgtttattctctggtcacaaatgatttagctaatttttataaataatgaatacatcaatgtatttacaggcaataagtgaaaagg

SEQ ID NO: 29854 - DNA, 638 bp, Medicago truncatula
  Intron number 1 from transcript Medtr2g111080.1 (locus Med tr2g111080) derived from phytozome v7.0 (chr-ID MtChr2; po s 26228622 to 26229259 reverse strand)
tgtatatcttgctgattgtggatgtagattttcatgtctttcttgttttgcaagcaatgtgtgtttttatcaagaaataaagtgcaaaatatctttgaaaatgtgttatgattcttggcttgaatatgttctatttgttcccacattatagctcaaaatcaaacccctttaacattgctataatgaggggattataggtcatatgcatgtctaagtttcatagccaattttgggtatattttgccactttatttcatttcattaccttctttcctctcttgctattctattcaattttgtttacttttctactatttttatgctttatgatactaaccatttcatctcacatttcattcatcccatagctttgacatcatttttctattcatttctatatcaattgggtttgtaataaattagttagtttagtttagtttacattcttgcaagaccatagcatgtatctaggactcaatgtaaaggactatggacactataagtgatgtacaccgacacgagcaccgacacatgcacacaccccacatggatgttctagatgcatgattagggaatgtatgtttagatgtatgcttaggctttacaacgcttagaccaaaaaacctttttttccaaaa

SEQ ID NO: 29855 - DNA, 449 bp, Medicago truncatula
  Intron number 3 from transcript Medtr3g148710.1 (locus Med tr3g148710) derived from phytozome v7.0 (chr-ID MtChr3; po s 38719258 to 38719706)
gaattgttggtaagtttaatcaatttctcttgctatcaattttttcgataatgcaaaaatatcatcagagtgtatcttttattagtagtataattgaaaacacatttgagaatcaaattaactaatgaaagacgtgtcgaaggatcaaattgacattcaaaatatacatttggcgatgttttgacgaccaaagtgacttgttattctttgttaattttaaaaactgattaataactagtgctctcatttttattatctttacttgcatttcacggtacaacaaacaaggtgaagaggggtcctgtggttggtaatgtagggatagctagggtgtaagaaaaatgagtgtgaacatagcatagctcaataatgatgattatatatgtcctttcagcatcacgacgtggtcaatcctatgattaatcctatggtcttttaattgcagggat

SEQ ID NO: 29856 - DNA, 645 bp, Medicago truncatula
  Intron number 4 from transcript Medtr2g122410.1 (locus Med tr2g122410) derived from phytozome v7.0 (chr-ID MtChr2; po s 29374190 to 29374834)
ccaccgaaaagcattcaatttctgtgcaggcaagagtatatattatttttacttttatttttatctttatgaagtgatagttcatatttgctgaagctgtcagccaatatttgttcatctgttctttaatgtgctggtgaaccatgacactggttacgatttgcattttatttggccccttatctttacgttcaggattcttgaattgttagttgttcaatacctcaatctatattgaaagttattatagcagtagaatttattggtttgttgtcaaatggatgacttcatagaaattggatcggagaacttcataagaactcttgcatgaaacaatatgcggctgattgttttttttattttttttattttattgtttatcgtctgatgttgttcttccattttccccacaatttacagtggaaataaatgatatcacctgttactttttggaaagctttgaatgtaccatctatccgcctcattctgccaatctagttcatattttcttcttgtcttttaaaaaaacctatgtgcatttgcttctctttttgattatgcattgaacagtcaacaacttcaactatttcattttgtgtttgttgtgcaggttggtgcttctctatttcgttttattaaaggaaa

SEQ ID NO: 29857 - DNA, 394 bp, Medicago truncatula
  Intron number 1 from transcript Medtr1g009680.1 (locus Med tr1g009680) derived from phytozome v7.0 (chr-ID MtChr1; po s 1381514 to 1381907)
cggtgtactatacatcaggtatcaaatatctttcgttttttctttgaatatttttttttttttgggggggctaaattattcataccaactgagctaagttaatgaagacttttctttgtagattctagtaattgcaaaagtccttcaaaactattgaaattattaaaaatacggtttttaaattatttgaaaattagttaaattattaataaaatttttaaattagttaaattatttataaaaaaaaaatctgatccttcaaaagtccttcataaagtttttaaaaattattaatagatcgtagtaaaactaactattatacatattctaatttatttcaataatttactatttttaactgaagctggatattggagtaaagagaaagcaaggg

SEQ ID NO: 29858 - DNA, 371 bp, Medicago truncatula
  Intron number 3 from transcript Medtr1g013040.1 (locus Med tr1g013040) derived from phytozome v7.0 (chr-ID MtChr1; po s 2198125 to 2198495 reverse strand)
acattcagaaaggagtggttgatccacattttgtggtaaatattttaaaggatgtgttcttaagtttttttttactgcgtggttatttattccataattcaataaaataacaataaataagaaacttccatttcataccacatttttatattatgataaaaaaaaaaataatagtggaatcataagtcataactaaagaaaattatgtacaattaaatttggaagataaaacaatagtaatatataaaacatgatttgattagtcgatattgtaacatacatagtttctaagtgttaaatcgttaatccaaagttaatgtatttggtgtcttgcaggtggttaaagaagctttgctgaaaacaataaagga

SEQ ID NO: 29859 - DNA, 503 bp, Medicago truncatula
  Intron number 2 from transcript Medtr1g013040.1 (locus Med tr1g013040) derived from phytozome v7.0 (chr-ID MtChr1; po s 2198534 to 2199036 reverse strand)
ctgaaaaagtttttggagtgagtgtaattaacataaattaataactatgaatatacttcttatttgttttttattgtaatagtttatacttatattttttctgttaggacaaatctatcattatatatgcaataccttcattccatttagtgtcataactatccaaattataaaaaaaaataaaaaaatcacatgtttcaatagtgcaaattagatcttccacaaatctcgattgttataataaaattatgtattaccttctcatttttaagttcacgatcctacatatgaccaatagtgtaaatttgatcttccacaaatctcgattgttataatcagaaaatggattgataattttcttcttaataaaatataatcacattataataatagcaataataaatgattatattttttattaacatggacattatcaatcataagatatttctactttttgaattataggtgcgcgattcagctgttcaactccgagcaacagg

SEQ ID NO: 29860 - DNA, 934 bp, Medicago truncatula
  Intron number 1 from transcript Medtr2g045860.1 (locus Med tr2g045860) derived from phytozome v7.0 (chr-ID MtChr2; po s 12743628 to 12744561 reverse strand)
gagaatataaagtgaatgccatacagttctgataggctgcaggtgcctagagatattgaggaccagctgattctaagatatgtggtggtaccatgcattaacttttttcaagtacacatggttcgccctgatttatgctacagacagttgggggtatttttaatttgggggttatttagttttaattcaaattggttggcttgttgtgttgagctgtttttcttctctaaggatagaataatggattgatatatagcagaattcattcctattgtgactgcattgcaatttggtttcaacaatatctctactatcatctggagtagtattacaatttgcagaagacatgattataaaattgattatgctagatttgcagttcctctatctcaacagctttgtgaaattttcctgttttaagacttaaaattgggaattaataacttttattccctgcattatcataacaaaagaagtaacttgttatggcttgattatgggtgcaatacttgactcatagtctgaattgtaatgaaattataggatgagaagttctctacaaaatctagtatgctgcattgttcttatgtctgcactttttggacataatttattcttcataattgggacagaacaaatagccttatgtctgtacgtttgcatgataattgtaatctgacaatgattaattaactgttttagaatgataaacttaagattatgttgctaagacctaaattttacacaggaatcaatggatttgagttttttagagtgatcaattaaattagggtttatgtgattctgattaatttgtatttgtatgaatgtgcttaaaattgagttttttaattgattttttaattgggttttgactttgtgtgtgtgtgtttctgtagtggtgataatttggtgcaagaggctcctcttcaat

SEQ ID NO: 29861 - DNA, 571 bp, Medicago truncatula
  Intron number 2 from transcript Medtr4g008840.1 (locus Med tr4g008840) derived from phytozome v7.0 (chr-ID MtChr4; po s 1226555 to 1227125 reverse strand)
gttcctaacaggtagcttattctcttcctttgtactttttatttgtgtttgagatagtggcattaattcaaatataatggttttcaacaaatattcatgtttcttcttgttgatgaattatgcttggttttattgaaattaatagctttttctagtgtttgagttttaaatgtctttgtagaactcatatttttctactcgatatttatattttttgttttagcttcgattttgttctctttcatttattttgcttcgatttgaagatcttaaatgctatatttgtgagctttgtttttatttccgataagtgcagtgcttgaattatttctaataagtttaataacactgaaatgtggcactggataccggttttcaggaatgcatttcatttatgtgttttcatgtttgttaccattgattgatactcaagcttatatatttttccatttggattcttctttttgtcccatatatttgagtgtatgttacttgtggttataggggaataatgtgtattgtttcatcatttacagagcagcaaattggtcacaaaaaagatcacctcgaa

SEQ ID NO: 29862 - DNA, 937 bp, Medicago truncatula
  Intron number 1 from transcript Medtr4g008840.1 (locus Med tr4g008840) derived from phytozome v7.0 (chr-ID MtChr4; po s 1227151 to 1228087 reverse strand)
ctcttggattttgtaagttgtttattttctctatacttgaattttcccattccttttgatgaagagaaaaataaatgttattgatttttgtttctggtattgttggcaaaggttccccttttctttggttacatgttcatatttcttctcatttcatttgatcgcttctgtcatatgcatgttaagacatatcttaatacatttagcaagtaagcaaatttattaggaaacaagtgttgaatgggcgatagattttgtaggaaactcttaataccgtagtagtaatagtatatgtgacattaattaaactagtgtggcactgaatgtgaacggtgcaaaaatgaaacaggggacctgagggacatgtggctgtgtttctttaatctacgtctcaagtccgttttcaaacaaaaggaatgataaagggaagcttgtggttatgcctactagaagtccacccataaaaagcaaagagaaagggaaggaagtggtcatttatgtaagtagaacacctactaacatgaaggataagaggaaggaaacactactacaattttatgccaaaggttaaaattaaattaaattgtttaattagtaatggcttgtttagttttgcattcaaggtaactttcttgcgacccaatgctactattgtcatggttttgtgaagctagaaatgcaagcttctctttaaacgcacagttgtgtcaaattcaactttataacaaacacacgctaagtaccaccacaacaaaattgtagtcatggatcgctagtaataatttaatgaattttctttactatttcaaagtctgtggtgtggtatgatgttatttaccatgctcttgaagttggtcaatgttgattcaaaagaacgttagtattaacaagggtgttgatattgtactaatgaacatgtgcttcctgatgtaggagt

SEQ ID NO: 29863 - DNA, 581 bp, Medicago truncatula
  Intron number 1 from transcript Medtr3g156920.1 (locus Med tr3g156920) derived from phytozome v7.0 (chr-ID MtChr3; po s 41294828 to 41295408)
aggttcctattgaaaaggtctgaacttattcacttgttattactacaattgataacacatattttcagaaatgtacttatggatggcacggaatttgtgtttttttttttcttcaaatgtacacatctgaagtcctttctctcatgttttcgatctatgttataaaccatttttcgtacacatctgaagtcctttctctcacgtttttgatctatgttataaaccatttttcgttatagtccctgaaatattatttttgtttcgcatataatattttttttcttttgttttgatgggacaaaacgaagaagaagcaaaaatgaaaagggcccttctaaataaaacagatttaagccatctaattatctttgtaaaatgatgaactgaatgtttgattttgattggcgtattatttttcactaacacactcttgttgcttggggcttgaattagattttcactggaaaaactctgcttcaaaaatttgcttgcccatggatgtagatcctaaactcattctcgtatattttacttgtattgttattgctatatgtgattgcttatgtcaagggtgggtttgg

SEQ ID NO: 29864 - DNA, 389 bp, Medicago truncatula
  Intron number 1 from transcript Medtr1g046140.1 (locus Med tr1g046140) derived from phytozome v7.0 (chr-ID MtChr1; po s 10676947 to 10677335 reverse strand)
tctgcagaaaattgctcccgaggcttctaaatgtatgtaataacagattatgtattattttcttttcatcaccgtgtttctggggtttattttatctgtcattaaacaaagtcatgtaacattgttgtttgtcttcccaagtatagtaagaatgctacttactctcttttggatccatctctgatgtactcgagttcacgtgcatgtttagattaacggtgaatttgcaaaatcattgtgacaaagtgaaactccaaagtatatgttttgctaaaatcatgttggcatgctatgatttgtcagaacaatgtaatcttatatagggcaaacttgtatttttttttctgtttgtatgcttatatttgatcttatcttaatatttcaggtat

SEQ ID NO: 29865 - DNA, 802 bp, Medicago truncatula
  Intron number 1 from transcript Medtr2g006180.1 (locus Med tr2g006180) derived from phytozome v7.0 (chr-ID MtChr2; po s 554918 to 555719)
ggaatagatcaaggaatatatatagagattaggaagtggctggatcattaaaattataaaatttaatagtagaaaaatgaaaaggaatgttaaatgggtgaaaagaaattaaagtacaaaaacaattaaatttgtggaaatagaccaatgtgtctaagttttatgtgcttataaatacaaaactaaattttaagtactgatataagaaagtcgacgtgattaaattttgaaaattcaaatctattttcaatatatcaatattagggtaatatttctattaaatatttttttgaggggattaaatatatatttttattttcatatgcaaaagcatcgttaaatattttactttaatttttatgcaaatagatttctacgcaaagcatctttatcatttagaattgtaattctagcatctttatcaccagcaacttttatcatagaataataaatcaattttatcgttaaatattttactttaatagttataaaaaaatatttcattacaacttaatattgtatagacaagtataagaagttgttccatgaaaatgttggtatttaaagaaatgaattatgttaaaataaaattagaaagtaataaaacaaacaaataaaatatttgaacgataaaatcaaagttgatatggattattgttgagatgtttatgttagataggaaagtgagttttctaaaaataaaacataaatgttaatatgagagtgaacatgtgcataaacaattgtcatttttcattgaattgtctttttttttttgttacaaaaattttagggtgagggg

SEQ ID NO: 29866 - DNA, 841 bp, Medicago truncatula
  Intron number 1 from transcript Medtr3g103610.1 (locus Med tr3g103610) derived from phytozome v7.0 (chr-ID MtChr3; po s 25532814 to 25533654 reverse strand)
tctacttctgaatctgcaaaataattctttttcctgttagttccttgtatcctatatacttttttcattttattttgtatacttatccatagttttttttttctttctttctaattgatattatctatggttattgtttattgctctgtttggtgtctctctattgcagatctacctgttttttttttttttttttaaatttaaacctggtttacacaataatcaaactttttattggtttagaattattgctaatttcctgaaagattttcaactttgaatcggtgtgctatttgtcttgttgcgtattaaatatatattaaatgaaactagactttgattttgtcttgatcaatagagtttgataatgtgattcctgttttctggaaactttgattctggatcggtggctcttgttttattcgagccaccgcttatttgagccacagggatctctgtgaattgtttttaagttcattctatagatcaattgaattccacaccggaaaaagcttattggatccaaacaggttggactttttttggttttccgatctgtttggtaatttttatttctggtcatttatgtgcaaacacatctaaattatatcatcaatttaatattggatcttgtggatacttttttttttcctggttatatgtgtgcaaacacatcttgtgaaggatgatttaattttcaaccctctagaatgattttttttttattttttttcttttcatttgaatatgtatatatgcagttatatatttctgattcttgttttgacttatttttattctgtttgatgaattcatttcagttggtataaagttgaagaaa

SEQ ID NO: 29867 - DNA, 388 bp, Medicago truncatula
  Intron number 2 from transcript Medtr1g020250.1 (locus Med tr1g020250) derived from phytozome v7.0 (chr-ID MtChr1; po s 4393719 to 4394106)
caccagttcccttgcaagctccaccacacgataaagtaaagcataattcttctgtaatgtgtttgattttgcatcacatttttattttatatcatttttctcactaattttatcgtttgtgttgcatccattttaaagaagatttgttatgcgcacatatgatgatgaaaagtctctgaagaacgtttctgagcaggtatggtcttgtatttttattatccatatggtgatcaaaatcagttcttatggttctttaatgttcaacctcgggtaagggtaactcaaactgcagtgagagaaaaagttcaacttgtttgtcaatggcccccaatatatatattaattttcatttctaacttaattttcttgatttctcatatatagggag

SEQ ID NO: 29868 - DNA, 947 bp, Medicago truncatula
  Intron number 1 from transcript Medtr3g076680.1 (locus Med tr3g076680) derived from phytozome v7.0 (chr-ID MtChr3; po s 17767149 to 17768095 reverse strand)
attggttgcggattacaggttttccctttttctgttgataaagttttgtttttttattcaatttttagtgtattttattaatgggtcattttgtttttcatttatgaaaaatgtgcgattgtgataactttagtgggtttgcttatatgagaaatggtttgattgtgaggacattctatgtggaataatgagttggaacccggttcaccacattttcccttctccgtgtgtgtttatcaatagcaaattcgttgaaattttcgttgaatgcaaattatttagtggatttcatttgaatttcaacaaaaagaagagagagtattgaaactagagtgtattattactagaaaatcctcttgtttctgtatttagtaagctattttttttttatcatatcatggttgcagtttagtaattaaaatggttattgttacgatgtcgcaacaagtaacgcttacaaataattgtcatgatgtgtcaacagtcaacacacttgagagagaaatgttgtgatgtgtcaaatgtgagttaaagtcccacattggatgaaaaagtcgaggttgagcaacatataggtgagaggacccacaaagccaatgccttaaggtttgtgatgaagatgtggtgtccaactcactttgtgtgattgctcttagtacaacgtgatgatccaaccatgtgaggctctccctcttggcccaataataacaactacccacttcacttcctcaggtgtggtcagccagaacatgattggttatgtctcctatttttatacatttttctctttcttgtataatttcttctaaacaaataacattgctcttttcgtaattaccacattttcatgctgaataatagtatagatttttcagcaagccatcattgcaaaagttgtattctgaaacatttgttttattctttttttaatcagggtgtagactttt

SEQ ID NO: 29869 - DNA, 727 bp, Medicago truncatula
  Intron number 2 from transcript Medtr1g065010.1 (locus Med tr1g065010) derived from phytozome v7.0 (chr-ID MtChr1; po s 12775453 to 12776179)
ttccacaaggactgtattaattccaattatagcaggtacgttattaatttaggatatgtaaaagtcatattgattgccctaggcagatgatttttcgtatacaaaaagcaaataaagattgtttgcaaggatgattgagaagaatgattaagccgatgaatcccctactgttctatatgagtaattacctcccttatttacttattactattcattctttacgacgaattaacaaattggttttgatcaatctcttgaatcaaaaccctttcctaagttataaccttttaatctcttaaaccgattgaataactgcggaagcaataaataacgttaattcatatgtcatgattctcaatttcctatctctaggttcctatgttgaatcaaacagaattactaattcaggattaaaagctagggttaagagtcattcaattcctaatatcaattcatataattcaagaagctagggttaatagtcatccgagcaattatatgaaaagcaatgaacacaaataattctgaataaagactgaataatattattaaataagagagtatcaactactaattcatatattacaacggttcatcatggctcaatcataccgagagtttagctactcatggttttacgattaataacataattgacagtgaacatacataatcatgaccaactatgagttggtatgagattcagggcttgtccttcggtcttctg

SEQ ID NO: 29870 - DNA, 393 bp, Medicago truncatula
  Intron number 4 from transcript Medtr1g028700.1 (locus Med tr1g028700) derived from phytozome v7.0 (chr-ID MtChr1; po s 7071810 to 7072202)
ggcgtgctattgaggctgaaagattagcacaagaggtaaatttatgtattgagcatagttatgctttaggctacttttagttttcctgtctacttcttcttttaaatagagaagttaagttttttggattttgtggcaagttaaatagagaagttaacagagatacaattttaagattaaaatcgtcctaatatccctctcaagtgcatttcttttagcttgtctaaacaatatgaaagttcactcaatcaaacttatataaaagtaatatgacagtttttttttttagggaaaagcccattgacaattagaattttattaataatgtctaaacccaacatcacctatgaatatgaagggttgtagaaattccacactatcatttgctcaaag

SEQ ID NO: 29871 - DNA, 731 bp, Medicago truncatula
  Intron number 1 from transcript Medtr3g148840.1 (locus Med tr3g148840) derived from phytozome v7.0 (chr-ID MtChr3; po s 38777032 to 38777762 reverse strand)
actcctggtctcgctgccgttgccagcaagtgtaggtagtgacccttctctttgcagttacttgatacactttcataaaagactctgtttggataaccaacttttttgcagcttatagtacaagtgtttataatgtactatcttggacttcttatgaaaataagcttaaaacagtttatgaacaatctcctaaaccgtacttatgtcggtagataagctcaaattagccaatccaaaaagctactaaacagttattttcagcttatagcataagcgctgaatagaaatgaggcctgtttagataaacaacttatttgccacttatagctgaagcactgataaatgcttatgtatatgttgtttctatagcaaaagatgaaataaaataaattgtttttatataagttataaactgttctcataagttctctcaaaactaagtaagtagataagctcaaataagtcaatccaaacatgtccgtgttataagttgtttctagcttattttcacaagctcatcacaatagcttatgaaaacagtttaactttactttatcttcttttaatacaaatagtttatacacaagcacttacgtgataaacacgtaagtaagtcgtttagctaagcagggtaatgaatcatggctttgtaatgtttgtggcttgcttgacaaaaaattattcatttttttgtgatcagatttctgagagtgcttgatcttgaggaatct

SEQ ID NO: 29872 - DNA, 600 bp, Medicago truncatula
  Intron number 1 from transcript Medtr1g031700.1 (locus Med tr1g031700) derived from phytozome v7.0 (chr-ID MtChr1; po s 7731255 to 7731854)
atttagcaacggaaaggttccatcagaccttataggtatacatattctcatctcaatttttttggcaacacattaggattttaaagagatagtataatcttgtaaaaaaaaaaaaaaaaaagacaatataatggtggttcattgaatttaatttttttagttagctttttaacaaaaatttgatttgaaattgggttactaaataaaaattaatttgtaatgatagtgagtcatttgaatagtggccttgtgcttaagttgaaatccatctttgcagggccgtttctaagattttgggacctagggtggtcgccctcttcgctctgcctcagatatggcctgcatctttgttccttaagttaatgtgcatcggatatattttttttgttttgctacaagaattcacaatgtgacttatttttgcaaaaaaaatataataaattggaatagaagtttattagcatgtttgtttttacgataaagaaaaaaagggaggtgatattttcagctgacttataatcaatttaaattactaagtctctatttttttataaaaatatttcagttgaagaattaggcattaaagaatttctaccccct

SEQ ID NO: 29873 - DNA, 522 bp, Medicago truncatula
  Intron number 1 from transcript Medtr2g021480.1 (locus Med tr2g021480) derived from phytozome v7.0 (chr-ID MtChr2; po s 5464491 to 5465012)
ccaacctattcttataacccagtctcgacagcaacgacagagagagctttctcatcaatgaaaaatctcaagacaaaacaaagaaacaaaatgagtgatgattttctttcaaacaacttggttatctacattgaaaagaacattgcaagtcaatttagctcagatgcaattatggatgaatttgagtctttgaagggccgacgagttcaattttcataaatagccactattagtttttatttcttttgttgtagcttttttggtacaatccgctattctactgtggcttttttggtacaaaatagtttattgccgcattttttggtataatccgtacttgttgaatcaagtgtatattttatgaagaacattttatataagtaatagttaatgtgaatttttgttgcctactcggttagtttagtttaaaaaaaaatctttatatgtggtcacctcatagaattattgctagctttgccgctgaatataatcaaagtgtatgtcttgcggccaccggagagc

SEQ ID NO: 29874 - DNA, 978 bp, Medicago truncatula
  Intron number 2 from transcript Medtr1g027950.1 (locus Med tr1g027950) derived from phytozome v7.0 (chr-ID MtChr1; po s 6673589 to 6674566)
agaagattgacaccgcggaaaagaaggtaactttcttatcctactgtatctgctttgttttgcaattgcttctttgttctattctgttgcaaatgcatcccattttattgcttgattagagtgttgggcggttaagacccaatacgagaataaaataagcgtagtggagatgtgtggtaagactagacaagagttggggtagcacccatagtagaaaatcttgaaaatgactccaagattttaaaggtgatcagcgtagactttcagttgaactttagccatgacatgagtgtctcagattgaacattgtttttgttaaaccttttgtttttgtttttaaaatgcaatcaatatctttggttttgaacctttgacattgtaatgggaaagagatttgatagataaacaactgaaacggaaaggacttttctcactaactggagttatctatatgggttcaagttttgtaaatggagaaaatatattgaattacagtttgcaacttcaatataaaagttttagaagctattgcaccagcatcatgaccgtaattgtggctacatttgttcacaatttttcgcaattcaagagattgcagcacacttgcaaccgtggcttcaatcagaatttaaaaccttgaaaacaatggcagttttgtctccgtaagtgggtttacctagttcagatcagatcagtagcaaatcaagattcaaagtgtattttggataatcatatctcagggaaaaaactagtataataaatgtcaataaggatgtaatagttgtttcttgcacagttacacttatgttgattcgttctgatagtttttgatgtattcacctgctagtttagatgaatgaaatctcacacctttgtaagtgttttgtttttccggtctagttttctccttaaccccggcaaactaaagctttaatgtgtgtaggtgttggttgatattgtaaaattggtacaaaagaa

SEQ ID NO: 29875 - DNA, 795 bp, Medicago truncatula
  Intron number 1 from transcript Medtr3g093300.1 (locus Med tr3g093300) derived from phytozome v7.0 (chr-ID MtChr3; po s 22141759 to 22142553 reverse strand)
gaaggtaattatttgtttttacacaactctttattttcgtcccaattttgcgacataattgttaagtgtcgtttcaagatatattgtgacaaaaatattaatttcgttccaatttcttgcaatgcatgttatttgtaatattatgtcacaatttgtaatagccgtcgtcgattgttttttgaaaaatgacatttctacttatgctctttttacattatgcttattgctgaagcaagaatttagccaatgtttcggttgatatccttatgtaggatttttttttcttcaagagatcaacattgaagaaactttgcacctcaactgcgtttttacgactcaaataacttggattttcaacttcaagatgtttgaacttggaagcatgtcaaggcatgtgcctatacttgcttgaggggatactattggtttattgagcaaaatagaaattagaatgttaattgtaatttaaatttgtcctgtcatcttaaagtaccgacaaacttcaacactttttttgactttgtttttataatctccttcatattaatgtcggtcaacttcattgcaacatgacaacttctccaatatgcactcattgacctacacccatggaggatattcttcattgcttacatgattgctcagactttagaaatcttttactacacttgactatgcagcgtgataaaaaaaaatctcccaaatcgatgttaaactttgactatatgagatgacatatgatgcctcctcagttttgtttgtcacatgattttggtatgcttagttgttgtattt

SEQ ID NO: 29876 - DNA, 628 bp, Medicago truncatula
  Intron number 2 from transcript Medtr3g102690.1 (locus Med tr3g102690) derived from phytozome v7.0 (chr-ID MtChr3; po s 25090716 to 25091343 reverse strand)
tggtaaattatccttcaacttattactttacaacaatgtttagtattctttagtagctcattttattggcttatgtcaatttctttatcttaaactgttaacattgccagatttcatatacttggtcccaaaatttaagccttttaactcattatcagtcaagaatcaaaagggttttcagtaaaatcaggattcctttcgagcatagtattaatctcacaatcttggttttgaaattttctttcttacagtaattcttattatatctattaatgaatccttctaattcctgtttctccactgctttagcattaaaaagtgagttaacttttacgggagactaaaacacttgataccttgttaatttcaaaatttagtatttgccataaacaactgaagtggtgtcagattttcttgttagtgttcaatatgtatctgcttatcttcgaagctcaaggtgtaaaggaggggggttactactacttagtgtcctttagtttgttcctcatcatcctagtgatttttctgtcacacaatgaacttgattttaggatttccaagatcaaataacattcagcaacaatattttctaggttacttgtggaggttgtcagagtgctcacacagc

SEQ ID NO: 29877 - DNA, 511 bp, Medicago truncatula
  Intron number 1 from transcript Medtr3g029790.1 (locus Med tr3g029790) derived from phytozome v7.0 (chr-ID MtChr3; po s 7879327 to 7879837)
tataagctaacaattgttcttttgaattgtacgtatcaactattacttttgattatagttttacatttttttaatttttcttcaacaattgtttatttctacaattctatttactgcatatgcttttttaatgcctttcatacattctgtttctattttagaggatatgattattaaaaataaacttctcccgttagaaagattgtattagaaaatagtgatgataaaggaacatagagataaacggtacaaaaaattaaatgatgtattcgtagaaaataaacagttaaataatttcactttttcattttctagaattgtgttatggtttattggtttgaactttggatttcttcatgcagacaaatgatatatggagtattgtctttctattcgatgcgacagtgctcgaatccatttcacacttataatttgctattttttttttaataaaaaggggtttctatttgctattgatgctgagttttttttctatagtagtgaaggattc

SEQ ID NO: 29878 - DNA, 918 bp, Medicago truncatula
  Intron number 1 from transcript Medtr3g157150.1 (locus Med tr3g157150) derived from phytozome v7.0 (chr-ID MtChr3; po s 41367655 to 41368572 reverse strand)
ttcaacaccctgaacttaggtttttttttaaattagtactttttttactctttaattaacctaggatccatttttatttaattaatttttcttttccatttttcttttttaattaattatttttagtatgagaggcctttttggtttggacataatttattgtggatttgaggctcctcaatcttctctccaattcaaccaaattctccttaacatattgggttatatatttaaaataaaagcacaatatcattgttttcttcttatttttgttagagcacttcttataatttttgcctcatacttatcatataaaattataaagcactaacaacaaatattataatttttcatttgaaagaaaagcattataattattctctaaaaaaaacattataaatcttttattttttcctttgtacaaattaaggaaaataacaccttagaaaattgataatgatattcgtttgaagttgtatttttatattattgattagaatatcaacttttttgtgttagttacaataatgacttttttttatctttacggatcttattttcaatttaaattgataattgctcttttaaaaaaaaatcagtttttttttattaagggcctatttttatataagagccgaacctccaattattcagggacagcccctgctgacacatgcactgatatataattacttaattagataaaattaaatgagcgctatttataaacatctaaactaagaatcaagatttatatattcttcatcatatcaaaagaacttgttagcattacatttttataacgagtctcaccaaaaaaaatactgagacataattatacaatttgaacaattatttgaaaagagctttcttgttaactgtttttttatctatatatgcttcaggaggtagaattag

SEQ ID NO: 29879 - DNA, 572 bp, Medicago truncatula
  Intron number 1 from transcript Medtr2g017590.1 (locus Med tr2g017590) derived from phytozome v7.0 (chr-ID MtChr2; po s 4415698 to 4416269 reverse strand)
ttatagtttttggggggtgagtgacggatataccacctttgtgctgaacttaactgcctttgctattgtcaatttggtgtttgcattactgaattttggctatgatatcaaaaacataacaacaattatatcaaattgattggtctatattcaactttgtttgactggtacaaatattaagaagccgactagatgaacaattacaactataataccctatgttgattacaagggaattgttgaacaattaatttcaacaagacaattagacaaatcaaaggcaaaaatcaacttttaacaattcaaataaaatccttaaaaaaaaaacaattcaaataaaaggaccaatcgctgtcaccttcaatctccacccaattgtcgcccattttctttaatcacatcgacgccctcttcctctaatcaccgtttcaccaccgctctcacaaaccaattcatcattgtcacaaactcctgtatacagtacaaaatcatcactggaaaaaaactcatttgttcaatgatttgtgaattatgtagcaagatttataaagaattgaaatcaaattcaattc

SEQ ID NO: 29880 - DNA, 885 bp, Medicago truncatula
  Intron number 2 from transcript Medtr3g122450.1 (locus Med tr3g122450) derived from phytozome v7.0 (chr-ID MtChr3; po s 30461535 to 30462419 reverse strand)
acgaatcccctcaaggtagaaccgctattcctttttagtatcttatagtattattaacatcgtttattgtcattctaaaaaattgattaaggtcaaagttaccaattaccatgtagaacaaatataattactgacaatgttgttgttccatttgtactatcttacaattttaaattttgagccttttgtatagtgtacgtgtaaaacttagttcttgtaaagtcggtgacgtacctgtaccacatatatacctgctactggtacgtgtatggtactttgggttatttgcgtttctattggaagtgaaatttgtgactttattaatataataataataatatatgatattatttgtgcatttgagtttctttgttattgcaaccaaccttagaattttttttacatttttaatctctttgatacttttttttgtgaatttaactctttcatgttatattatatattgacgtactggtaccttaattttttaagaattgttgcattcttgttatgggtatcgtacccgtacctatgcaacatagattatagttgaacatattatttttatagataatggactcatgttaactccttgcagcaccaacatttctgatagaaaacgtgtcctgtccgacacgtgttaatgcccgacactgatataaatattctatttcaatgatataaaacaaagttcactgcagtgctaattttggcaaaatcagtaagtgtcacaaatttcagggtcatagttataacctataggactttttgacttagagaaatcacaatgtgcatttcctttttattatgtatcttcaattgcaattaccatatacatgtgtgccctctgatgttatctgctgatttatttatttggacttcgag

SEQ ID NO: 29881 - DNA, 978 bp, Medicago truncatula
  Intron number 1 from transcript Medtr1g025230.1 (locus Med tr1g025230) derived from phytozome v7.0 (chr-ID MtChr1; po s 6207959 to 6208936)
acctctttaacccttcttcaacctctcaatctctggtaatttctctatttcttctttttgacctaattgcatgtttcaatatatattatatactcctaaatgtaataattattatgatctttatgaatgtgtgatattattatgtatatgaataacttgcaacatattttgtggacaagtaaaattggaagcaaatggggtcaaatatgtttatcttttgaggatcaatagctaaatgtgtgtttggattgacggtgactttgacgaaattaccgtgggtcattgtggttttggtaaaactagagtttggagctgcaacaaaaccagagtgccactctgatttcgtcgaactcatggggaatccaaacatgcacattgcatctgtatgcaacaatgacaagctgaatatgctcttattgccaaaagtattttcttttagagtatgtttggatggagggttttggaggacttgactaagtctatatttttgtatgtatttgagatttttaaaaaatggaaagaataacgtcaattacgaccatacaacatttcaatcactcttaattcgtttttagaaatattttataacttccttgatttagaaaagaaaatcgagtcctccactcctctcccctccgagaactttcatccaaacatacccttaagcaagttgaaggcttaccctcactttccctcccagcctataagaagctgagaaactatgtcggtgtttctgaatacccgatccgatagtcccacctttcccaaaaagtattgatttggaattgattggccattaaaaatgcagagaataacataaacagtaagctagtttgcagtcttagagccagacagccctcaatttccagtatcatgtatctaaacaagtgaatgatgtcaatttgttgtttttgatatcataaaatgcttttggaatttctatttgaaagtatattcttttaatgcagagagttccag

SEQ ID NO: 29882 - DNA, 848 bp, Medicago truncatula
  Intron number 2 from transcript Medtr1g022960.1 (locus Med tr1g022960) derived from phytozome v7.0 (chr-ID MtChr1; po s 4959904 to 4960751)
tttctttctgggatctccaacaattgaaacaaacggtatatttttttctgattttctgtcaattttttgtcctaaggtagttttatgtaggttggtgaaaattttgaatttttttaagtgtttttatttttatttttattacgaagatgtagaattaaggcctgtttggataaacaattaaatatgcagcttatgagtaaagttattgttgtcgtataaagctatttagcagttttatttgaaaataagatgaaaatagcttatgaacatttcataacaagctctattttgttgagttttatatggattagtgaaatttttgaactttttgacgtgatcttagatggtaagatatagacatagtggtacttttaatcccgtgatagttactagtttttatgtatataggacttggttggataaatagcttaattaagcacttaaagcataagagtttttcatttaagtgctattttgattataaaatatatacaattaagtaaaagtgtttgaaaataagctataagctgttttcataaactatacccgagatcttatgaaaataagctgaaaacagcttctgggcatgtaacaaactgttttaatagcctcctccaacaagtctcgctagtgcttgagtctatagttaagttcaaataagctgatccaaacatgctctttgttggatttgtattttagtgatggttgagggtgtctttgcagttcctcatcagtgtaatatgtacatcaatgagtggtgcttttatttttattttattgtacttttttgactaatggtattaatggttttgttacttattgttgtttattatgacacgtggttacag

SEQ ID NO: 29883 - DNA, 1016 bp, Medicago truncatula
  Intron number 1 from transcript Medtr1g089490.1 (locus Med tr1g089490) derived from phytozome v7.0 (chr-ID MtChr1; po s 17812066 to 17813081)
tctcttgaaactagaggcacctattaagatctgtggtatattttcttcatcaaactcatgtttctactttttagttaattgatttaattagtataggataggatttaatttgtatacgtcggtgaaggtttttacgttgtcaatcaatcaagtgtaaaggtttttacatcgtcaatcaattataatttatcggatgattgaaaacatttgtctctctttaactattacaaattttacagagtgacactggtgaatgattgtgatttgttgacggtataaaaatatattatatatggtctagggcggttccagttaggctgcggttaagtgcttgcgaatacagctgatttggacacaattgcgattgtgttgtctattttgttttaaatatcaaatgttagtatgttaactgttatgttagtatttcctatatgtgttgggattcgaagtttggacctatacctccgtaacacctttaatcccttagctcaaccgagcaatgtcattgtatttaaaaacttttatactgcggtcacaattgtagttgcaaaccgcaattcgctaaactataaagctgctgttttagattataggaaataggaaagttattgttgttatagaagtagggagtaggaatcaaattggtaaataactctggaagctctgttttttggttggtaggattgcatatatcagaccccttatggactccacaattctcattatactgatgtggtctcattaactgataatatcctaattattcattcttgtttaaattttctatctttgtattacttcttaatcaagattaattttgaggatgttatgttagaacaaagtgtctgtctcatgtgccaacatatttgatatatcacctacctttcttcattaagctagagttttatgttttccaaattttctattatcatatttcatgatagatgcttttcccaacactattgtggcctatgctaatgtcttgtttcatttctctatgttaccaggagatattc

SEQ ID NO: 29884 - DNA, 989 bp, Medicago truncatula
  Intron number 1 from transcript Medtr1g031550.1 (locus Med tr1g031550) derived from phytozome v7.0 (chr-ID MtChr1; po s 7668602 to 7669590 reverse strand)
ataccgattcttccttgatcgacgattcgattaaggtttgttgagccagtttcgattttgcgtttgtgctcaacttcctgtgtgatcttgattgaatttcttgtgtatgtatatacatgacatgcgattatactttgattattgcggttagtgttaattaatttaaacaaaccctaaaacaagtttccgatcccatttttttaacctaatttgttattttcttgggaattagagtagatctggattataccaattagggtttttgttctttcgttcattgaaatcgtttttgtataaaaatattttgtaacaagataagaaattagggtttgatgatatgtacctctatttttaaagaaaattaaattaattatttcttggtgggtgtttatgacccatttgattttaattgatgttttgtaaacccagaactttgtacaagttaaatcaagtaatttttatccaatgatgcaccgattttattttttgagacatttgtttgaatcgtacggttagtttatttattaacaaagtaagacatcgatagtgatagttgttaggaaagtagacaaagttctttttaatatttgatcgtacatgattatagctcatggaggtgagttaataattcttttaatattggtgtttcaatgacctaaaactttttattaattaaaataagtataccaaatttagagttaggttattgttatgtgagttagttaggcttaatgtgtgattgcttatgataatgtgattacatcactagttgtaatgaaagttgaactttgatttttgtttttctgttgcaatgtctgtggcatgatagttgtaaacaagatgtgattacttgattttataactggtatgtaagcaagattcaaatgcttgcaatgtttgcttctttggtcttccgtatgcgctatttgaaaatgttgttatggtgctttaaagatccgtttggatttggagaagctccagaaagaaag

SEQ ID NO: 29885 - DNA, 694 bp, Medicago truncatula
  Intron number 1 from transcript Medtr1g028350.1 (locus Med tr1g028350) derived from phytozome v7.0 (chr-ID MtChr1; po s 6866812 to 6867505 reverse strand)
acaaagtcataaacaatgagatctttcaaattttgtaggagattcaacacattctaacattaggattagaaagtgtgacacttgaagagtcaacaaatgctgaagaattaacacaatcaaaataagtttttcttgatgctttggattgcatcattctctaaaaatatttgaggttataacttagaagagggagaatgggtagtcattagagattgaatcgatgttgcataaatatgtttgttgacttagaaaaaaacaagactaaataatatttatccaatactacaccaagacattgcattagaaacacaaatgtgatttttatatagtaaatgagaatcaaatgcatcgtcttgtcaaaaaaatttaaaaaaatcaaatgcatcgtaataataaaagtttaacacatttcaaaaatcacatctagttcaaaatgatggttcattcaacacattcaattaagtatgtcattttaatttcttgttaagtttatttcaatgcaatttatctttatgtcatttacttttattgtatctttaaatatcttgcaattcactttcctgacatttaaattttatgcaatttagtgtctgtttacgaaaaaaaaatagttttcattttttttaaaaaattgtgttcattttaaaatgataacaaactgaatgtagtgaaaatttatgataggtagaagaag

SEQ ID NO: 29886 - DNA, 623 bp, Medicago truncatula
  Intron number 1 from transcript Medtr1g125950.1 (locus Med tr1g125950) derived from phytozome v7.0 (chr-ID MtChr1; po s 27968340 to 27968962)
ttacgtttgataagtttccttattacttaaggtactgtaaagtgttaggttattttctagcaaacttttttaccttttttctttgtgttttgaatatttgaattacacatatttctggtcttattactttaaacgtggtgtattatggttatgttgcattatgatgtcttgggttgtgaaaaactcattgaaataaaccgtaacagtgcgtttcggtgtgttataacatataagctattttcataagttacctaaaatacttgttatatcataagagaaacacaataagttgtgaatattatcagctttttgttagatttattgttttatacaatatccaatcactatatatatatatatactacgattagtccccatgcttaacaacattgtagtttcatgatctatggataatcttttagcatagtgatatatttgattatcaagtttgtcacatgtggaattgatctagccttggaggaatttgatgtgaataactattttcctgattcatacatatgacaagaacaactgtcttctccctgattaacccccgtcttatatttcatataatgattgaaattacagggaaaaagtcaaaattttgttgacaagtgccggat

SEQ ID NO: 29887 - DNA, 815 bp, Medicago truncatula
  Intron number 1 from transcript Medtr3g106300.1 (locus Med tr3g106300) derived from phytozome v7.0 (chr-ID MtChr3; po s 26741140 to 26741954)
tttgaacaagataaaaacaataaggtatttgagtaagggggatttgaggtatgtaaaaagatgaagcatataattgtagagaagtttgtgcttgagtgtggaataggaaagaaaaaacaagaggtgttgtcttctaacattaacatgtgaatcactctctgactaaaacatgaaacccttctcttgctgcaacaaccgacttgcaaaacacaattcacgtagaagctctcacgtttgaatcactctgttactgcatattgaatccctttttgtttaattgttaaaacattattctggtgtattgagttactttgcgtccacattgaacccctctacgtatgactaagacattcttctacggttgaactgttccgcagctgaacttcccctttctaactattgtaagtcactaaaacccttcttgtctataccttttctcatagacaacgttttgtcgtctactttgattaatttcaaccttttcccatttataagtttagctgatgtataccatttcctagataatagcttttggaggttgaataggaaagaaagatccttgctttactaaagatcaaagttatttcacaatatttttcaagctacttgtgtaaaaaacagtagaattgattcttttaagttctacccatatgatgcagagagatattaccctatacagtgtttaaacttttagctcaaagtgactttttctttttcgtaaaattcacaattacgaaaaattgaagtacataagtggaaaccaatggttggtcaggctagcctaactcccaagagactgaagtatcatcgtttat

SEQ ID NO: 29888 - DNA, 425 bp, Medicago truncatula
  Intron number 3 from transcript Medtr3g105170.2 (locus Med tr3g105170) derived from phytozome v7.0 (chr-ID MtChr3; po s 26246240 to 26246664 reverse strand)
tggttgagggtgagttcatcttaatttattgttgttaagtgatttaatttagcttcattttgcaatgtgtttatcccttttgtatcatcatgacactgcatttacattgacatgctagaagttaaatttgggtaatttctattgtatgctgaagaacacatttcagtgggggatatgttttgtcttttaattttgagtagacatgctatttataaccttagcaagcaaacatgatatctgtgacttgctgtaattctgaagagtaagtcaaatttccggtagttgatacattaaaatgtctttggtttatgattattgaaacatgaaaaagcatctgctttgtttgattttggtgtttttataataataattttggctctgtttttgcagctagagttatcactgatagagagactggaagatca

SEQ ID NO: 29889 - DNA, 538 bp, Medicago truncatula
  Intron number 1 from transcript Medtr3g105170.2 (locus Med tr3g105170) derived from phytozome v7.0 (chr-ID MtChr3; po s 26246965 to 26247502 reverse strand)
gcttaaaccctagccgcttcactcttttctctctcgtaagttccttcctcaaccctaaaaccctaattctcgttccataactcaaatttccatgaatttgattcaatttcgtttctcttttttgttgattcattgtttcaattttgttttaacatgtatctgttgtttgatttaattgtttatgattcaaattcgctttctagggtttatagggttttcatttccgatatcatgattacaaatttattcgtctataatttgtgtcttttatttgtataagctattaggctatttatctttgaataatatgatttttgatcaataattatgtttacgtttttgtagttttctttgccaatttcataactgttactgtgttgtttatatcttatgtttattatctgatattgatttttgttatttatgataaacaaatcattatgattatgtatttttataactgtggttatgtcaataatctgggtttgttgcttttgtattaggaacttggaaggcttaagctaagtcttcaatcaaa

SEQ ID NO: 29890 - DNA, 501 bp, Medicago truncatula
  Intron number 3 from transcript Medtr3g064500.1 (locus Med tr3g064500) derived from phytozome v7.0 (chr-ID MtChr3; po s 14720516 to 14721016 reverse strand)
ggtcattacttcttcatctcacttcaaaattgcaagtgcgttttctctctacatgcgaaaattattagcttatcttaacggggctccacaatgatttaattgtttcattctaatttattttttttgtgtttatatagaagcattgttattgtttaacattgagaagaaaaatcaaatggatttttagctgctcctcctcttttatgtgactaaggttaaccacacatctttctctccattcaattcctctattgtacaaaatagcttgcaatagctttttagacttcttacaaaatcaaagtaattgttatatgattggtgtggggtttggtttgttgattttgcagttcaggaattttcaaatttggggttggaataagaataggagcatttgtttagtttgatttttggttatttgtaatccgatgactttttgaattgcattgctatctaatttattatcatctctttttttgtttgttatattctagaaggaggttt

SEQ ID NO: 29891 - DNA, 996 bp, Medicago truncatula
  Intron number 1 from transcript Medtr2g113950.1 (locus Med tr2g113950) derived from phytozome v7.0 (chr-ID MtChr2; po s 26821825 to 26822820)
atccagcagtatacatcagcacaactcagcttaaggtaattttttttttttaaatttctagcatattcttgtttatactctgccatatttaaaactatatatcaatatttatatatagagtatatgctgctagctgaatataattaattttctgaattccattcatgcttgctttgtgtcaatcatcctcactttcactttcctacaatagtaagaaacattcttgataactattacagatgttttgcttcttttacgtgtttattctttttggattagccataaatagaaaacagtacatttttaaattgatgtctcctccaatgtcccaactcttagataatattaaataaataaattgaagttactctaattattttatcatacttcattatcagctgacaaaaccatctcaaaaatgtgaggccctcaatttatttcagtaacccagttgataaggaacataaattagacaaaatatagcattgttgaaattaattacacagtaaccccacacaatattcatattattatttgttcttctataactctcttttttattgaaaaatgtttgtagttagtaatagtatgttaggtacgtgttttgaaccatggacctcgttctcacatccactgtgatgtaccataatcagtgattcatatttcaatataagtttttatttttattttgtaaaaacgttgtattaaaatttgaatcgtctgatatcgatccaacaacaatagatgttgtgaccgtatgaatgcagtaaatgttgatggcaacaatccaatctccgtagactacgccttcttatcacatcatcagctgaatttcactgaaattttttcaatatcaagtatattgtgattatttgatgtaacataacataaaatgttggtccaactggtccaatgtattaaaccaaaaaaactgtaacaatattaattcctatatatacagcattgtggaaactacaggaaggtagttactagtta

SEQ ID NO: 29892 - DNA, 549 bp, Medicago truncatula
  Intron number 1 from transcript Medtr2g121520.1 (locus Med tr2g121520) derived from phytozome v7.0 (chr-ID MtChr2; po s 28857037 to 28857585 reverse strand)
tacattgctagtggttgtaccttcacaaagttcaggtcatttttctattgcattcttttgttttgcttatttttgtacttgtgttttggtttgatatttgttggtgcatgacctttttgatatttgtgtttctcaactaagtgtgtgttcggttatgcagcaacaaatattgatttcgaattaattgattttagttaaaatttgagtgtatgaatcaaaagctacaaatcttagtttcaagttaaaatcaattctataggcaaaattacttctggctctccccactttgaaactaaacatacactgaatcatttggttcttatactattgtcatagagatttatttactttttataaacattatagatttagttttgtaatttttgttttgatatctgaagtctgaacataaaggttgtaggatgacatggtttgatttaactttcttgattcttgaagactttggaccttgttattcgtttatttgaaccttcactcttactctttgtgtaattaactatgttactgcacctgcataggccgaaaatt

SEQ ID NO: 29893 - DNA, 537 bp, Medicago truncatula
  Intron number 1 from transcript Medtr2g080700.1 (locus Med tr2g080700) derived from phytozome v7.0 (chr-ID MtChr2; po s 18667622 to 18668158 reverse strand)
tgtcatcctgtgatttatatttgtcaatcactacatcccctattatttactcttttgttactcccaccactttttctcatagaacacttgctgtcactctaacattcagggactttacatcattattgtttgaaaaattagagctatgtgcatccaaactaaggtgttgctgttgaacatattttgtggattattagatgttttattgtcacggttggggtagatatgaaaatcagaagatacaagtactattagttttataaaaagattcacaatgtctcttctgccctgtttgtggctatttgcatttgctttttgcattcttataaacttatcacttgatgttttttacgccaaattcatatctttttcaccatggattgttaggtgtagtttgttatggtttagtgacaaatctaataagttcaacttttttacaataatcaaaatattataccacattaatgagtttttcgtattcttgggtaccttaatgtttgttttcctctgctcgagtattgtacttatcttagtcat

SEQ ID NO: 29894 - DNA, 1045 bp, Medicago truncatula
  Intron number 1 from transcript Medtr2g056310.1 (locus Med tr2g056310) derived from phytozome v7.0 (chr-ID MtChr2; po s 15378600 to 15379644 reverse strand)
agcttcacaagcaagagacttctacttgtttacaagtaaacaaatttgttcttacacttgatatacaatcagaggtgtaaactgaacaatgttgaacatactcttaagactttagcatttctaggatacaaattttgataacaaattcttaagtgtttttgcgctatttgattttgacagagtaatggcatggtaaaatagaagagtattgttgatcttctttagatcttcagctccttttataggaagggattcgagagacgttagagaagagtgtcagcgaattaagagtcgttgaaaagcttcaaatcaaggacgttggatcattgcctaatatggataatcccgttgaatagtcatttgaaattcatttgctgaaactggaataatttattcattctctttgtgcttgaagttatttgtcaatttctacacgtggtcagaagaagataaaattgtattcaggtccttgattgatactatagaagacaacaaatctgacgtggagtctgggtccctctggatcttctgattttaggggtcttccaagtttgatggtgaccttccaagtcttatggtgtcttctgagtgtgatgatctttacaaagtctgatgaggttaatcttcaacttctgagtggcgtccttttcttctgatccaagatgttgacttgtggttgacctttcttcagatcttctaccatagtcttttaagcttctcttgtgtttctaatgctctaatacatgttcgattcatcaatagaagatgagcacaccttgagagagatataaacaacgagagtgatatgatatatatgatgtattgataatgtggtgggaagaaagagttaaagaaaaaataaagtggtgtataagtgtacgaagttcaggagtgttcaactttaagagttgataaaaaaactacatagaccatgtatgaaaaataaacgtcgaatttaattagcatgcatttatcaaattttttaaaacgatacaatatgtcatcagcaggcccggccttgagggagtgcaaggtgctcaatcaa

SEQ ID NO: 29895 - DNA, 940 bp, Medicago truncatula
  Intron number 4 from transcript Medtr3g024650.1 (locus Med tr3g024650) derived from phytozome v7.0 (chr-ID MtChr3; po s 6235936 to 6236875 reverse strand)
gagaagacgcacagaaggttttaacgtgttgagaggtgctaaatattttttttttttgatcaagtagcccagtggctagagaaattcacctttgaaatgaataagggggggtgtcaaaggtttgaaccccggctcctgcacatattgcatattatcatgtaataaatgagctaaactcatggggagagaggtacaaaatagtttgaacatataggcttaattttttttgtgaaaatcctaaaaagtaatttgttttgtagctaatgagagcatatttgtattttactcgcagcctacaaaacttgtccccttgaataaatattttcgagaagaacatcaactcaccatttgataaggcaatgataggaattcaatttaaatttattttattatgacaattcactatactaactcacgagactaactcaaatgaagttctctttaagaacatttaataataagtttatatgaaaactgggtattcaatacattgaaatttgtaatatttagcatcttgaatgaataagattactgttcatttcaaatttagaaattattcattaaagaagccaaatattacacatttcgatacattgaatatatgaagaatgaacattaatattatcttgatcttttttctctctctcttgatattctctctaaaatgtagagatagatagatacaacttggtgaaggagggagaatcagagaaaggagagggccaaatctagaaaaaattgttccgagaaaaagcaaattcttattttcaacccttgatggccaaatccacaacttgcattttattctattttatgtttatccgttcataattcttttaaatcgtgttttatcgttctaagttttaccaatctgattgcatgcatgttaatatttacaagttaaggtttcttgtggagcagagaaagaaaactgagaaga

SEQ ID NO: 29896 - DNA, 515 bp, Medicago truncatula
  Intron number 1 from transcript Medtr1g008620.1 (locus Med tr1g008620) derived from phytozome v7.0 (chr-ID MtChr1; po s 839610 to 840124 reverse strand)
tcatcactcacactctcttgttcattgttgcaaaggtacgatgatgtttgtaatatttataagaggtttcacatttcaacaactttttcttttctttttacttgtcttctgctatcacaatgctattagaatttcaatcttatcaaagagttctgagaaactaattttggaattatctctcatgatcaaattgagtttgacatgtttagatgttttttagttgaattgatttaacctcaagaattgattttaacttgaagcttgaatatttagcttttggcttctacatttgatttttagtcttaattttattcttcaaccaacttttacttatccaaacatttatgcaatcacttttgcttaatcaattcaactcactcttagtcgcagtcaattttacataattaattcatttaaaatcaatctgtgtctcaaaataaatttcactatgctaactataatatttattctactttctttgaagattgactcacttattagaagcagagaatttg

SEQ ID NO: 29897 - DNA, 881 bp, Medicago truncatula
  Intron number 1 from transcript Medtr1g146000.1 (locus Med tr1g146000) derived from phytozome v7.0 (chr-ID MtChr1; po s 32164163 to 32165043)
ttccaacttttccggtatgtccaaacataacatttgaagttttcaaggttggagttaataaactggttttataaaacggcagttcttaaaacaggtttttgaagcttggaattagtttttgactttttgtagtgtaggttcagcttttatttttatttttagtctgttcacgaaaatagcagttaatgaaactggttttgaaaaattagttcaaaactgagtttgcataatcagagattccccacctcctcgtttcatttgttccatttggtgtttctttgcttgcaaccatctccctttaacaaaatgagaaccttattttccaaaatgagaacaattagcaaattaatgtggatgtgtagagcatagaagatggaaacgtacatatttttttaacataatctgtttgtctgcaacatgtttgagtacaatttattatgctatgaatcacttgatttgatcaatcccccaactttgttcgaactagatgaaatgattctgaaagcagcatggttcaaaaatttgctaacttgttttatatctgtatatactacacacgatttctcgtttggaatagcttttgacaaatggaagaaattattataattcagagatgaacaaaatacacgaaggacaaaaaaaaaaggcggtgaaattctagagttttttatattgattgtattccaagtgaatgtacaaggctcttaattagacctaatcaaagatatgttgcaaaactcagtgaagctgcaagaatgaaaatggagaagagcccctcgaagtcatttaaatgggtttcaaaaaccaaacttcacgcccagatatatgctcaaattggtggtatagaactttggttatagtccagcttcttcaggtgtttg

SEQ ID NO: 29898 - DNA, 974 bp, Medicago truncatula
  Intron number 1 from transcript Medtr3g031230.1 (locus Med tr3g031230) derived from phytozome v7.0 (chr-ID MtChr3; po s 8718128 to 8719101)
gagcttcaattgtagtttcttatttccctgttaactattatcccttctgaagcacggatacttcaaaattgatgacgcacccgtatctgatatgtttctgcatcgatatttgcctgatacgccccaatacgtatcggaaaagtattcaataattaaattttattcaaaaattataattgctcgatagtttcaaatacgtccgagatacatgagggatactacagtgaactaatacatgcaagatacatagtttttctattttattgttctcattttttcttataataaaaaatgaaacatgatttttctagtttcgtttttttctttaaaaagaaatagtaagaaaaatgaaaagacattataatatatacattaggtaatgatgttctctttgcgatataatatcacataattttgttatctttttaggatatatgtaattgattaagtaatgatgtcatctctttcgaatgtatgtaatagaataattgttgtcattttctttattatctatattacttgccatgattgtagaactcttttgtgcctagacattttggtacacattgtgctttaacgtctagtgtggtaataatatatattccattttttttagggaaaaaaattcatcaatattacttatatttatatattttgcatttagttatttaatttaaaatttaaatttttattaaagtatctcagccgtatttatcttgaattttgaaattttcacgtatcatcgtatcggtatcgtatcgtatccgtgtcgtatcatgtatccgagcttcatagattatccctcacgattgtagtcgcgctctattaatttgcttcttatcaagagtgcaatcgacatttatttatttatttattaattttggtgcttaattttctttcaattgatttttctggcaaggattaatattgtatagttagcttttcttcttcctgagatttttcttcttccttcc

SEQ ID NO: 29899 - DNA, 722 bp, Medicago truncatula
  Intron number 2 from transcript Medtr2g046190.1 (locus Med tr2g046190) derived from phytozome v7.0 (chr-ID MtChr2; po s 12910205 to 12910926 reverse strand)
tgggtggtggaagttatttttgtggcagttgtacgatgtttgaggattttggtacaacttttgtttatgttgtttcgttgatcgtggtgttagctttgttttgatttttctatttattgatttcggagatagccctctcttaggaggcgtttcctataggttttttggattttttctttgattcacgggtgtatgagtttttcattaggggctccccatctatcctttgtatattgctctttaagactcctagcttaacactccttgtgctggttaagattcattgtgattttaataaatttcattttagttttttaaaaaaaaataaaaaaataaaagtgaaatgaaataagaaaaaagaaaaaggatttataatttccatgtcattcgtgatgttaaaaactcactgataaaacattttcaatctccacgattgagtgttaggaaaaagggtgttcttaactttccttttaatacttatgcgagtaatttattcaaaatgttaagacttgcaatagtgaaattgcatagataattttgtacgaacttactagaaaagacatttttatgcaatatgatttgaatattcagattaccaacaattttttttttgttgttgtcaaaggtgttaaaaaatatctcttataaacgaatttgttttcttccctcgttctaatgttttagtttgaatgtcaagtttttaatataaggtcaggggttac

SEQ ID NO: 29900 - DNA, 691 bp, Medicago truncatula
  Intron number 2 from transcript Medtr1g047410.1 (locus Med tr1g047410) derived from phytozome v7.0 (chr-ID MtChr1; po s 11408669 to 11409359 reverse strand)
acttggaaaggtatgctcactttcaatttcaagggattgtaacaattttaagcttcccatgtctcatggtttctatctagacatatggtttcttgacaagatcaaaatgtgcatatcagatagccgggaaagtgaagtgtgatatttagctccatacagcttattacatgaaaggtcaatcattcttaccacattgtcaggttatcactgtcctataactcgtgacctttggaaaaccaagacaagattctttgtgtgtagttgtcattctgaaaccaaagccatatgtgaatactgatttcttggagaacaaagaaacaagtcagtgaataaggcaagccagttcattctttagtgactactgcatactgatatatgatcatatattttaagctagtttttcttaagttatgtattagtatatcaagctattgccattaggtttttttcccatgttgatttatgtctaaacttcattgtatttttgttacattgacaactattttaccttccgaattgtgccttatgcgaaaatggtatcgaagataacagtgagctttgttggcgtagagctggtcttcgaaatttcattcaacagcatacttcgcactctcggactggagcataattttttgtctgcgtgttgcagaattttaatcaggaaataaaggaactacaatatttgggtata

SEQ ID NO: 29901 - DNA, 843 bp, Medicago truncatula
  Intron number 2 from transcript Medtr3g036440.1 (locus Med tr3g036440) derived from phytozome v7.0 (chr-ID MtChr3; po s 9642132 to 9642974)
tggggagagaagttgtagaatttaattttatttcggcttggatgagttttgactcattgcctacgtaccctttttaagggatcaaaaccgttcgtagttcttgctaaaaaacttgtttttgttttaattgtttgattttaagttttgaaaatggttttgaagaaggagattgggaggcttcatgagcattagatttagcaaaaaagtgaggtttgattagtgattagaaagaaagtctaaatggttaagatgaattgaattttccttaagaaaaagaaaagaaaaaaaatgaagtgttgacttcatatttactatgaaattttttgaagtgaagttcaattgttttttggaaaaagatggattttctctaagtgtttaaaacctaaacgcttatttaaccatacaatcctatgcatacatctaaggtgagtgtgtgcgtgtcggtgcgtcatagtgtccatagtccatattacaacaattgcctaaatacattctatggcccctttgccaagctacaaaccaatgataacaaattacatcaccaaatgagttaaaacttgcaaagagaataaatgctaagctaaagaaagtggaggagatagtgggatgctatgaaatgtatgtcacatgagatgaaatggttagtaatcataaagcatgaaatagtacgagataaataaaaagagattgtataagaatagcaaaaaggaagtaataaaatggtaaaaacctataaaaaatttgatatgatacctaaatgtgcttgtgacccataatcatcacatcatggcgattttgaaagagatttagtttcaagccatgatgtggaattaatagagacac

SEQ ID NO: 29902 - DNA, 1022 bp, Medicago truncatula
  Intron number 1 from transcript Medtr3g138070.1 (locus Med tr3g138070) derived from phytozome v7.0 (chr-ID MtChr3; po s 35185061 to 35186082)
agccttcgtcgttagtagtacaagattgaaaacaagtaaaatttaaatttaaactaatattgtggaccatcacatttaattgctaataaggttcttatgtatcgccttgtaatgccataagcgacgaggcacaagaaaactgattaacaaacaaaaaatgttatgacttttttttaacaaattaattttcaatacacgtattaaatcaaatgttcaatacacatgttaaattgatatgaacaattacaaggaccaaacacttgtctcctcctcaaataatttcctctatttcaatacttttgttgatgatgcaactaggttaacattgttttatctcctgaaaaataaagttgagaatcctattgtttttaaatagtttaagtatgtgtttaggaacaccgataaacgaacatccaaagcgaagctactaattgtagctttgaaaaaattgaggtgaaatggccattcaatgaagattgaaaagtgaacgtgaaaccaaacatatcacaaggctggttcaaattacaatatgattttcctaccaaatcccttcaaactgtttgggaaggtgaactaaaaacatccatcacattattcataggcttattttccatttcactcaccatatatagttgatctttgcttaaccctcttaagccatgtttttcttcccttaaaatatagttggatctttgctttctctgttgtttttcctcctcaataagcttacaacgatcaatatatatattttaaatattggaccatagatccaacagatgaaacttttgagttatgatttaattagttccatcgtggtgcaactgcatgacaaataagtaaagtaaaaatacaaaaaggaaaaatgattgaaccaactatggttcaatacttcagttcagttataatatatttggaatcaaaccaaatatcaagaagcaaagttcattatgatacttctgcaaataatttctctttctttattttctttagaatctgtctgggactacgaaatttatcttgaa

SEQ ID NO: 29903 - DNA, 630 bp, Medicago truncatula
  Intron number 1 from transcript Medtr3g104810.1 (locus Med tr3g104810) derived from phytozome v7.0 (chr-ID MtChr3; po s 26130770 to 26131399 reverse strand)
actctgttaccaagagcaaggtaatttttttttttttttttgagtttttgtgcttgatttgattcagatctgttgttgttatgtcttttttgttattttcaatttcagatctatgttttgttttctgaatttgctaaattgtgatagttttggtagctcccataaaatgggagtgttattttatcattaaaattttcttttttaacatgtcttgaagaactaaaaaatatttaaaattcacaatgatattgttttataatttcattttggaacttggaatagtataaagaaaaggttggttggatctaatgttttaaatttttgagattcataattgaatacaattgatgcatctcaattgtggatctggaatcctttcaatcttgcataaagaaaaacatgtggttgcatacattaattgatcttagtcgtcgatttgaaatctgttggctcacattacacaaaatccaaatattcttgttatgttattgttgttgtagaacaacaattggatttttatgctgttgtaatttcaaagctgtttattttgtgtggtgtgttctaaacaaataattttgttttgtgatgtttacagtttgacaacttgtacggttgccgtcactcactccc

SEQ ID NO: 29904 - DNA, 636 bp, Medicago truncatula
  Intron number 2 from transcript Medtr1g013500.1 (locus Med tr1g013500) derived from phytozome v7.0 (chr-ID MtChr1; po s 2488561 to 2489196)
attgtcaccacttatcgatcgactacctttcaatcgtcggtatgactaattcattatctttcttttctaaaccattcattttcatttcattgatagagttggaacatggaaagtgtacacacaaaagaataattattatggaagagtgagtttgttagagatatccatggggatgataatgcttttgttggtggttttttagacacatcttgtataaataagaggatacaattggtacttgaactgaattttcaggtttgtcattattgagagcagagaatagagaagtggactctgttgtagatgaaattcttggaggaaaaatattttaagaatttatgagcaatggctctgtttatgttaattattcttccttatagtcatagataggttcatcaatcatgatataacttttctgttgatgcatctatcaactttgtaacattctattaatggctctggctatctaacaatgatctgatatagcttttttctgtcctgcatctgctatgatctaatggtcccttctgtcattcaatgttgtctcattacatatatgcttatgcttgttctcaacccactttattcacaatttgcatgtttgaatttgaagctgattacatcgggcttcaacta

SEQ ID NO: 29905 - DNA, 451 bp, Medicago truncatula
  Intron number 1 from transcript Medtr3g133550.1 (locus Med tr3g133550) derived from phytozome v7.0 (chr-ID MtChr3; po s 33853943 to 33854393)
aaccacttaccatttcggatttccaaaaactggaggtatattcttttttcgataacgtcttttatctcttttcttcaatgacattgacactatttattagttaaaactctgctctaagtagtgtatcaaaaaatactatacttttatagtacaaacttgtacactaagctatcggtttgaccttgctgaactgagcctgaatgtaacatttgtcagcgttgtgccatagtatttttttccgtgatatgttgtttcatagtttgacgcatgttggacaacaaataatacatcttcaatctaatgtgttagtgttttgtagcttttttttagcttctatgtttgttttgttggtgctatggatttgaatttgattaatgcagtagcaatataatatagcatcacctttacgaacatgaccttgtgcagcattgagaacacaatttctccttga

SEQ ID NO: 29906 - DNA, 680 bp, Medicago truncatula
  Intron number 3 from transcript Medtr1g126230.1 (locus Med tr1g126230) derived from phytozome v7.0 (chr-ID MtChr1; po s 28124642 to 28125321 reverse strand)
gaactaagattaccttgttcctcaaggaagatcaggtaaacacattaaactacaactatattcctagagctttctaatttctagacagtttgagaaattaaatggacatataattatgatcaaagactttcaatatgaacgataatttgaaaatattattattaatctagaggctaaattgatagcattcatggttattagtatttaacaattttattatgattcaatactagcctcttgaaaaaaattattttatgcttcaatattgaattcaactcaatcaataagaatctctagtgtgcatctattttggacataattttaccttaaattttgatacatacatataatgagtcactttaaatttgccagctacactttttgacaattttgcataacaaaccaattttcttttgttgtttgtttatgatttgaattatttataggttcattaagatgtatgagcttatatgatgttgctatggcacagaagatttgaagcgaaatttgaaaatgagtctttggataaacagctaatttgaatcatgattgtactctataatgttgatcttaggcctctttgttttccttcttgtgtcaatagactaatgatatattgaattttgtattggttatttgttacagttggagtatttagaagagagaaggattaaggatct

SEQ ID NO: 29907 - DNA, 661 bp, Medicago truncatula
  Intron number 1 from transcript AC235678_12.1 (locus AC235 678_12) derived from phytozome v7.0 (chr-ID AC235678; pos 45521 to 46181)
gctccaaccatcaacttcacgttccttccctaccggtaacttcatttaaatttctccttcttatgtttatttatctttccttattactgaagcaccagcactgacatagacacctgatacgacactgacacacgtcaacaccaataataatttgaagaatgacttaattgaataaaatcgaatgtaatgacatgtatctcgtgtcggtgctggacatttacacgtcacgtgtcagacaccagacacagcttcaaccagaggtgtcagtcgtctaagtaattcaaagtgatagtgttcttgattggatgttaaatcggtactactgagttctctcagtagttcaaagtgttggttctactacaacaaagatggacacatgtaaatatttgaaaaaatggcataatttaatataattgagacatgtacatatttgaaaaaatggcataatttaatataattgaatgtaattgaattataacacgtgtctcgtgtcggtgttgatactgacaagtgttagacataccttctatcagaagtgtcagtctgtaattcaaagtgtaatggtgggtttttgtatggtagtggttttcgagttgaatgttaatttttttgtgttgtttttgcttggtgatttttttttttttgtagagtggttacctca

SEQ ID NO: 29908 - DNA, 849 bp, Medicago truncatula
  Intron number 1 from transcript Medtr4g011640.1 (locus Med tr4g011640) derived from phytozome v7.0 (chr-ID MtChr4; po s 1731885 to 1732733)
gaatagtggacttcttgtgtcaaaattcacccttggtagaagttgactacataaaatgcagaaggcgacaaagatacttataattggtttgtttcttgtctccttctatgtttctgatttccgaggtctattgggtcataactatttttagtagataaattacaagtctctttggtaaagaattgaactggatatatattctggcatgattgtatctagtctcaacttaagtggatgctctattgcaaggattatattgcttgttgatattatgtgaaaatgtatttgtgtgcatgtgtgcatttcttttttactcatctgtagcaacaatttgaattactctagcagataaacattagctgttgacatgtaaaaaaaaagcttgtgcatgtggatcacatatatgaccattttgaattagtatttagcttgcaggaacattgtgatagaaattggtaccaaaatacaaattaatgttaatattacaatagatttccaagaaattcgagagtcttggatctatcccttcccgaatgttcaagaaaagtttatatacgtttattgatattcacagagaagttaaaggacggaacttctgaaatatttaaggtgcacaactgacgtaagtgttgcattgtgcgtaaaagttatttaaaatttcagtcatttaaaagacgactcattataacatgccgaagtaacataagcgttgcactgtgcacaacttttccctaccattagatcaattagacaccagatctttctcgtgctctttttgattccctcatatcttttctcccacgatgcatcttctcatgcaatgaacctgttttagggtccaataaatcc

SEQ ID NO: 29909 - DNA, 1039 bp, Medicago truncatula; identical to SEQ ID NO: 28861
  Intron number 1 from transcript AC235665_31.1 (locus AC235 665_31) derived from phytozome v7.0 (chr-ID AC235665; pos 164498 to 165536)

SEQ ID NO: 29910 - DNA, 1015 bp, Medicago truncatula; identical to SEQ ID NO: 27895
  Intron number 1 from transcript Medtr3g166770.1 (locus Med tr3g166770) derived from phytozome v7.0 (chr-ID MtChr3; po s 43722250 to 43723264 reverse strand)

SEQ ID NO: 29911 - DNA, 843 bp, Medicago truncatula
  Intron number 1 from transcript Medtr3g040060.1 (locus Med tr3g040060) derived from phytozome v7.0 (chr-ID MtChr3; po s 10861883 to 10862725 reverse strand)
tggggagagaagttgtagaatttaattttatttcggcttggatgagttttgactcattgcctacgtaccctttttaagggatcaaaaccgttcgtagttcttgctaaaaaacttgtttttgttttaattgtttgattttaagttttgaaaatggttttgaagaaggagattgggaggcttcatgagcattagatttagcaaaaaagtgaggtttgattagtgattagaaagaaagtctaaatggttaagatgaattgaattttccttaagaaaaagaaaagaaaaaaaatgaagtgttgacttcatatttactatgaaatttattgaagtgaagttcaattgttttttggaaaaagatggattttctctaagtatttaaaacctaaacgcttatttaaccatacaatcctatgcatacatctaaggtgagtgtgtgcgtgtcggtgcgtcatagtgtccatagtccatattacaacaattgcctaaatacattctatggcccctttgccaagctacaaaccaatgataacaaattacatcaccaaatgagttaaaacttgcaaagagaataaatgctaagctaaagaaagtggaggagatagtgggatgctatgaaatgtatgtcacatgagatgaaatggttagtaatcataaagcatgaaatagtaagagataaataaaaagagattgtataagaatagcaaaaaggaagtaataaaatggtaaaaacctataaaaaatttgatatgatacctaaatgtgcttgtgacccataatcatcacatcatggcgattttgaaagagatttagtttcaagccatgatgcggaattaatagagacac

SEQ ID NO: 29912 - DNA, 913 bp, Medicago truncatula
  Intron number 1 from transcript Medtr3g105530.1 (locus Med tr3g105530) derived from phytozome v7.0 (chr-ID MtChr3; po s 26423725 to 26424637 reverse strand)
atccataattccatctgctggcacttgcgagaatcgtaagtttttcaactcaacttatgcacttgttttcatgaacacgtgtaaaacttgttaatatctcaactcttgtatcatttaagtaaaaaaagttgcaaataatattcattttcaaaatttgagctttcatacttgaatatcaaaatggttcatatctatatgtactgcacaagctacgaagaggcgataagcttaaacaaacacattgatatataaaccaactctctcattttatgaaaatatgtccgcattgtaaatcgaaatatttaacttttttataaaataatttcttctttaggaattcttatagagtgtgccgagacactcgttaacaaaaccttaaaatttataaaataatttcttctttaggaatccttaaagagtgtgccgagacattcgttaacaaaaccctaaaacaaataatgaaagataacaatttggtaatttcttatcgtgccatcctcacttctcaaacaccacactttatttcatattttatatttcaaatgcgtaaaaaatcacgcaaaagcctccgattttttttttaaattttagaatccaaaaaccaggtcgcgcgagcaatcagagggtgcgatatgagattcaccaatgtttgggccgtaaactttttgagcatgtgagacctacttctatggaaagccttagcctggttcccactcgtgctactgcacatgtattagaggtgcataaatttattatcatagatttggaacatggtttttgaatggacttgggtccaattacaatatcgtatgtgaagcatattctccagaaacaaatacttgaagccctgttactgatggaatggtaacgggtttgagtaataagctttgtatttcactgaataggcaactat

SEQ ID NO: 29913 - DNA, 644 bp, Medicago truncatula
  Intron number 1 from transcript Medtr3g139500.1 (locus Med tr3g139500) derived from phytozome v7.0 (chr-ID MtChr3; po s 35924097 to 35924740)
agatctaacattaaagcagtgtattgaacttcagggtagatactctcttttatcattattattcacaaagttttaactagtcttaattgtatttttatcctctacatattttttttatgattctaccttgagattcacaacactcaaatagcctgcacactaactacatgtgctagaccatggtttacaaccctgtagatattaggatcgtgcagttttcgcttttcatgtttcaattgtacgaattaagtcctccgaatttttctctagtcacaactgcccctcaatcactatgttgccgttgtacatctttagcgctggtaacctatgcgtcattcataaattagacagccgggtggtggaggaatttgattgtaattagagaatagggaacctatcccgagcaattagtgccgtgactcgtgagacaaaaattatacaatcatatatgcagatcaaaagttccattttgaattttatctattgtaagagttgaaatttctttaatataccagggaccatattaagagtttcaagatacttttttattcctgtcctcaagaagaatcccttgctatttgcaatataaccaaaccagcaattaaaatagtaaagacacgtttcttttttcaatttttgcagta

SEQ ID NO: 29914 - DNA, 963 bp, Medicago truncatula
  Intron number 2 from transcript Medtr3g046450.1 (locus Med tr3g046450) derived from phytozome v7.0 (chr-ID MtChr3; po s 12567690 to 12568652)
tctcccccagagtaggtcattattagacgaactgggtaaacatattcttgtgttctccttcttcctttatctcctgctgtttattttgtttgaattatattgtcacccgcttgatttgattgtttagttttaatttgttcaacgcatcaaggttttattggtgtgtttttcacaacgaattcacaactgtttttaacatatacgcaaaaaaaatcattcaaaaagatatgttaatttaacaacagaaactaaatattgttgttactaaccaagttgtttgggctccagtggcaaggagctccttccaaggacgtgtccggggaataccgggttggatttccagggggaacaacgcttggtcaatgcgcatgcctctacacacgagccggattagtcgcccacctttggtggatcgaaaaccggtgcgaaagccaaaaaaaaaatattgttgttactaaaacatgcattttttcatgcggacgaaaaaatgattgcattttttcatgcagacgaaaaaatgaaatttggtaattttgtagcaatgacttaacccttacttttttttgttaccacttaattataccattaaatccgtaatatatgagaattgctattcccacatttgataaggctgagaaacaagagtaaaatacgtttttgccgaggaatttaacatccggctgcagttaactgtcgagaaaaatgttataagaacagaacagacataggagtttccaaaactccattgttatgttttttgatctcgaaggtgcgattttgagctatttcaagtcattccaagccaatttcaatcaccaaaacaagtaggtttttttaatcctattgcattgttgttttgcggttaaattgtttatttttttttttgttgttaaatttcaattatataggttcgactatattgatttgttgtttttttgatatgttaggatagtttaggttaga

SEQ ID NO: 29915 - DNA, 526 bp, Medicago truncatula
  Intron number 1 from transcript Medtr2g121860.1 (locus Med tr2g121860) derived from phytozome v7.0 (chr-ID MtChr2; po s 29015932 to 29016457)
agcctttgatcatcactgatcacaattgattataggtatgttattcttcaacgatcgatgctttcaatttcatcacatcgtttatgttttatcgatttctttgtttttccaacaaaccctaaattcatgtaattcacacgatcatgaatttgtatgcaccgtttatgttaatttatttatagtttcaattatttttatattttgcattgaacaattcgttaaccctaattcttgaagttgtcgattttttgattttctagttgaattcataacatgtgaaatgattctgatgataactagttactgctttcacattatttgagttactgagaaatagattaatgtataatcttaatcgtaacgaatatgctctgtttttctgatatataatcatgttttggattatgttttgattacttgttacgattattatattaatctgaatgtccctcaatcatattgtttaatctgtttatgtttggtttgtaaagtttgaagcttgtggggattaagtagcagcatttgt

SEQ ID NO: 29916 - DNA, 584 bp, Medicago truncatula
  Intron number 1 from transcript Medtr2g110590.1 (locus Med tr2g110590) derived from phytozome v7.0 (chr-ID MtChr2; po s 26061961 to 26062544 reverse strand)
ttctcaatcgctcaagaaaccaccgccgccgccgtgttataactagttttgaactaagttaagtttctcctgtttattttaatatataatcctgccatatggatatgtgtggtgtgtgtggaagtaatatagtttttctgttttttatgaggtagattagaagaagatatgcatcataatttggatcagtattatgtcatccattcatgagattatatctgccatttgttggttttgattcagatttgtttttgagcattagagtctgttattttcttggtgcttaaagaaatgtgctagagttgatgtatgagcgatgagctaattgttgtgcattttatgaagtgtcaaaggaaatttaagagattgtaattactcttcattgtgaagattgaagattgtaattaatcttcattacgatgagctaagagtttgaattaaatgtattttgatttatctaattttgaactatgtttataggaacttggatcaacttgaggtgttatcgaagaaatagaagaagcttaatcaaagactataagagccaaggcgtcttcacaatccattgctgcaactaggttatc

SEQ ID NO: 29917 - DNA, 964 bp, Medicago truncatula
  Intron number 1 from transcript Medtr1g106080.2 (locus Med tr1g106080) derived from phytozome v7.0 (chr-ID MtChr1; po s 22016463 to 22017426 reverse strand)
tagattcgaattttgatcgagttcgtgtttctgaatcagtttctgctgagttacttactacaaaagaagttagttttttcagatacccttttgagaatttcttctgattttgtgttgttggatgatgtagatgctaattgggtttgatgggtttcgttctttctcttcgtttgtgatgtttcatcatgtgatgtgaattctttgacttctattttgggatcgaggttctaacataaatagaaagaaaaacaaatttggaaacttttggatcactaatctgtttataggttgaattattgaatttgattgatcttagaaggagatacctgaattttgataatttagttagattttcatttagcttaagaaattggacttatatatagtttagtccaatttatttgtgatgatccaattttttttttagaacaagagaatctctctctatccggttgaaattgagtttctttgtgaggtttgatatgtgtgtgatggatcttaaagtagttgatacctagatggatgacatatctgctagcaagtatatgttgttgatcaagtcctccatgaagatattagtaatttaacacttgattttcaaaattgtgattgtaatttgattggtagtttataaccttcattgttgaggttatctgcagtcaacaaatatttgtagccattattagtattaaatgatccatgcctagaaaactaacttctcttcaatgtgactgaagaacttagggatagccattattagtatttaattaagaaccgtgtgtgttaattgtataaattgcagcatattttttttctcatttctcatgtggtaatttgaagcatttttttcttcttctgtgtatctagactagtctagtctcaagttacactaaatattgcatctagtcttttgatacattatgattctcattttctcatttgcgtttaattattctggtgtagg

SEQ ID NO: 29918 - DNA, 907 bp, Medicago truncatula
  Intron number 1 from transcript Medtr1g087110.1 (locus Med tr1g087110) derived from phytozome v7.0 (chr-ID MtChr1; po s 17447214 to 17448120 reverse strand)
ctgagaggtgggtatttcgttttcttctaaatttcgataatttaattttcgctatttttttttttatcgccaattttttgaatttcaattgggattgttttctttggcgctctccgatttttatatttattttgacagaaaaagctgacaattgattttttgatttaattttaaactacggttaaaaaaattgtttttttttctttctattgttatcatttttatttaattgttacactgacattagtttttggttttgatttgtagaacaaagcagaacatgaatttgattctgggattcatgatgttttgttcaattaaccatgctgtttttattcccacaaaaagaacaaactttttcttaccaattacacaatttcatggtgcaattcagttcgtttctgtttttcctgattatgggttctaaagatgattgaatttggtgtaagtttttttgttttcaagcttaacggttccctgttgattattcctttttgagtgatttcagcatttgctttatacaagttctcttaccttctggattttgcctgattttaagggtttttttttcttctgctttttagtttttgtgatcttcatcacatgcataatgcattcatgttttcttagtgcataagcttaatatgttgggattaatgttttttgtgccatgttgttattatttattattattattgttactttttttggcagaaagtggcgttactttctcacagttttacaattttttgttttgacttgttttaatatatatatatatatatacttattcacaatgattggaatctttccaattcatgtgctatttattggattgaaattgttatctatgtattatttacttgcaacagaagcgctagggaaactacacccgtccatttgataa

SEQ ID NO: 29919 - DNA, 906 bp, Medicago truncatula
  Intron number 1 from transcript Medtr1g127120.1 (locus Med tr1g127120) derived from phytozome v7.0 (chr-ID MtChr1; po s 28533619 to 28534524)
tggtggttagatctgtttttatcatttctggttaattcagtttagttgtaacttgtaagatgttgctcttaacattgaggaactaaattcttattgttttattcagggattatattgatatatatgttcatagtttagacaatatcgtaatagacattaggtcaattaatggaagaactaaatagttggacacaggatagtttatgaatcttttagcaagtacaagcattattaggttaggttaggttagagatcaatttgaaagtgttggttggtgggagaaattaattatttgaaaattgttatatttttcggataagaagcctaataccgcgaagagtcttttttttttgacaaataataccgcgaagagtcttaaattttggttttcatttgcatggatattgttttagacatctttgttttattttttttattttttgttctaatatttgtcaactacgattactatattataagaagataaatatactgagaaatgtgttagaaattagaatgcctattttctctagttttatatcaaacgatgagaacatgatacaataaagagtaagtgcataaaatatcatacttcttttttaaaaattaaaaaaaaaaaataatcatacttctctattctctgattcaaatggaaagcaagcaagaataatgagcaactggctcaaagatactcttatatgtccatattgtaaattacaatattgacgaatcttttcaactaaattttgtactttcatgtttcctagtatccctgagattaaattttggattacatagcacgcaagtaattggtgcctaaaatgaaccacatacatatggacatatatactttaatttataataatgtccctgtgtttccctttgattttagtccctatcatcaaa

SEQ ID NO: 29920 - DNA, 452 bp, Medicago truncatula
  Intron number 1 from transcript Medtr1g013460.1 (locus Med tr1g013460) derived from phytozome v7.0 (chr-ID MtChr1; po s 2481253 to 2481704 reverse strand)
ccgtccaacttacaaaacaggtgaacattttattttgcctcactttacatttcctctggcatatgctttgaattttttgttattctagatcaataattataaggtttttactgtgtgtttgtgtccaaaagaggtttttggttggaatcatttcattctgagcagtctaatctccaccatagtaataatttgttgttaatctgtaggtcgttggcgtcgaatgtgatggaattagatttctcgaagtggacttttgcaaaagtggcatccttatgttcttcattaggcatgtgtgttgccagtgaaagaaaaaaaaattatgtagtctttcttatatgaaacctcagttattaagatactttgttattttttatttggatttgaattgtttgtcatgtattattgtacaattttgatggggtgtttagttttcagttaatttgtcttgcacc

SEQ ID NO: 29921 - DNA, 625 bp, Medicago truncatula
  Intron number 4 from transcript Medtr3g025510.1 (locus Med tr3g025510) derived from phytozome v7.0 (chr-ID MtChr3; po s 6616174 to 6616798 reverse strand)
ttcttcctttggcatctcttggaaatcttactaaggtaattaactctatttaaacacgtgaaacaggacatagtctttgccaggatacattcttggttagtttgttagtataaaagatgtagcttactgttaggattgttatattatgttatcattgtaaagccttcttagcaaaccttggggtctgtttggattgactaatttgagcttatctactaacataactacttttagggagagcttgtggaaaccacttatggcatgtccataagctgtgtttagctaatttccttaagattctctaacatagcttatataaaaacagttcgcctttattttatcttttgttatagaagtagattatacatcagcacttatatgataagcacatatgctacaagcgcttaagttgtttatccaatcagattactattaagacttttctctataaacaactcaagcttataatacaattttcacattccgatgcaatcttccttttctctctatcattttacaataatgactacggtatattgaaaacaaacacatatagttgtgtaatgtttttggatttgacattaaaacaggctatagccagaggactaaaagatccttcttctag

SEQ ID NO: 29922 - DNA, 870 bp, Medicago truncatula
  Intron number 1 from transcript Medtr2g121190.1 (locus Med tr2g121190) derived from phytozome v7.0 (chr-ID MtChr2; po s 28690155 to 28691024)
cccatcattctcattccaaaaaagtacattcctttactctttttccaccgctgtttctctcttagtttctgggtattttctttttagctctctatttgattagattaaaagtttgtgtgtaaaaaccaattcttgaatcaaaagctccagtttctagcttcaagctcgaggcaaaaccaattctactcgagagcaaccaaacatgacaaaattagttatacacctctagaatcatttctgtctcctcttaaaagtgaaaccaatatacactatacttcttgtcaatggaaatagatcagcaaaaataattagtttttgcaataatttttagatttttttctttccaaattggtagaagaattcagcatagagtgattgtagttgctttaaatatgttgttcttgttgaatcagtgattttgggactgttgctgaaaatgtgtttaaattttaggacttgattggataaacagcttaatttgcagcttatagcatgataagcacttacatataagctatttctataacagaagaaaaaataaagttaaattgttttcgtttaagctataagttgttttcacatatgctaacttggagagcttatgaaaataggctgaaagcagcttatgaacatgttagaagctggtttcttatgttctttcaaacggtttaacaagtgcttatgccagtagtagataagccaatccaaacaggccgttacccgtttttattaaattgaaataaaaaaaagttgacatttaaaaattattttccattttgagatagcttgatctatagtttgtttgatgttttccaacttagctcctctgtgattgttttaatcaggttaataagaagttcgagattgcaa

SEQ ID NO: 29923 - DNA, 286 bp, Medicago truncatula
  Intron number 1 from transcript Medtr2g096200.1 (locus Med tr2g096200) derived from phytozome v7.0 (chr-ID MtChr2; po s 22220718 to 22221003 reverse strand)
gttgtcacgtaagttatcaaccaaatgattgttcaaataacacttttatcatatatatatatatatatatatatagagagagagagagacacacacttgttatatgaagaaaaaaacataattatacacttaccattaaaaaagttattacaagcttttccatctgctgaataatcatatggcttaaaatattttgatgttgcaatttcaggagctggagtgtttggtcacctttcagactcttctctaggaagaaaaggttccctcaaagtggtttgttccctaa

SEQ ID NO: 29924 - DNA, 899 bp, Medicago truncatula
  Intron number 2 from transcript Medtr3g132770.1 (locus Med tr3g132770) derived from phytozome v7.0 (chr-ID MtChr3; po s 33466292 to 33467190)
tgtctttaatctcggcgaaaatctcactcctagatgtaactaacttcttttctttttatataattattattattattgtaaaaatcataattatggttatgaaccctgtttctcaatttaatgtgtgtttggttctctagcgaccaaaatttattttgaatgaattgattcagcaaacttgatttcggctaaacaacttaatttgggataaacaacttaatttgcaactcaattttgaataagctataagctgttttcatcagctatattggagaacttatgaaaataagctgaaaacagctcgtggacatgtcatgagttgtttttataagttcttccaaacagtctagtaactaataagttcttattcaagtagataagctaaaataagtcaatccaaaaagaccattaatttgtgacttgatgctgcttttgtgctagttaaaatattagtttgttggcttgattgcacttttggtcccctattttataaaactcatgaaaatagtcccttcttttttaaaatcaaacttttaaaatagcccccccttttctaaaatatttgttcgttgcaattttgatcccaacccatgttttttgccctcaaaatggtgatttttagcgctgccccaacattgattcttaagacaaaatatcatttttgatacctaaactcacctttttggattccaaaagccacaatttttagggcaaaaaaacgaggtgggaccaaaattgcaacaaatgtgaaaatagagggactatttttcgttagtgtaattaagcctagtttgttcgttgtctatttttctcactcttcaatttggtgtttatgaaaggtgtggtggtttgaacttctttttcttaatttatttttgacagataaaattctcagcaaa

SEQ ID NO: 29925 - DNA, 716 bp, Medicago truncatula
  Intron number 7 from transcript Medtr1g083290.1 (locus Med tr1g083290) derived from phytozome v7.0 (chr-ID MtChr1; po s 16315966 to 16316681)
tgagctctgtgcttgtatataacttgcctgagacggttagataatgtcttcctcacctaattttcatgttcattgccggtgtttatcttgttgcaatgttaaaggccttcattttgagattgagcaacgtagaaagaagtttatgtttcattgttgagtataatataatgttgctttctgacttcatatggcatgtatacattggtccatgcgaaggtaaagtgcactcggtcaataattagtttaacaaaagaacatagaaaaatgggtaaaatgttgctaatgagtaatatattgatgactgattttagttctttatgtagtccatgatgtgcagcattagttgttgttagggtgataggccttttaatagatttactcgaatttccaatcaccggaagcaaacaaattaccgtggtgtgatatggagagaagaacaccctatcgttgtcccaaaactctaactaactaggcacaaattatgatagattacttttaggctttaaataactgagcacaaattggttttcttttcaagaaacttgactacatgtagaagattgctggtatcaactttgaattacttgatctgggatgaataatctcgatgtcctcagccagcacataatttttcaataaaaaattagaccaatctcaaatgttttcatctttgtgtgttagatacgagaagctgacatctctcgactctcttttgc

SEQ ID NO: 29926 - DNA, 653 bp, Medicago truncatula
  Intron number 1 from transcript Medtr2g103320.1 (locus Med tr2g103320) derived from phytozome v7.0 (chr-ID MtChr2; po s 24023078 to 24023730)
tcatctggtgcagtttactcatttggcaggtgttggtaaagcaaaaagatcgttattgcagcttatttggcttttgtgttcttgagtattgttaagtgaacgtaacaaccgtctattcaataattctgttaatccagtccctcaattgttagataaggttaaattgttatctttggggtggctgaaagctaaaaaggttgtgtttgtttatggtacgcagagttggtggtcagacccttttgcttgtttgggctttggctaactagtgtaacctcagtttattgtatacttaaaattttgtaacttttagtggtatcctagacacaccttgtgtttggaaaccgctgtttggtgtgttatataatttcattttgatttcttaaaaaaaaaaaaaaaaagtcatttaaaagttttgggcagtgaagccaataaaagtaacacttgctcttcatctttagtattatcccctgtattttttgtcaagtttctttcaacactgtcacttaatttatgaagcaagcgtcattcgaattgtgcttgctgctttttttttttttttttttttttgtatttctcattttgaatctttcatctcacttgatttttctttttctaaagcacaatcaagatcttgtttcatcgaatagtcttgc

SEQ ID NO: 29927 - DNA, 289 bp, Medicago truncatula
  Intron number 2 from transcript Medtr4g005420.1 (locus Med tr4g005420) derived from phytozome v7.0 (chr-ID MtChr4; po s 223440 to 223728 reverse strand)
gctatttcacaattactgtgttagttggttttgttttatattattctttactatagttaaattttcaattagctcatttatggaaatatctccgttgatttgcttgatggactgtttgccgaaaggaattaatattttgattttctttcttggcattttcccctcagattttagtttgtgaactgaactgcttcattatataggaaaatgcattatatatttagaaatttgattggttgcactaaatgtcttctccatattcttctcttgattctgtgtagtctatcca

SEQ ID NO: 29928 - DNA, 849 bp, Medicago truncatula
  Intron number 1 from transcript Medtr4g005420.1 (locus Med tr4g005420) derived from phytozome v7.0 (chr-ID MtChr4; po s 223799 to 224647 reverse strand)
aagatccaaatgttttgatttagctcgttgaagctccaatccttcatcgatctggtttttccgatcttgttgaagctccaatttccttaatcggcaatcgattcatcgaatctccaatcgagcaccttcagatctgaaactacccgcttaggttattccggtcttatttaattgattttttgattttatgatctacttgaattgattttttgtttaatctgtgaaaggaaaatatcaagttataggttatgtgaattgatttggagctgtataacaaaacaaatctcaggtatacactcattaattttcttttcataatgttcataattgtaggccttctttggtcaaagctggtaattggaggcctaattcatgaaacacacaaatctcataatcgatagtggatgcaagatttaagagcaaaataattaactagattgagataattttggggttcattacatttaagaatttgtggatgaattcaagaagatttgattgattaatttctcaaactttcacaattacatgtgtgaacaatgatcatgtgcctttttagttgaaaactgtaatgttgatcgtttatttgatctaaggttaatattatatcctcccatttattacattatctcacgcctctcactttatatgtgtgtgtctgtgctcatttgttagacagactaccaacaaatttgaatgcacaatgttcatggcaaacaaaacttttatatgtgcaagaaaaagttatttcaaaaatgtccaaagatcatatgttattgtgtatgtttgtttaattgtgtttccttttttgtagatcatctgtaaatccacggttttggatccctatac

SEQ ID NO: 29929 - DNA, 661 bp, Medicago truncatula
  Intron number 3 from transcript Medtr2g085400.1 (locus Med tr2g085400) derived from phytozome v7.0 (chr-ID MtChr2; po s 19243866 to 19244526 reverse strand)
gcttggttatagttatcccatttaaggaatcacttgtatttattttaaatgcttagattagttattctaagccttagaagttaaaacatatttgttttgtatttaatttaaatatcggaaatgatgaacttcaattaattgttatgaatgatcaatacatacaataaatttcttgtattgtctcccatacaattgaacatagcagcagccatgctgctacctgctaacatctataatgtttcagatgtcggtcccacacttttttatccagattaacggcgtagcatgcaaagtattttttgagttttagtgtgcagattgcatttgcccattgtaccttgcgccaaaattgaaattttatattaagaataatacttggttttgttagttatcttaggttggtttcatgtttttcttcttctatgattattccttatatattgtgtgtattgatcattgtgatcgttgtttgagattattttattctatcctgtcaaatgtttctttttgtaatactaactagtcagattattaaattgtaacgtattcatggtatgtatcgacccaatgacaggacttatatttaccacttatatatacttttattactgttttcattattttaggaaattgctaagaagtctcttgaaaaagctgcaga

SEQ ID NO: 29930 - DNA, 935 bp, Medicago truncatula
  Intron number 1 from transcript Medtr2g121030.1 (locus Med tr2g121030) derived from phytozome v7.0 (chr-ID MtChr2; po s 28618821 to 28619755 reverse strand)
ttggttttggttctaaaaaaacataatgggtctgttaaatggttgttgcctcatgcctggttagcgttagcatttctagactctttgatcgttgtctatattgtgttttttctaacaagtcattgtctatatgtgttgagatccgcaggtttctagattttgggttcgcctccaatgcgtcgacgtcgtcttaacatttgtattagtactcgtgattgattttggattagttgtgatatcatcaacattctcttgttcgatgttggattgataggcttaacttgaatgagttcctttgcttattgttattgcaaggagttgttatttgttgaatcgtttcgtattaacggtcaatccattcactagtatgtacacatttgattagtgtttgttagaattaactagaggttggatccattgtgttgttttaaatgtttatgttatctgtttgggtaggcctacactttgtacatataatcgacattttatttatgtcataagttataatatggaagatgaagtattttttaacttttatactttgttgaattcttgtcgacaattttctatcagagaaagattttatcatgtgtgtaatttaaagtgtgacttttggtattttgaggtaagatgagtatattcaattatatgtaagtaccgctataaccttccaatggtggtataattcagttctgttaacagagttgtttactggatggttatatttatgccaaatttgtatcttgaaattacattggtacctttttgaatacttttaaaatacttcaattttgaaaatgcagaatttggttttgtgagacacgagtttgactaaaatcgaaaggacataatcgggaatgtggagaattaagagtggttcctcgaggagcctagcaaagaaagcagggaatgatgaggatgattttgaggagaaa

SEQ ID NO: 29931 - DNA, 211 bp, Medicago truncatula
  Intron number 1 from transcript Medtr1g086350.1 (locus Med tr1g086350) derived from phytozome v7.0 (chr-ID MtChr1; po s 17067035 to 17067245)
tctgttggaatcgtacggattacgtcagaattcaggtacgttaatttttatttttacttttttcttctttctgtttctctgatctctgcatttcgttcagaactcagaaaatagaaatcaatcaaatcacatcattatccagttaccgttagttaacggcgtttgttttgtaacaggcgtttggtttgggaagtgaagaggaagtgttgaa

SEQ ID NO: 29932 - DNA, 546 bp, Medicago truncatula
  Intron number 2 from transcript Medtr1g096670.1 (locus Med tr1g096670) derived from phytozome v7.0 (chr-ID MtChr1; po s 19818982 to 19819527 reverse strand)
gacccgtttataaggtgactttaaagttaaactatgttaattatatattaatgattatgtttattttaaaaaaaaaattaaattactatgacaattattacaccatcttcatgttccaaacaaatgtttctagttgtatttattaaagaaaaaaaagtcaagtttttgagaaataaattggcacaacttcttttttttgaaggaaaattggcacaacttctaataaatactttttatttttggtatattaacacgtgctttaagggaacttgttaacatttcactgctttttttaatggttgaggattattgctttggacaaactcatgctattttttttaggtttttttttttttttttaatggttctttacgtaagtatccatgatttcttcaaattcatataattttcccaaagtttgatattataattgcataaagtgtattaagttaagaaccatagtaaaagtatttacataaatgcacttaaatttgtccttttgttttacgacttcagggaatcttggcaacaggacaagaagttgct

SEQ ID NO: 29933 - DNA, 532 bp, Medicago truncatula
  Intron number 2 from transcript Medtr3g127790.1 (locus Med tr3g127790) derived from phytozome v7.0 (chr-ID MtChr3; po s 32472487 to 32473018)
tcttctgtgcttgttttgaggagttgattttgcaggtactttattgcgtaacccttattcataaatgcataattattgttgatatgtttcttttgttttttttttcttctttaaaaatgttattttgtgaattaaaatagtgtttttgggtggattacagtggtggatctggtatgacttacataaaatttcctcagataatgttgccatgttatggatttatgtgggttctatagtattagtagtattatttttgaagttaatatgatttggctgtgttgaattgtcgacaacctttaataatttcaaattcttccttttgtcacggctaattaatccgggaactatttacaattgactttggtttttttgatgggtttttcaccttcattcttgtcgcgttcaaagaaagaaggatttgtattttggggcaaagagcctgtgccgatgccagtccctctattttcattactttggtatgtagtgtgatactgactattgacgctgttttggaaatttgacagtttcaaca

SEQ ID NO: 29934 - DNA, 541 bp, Medicago truncatula
  Intron number 3 from transcript Medtr1g009100.1 (locus Med tr1g009100) derived from phytozome v7.0 (chr-ID MtChr1; po s 1068334 to 1068874)
ctttttgcttgaaggttttgaaggagacctgggtggtaagattcccgaatgtagcacataaagtaaagcataaccttttctctttgtttttataattaacctagaatgaaatagaatataaaggttgttccatcccatatctcccaattagaggtaaataagaaggggagtgttgaacaaaatgcaatgagatgtatttaaacaatccagattatagaatttattataattccatttcatatcattcaatattagtcaatacttaattgtaccataaataaaagagaaattagtattaataagtgaaaaaaagtggaaacctgttttctttcttttctaatgcaaaactataagcaaaaagagtcattttggtaatgagtgagggtatgcataaacttttttttgacaagtgagatattctttttctgtcatcaagattttaacataacactataaattaagctttgactgaaaagttaattagagctgaccactttcaatgttcttttttttttttgttaataggagaagctcggatcat

SEQ ID NO: 29935 - DNA, 863 bp, Medicago truncatula
  Intron number 1 from transcript Medtr2g120580.1 (locus Med tr2g120580) derived from phytozome v7.0 (chr-ID MtChr2; po s 28402076 to 28402938 reverse strand)
aatctgttgaagaagttgttggagtttgcactgaggtcggtcttttgcattattgtcaattctctgttttactagctaatttggttaattacaagttttttttgctcgttcttgagtttagtaattaattttgcttctatttaaattactttttgtttcttgagtttaactaatttgatagtatattttgtgagtagactgtcattttggtccttgaatatgcgagtagtttgttcatatagtctctgaatatatcaaaattacgaaaatataccaaaatatctattttgtttgtcattttggttatcacaagtgttcttcatttattaatttgatcgttgaatttcgaatgtatcttccgttagttgatttagtgcatgaaattactaacagaaaacactcttgtggagtttttgtaatttcaatatatttagggactacagtgacaccgcgtcacacatttaggaaccatggtaactgttcactctaattttaaattagttttaggaaagatgccatgtttgaagggcctcctttccatgactttgatgaacatagggagtaagcataagattaatgattaattgagtataaaactgcttcgtagctgcgctacactttcattgttagcattccttgtcaccctgctttggatgtgttcaactttattcactgttgatttttagacattgcatgtgttgtatccatgttcatgttgtgtctagttcgatttttagatgttcacagggtttctgacacgtcaccataccttttggtctctctccacacacacacatagtgatcatccataatcccctatttgtgtggtgcttgcagcagccttgcaatctctggttattaaa

SEQ ID NO: 29936 - DNA, 436 bp, Medicago truncatula
  Intron number 1 from transcript Medtr2g042420.1 (locus Med tr2g042420) derived from phytozome v7.0 (chr-ID MtChr2; po s 11886694 to 11887129)
cactttcaacacaaccattggacttggtcttagttgtaccactgaagaatcattcattactttcttaattttgtcctactgaaagaaaaaacgcgtctattactttcaccttttttaaattttaaagtcaaaaagaaacgcgactactgtgtcactcatcattatgactaaagccgaacgaagcttcgtggaacttactactaattatcacttgctatttcctcatattatgaatataggaaagaatagaacttagaattttaagagaacacactctaacaacgtagtttcatcttgctactgcatcataaacaggtaattaacctttgtctttttttgccattttcctcctgcttcacgacgtgttttttttttcgcactctcttcttaacttatatttataatatattcattccttggttttgcagcagttgta

SEQ ID NO: 29937 - DNA, 952 bp, Medicago truncatula
  Intron number 2 from transcript Medtr1g105810.1 (locus Med tr1g105810) derived from phytozome v7.0 (chr-ID MtChr1; po s 21899697 to 21900648 reverse strand)
ttcagctgataggttagtgttttacgccgtgtttgatttgggctctgtttggataaacaactaatttgctgctaacaacacaagcatttattattagggatgtaaaagctagttacatgttagtttaattagttaggagtaagtcagtttaattggctatatataagccttaatgtacgcactgcttgatgtaacaattctctcatgataaatattattttcatttcacttttcgatacttttctctcaattatgagttatatcaagaattataatatggtatcagagcctcgttccgatccaggacctttgagttgtggtccgcttccgctgcgcaactctgattagttagcagttacattaaggctcataagttgtttctataacacacttatttgtaagctatttctataacaggagacgatataaagtttttttttttgaagaacgagataaagttaaagttatgtttatgtataagttgtttttgttagctatcttggagaacttatgaaaataagctgaaaacaacttatgaacaatgtcataggctgtttccataagttctcgtacggacacacctcggattaggtgtgtccctgcgtcagacatgtgtcatgtccgaccgacaggacaccgacacatataattacactgaaatatatgattttctcaaattattagcggtgtcggtgtgttagtgtccgtgtcatgtcccgtgtccgtgtccgtatccgtgcatcataggttctcccccaacagtccacaaattttttgccaagctcaaataagccacaatccaaagaggccctagttgttgttggtggaactggaatctgttaacttcattatattatattttgatattgaaaattcggtgtataaatgtgtgtatatgtatgtgcatcgtggaaagtttattaatgttgttagtttgggtgttgtagggggt

SEQ ID NO: 29938 - DNA, 741 bp, Medicago truncatula
  Intron number 1 from transcript Medtr3g073870.1 (locus Med tr3g073870) derived from phytozome v7.0 (chr-ID MtChr3; po s 17218020 to 17218760 reverse strand)
gtttaagtgataatagtgtcaaggctgtgatcttggtaagcataccttttttttgtatgaaaatttttatttttatttttatttctatttctatttattttttattttttaattttaattcaattcaatattatttttttattttgtcaataagaccgttaaatctttactgtatagagagaataggtctagtgatataaaaaatagttatgaatataatagaaaaatgacaaatatttcatcaaattaagtagagagggatttcatgttttccctcattaatttttgtttttttagtagtagatctattggtatgtatgtttaaacaatctaaatgaccattaaaatggaactaagctatcacgaatactatttggaaaataaagaaacagttgaacacatttatatcttcctttgctaacgcaatagtttatgatttccttactttcattaccttgctaaaaaattatttcatgtgtacataaggataataaattttataaacgtaaataattttttttttttggtacaaaaaatttctaaacgtaaataattattaaggaaaaataaaagtataaattatgtttcttggtgttgactcaataattttttttaactaataggtctataaatattatttgggttttagtttttcctggatgctattcaaatcaatttacctaacttatatttttttacaaaaaaatctaactagctagatctcctgatttgttttaggat

SEQ ID NO: 29939 - DNA, 897 bp, Medicago truncatula
  Intron number 2 from transcript Medtr2g129880.1 (locus Med tr2g129880) derived from phytozome v7.0 (chr-ID MtChr2; po s 31520688 to 31521584 reverse strand)
tggtaatttccaaaacatccctatcattcatttcaaattcataattaatacatttttgaacttcaggttaatacttaatacgttctcgaaccatttgattttcagattatcttattatttttctaatacatcatttttttatttaactcaaatgtatttcataattgttaatttgcaatttacttttgcttttagataaagttttggttgcttgttaaaactaagctggtcatactcaattaggtatataatgtcttttattgatcttttgtttttgtctttctgaactgaacaacgttcaacaaggcatcttcatgctccaatgtgtatgtcaataaataaagtctttcttgatgttcactgtgacctaattatcttgatctcacctgtaagtttagtatatgggtagcagcagaagcttaatcagctccttctattgttttaacatcacgttcacatgatggacttcatgtttttaattatttttgagaggcttatccttatccttggttgagccataacacagaatgtcataaatcttcttttcatggtatttccatgtttttctactaaaacatttgaatttgcttctatacacactttttatctgtgttgtaactctttggaatgaactatcagtgtctttttttctgacaagttcaacatactgattaatgatcttctatctaaaaaaggttgtgtataataagctctgatggttagcttgcatgattttctgtactaattctgaaattcatgttttaattttttcttctgctatgtacaaaatgtgatgtgatgtgagttgccactgaggctgccgatgatgaaatttcactattctgtctttttcaatagtttgagatcatggattgtgaagtgcaattgagactagag

SEQ ID NO: 29940 - DNA, 588 bp, Medicago truncatula
  Intron number 1 from transcript Medtr3g110160.1 (locus Med tr3g110160) derived from phytozome v7.0 (chr-ID MtChr3; po s 27724790 to 27725377 reverse strand)
gacagaaaggttagacattaatagtatattttattttattattgcctatggaagtttgttccttttgataatggtgctgttttctttgcaggcactgttagatagaccattgaggataaatgttgaactcaagagcccgtggtgtatctgttgtagttcctcgattttcagataacgaacactttactagggtcaggcactaaattgaatttggttgacgaaatttatgtatgtcttcgaatcagatcaaatttgtgtattgactatcatgattttgaattagtagaaaatgaaatctagctagcatgttgttgaatcattttttacatgatagtagttatgcggacatttcattgtgtggatcaatgagaaattatcgacacaaatcgtgcttgaaactatgatgttaagtttagagtatcaacctttagcttttcagtccgagcaaataattaatgatcataaaaaaatagttgaatgtagtgtgtatgcttcattagcctaaaaatcactagttttcccctataatttcatagttcttttagactaaattttgactcattgaagtaaaagttgacctgtagaact

SEQ ID NO: 29941 - DNA, 637 bp, Medicago truncatula
  Intron number 1 from transcript Medtr1g086410.2 (locus Med tr1g086410) derived from phytozome v7.0 (chr-ID MtChr1; po s 17086826 to 17087462)
tttctagggtttctgcgttctcatttctcactcaggtactagatctattcccctcttttctttctcttctctgcttgttatcgataagattcagattcctttttaatatgagattcgattccttttctcctgttcaaatttctgaattttcaagtctgtaacggagtccgtaacggcgatttcctgtgatttttgttctcggcgtgaaaagatccaaaaacggtcacggtggctgctgataccgttttgtaacggccgcaatcccggcaccggtcctttttttgaaaccttggtagttattgatttgtacaaattaatttttttagggtttatttaaaagttgtagtcattttcatttttgaaaacttcgtattcggtcccaaggaatgattaatccgtggggttactgaaatatgtagtcattataactctagtgctgttaaaatacatcactatgtatgcatattgtggttctttggttttgattttatactgtagttattattgaagaagaaagcaaattaatgaattttagatagtagttttatgtcttctgttgttttataggcactagtgaagattatgattcagaaaacttttaaatttgttgctatacttgtttctaggttctgttgat

SEQ ID NO: 29942 - DNA, 1016 bp, Medicago truncatula
  Intron number 1 from transcript Medtr2g096540.1 (locus Med tr2g096540) derived from phytozome v7.0 (chr-ID MtChr2; po s 22390962 to 22391977 reverse strand)
tacaaggcgagctcattttatcgaaagatctaacagtttagatttcgtgacctttcaaatgtgctttagtttatttatgttttacttggcgctattgttagctcgcgctatcctttatgcgtgatgttccgacgacttttttcggctcggttttttgacatgatataaatgcttttttgtcagctcggattttctacgaatacgcaccatcgacttgttgtcgatcggattttctgcaaagatgtaccgtcgacttgttgtcagttcggattttctgcaaatacgctccgtcgacttgttgtcgatcggattttctgcgaagatgttcttttgtaaatgcaccgacgacttgttgtcaacatatatttttctgcactgatgaacttttgttaacgcactggcgacttgttgtcaacatggatttttctgcgccgatgaacttttgtaaacacaccggcgacttgttgccagcttagattttcttcctttgtttgatgatttttgtactttatttgttcattatcttgttcttttgttcaatcttacttaataaaaactaactacttgttgtcttctcttattaactcgcccatattttctacttcttttcctctcctgttcactatcccactaaattgggaagaactttcttaatcaattatcttgtgtttttagtctttttctttcttctattagactggaattgaatcctctattcaattttatcactcctcttaaatccgaaagcacttcttccctgatatgaactaactcgcccattttattctttgattttttgctcatctttacttgaaactgattatatttttactacctcaccgacttcaaacttttattttatattgaaactaactaactactccacttttcatgctctttgttgcgtaaagaagtaaatcgttgggtaatccctccactctttatatcgctatattaaaccaaataataattctttcatattgcaaagaaaaaatagaacctggacaatttttttt

SEQ ID NO: 29943 - DNA, 366 bp, Medicago truncatula
  Intron number 1 from transcript Medtr3g087010.1 (locus Med tr3g087010) derived from phytozome v7.0 (chr-ID MtChr3; po s 20585535 to 20585900)
aaagtaaacatttttctcttccactttaattttcttcttttaaattttctgagagacagtgatactaatgaccattttacacctgtatcagatttgatcttcgttttttgagattacaaaatatttatcaaattttttataaaagtaattaaaaaatttcttaaattgatatggtctttcttttaatgaaaaaaaaaaaaaaaaaagagtgttgtttagtacttgttacttgtgagagtgagactaaacatttagtattttgttttattgctgttgttatcatatatgtttggtgttataggtatttggctaatgtaatttagatggtgaattttaggagcaacaccaaagtcagttttggaactg

SEQ ID NO: 29944 - DNA, 616 bp, Medicago truncatula
  Intron number 3 from transcript Medtr3g100480.2 (locus Med tr3g100480) derived from phytozome v7.0 (chr-ID MtChr3; po s 24051294 to 24051909)
gacttattgaagaggtttttatctgccaactctgtgtctcatacatactcatgcacagtttcaataaaatcccctctttgccgtttgactgaaatattaacccctttgagacctcaggcattgtttttatgttttgaattttaaatattagctaagaaaatggttatgaagtgggactttgaatttgtagcaggattaatcacaagctaatgtgatcaaaccattcaaaagtgatattgaatcgggataaaacacgtctattgctgtaaacaaagcatgtttaaagggatgtgcagacttttttttttgcataattttgttctttatctatttggtctgggagttcggacagattttgttggatattttacttccaatgctgaatcttgtcattacattgcttgcttgtttctggagaacttttttctttcttaatttgaatattttttttaagttataactgatgagtattctaacccacacagacataaaaccttttcttttttatcttcctaaactgcatgggtgatggtggcattattcttgttatcccttagtattgaattttagtttaatttcagtgagcattttgtaattcaggttgcaaaagcacggg

SEQ ID NO: 29945 - DNA, 445 bp, Medicago truncatula
  Intron number 1 from transcript Medtr3g068050.1 (locus Med tr3g068050) derived from phytozome v7.0 (chr-ID MtChr3; po s 15761033 to 15761477 reverse strand)
ttcggttagttctttctcatctcttattttatttattcttttcttcttacttttcttttttaatattttacttttttcctttctttttcggaagaactgaatcaaaaacatatttttatgtatgtgtggtaaagtagttttaagtacaattgatctggctggtaggaatggttgagtcgcaacggttgtagagagtgctccggtgatcggtaactgtttctggtgaggcggcgacgtgtcttctgtggtagaacgaagggtgcctgcaggcacgctaacatttcgatgatcaagtcagtatggaaactaagatagaaagtgtatgaagttttgtggaaagtgttgtgtaccttgagggtgaagaaagttcacccttatataggcgcgcttatggaataaccgtctccgggttatgcggcgtatgattaagagccgggaaggacac

SEQ ID NO: 29946 - DNA, 908 bp, Medicago truncatula
  Intron number 1 from transcript Medtr3g105450.1 (locus Med tr3g105450) derived from phytozome v7.0 (chr-ID MtChr3; po s 26403642 to 26404549)
tgcaaatacaattccgatctctgcttccttcatcggtactctctctctccctccctctctctctctctctctctctctctctctctctctcttcaaatcttcatttatgattattactgttgcttctgagttctgattccaacttaaacatatcttcatttgttcaatacgaacgaacgccaaattaatctttattctttatactttcagagctcagttcaagatttttcataaaatgcttagtatatttggtcatttaaatttgttgttgatgattcatgattctcggttcatagatttttagctgaatgtattgctaatatagcgtctctttggattgacttatttaagcttatccactgacataagtcttgtaagactgtttggaaggacttattaaaacaacttacgacgttgttcctaagctattttcagcttactttcatggattgccaagatagcttatggaaacagtttatagcttatacgaaaacaatttaaccttattttatagcttacttaatttagaaaagaaaaataagccctccaaaatcctccatccaaacatactcttagaaaagataccaagtgcttaataagatttgaaacattttcatatgataaaggaatgttagcactttcttacatttaacaaactactactactgcctgtgttcatacaaaaaagtactgtgactgttgggagaaacctatatgtcaagatacaaatgtttccttatgatactctacatactacatagggaatacatgttctttagtattgcaattgttagttatataatcaaattattttagtggctatgacaaaataatttgtgttatttggagattgactcaattctttccaccaatctttgatcacatgtacaaagttattggataagtga

SEQ ID NO: 29947 - DNA, 799 bp, Medicago truncatula
  Intron number 3 from transcript Medtr3g008920.1 (locus Med tr3g008920) derived from phytozome v7.0 (chr-ID MtChr3; po s 1183383 to 1184181 reverse strand)
acagctaagtggccaaactcctgttttctccaaaggtattttttataatttcttctctattttatgtttttttttttctttctattatttgattttatattcctattttgtttaacatgtaatttgatatcaatttgaaaaacctagtagacatgttctgtacattttttttattagaattattttttatattcttattgcggagtctaaaaaacataattattctgtatcaatatttgcttaagttattatttgttagttttttaggttctaatggaaaacttatacatatattttcgtaagcaaagaacattaccttattttaattgacaaattcccataaagaaaaaattacttcataccaggacttagtgtcaaagataaactgtgttgtaacaattttgatcgacaaaataccagtgttgtcaaatagtggatatggccaatttgtgtagaatgacaatgtcatgttggcttgaaatggagtttttgaccttctgctatggtccgtcttctgcattccgttactttgaaattcaaggcttgaaatagagtttttggccttctgccatggtctgccttctgcatcgttacactttgaaatatataattcaaggctttgagttaaattttcattatttaggactcgcagactagcttaaatatgtcagttgtgtccatgacatagtttacatgtgtattggatattttgcgttgtggttgtgtcctgattggttcttctttcgctcttgtgcttattacagctaggtacaccgtccgttcctttggtattagaagg

SEQ ID NO: 29948 - DNA, 871 bp, Medicago truncatula
  Intron number 1 from transcript Medtr4g012900.1 (locus Med tr4g012900) derived from phytozome v7.0 (chr-ID MtChr4; po s 2385261 to 2386131)
ttgtgccatcagaacaccaggtttatttctatctgatttttttttttttcaataatttgttctttgtttgagtttgattaatgggttggagttatttaattgtttggaacattttatttgctagttttaattctttgtccttttgttttcattctatgatgcaaagttattttcactttttatatgatgcatagatcctaaaattgatgctgttatactctttggtttgattgagtaattgttgacatgattgataccaattcaacaacaaaacaatctatttcctttttaagcaacttttttgtttggttttgtttttggccatttcaacaacaacactttttcctattgcaaatttttctcttttccttccatgtcagtggtggaatatgttaactgttttgagaattttcttttcatatgtaagaattcgagaggatatgagttaaactaattgattttgttgttgtttaatggagtgaagtttgttgagtggttttctgattgttgtatatacattaaggatctgtttggattgaattatttgagcttatttagtgatataaacacttgtaagattgtttggagagcttatgaatactgctttgacaagtccataaactgttttcagcttatataaaaatagtttggcttcattttattctttgttatagaaataacttatacataagcacttatacgataaacgcatatgctatagctataagcttttaattaagttgtttatccaaacatgaactaaataaattaagagaactgataaatatttcggtatatttgatgagagattgtcttgttctgtataaatgttgcaggaggtagatttggaacctgttgagtctcaagttca

SEQ ID NO: 29949 - DNA, 494 bp, Medicago truncatula
  Intron number 1 from transcript Medtr1g009290.1 (locus Med tr1g009290) derived from phytozome v7.0 (chr-ID MtChr1; po s 1185518 to 1186011 reverse strand)
acttcctataggtaatcaactatcgcatacatatttccttccctttttttgagttcataatagtaggaagagggacgacaatagatagagtcgagataggtactgtaaaaatgacttgtattattgtatataatcaaactgacttttgtaactttaatgtttgtatctttgaccactagatacttttatacatgcatccaaacttattagtctcattttagttaacttaaatatggtctgtcttgatacatttcattgacaaactagtagaatattaatatcattaatggtaaaatagtagcaaagaaaacatattgattaattattgatgttacccctccctgagagtccataaaatcatatctgctactatttcaatagaatttctgatgagggttaaaacatcaaattagtttatgcacttcacttttctttcacattgttgacttcaatgttttacagggaactctcaagaaaagctaagaaagcaaaca

SEQ ID NO: 29950 - DNA, 269 bp, Medicago truncatula
  Intron number 1 from transcript Medtr3g138130.1 (locus Med tr3g138130) derived from phytozome v7.0 (chr-ID MtChr3; po s 35241961 to 35242229)
cgtaagtttctctctgagaatgtgatttcaatttacagcgattcattgttctataatcttcgtaaatttctgttatgcatgacgaattttccatttgatcgaaacatgaatttatcatattcttaattgtggtttatacatttctaattttattgtaatttttgctattttttgtttgattaattacctcgtgtttaatctttttttttttttgtttctgtggcgtttttgcagaaataaagcagcgattgttaaaattggtgctgttc

SEQ ID NO: 29951 - DNA, 747 bp, Medicago truncatula
  Intron number 2 from transcript Medtr3g028880.1 (locus Med tr3g028880) derived from phytozome v7.0 (chr-ID MtChr3; po s 7508931 to 7509677 reverse strand)
atccaggtgcagaacttgaagaagccatttgattgaatgtagatgaaaagggtttctagggtttgagagtttcttagcagagaaggtttgagatgaaatgaaagtgtgagttgtgtagtgagtagtgtgtgtttgtttaagtgtttttatcaaaacgtttgcaattcaaaggggacaaacaaacatagcattaatgacaaatagggggcgcgtgatagtaagttcaaaagcatataaaacatcattgccctttttgttatactccaatacaaatagaccacgtcagaaacttttcagaaaactaacctttggttaatgggacagctgttacaaaaagtaactgccaacgatcccactaaccttgctattcagaagcaaagaataccacttctgaagttttagtgctgacgtcatcttcataagcacattttcctcagaacctcagttaagagcttctgatggaccagttgcttctgaacagacttcagaaccaaacttcttattcagaggcaagacattttttttaatcagacacaaaatgcatgttcaaatttttctttataaaatcaaatttttcaacagataaaggtttagtaaatatatcagctcattgatgctcagtatcaatgaattgtatatcaaaaattcctttttgaacatagtctctgataaagtggtgtttgatctcaatatgcttggctctagaatgtagaattggattctttgacaaacaaatagcagcagtat

SEQ ID NO: 29952 - DNA, 1014 bp, Medicago truncatula
  Intron number 2 from transcript Medtr3g008700.1 (locus Med tr3g008700) derived from phytozome v7.0 (chr-ID MtChr3; po s 1092716 to 1093729)
atttgattcatttggctgtttttggtattctcggggtaatattctatcctccgaacttcaatgataaaatatgcgagtagttaatcacttttggtttagtattatttccatataaccattacttgagttacgatatttgagtattttcagttcagttgtggaaaatttgtctatcgtgttttgtgaattttgaacatacttaacttgaaataacaccagttcactatagtactcatatacacatgatataactagtttcttgaatgagtagataatagagaaatttgcaagttcggggggcattttgcacataagtgcaaaacttcagggggtatttgcaaaacgtcacgttgactaacagaaaaatttgacggagggggtaaattgattaacgttgtgcaatttcaggggggtaattgaagttttgttaatatcagggggtaattgacgaaacttacaatttcaggggggtaattgcctatttactctaaactttatgtctctaatacataatacattggttttgaaactgaaataagagatgatgtaatgatgtacaatgttagttctgttgatttgaaatcttattgattttcattttctgtttataaaactggtcttataagggacttgttcactttcatcgtcttccatgatctaggtattaaatttcaattaattgctcaacttttacctgcagtagtcgcatttattccattgtataaagtatgaacaacagtctctatttgacgtatgttctgtatttttcaaccttaggaatctgctcaaaactgtcatgaacacaatttcaatttaactacactatagaatataatgattaattgtatgaatcttgtcgcactcatttatttttgggtaatataatgaactaatgaattctgctcatactattatactaggatttcagttttcagcatgatactaattcacttgttcttgttttgctattataatgcaggtattaacaagatatactctggacaagttattcgg

SEQ ID NO: 29953 - DNA, 705 bp, Medicago truncatula
  Intron number 1 from transcript Medtr1g118170.1 (locus Med tr1g118170) derived from phytozome v7.0 (chr-ID MtChr1; po s 25614425 to 25615129 reverse strand)
gaggttagtttaggaaatgggattagttaggattttgatttggcttatagtttcatgatagttaggttaggattccttatagctgcttcagttgcagcctatacattccagcagaatgtgaaaggatcaaaatcaggtagttgtgctaatttaccagttttgaaaaaaattctctacttgtttcttattttatggctaatcttatataattaaattgaccctttatgttcatcttcattaagaacatgatcaaccaaggattaggaggaaaaatcaagatgaggtaacgaaacagaagcagtccacttgttctactaatggtctcaaccagaatgaggtaaagtataattagataatagacaaacgacccaatttagcccttcacaaaaattaataatcaaattagtccctgcatttgcacacggaggactagttagccatctgtttgatgatcagtcagagactaatttatctcctatatggaaatgttacggactaatttgggaattgttttttttcctaaattggccgcgaacaaattgtgagggaccaaaggtctttattctagttaacattatcaatttttttattttattttgttttgtatttatggtaatgaattatgatgatttctcttgtatttttgcaatatgtttcgacgttgttgtagagggaagaagaagagctagaagaggaggttaagtt

SEQ ID NO: 29954 - DNA, 531 bp, Medicago truncatula
  Intron number 1 from transcript Medtr3g143480.1 (locus Med tr3g143480) derived from phytozome v7.0 (chr-ID MtChr3; po s 37015226 to 37015756)
ttttagaggttactattttccttccatttttatttaactaataaattttgatgattatgtctcctttgcctataacctagatattaatgcatcaatttaatgtaatgcaatgcaattgaatgcatgtcattagtgaaaattattatggaacattataatcaatatttgctttatatgcacatatatgcaatgcaatagtaggaaaaaaactgtttttagtttttatgtttttttttcttaccttgtttgtcaatgcattgatttagtattttggtgacaagtttttcatttgagaaaatgaaatattttatttgaatcggtttgaagattggcatgaaattacatggaaattttttattaccttgagagaagtatggagagacaatgagagatggaggaagacagctacaaaacaaaaaaagcaaaatgcaattgaatttgttgtttgatagttgataatgtttttgctggatcaattgttttttcttacatggttgtctgtttttgtgtcactaggtgtcagcaggcatt

SEQ ID NO: 29955 - DNA, 654 bp, Medicago truncatula
  Intron number 3 from transcript Medtr3g143430.1 (locus Med tr3g143430) derived from phytozome v7.0 (chr-ID MtChr3; po s 36990826 to 36991479)
aattcaaaacgctgttgctgcaacgattggagagggtacataactatcctttatcatacacaacaaaatatatagtactcttttttttatgcatgcatgcataacatttattttcaaagagtttaacttaaagtggatattgaacattaacttcatataatttattggttcaattttgtattattattaattgatttttttttagttaatgcaactaatactaacgcaaactacttaatgttgtgtttggtaacgacgagaagttagcttataatttgttgaattagcttataagcttgttggatcaaaacatgacgtgtttggtaacaagtttttctcatgagcttataactttttgtgataagctatttcaagtagcttttgagcttgtagcttatagcttttcatattttcttccatttttaacctttaatattattttttataaaaataaattgcccactaaaaaggaaaaactgcccacgttctaactctcttttttacgttgattttttttttttttaattatagttcttttttttaaggatgaattctacaagggtaacaaaagattcctgcactagtatttaaattttgaagattttgtttttgatcaatattttaggagaatctttttttttgtagatagacgaa

SEQ ID NO: 29956 - DNA, 788 bp, Medicago truncatula
  Intron number 2 from transcript Medtr2g077110.1 (locus Med tr2g077110) derived from phytozome v7.0 (chr-ID MtChr2; po s 17626760 to 17627547)
tcccaaagaaggttcttttcctatttttttatttaatgggattctgtttaatttttcttatatttctttggtttagcattttatagctgttaaattgatgttgtcgatcgtgggtcgcagaaaataacagtttattccactgtatcttttatttgacaatattttgtactaaatagtgtatcataaccattgcggtggagggattaacctttgcaattgcgcgtagaggtacctggttcgcaaaaaaaaagagtgtatcatagaatgatagtgatttatttaataaaacagtgtttcttggacaattttatattatgcatcgttagtacggaattttgcagtttctttctgtaagattttggttttttgaaataactaatttgagtgtttctaattggtatatttgattatttgtactgatcatgggaacctaggaaggtcttaccaaagatttattggtccgctggcttaagtattgcaattgctcagtttaataacatgtattgtagctgataatctctgtttgaaatcattatttcaatgttcaatcttttagtatccattgttttaatgcatgtaattcaaatatattcttcattttatagattgtcattgtttgcttaaagaaacagtgcttgtatagagtgaataacttcagtttcgagcataacacagttaaagttggtatttccttctgaatgttactggaattcatttcattggcttagttttaattttaaagagtcctaagtttcttattttctggaaatctagagagaaaactgaag

SEQ ID NO: 29957 - DNA, 874 bp, Medicago truncatula
  Intron number 2 from transcript Medtr2g037370.1 (locus Med tr2g037370) derived from phytozome v7.0 (chr-ID MtChr2; po s 10136003 to 10136876 reverse strand)
ttgctttgtctcaacctgactgttcattcgatgtaagcttattaatcctacattgtgccatgttttatcaatactctatgtttgatatcattcatgtatctccctttatgacttatcttggattacgttaaaggctgctgtcgtggtggatatacgttttctctatgttgtataaatgaagaaacacatacagatatagaaattaaaggctgatttcttgcttaggaaaggaggaagggcgaacaggttgaaacagatttatggggcattttaaagagtttatctggcctcgccctcatctcatgacttaagcactcgtgtaaatgttttaaaaatcttatcttaataagcgctttgagaagcttatggaaacaattaatgcaaaacgtactcgcatcttctcttcaattaaaccatccctaaattctaattttatggtgaaaacaaatgttgagaatacaaataagttggcaacataagctctggtatgataatttttaaccgaataaacacactttttaaattgtttatctaagcactcctttagaggcttggagggttggacctctaaagctctgcatactaaacaagttttggatattccatatatccttatgtataatctttttaatatcttcagatcattttacataaatatttgtctttaaataatgaccgtataacattgaaagttattttttttcgatttgcgaggggttggggtattggtagactggtggtggtttaagttgtttgattttttatgcaattgaagtttgaaacgtctgcatgcagccgtgtgtatgttttaaagttgatttgtatttatttctattcaggccatagaccttgcagctgttactacagttttact

SEQ ID NO: 29958 - DNA, 454 bp, Medicago truncatula
  Intron number 1 from transcript Medtr3g124660.1 (locus Med tr3g124660) derived from phytozome v7.0 (chr-ID MtChr3; po s 31683914 to 31684367)
atccattgcacctgcccctgctcctacaagcggtaaatattcttaattttctctcatttaatttttagataccattgttgatgtttgatcaatttttatttgattagttaatatattcatataacaaatatttttctaatgattacaaaacaaatgtgaaaatcgtttggaagaacttgagttttttttttttttgttacagaagaacatgactttgatggaacaatctttaaccaaattttacttacctttgtcttaattatggattgccaagtccccttccccaaaactaaagggttgtggccaaaaaattcatcatatttaattttcaattttttatttttccatgctatattctttatgagcattattgaaaggagagtatgtagtgagtattgctaatgaattgttgttgtttataatatgcaggcaccaaaattgaccaagcgattgc

SEQ ID NO: 29959 - DNA, 924 bp, Medicago truncatula
  Intron number 1 from transcript Medtr2g126350.1 (locus Med tr2g126350) derived from phytozome v7.0 (chr-ID MtChr2; po s 30590954 to 30591877 reverse strand)
acggaagttcaaatcaaccttctcgtgtcgagaaagtttgaatcataagatcatattatttttataagataagtgctaaacatggtgtgttttgactgatccaagactcaatttggatgcatccttgatccaaattaagtgttaatgtgttcccgcaacactagataatttttgtgatcaaatcactgtcttttgattaaaattagacggtgatccacaaatcatatcacgatacctataatagacggtacattttctacttttgtttaaacctttcactctcctaaaaccataccttagttgagtaccatcccgtggagtagcaatgccatcttccgccgtaaccaactagctccggccgtcgtcatcagcctactatggatcatgatgttattaatattatgcagttttgttgataaatcatatcagtttgattgttgttttgcggtaggtatatacaaaaattgagaaaaaatgcttttacccaaaggagatcattatttgtagaatatataatgcactaaattgtttataaacacttcatattctcgggaatgataaagtggaacatatacatgcactatttaaaattactgaaaggcttggttagtgaaatttgcatgagaataattatcgatttctaatatagtgtacagaacaaaagtctttcaaaattgggacctaacggctgcttccttcatgcaattgattaacattcccaatcagtcttcagccatagaaaaggacaaccaccaaccaattattatctcattttccatttattttatggtctctgttaattattcctcactaagattgaaagttctatgcagtttatatatttatgatatctattcttcttatattatattatgcttttctaagggtgaagttgtttttttcttttgctgacaaaaggattag

SEQ ID NO: 29960 - DNA, 792 bp, Medicago truncatula
  Intron number 1 from transcript Medtr4g021890.1 (locus Med tr4g021890) derived from phytozome v7.0 (chr-ID MtChr4; po s 4295641 to 4296432 reverse strand)
ttgtgttggttttctttttttaattaataaaataaaacaaataattaaataaatgccacggaaggagtgtgtatggctggtacaagaaaaagggtgttcatgtataatattattctaaatttaattcatttgaagttaatgtttactattaaacaactcacccttataatataataacagtgtaacttgtttggcttgttgttctttttactatgaaacttgttttcttgtcagtcttgtgctaagatattcttattattttattttggctgcttaaaaaaattacaataaatgtagaagcatagtttttgcttatttcatttatttaatgttataacatctttattcatgctcgttaatttacgatcattaaagaaaattattttcttctactaagcatgactagtgattctattaacattatctccaacactacaatgattccttaaagttgttccttgtcttcaacaaagtctttgattgtattagtttactatatcattgtagcatttacaaaccacacaattccatgaattgtttcaaatgacatttgcagttttgtattggactttgatatgatggtaaaatgcattgaatgcggtcgtaatttcggttatgatgccatgcacaaacatctaaaatattgatataaagaatccataaacataatcttaattctctctggtgatatatttctttatcgcaattcttccactacttactaacttcactatgattttatttgcataatctacaggttccaaaaatattgcattggaaaattcaacttca

SEQ ID NO: 29961 - DNA, 970 bp, Medicago truncatula
  Intron number 1 from transcript Medtr3g122660.2 (locus Med tr3g122660) derived from phytozome v7.0 (chr-ID MtChr3; po s 30550718 to 30551687 reverse strand)
caactataaaggtactatttctattattattattattattttattgtacaagctgatgtttttgtaatattgttttgtgtttaattggttatttaattttctgtaagtattctcaattttcaatttttcttgtgtgcaaattcatatttttttagtgtaaactttgatttaattaattgtgaatattgggttatattgaggctgagttgttgttaattaagagtatatatttgacacatgacaaaaacagggggaaaaagcttactagtaattataaatttagaagtttttggactgcaaattttggaaaggatcaaggctcaagggtgtactgatagatttgtagattttgctgatttaataaataaagataaaaattaaggggatggaaaacaaaatttgtgtgcactaattaattgaagacattttgtttttaatatggtttgataaattttaactcatgagaaaaaatgtaaaaaatcatgtagatttttttacagagaagtgacatggattttttttttggcttttgcaccggtttccgacccactggtgagcgactaatccggctcatgcgtagaggcatgggcacttgccaagcgttgttccccccgggaatcgaacccggtattccccggatacgtccttggaaggagctccttgccattggagcccaagcaacttggtttaaagtgacatggattttgttagctgaaaatcttaggaatttatggcaccttgaaatagagtcttatagcagtatggaaattactaggctaagccataaacttggtacaattattcaatttattttcaatttttatctgccattatgattttatattattgagtttttttatcttggttgtgttgtaatttgaaaaacaaaattagtgtacttgaaagtaaatctaagctctagaacttcaaaataactttgatctgttttgagcagttgctgctgttgctg

SEQ ID NO: 29962 - DNA, 536 bp, Medicago truncatula
  Intron number 1 from transcript Medtr3g013690.1 (locus Med tr3g013690) derived from phytozome v7.0 (chr-ID MtChr3; po s 2665207 to 2665742 reverse strand)
ttggagctgtggtaatgcgaggagttattctgccgttggcttctttcttcaacattttcgtggtttatatgaccgatttcttgtttccatgatctgttttcttggctggttcgactttggtttgtttttaagcttgttcagtttgcgccactattccaccttttcactgacttaggaatttgtcatgtcgataatggtgggccgatcgcttttgctttgaggtaggaagttagtctctagttacgaggttttgggtagattaaggtgtcttccctagtggttcgagagtagggtgccttaatgatttgattcgagagtctaatgggctgatcgttggttattattttgttctgctggtatgtggtggtttagctgggtttttgttttggctttggctttgggtttggaagttttgttttttattggtgtgtgttggtgacaaccttaagtgaagttgtgtctttattcgtgtttatgatgtatggtgtgtatgtattttcttttaggtgttccgcctatatatcgcgtcttttgat

SEQ ID NO: 29963 - DNA, 1017 bp, Medicago truncatula
  Intron number 1 from transcript Medtr3g086470.1 (locus Med tr3g086470) derived from phytozome v7.0 (chr-ID MtChr3; po s 20220775 to 20221791 reverse strand)
agaatctgtgattttaggtactaacttcattgcatgcttttcattttatttttatataatcaaaatcaatttcactatttaactacattactctctcagctcaggattttcactaacttcgagttttgctcattcatttttcatgcttatatcttttgttcattaatttatttatttatttactcatattttaggttttcagtgaaatttattttttattctagttttgtttaataatgtgatgtcaagcctatgtttggctgctcttgagttgagttgattttgtctccagatttgattccaacttgaagctagaatttttagttttttaatctaaacgtgatttttacttttaaatatattgttcaactcaaatagattcaaacataaaccacattatattcaatacactaagtaaaatcaatctttgtcacaacagaaccaaacatgcattacaaggagcgatttttcctggaaaacaagcatgctaatgagaagtgaattcctaaaataatatgttaaattgagtttatttcttccttggcagtaactggttgatctgttttctgaaataaaaggaacatcggatatcttttctttttttaaattttgaatttacattattttccatttttatttgtcacagttattgtaaatacacactgatgcttgttttgttgtctggtcatattttattttgaaaaaggtttggtaagtgaataagttcagcatctgcttgttttctgtttttataaatggtagcagtcatttcatacttgtttcatatcttatagcatgtgcttggccttacataagatttgtgcggttatgttatatttactttttgttaatagatttgtggtttacttagaattatttatgaaccaaagcttggtcatcactatcattagtatgttttactgttggatactaaaatcattatgtaaagacatattttggttttgtttgtgactttcttttttatggttgattacaggaattgccttaaaacctatc

SEQ ID NO: 29964 - DNA, 515 bp, Medicago truncatula
  Intron number 1 from transcript Medtr3g044420.1 (locus Med tr3g044420) derived from phytozome v7.0 (chr-ID MtChr3; po s 12389670 to 12390184 reverse strand)
aatactaattggagattctttgtaaaaaatattaggtaatttaatgtttatcaatttcaaatttttttttcttcatgttttttgttgctaaatttcttatgtgaattagaaaatactgtatctaaattggagttgtgaaacccaattgctaaattagtgttgtgaaaataattgaggtttttttttttggttaaaaaaaaattgggtttacacgtgagtaaaaaattggtgagaaagtttctaaaatcttaattttttttttcatgtgtattttgattatttttaaggtttattaattggatttatattgttgagttcattagatgataccttaagattcttcaacattttctttaaagttgtttgaacgaaagtatactgtatgtacaaaatctcagaatgattgcattcaattgtttcattttctcaaattattattgatgtcaacgtattttcttaaattattatcggcgtcaacgtgttagtgttgtatcgtgtctgtgttgtacagggta

SEQ ID NO: 29965 - DNA, 380 bp, Medicago truncatula
  Intron number 2 from transcript Medtr1g086990.1 (locus Med tr1g086990) derived from phytozome v7.0 (chr-ID MtChr1; po s 17392256 to 17392635 reverse strand)
aaccacttaaggtgtacctagcaaggtacagagaggtaattttactttctttgttttgccatttaagttaatgcttggttttggatgatttatgtacaatgttattatgttttgaagttaatgtttcattaagttttcttcaaaattttgataatgttctttacggcttaatatttatctgaccgttttttctttctttctttcttcttccttcgtgattttgaaatgttgacggatatcacagttagaggttagttaatcctcccctctgattgactgtctttgtttttttacgttggattatcttgccaatggaatgctaacgtttgtgagccatggtttctgatagggtgacagtaaaggatctgttagaaacagtg

SEQ ID NO: 29966 - DNA, 751 bp, Medicago truncatula
  Intron number 2 from transcript Medtr2g010520.1 (locus Med tr2g010520) derived from phytozome v7.0 (chr-ID MtChr2; po s 2581380 to 2582130)
tctactgggagcaatctggaaatccaactggccatgtgagtagttgtatatttctagactgaattgtcaatttagtgttgaaaataccttaaattcaaaattatccattatgtagcaccgacacgtctgatcaaaggcgttctggtgtttgataagtatactgagactgacccatgtgattacattcaattttgaaatttcatttatgctagggattgaattgcctgacgtctacaatttcagagactaacttggcgataaaccatttgaagtttttaataacaaagttttaaacttttcttgatttttatcgatggagtaggcttatgtgtgtatatattgattgatgaagactggaatgtgaggcactgttatataatggtcgtatgtggattgtttattgatgctatgaatgaactgtaatgttgaattgttccattaagcctcatgtagaattcaagatgataaattccgtggaccattttattggaattgatatatgtagtttatctgtggtgggctggtggctcatgttttttatgggagccaatttgaaaaaccgaaatattctgggccagaacattcttggttggaacaatctttgggcagaatttacttatcttcctaccgaactctagcctggattactcgggccgcttatccctagattttatgcattttattctatatactaaaaaatattgattcataattttataaaatctttcctggcagccagttgtattcctac

SEQ ID NO: 29967 - DNA, 819 bp, Medicago truncatula
  Intron number 1 from transcript Medtr2g026560.1 (locus Med tr2g026560) derived from phytozome v7.0 (chr-ID MtChr2; po s 7283384 to 7284202 reverse strand)
acgtatctccggagctttatacgaatttatctcaagtcaacaacaacataaaatctttatcttctcatttgtgattgtttcattttatcttttctcactctttattagattatcttgtattgttgtttctgtttagcttctgaatgaaaactaatgattaattagtgattttgatgttattgtttgtgtttagagataatggttcttctgaattaattaattagttgaatttcaaaaactgcattgtcttcttgcttttgtaacaactgcataaccaattcttgctatattttaatgtgaaacgtagattattaattatgtttatggcaccggtagttcttaatgaggttaacactccctttgaaggtggtgatggctttctctcggaaagaattccgtctaaaattaatctagttaatacagcgaatcgaggagtcattccattaggtgattcaatggattgggttgtgtgtggggaacgaggaatctgcactacttttgttccttcattgcaattttgtttcagttgtgtggtgtagagtgtttaattggaagggcaaattttttgaaaatggagataaggattcggtggaggtggtggatatcaagcttttattgtagaaatggtgattgagtaaatcgaagttgtctcattgcctctgttatgaatggtgttgggatccttgtatgtgtatggttggttgagattgcggtttttggtttgatttggttggcgtttggtgttgttttactctgtattgtttcgggtatttggttgcagcaggttctgtattgtgtttctaccaggttcttttttca

SEQ ID NO: 29968 - DNA, 371 bp, Medicago truncatula
  Intron number 1 from transcript Medtr2g105050.1 (locus Med tr2g105050) derived from phytozome v7.0 (chr-ID MtChr2; po s 24949646 to 24950016)
agtcaattgatcataaaatacatcttcttgttgaatcttcaatcaacactcatttgattcaaacaatattttttctatatcttctttgagcttgtgatgctactgttttggtattctttcattgaatatatatgcacttgtaatagacttaattcttgtctacttctctgaaaagacttaagtgcaaacatcagtagatcaccattcataaaacttagcgtttattccataatgtttgttatcattaaaacattcatcaaaaagatttttggttcaacaaatatagggtttaattttgattctctcataatttatttttttatttctattgcttagtgaatactatcgaggaagtgaatcccactaagaat

SEQ ID NO: 29969 - DNA, 820 bp, Medicago truncatula
  Intron number 3 from transcript Medtr2g038400.1 (locus Med tr2g038400) derived from phytozome v7.0 (chr-ID MtChr2; po s 10728727 to 10729546 reverse strand)
cagtggagttgaaccccaattgtgggcaagatgtatcacccatcttaaacctatttcatttttactctgcatttcataccatgtgatttgcattcacattccatattctccttagttccttaactgggatttgtaggaagttaacataatgctttaatactgaaaatatgttttttttacaagaacactgaaatatggtaatcagcattgttcccttaaattcatttcaatgttaaaaggccaataactcatagcgttcttttggtggttaatttgttagagggagataaatttgttagtatctggatctcatgtttagtgttcttttggtgtcccaaccctactcactaggcaacgccttcagagatgagaatattatagtatgagtagtctgtccaaaactaattttagatattatatcaattttgacttttatctacaaacatttgtttgtatgaattgcaaggagtttgatatccttcaagtactaatgaatgggtaaattggagttggaagaactgttggttaaaaaaacttgacccaattagaagttgtgtataatgtcaatttggttgtaatttttacttaagattattttgtgtattgtggatggccttgaatgcataaagaaaattaagtcacatactgtaaattttggtatacttactcttcaaagatggttcacatttctgatcatatcttgtagctcatccttttcatttgcatgattttgtttatctatttgtgatatatcctaacatcgtataatttaatattaatactagatttgggtgttgagaaaggcatcaaactggaaggc

SEQ ID NO: 29970 - DNA, 638 bp, Medicago truncatula
  Intron number 3 from transcript Medtr1g007390.1 (locus Med tr1g007390) derived from phytozome v7.0 (chr-ID MtChr1; po s 413466 to 414103 reverse strand)
ttgtgacttctgagcttgtggccattaagaaggtgagtctattggaaattgttgctttgatttttggttattgcttagaattttcctttttattttctttatttgttgtaataattgtgattaggaagtgatcattttgagtttgttattgcattttaaataattacaaatactcttgggattaggcgtcctgagaataggcgtatcttagttgtacgacactcgtatgacacctgtgtaacacatgtctgacaacttagacaagtgtctcaaagaaacttagttttctttgcttttatatatatcttggatactctcggacacattttagtcgcatttaaggtaataatagtgatgatcaatgagagagttaaattaaagaccttaaatttgattacatcgtttttatcttttccgtagtagatggatggatgaagcttaaagactatcatatcttgtattacaatttttgtagtggatcaaatttctcaattagatgcatgttttaaattttgattgttaatttacatcttttggtcactgaacgtgtaaaaagtcctcaactttgtgatggtttataatagacatattcttgtgtaataggagaagaagaaaactcaacaaccacagctactata

SEQ ID NO: 29971 - DNA, 558 bp, Medicago truncatula
  Intron number 1 from transcript Medtr1g007390.1 (locus Med tr1g007390) derived from phytozome v7.0 (chr-ID MtChr1; po s 414239 to 414796 reverse strand)
aaaaatgtaacaaatatcttgtattataggtcacatttcactaatccctattatttttgttattgatgttgatgaataacaaatataatttttaccttaaaaaaacaaataaaagttttaatactaataataataatattattacgtaacattaaaaaaacacttaaaataataagaagagttgtgaatgaataaaaatgaggtgaaaatttgttataaggagaaagtgacaaactttactgcttttaaggacaacgaaatgcaactaatgtacgcaacgaagaaaattttgtcaaaccacgtcaccaacaaccttttaaaaacaaaacatgaaattccaataataaccttaaccatcttatctattctcttttatctccttctgttttgttcctcgatatatacgaaaccaactgaagcaacaaactcagaaagcaaaagttagttgtttgtttttatcgctttctctggaaaatcatcagttgtttttccattctcattgtttggtttttgatggaaaaaggttgttggaggaaagtatagaattggtaggaaaat

SEQ ID NO: 29972 - DNA, 704 bp, Medicago truncatula
  Intron number 2 from transcript Medtr3g104340.1 (locus Med tr3g104340) derived from phytozome v7.0 (chr-ID MtChr3; po s 25906977 to 25907680 reverse strand)
ccagagtcatctcgttagttttctgctctcttctgtcttgtattttctgtttgccatttttctaattagttttaattttttcttaattaaatacgatctattagaacgtaaaaacaatgcaacttgtgcacatcccatattaacaacgtgttgaataaaaattcacttcttaataatgcttcacgtgtgtgtgtgtgtttgtgtgtgtgtattccctgcttcgataataatgtcaaaactaatattagtgagttgatgtgatttgaatgagggtttgcttagttttaggcttgtaacttgaacaatctcacatagttgaggacttcttaaacacagtaaactgccaatatgttgagatcaccaggcttgaggcttcattttgattctgctagttccaaaaaaatatatatttcgtttcgactgaccagctttcggttctcacagttatactagtggttgagattagcttggtaattatcatgaatccattttcttttagctcaagcttatgggacaattagtgatatgacatggtatcctaatttcatcctttatctgtttttaactaaagtagctggtggtcccttggtaataaatcagtaattatgcctctactatagtcttgccgtgctttgttctgttctgctgctcatgtttcaactttacgtttgggaattgggatttgttaggttgctagactggat

SEQ ID NO: 29973 - DNA, 463 bp, Medicago truncatula
  Intron number 1 from transcript Medtr3g104340.1 (locus Med tr3g104340) derived from phytozome v7.0 (chr-ID MtChr3; po s 25907873 to 25908335 reverse strand)
ctactagctgtcggtaatcttcacaaaaagaaagtaaaagaccatcacccataagttttatcctttttgttttagatactcttctaggtagtaaaaagggatttttcggctaacattagccttatgtaccaaattgctatttgtttttgtgtctaggaattaattttccacttattgttagtgccttttctgtatggcctacaattggccttctcaatacttaaatttcccttccctatgtaagcacttgactctgtcttaaactaagatacattgctatacacaaaatcttgccttctcttttagtgtttttttaaatgatttatatcaaatttcaaacaatgtaacaaacactatcatttactaacataccaaagtttgtcgttccccccaaaatatatttttaactgttttgaaatattgaatgttgttgcagttatagaatcaactggtttcaatataa

SEQ ID NO: 29974 - DNA, 608 bp, Medicago truncatula
  Intron number 1 from transcript Medtr1g016990.1 (locus Med tr1g016990) derived from phytozome v7.0 (chr-ID MtChr1; po s 3466865 to 3467472 reverse strand)
tcctggtacacttcttcaacctccttatatcattcatttcttcattcttctttttctcaattataaaaaagctaactttgtttattcttcaattgtttgttcacaaagttttctccattttcatgtgagaatgcaaaaaaaattaaatttttaactcttattgttaatttagtattcatattctcatatgggtcttccttgttcttcatgattatgaactctacatttagtttaatctctattattggttctatctttaattatcttgatatatttctctgtctaatgaagatgataaaagtttatgaaataaaaaaatcatatttatttttttaatatttaatatttttctatctttgtttgttgtctctttatattttaatgtttcatatttaaatatttaatttcatgtttttgttgtatatggttggttttagatcattctttgattattatatcacttttcttgaatcatgttgttgagaaagaaacaaaaaggaaaaatagtaaactttagatgattcctcttttttgctaattgatttggcacgtagatttgcaaaagttgtatttgaatttttattccatagtttggtatttataaggta

SEQ ID NO: 29975 - DNA, 811 bp, Medicago truncatula
  Intron number 6 from transcript Medtr2g122660.1 (locus Med tr2g122660) derived from phytozome v7.0 (chr-ID MtChr2; po s 29529720 to 29530530)
tcggtgttggattaggttcatttgtcagcttcctggtatgtatagatattcatttttcctctactttgtattctttcttactccattgtgtttttcttatcttttgactttaatgaatatgcatatgaattcagttcaattgtttccttggtacttttgttcaacaatgatagattgaagctttttgagtaatttgtttttttaggtgggtgaggttgagattttctaaaagagaaggaaaagttgataattttgtttctgatatgattacaacaatacaatagaaaagttgataattattaatgtatgtatgtatgagattctgttaaaagtctaatagtattcctttttttttttttttttcatgattgaaaattggatgttgagatggtgatattaatatattcccttgtatgaaaaagaaagaattacaaaaagggataaaattccatcaaatcttggtaggtatattcaattaatattctgaaattagttctgtaatgagaaaagtgtgcaaaaatgcctctctttattgagtttttgatatcattaactgcaatacaatggaaaagtttatctgataaagtatgagattctgctcaagtctcatctgattccttattatgattcaaaactaagatgttgatatagtgatagattcccttgtatgaaaaaggtagaatcataaaaagggaaaagttccaaaaaatttggtaggcatattcaatttcaatcaatattctgagccaaaattagtgctgtaatgaaaaaagttggtaacaatgtttcttttttctttttgtaataggga

SEQ ID NO: 29976 - DNA, 604 bp, Medicago truncatula
  Intron number 2 from transcript Medtr2g093240.1 (locus Med tr2g093240) derived from phytozome v7.0 (chr-ID MtChr2; po s 21583317 to 21583920 reverse strand)
tcacgtggtttaccaggagaactatcgaaaggtgcggcttgctatcatatttttttatttgttgataattcttgttggcatatattggaatcaatgttatcaaatagcgactatagcctagtgttgtcagatagaggctatagtgatgctataacatcgtagcatagcagaatttgaaatctgtgattgacaacattgcttggaatttgaattgatagcgatattttgttgagccgttattaggggtttgagattatcatttggtattctttcttatggtgctcaacatgtctcttcaatgccatgttagtagtcctttttcatttgtcgaaatatctgtgagaaagttccctttaagcctattttgttctagctttttccaaagcagagggatttactgggggaatggcagtgaagcattgcctttgaaagctaaaacatagattaatcacttataactctaagattggaaacttaaagtttgttgattgttctcttacaagtgtttctaggcagtactgagtttcgtataaatgagcatgctgaactcgttttctatgcttctataggtttgtccggttcgttagcacacctgagatactgg

SEQ ID NO: 29977 - DNA, 431 bp, Medicago truncatula
  Intron number 1 from transcript Medtr1g008580.1 (locus Med tr1g008580) derived from phytozome v7.0 (chr-ID MtChr1; po s 820938 to 821368 reverse strand)
ggaaaataccataattcagacttgtgctgttgcatgttacagtgcatctttttgaggtgagtttttgttttattttctattcaatgtctttgtttacagtttaaaatgaattattttctaaaagaagattgcttttaatcctccagttcctaggggaatggatccctggtaatccggagttcggtcaggagataagtaaactcttgtcaggattagtccagggttcgaccttggttactcccgagaaattaaacctttagtgaagctcattaattaaccacttgagtcaaacaacttgcttaaaagtcattatttaatttctattttgtttgtataaataagaactgcaagtggaacatttcccttattttctaaattttacttgtttatttataggtggttttggatcttaccttttgggattgaatagg

SEQ ID NO: 29978 - DNA, 654 bp, Medicago truncatula
  Intron number 1 from transcript Medtr1g090380.1 (locus Med tr1g090380) derived from phytozome v7.0 (chr-ID MtChr1; po s 18283288 to 18283941 reverse strand)
tcattccaagttaccttcctcttccttaattgctggttagtttttttattttatttatattattccaactcttgtttatttcatcatcactttgttaatccatacttaatagcttacttgagctttatcaggttttcactctttgcttaatttattgtttcctctagagcctagaatcttatttttcttctttcttacctcattccactcggttccttttgtctcttctcattcaatatatttatgtagtataatcttctcttttcaattctcattcattcattcattcattattcaaaagtatgaagaattagtctcactttaattttttgtttcttatttgatgtgacaatgaatttctcttcaatcaaaatgcattatgttatgcattgcttcaaagtttcattatagtataataaggagatgaatgagactaactcaccttcttatatttttcctttaatcatagatagctggcttgttttccataaacatcatcattttaactaactaaattatttatgttaattatggaagttaagtatgtgtgaaatgtattagaccatccctttttttttttatctaacttttgtttctgtgtttttgtttcatcatttagcaacaaagaataatagcactggttaatttttggtg

SEQ ID NO: 29979 - DNA, 859 bp, Medicago truncatula
  Intron number 1 from transcript Medtr2g007840.1 (locus Med tr2g007840) derived from phytozome v7.0 (chr-ID MtChr2; po s 1266499 to 1267357)
ggtgacagtggtatttgtggttgtgaggttactgtgattgtaacaatgtggatggatgatcatggtgaaaattcttagagctaattaataagacagataaatgggatagaaaggttaataagagagggaaaaaaaatgcattaattgcttcttatccttatcctatgcacaagttacaaaaatccttattaaattgatattaaaataatatcatttaatattaaaataatatcttgaatttagagtatatgcaacaactgaaaacttcattgaaaaattcaaagagggccttataaaatggacatgggaaaaacttaaaaagaatttaatactccttccatttttaaaaacaaaattgactttttagattcattcatttaatgatgtatgtggtttatattgtgaaccacaaacataattaaatgaatcaacctaaaaggaggtaatgttagttaaagaacaattcaaattcaaagtatttgcagacacaatgttaatacaattcgatcatagaacactacagtaagtaatgctataattattacctgtgacaagtttatgaagttggaactagagagtatttatggtattttagtcccacattcctagcaaagaaacataacgtgtgaagttttttctatataataaagtaacatatgttacatatttacatgtcacttttaaataaagttgtccattgcaattcaattgacactgtttcaactttagcattcccaaaactatcaacttttaattgaaaagttttgaggtggtaggcttgaaacattgacaataggatttaaaaagtttaaagtttcttcaatcacctttctaggcagcgagagataatatcttaaga

SEQ ID NO: 29980 - DNA, 798 bp, Medicago truncatula
  Intron number 1 from transcript Medtr2g132550.1 (locus Med tr2g132550) derived from phytozome v7.0 (chr-ID MtChr2; po s 32094479 to 32095276 reverse strand)
agagagttacccgtagaagcaagctgcaattgaaggtgaaacggaactcttcttattcttgaaattttattttaatggaggaacttaaaacaagaaagaggaacagaagatacttgttgatgagttaaagatcgtctttttcgtgggatttgggaatggggcccactcaaccaaataacttgctcccgaagttcctcgcttcgctgcatatcccaaattcattcctcccctcttttttatggacaaatagttttttttttttttttttaaatcaaatgatttttttatgaaaaaaaaaatgatatttattcatttaaattatagagaacctagagagaagatggagtttctctcgccaaaaaaaaactagggtcggcaaaatttataatcaaagactggataaatagttattttgatctttaaacgtgtaacaaacagggacgagcctagaaatttcagaaaatgggatcaagctcgtttatcataaatatataaaaccatagccgttaaaatgaagaagttataatcatttagcaaaacattgaagattacaaaaagtatatgaatgtatataaaaaaactagggttaaatatgtttttggtccctacattttgcacgattttgagaataatccttacatttcaataaatgtttttaaaatccctacatttttcctccgttagcgtaaatagtccctgctgtcaaattattaacttgatgccgatgttggcggttcaatctcggcggagaacttctctatgagcttcaccacgatctttcttcgcagcgtcgtagac

SEQ ID NO: 29981 - DNA, 582 bp, Medicago truncatula
  Intron number 1 from transcript Medtr3g021110.1 (locus Med tr3g021110) derived from phytozome v7.0 (chr-ID MtChr3; po s 5050201 to 5050782)
actagaggatttacacttcctggtaagagtggacatttgggtttccttagaatagaacttttgtcatttgtcaacgagtgcttcagacatcgtattactctgcttatctacttcctttggactttccttgtttcccttttcaacttctctttcggtgttggtgcttccaagagtttctttattttgtggaagcttttgaacaacactgcaacttgtgttaggcctaacaacctcatatccttgcagtttgaatttcttttcgagaaattctactatgaactatgtgtaaacagggtcccctaattatcatacaatttgcggagtgagttatattttggccaggacatacgttctttcaatgatttacattttcacccccttctcaccttggtgtaaatagttatccaattctaatattacctcataacaaattaaaaaattagtaatactaatcatcataagatgaagattatttacatacttttccttttcactattttctcattcaatatttcccatgctccagtccatgatttctgtgttgcagatttaaaggctccaaacaccaattcaggctactct

SEQ ID NO: 29982 - DNA, 893 bp, Medicago truncatula
  Intron number 1 from transcript Medtr3g086130.1 (locus Med tr3g086130) derived from phytozome v7.0 (chr-ID MtChr3; po s 20105672 to 20106564)
tcttcttcatcgcttatattctcttcaaagacatcgtaagcttcttcctctccgtgttttattttatgattttttagcacccatttgcattatttgttgaaattttcgttctttttcatgtgggcatattgtttctcttttaatgtttgagaaattaggctaaaattttgcatttttcgtacttgattagttactaaattgaaaactggtttgatgattgatttgataattatatcaaaaaggtagagattctgattccaattggaattggtatatagtttggataagcagcttaattaaagcgcttatcatataattgcttttgtataagctgtttttataacatcagatgaaataaagtcaaactattttcatataagctataagttgtttttgtaagttatctagaagagtatataaacacctcatcagttcttttgaacagattcacaagtttttgtatgggtagataaactcaaataagtcaattcaaacaaactcgtaatcatgttaaattacaatcagcatgttggctttcggtgtaccatgttctatgaagcgcggacgccgacacaggcattagacacgacaccaataataacatgataaaatgacataattcagtgtaatcataggcggtgtcagacatccatatgtcatgtgtgtcagacaccagaagacctaatctgagaagtgtccgtgcttcataattcattcatatatggttggttttgataagtggaagtttttggcaacatgtcatcttctgtgtcataacttcctctactccctcccctgtttgtcttgtaattttgcttttagcaataagtttcaatgaccgttttgcataaactgcagacatcgagacctgaatacaatcaagtatttgtgaa

SEQ ID NO: 29983 - DNA, 710 bp, Medicago truncatula
  Intron number 1 from transcript Medtr2g097500.1 (locus Med tr2g097500) derived from phytozome v7.0 (chr-ID MtChr2; po s 22848262 to 22848971 reverse strand)
tgggttcggagtggaggtttatttggagaagaaatcttttcatgtgggaggaggagttacttataagctatgaagcacggacactcctcagattaggcgtgtttccgtgtcggacacgtgtcgtgtccgacaccgacacgacaccgacacatataattacactgaattatatggttttctcaagtataacagcctcattattcgaggccttttttggttgtttttttaggtgtgaaggtgtttccttatatatgcggcaccttgttgtattttttttcttcccagccaggagttttttgtgcgtcttgcataaactcgtcgtgaataaaattttccttttcaaaaaaacaaaattcctataaatccataaaaaacctcctctaaacaatttttgaattccccaaattaaaagaattttgtattatatgaaagagtactgctattgtacatgacaatttgcacacacaacaccgcacgtctcacgtgcttaaactcaaagtcatgcacagtttcttattttattttttatttttttattcttattgatttagtataaaaaaaaaagaagcaacagaaatcacttacacatttaggaccttcttccctgttaaatttacagcgccgaatgcactttagccgccactaattggttaatctcaccaccaattctacaagccgcaatagtaatcaccaacaccatagatcaatcg

SEQ ID NO: 29984 - DNA, 597 bp, Medicago truncatula
  Intron number 2 from transcript Medtr1g107660.1 (locus Med tr1g107660) derived from phytozome v7.0 (chr-ID MtChr1; po s 22774746 to 22775342)
gaagtgttaggggtatgtgctttcttgtgtttcttagtataataatgtttttttttatagttttttctatgttgagaaaaaaagacaatgtagatgtgccctgtctcataattttttttatttatttagctattccgtccttaagtataagatgatcccttagtaaatcatgggaattaagaaagttggttttgatattcaatatgttgacaattggtattgcttttacaaatttatctttaagagagagaattatttgatgtttacattagagtatttattgtagattgcagaacaatatgtaaattaattagggttatgttagtaaagaaatagttaatgcagttgaaaattcaaagagggtcttataaagaggaacaaagaaacacatgaaagagtcttatatttaggaacgaaggtagtagtattttagttttagggtttgtgtcttcgttcttagaattgttagtgtaaactatgaagagatgtgaataaacatcattaaataactataggtaaatactgtatttatttaaccaacattgggtgtttgtgttaccaggtagtcttatagttggtagtttgggacagatatat

SEQ ID NO: 29985 - DNA, 529 bp, Medicago truncatula
  Intron number 3 from transcript Medtr1g020410.1 (locus Med tr1g020410) derived from phytozome v7.0 (chr-ID MtChr1; po s 4455377 to 4455905)
attgagcctactgaaagtgaaagcaaggtatgcatatatggacctgcctaggaagaagaattctttttatccttgtctgtgtttcttttgctctgcaatttctcttgtgtaacttctcaaattcaactaaacattgcctgcctaaattcaatgtatgctcattgactaactaatttgaggttttgacttaggctttgacctttatttgtgcattatgcccaaaggcgaatgtcctattattttttttgaacaaagtgaatgtcctattatataggagaaaacttaggtacttttcgtatggctcttaactaaattcaccattatttcctcaaatccataattttctcaaagtttgttatatccaaaaaaaaatatgtatttttagttaagaaccatacgaaaaacacctaaggaattgtacctaagttttctcctattatatatacctcattttgatagtttgtttacttttagctttatcttctcttataatatcttttaatgcattcatgttttgtctcaacagtga

SEQ ID NO: 29986 - DNA, 526 bp, Medicago truncatula
  Intron number 1 from transcript Medtr3g092260.1 (locus Med tr3g092260) derived from phytozome v7.0 (chr-ID MtChr3; po s 21649266 to 21649791)
aagtaagttcacaaaacttctatcttgatactatcataactttgttttatttttattttatgtagccaaatttaggcacatcatacacattacaccgtgacatacattgttgttattgtgattttgtcattataagtttctttttgtcgaacaccagacacaacactagcatgtcaacaaggtaataatttaattacatgtctgaaatgtgtcacttgaacatcaaattttggtcttctggtacttagaaataaaatcgagtctaactacaagctccttacaaccaagtatatccctctggtttatatactcaaaagtagaaaagaacctgtgaagaaaaaagtaaatacatgtagaagttatcacggatttaatgtaacaaacatgcacttaccatctttcctattattaggatttttgcaattattattaagatcagaaatttattttatttccttatttattatattgctgttcctaccattccttaatctaaggaatagagacactcttaaacttgggcaac

SEQ ID NO: 29987 - DNA, 451 bp, Medicago truncatula
  Intron number 2 from transcript Medtr3g062040.1 (locus Med tr3g062040) derived from phytozome v7.0 (chr-ID MtChr3; po s 14200239 to 14200689 reverse strand)
cagaggtattccatcaagtagttgttttaggaatttgccttaatatttgcatatttggctgtaatgagtctcctatattgtgttccgtgaacaatttcctttgtattttttaatgttttaaaaatgttttttttttcttgtaaaaaaaaagattttttgtcactaccttcgcttgcttaaattagttattgttttgcttttggtacatacaatttactgatactaacacatttgcactaatcaaacccggggataaattgtctttcatatgatgatgaggatggtatcatgtggattgatcctttctcttcacatttatatatttgtattccataaatgtgtcattaatgagcacaaagtgtatatatttaaagttgtgttgttttttcaaaatactctggattgttgtttttcaggctctcgagatattggaattatataggcgtatata

SEQ ID NO: 29988 - DNA, 572 bp, Medicago truncatula
  Intron number 1 from transcript Medtr1g096500.1 (locus Med tr1g096500) derived from phytozome v7.0 (chr-ID MtChr1; po s 19757287 to 19757858)
gagctggctgctgctgctgctgcaaacggtaagtagtaatagtaattgataaaattcttcatatactgttgcttctaaacatcttcaattatcatccttagtgtgttctacaatttggtgttagtaataattaatagtatcatttgcactattatgagttagcattttgattatggataaaaagttataaactagactgaatgatcacatttatgagtcaagtcagaataaggtggataagagcagaaaaaaaaaaactgctatttacaaagtgtatgaacatgtttatgataggacactgaaatatatgaataaatgaatatttaggcgatgtttactttctaaaaacattttaaattgccaacagggatatgaaagaatcatatagtgaacaattgttattataatgatgcctcagtatcaagcacaacgaccaattttgcttctataaatagctggagcaatatgatatattgattcataaatgataattcctattacctgaaatctacttctttgtattttctcttgtacgagctgtagaggatagagaccaaaagttcataacaaaa

SEQ ID NO: 29989 - DNA, 752 bp, Medicago truncatula
  Intron number 2 from transcript Medtr1g096500.1 (locus Med tr1g096500) derived from phytozome v7.0 (chr-ID MtChr1; po s 19757992 to 19758743)
ctgaggttactgctataagagaggtataatcaattttatcttttatttttcttcttcatttgtgcaatctgaaatttctgtaatatgaatagcttaataaaacaagacgttttggactgttaatcttgatatcatgctacttttatagcttaataggtttttcttatttttcattagttattttattagtttttatttattcctttgtttctctcaacacctacacacacatacacatgttattacattctattagttcattttctcaaattattaaagatgtcaattttgtgtccgtgttctatttggggtcggtgctgcatagaatcttacatgtttgacatataagtcggcattttatttatcttgctaaatcaaaatattaatgccatcatctactatctgctgtctatgacagatttggatctcgatatctgagagtctttgaaattaccattgaaggataaattgacaagttttatagacttcttataggaaattgcatttggttggtaaacgcataaagcttttgtatcacacactatatacatttgcttattctacatgtttgagggctctaattaggcttatatcagaagccataattatttttctaaaccatgtctattttctactttttttggtaagcttctacttattttcttcaatgcacataattgattacctcctgctattctaattggaaatcctctgcaggcttgtcaaaagctggatcaaatttaccttaccga

SEQ ID NO: 29990 - DNA, 505 bp, Medicago truncatula
  Intron number 2 from transcript Medtr2g122640.1 (locus Med tr2g122640) derived from phytozome v7.0 (chr-ID MtChr2; po s 29516124 to 29516628)
taggtgtcggaataggttcttctatcagtttcctggtatgatttacttttttttaattccattgtgtttttcttatcttttgacttgaatatgcccattattaagtttaattttgggagtgagttgaatagatttgaataattactcaatacaaattttcaactacgaaaaatgacaaaaaatgaagttttaagctgaaaatgacacttttttaactaaggaattgactacacatcttccatataccaacagacgcttttagcaacggccataaaattcatacagtatacggtgtgtccgatatattgaagatcatagcctacttatattgaattcattcaaattaattaaatatttaattaattattatagtaattaaataaaatattcatcagatatatttccttgtatgaaaaagaagcatacaaaggaaaaatgttccaccaaacttggtataatgagaaaattttgtaatgatgctcttttttgtttgttgttataggga

SEQ ID NO: 29991 - DNA, 685 bp, Medicago truncatula
  Intron number 1 from transcript Medtr2g030270.1 (locus Med tr2g030270) derived from phytozome v7.0 (chr-ID MtChr2; po s 8351731 to 8352415 reverse strand)
tatatatatacatatttatcttctttcaatcaacggtaattgttctttcttagagaaaaaataaagagggcctttcgccctctctctttcttcttatgctttctctcagatcttagatttcttctaattttctcatctgggtttgtcttcatttggtaaactttctatcctaattttatgacttttgtcaaagtttgatgctttttacaattttgaattatgggctgatcttatttcgatccatctaactaacccaattcagtaaatttttgtttgtttttttttttaaaaaaatttagacatcatagttttctgctaaagttgtctcaaaaaacatagatttggtcttttttgttgttgttgctgcatgtttaatcagcattatgttgttttgtgtttgatgattgctgttttgatgaatttaatgttgtttggatttataggacatagatacgaggttttgtgtttgtttggtgattgtatcatgtatgtaactgattggaatttggatccgatgatgtcagatgtttttgttttttgttttgattttgatgttactacttttggtattggtttgtttcaatgattgttggaaaagaattatgcattttttttttttttaaagatttcattttatggttagaaaaagaattttgattggattatgtgaaagtgcagagtggaa

SEQ ID NO: 29992 - DNA, 762 bp, Medicago truncatula
  Intron number 2 from transcript Medtr3g100820.1 (locus Med tr3g100820) derived from phytozome v7.0 (chr-ID MtChr3; po s 24297128 to 24297889)
atcggttttgcagtgagtaaatctttacctctctatgatatattcactttaccataacaacttgtcttattttcgttgcaattgtgacaacttgtgtttttttcctcacaatcaatgttttaaatcacaatctatgaaactttttgaatatctactgtataaacatttgcgaaattattaagaaaagcttgtagctacatcttattataacatatatgttcctaaactattacttaagtctatataaactctgcatgatagtttttgaaaacaatttatagtttatgaaaataatttaatttttttattttatagaaataacttatccattaatatttatacgataaacaattaatatattagtgcttaattaaattttttgtttaaaaaaaagaacctgtcaaaaggggcggatccatgactaagattttggtgtggttaaaaaataaccttggtcatggatccgctcatgctgtcaaatgttctcaaataaatattaaaaccatgaagacttgcattgttatcttttaaaacaatgctcaagtcatatttgattgaccaatattaattaattaggattaggaagatttaaaacaattaaaaacaaaacttcaaaatgtcctttaaaaatgtgattccaaaagttagtaatacatgagcctagaaaagtatatcatgcaaattaaaaagggtagataagttatgtcacggcttgtttcattttcaggcatcaatattgggtgaagcattaactggcaaagg

SEQ ID NO: 29993 - DNA, 684 bp, Medicago truncatula
  Intron number 1 from transcript Medtr3g064240.1 (locus Med tr3g064240) derived from phytozome v7.0 (chr-ID MtChr3; po s 14474597 to 14475280 reverse strand)
ggcgactctattctactcaactctctctttctctggtaggttttctctcagtcctagtcgctttcaattcttctttcatgctttcgaaatcgctctgcactgtttttgttttttttttattttgattctcagtgaaaatcactcacttcgaaaccctagaccctaaatcaatctccgagatggtttttccttcaattacgtgttactgcttgatttcgatgctaacatgtgaacgagcactgctttctacagtttcgatcatcatttttcatcgcgtaatgtgtaatttgattttacaaacaaaattactatttctgtgtcgtgtatgagttcactgtttttgtgtcgtgtatgaattttctacatgttctttattgattgccatgagttttccatctttagtaacttagttgattgccactggtttccaattccatccgttgttctttaattgaaattgaaattgaatgtaattgccatgagtttagttgattacatgttctttagttgattacatgtgtaatgtttgaataattcattgtagatttgtagtgggattgtgttgtttcatattatgcataaacagtatgtcaatttaaatcattcttcattatattgaaactcagtttatgaaccatgtttggattaggcgtgacccgttgtcagacacgcgttgtgttcgaa

SEQ ID NO: 29994 - DNA, 772 bp, Medicago truncatula
  Intron number 1 from transcript Medtr3g143720.1 (locus Med tr3g143720) derived from phytozome v7.0 (chr-ID MtChr3; po s 37141083 to 37141854 reverse strand)
atttggtaaaaacttgttgcatcaatatcatcgatgtatcttcccttactccttaattttatttgttgttgttgcaaatccatgagtttcttatatccagttttcattcaaatatacttttatagatttttttttttcagtttgccatctttctatcaaaatgtaaagtaatgtatttgttgcgagaatgggctactacagtaggagaaatataacaatgccttaatcaaatattatcaaggttccaatattatagacacttctatgagtagtgcaacaaactaggtttgtataatcttcattagtttgaaataatattatcaatggtttgttgttcttactgtttgcgtgtggttgctggtgtgtgataatacctgctgttctggtttggtgtgcacagctggagcgtgtagggggctgtttttgaggctttggaatgctcggctgggattagttgggatttttgtgggatgacagtgcatagaggctgttattagctaatgttctctaattcctttgttctatactttagcaccatgcttagcatcatcgtgttattactgtgaagtattttaattcttaggagaggtagtttttggtgtcccgccaatatgtggcacctgttatttgtttcgcttttttcgtatttatctgcgaccggtacggctttttgtagaattcggcgtggataatattagctgattaaaaaaaaaaaaaaaggtttgttgtttatgtagggagcaacaaaactggggtaccagtaacttttgaa

SEQ ID NO: 29995 - DNA, 799 bp, Medicago truncatula
  Intron number 1 from transcript Medtr2g008590.1 (locus Med tr2g008590) derived from phytozome v7.0 (chr-ID MtChr2; po s 1670440 to 1671238)
gcttagtggtgatatgttgaagtcgtaagaatgatcaagaaatttggaaattctattcttctatttagtcacggttccatcgtggctaaaatagccttgaccgtggctaaatgataacaacgtaaacttagccacgtggctaaagatggcacgtgtggcagtgacatgtcacccttagttaatctcaattaataacatggattaaaagtgttgacggaaacttttggggaccaaaaaaagtggaaaatatttagggacaaaaaaaaaaaattgggatatttatatacaccatttatttatcaaacctaaatgaaaataaaagataaaacaaaaatattttcttagaacaacttgaccttaaataaaatggttgacttggatcaaataatagaattaatatatgaatcataatatctcatcctgatagttgatacaaagcttcaaataattaattatatatatatatatttccacctatctcttttccaactctatatataggcatagcattggcttgccacaagaaaaaaaacaagttaagggtgatatcctctcttgcaaacatcacttggtttggtactttcacattgtctccttttgattcaattatattctttatccaaattaaacggcaattccaatattattctgttaaattaagctaaacttcacatgacaaaatgtaattatgcagctatcagttgactaagaaaaatagactttcatgctaaattacaaaagctactttttgtttctgaatttttgctgattagtgtatggttttttgcaggttattaaa

SEQ ID NO: 29996 - DNA, 717 bp, Medicago truncatula
  Intron number 1 from transcript Medtr1g092690.1 (locus Med tr1g092690) derived from phytozome v7.0 (chr-ID MtChr1; po s 18648042 to 18648758 reverse strand)
ggcaaaaggtattattcttcataaatcaccaatttctcgaatattagggtttattatcatatcggacttgacgggaaataaactaacaattttgtttaatttgtttgtgcttttaaattaggaaaaattacacttttagtcctttaactcaattgtaggtaacagtttggtcctttatattttttatttatttatttcaatttgtccatttgcatatgaattgtcaagcttcaagttcatggttttattttcgtatggcctttcaatattcaaatttatgatcttcatctttgtttgcataagaataaaaaaaaaagattaaggaccaaatttttacccgaaattaagctaagggactactattgtaattttgtgcccggtaagcatagataattaggtaaagaagatgcaatattagttatgcatcaaaatgtccttaattcgtataagcatctaatatctttatgatttctgcattgtaaaatatatatatgcggaagaattcctgctgctagagtttaagaaagaaaatagtaaaaccattatgttaaaaaacttaaggcagatgccaacattttctacatctacatacgaatgctcagttgattgttataaaatatattgtgatttttgaaatgcttagttcagaatgctaataataaactttggaaatattgaaatgcagagctttcaattggagagaaaaagtggaaaaaa

SEQ ID NO: 29997 - DNA, 1025 bp, Medicago truncatula
  Intron number 1 from transcript Medtr2g121420.1 (locus Med tr2g121420) derived from phytozome v7.0 (chr-ID MtChr2; po s 28814134 to 28815158 reverse strand)
ctaccttagcttatattggtgattgcatttacgaggtaaccttctttacaattttattcttaattcctatttattattctctaattatttgtactaaatgaaggttctgttgtggataattggggataactgataagctaactgacatagttaataggaatagtagataagtttgctgatagtggataagccggaagattgaattcctaagatttagtaaaatttgttattgaactagctggtgaaggtgaatatgaaatgacataaaataaaatagaagcaatacattgagacatttttgctagaggcacaaaatctcgattggtattcgtcgtaatttctatgacgattgtgagtgtttcttcaaagttaaatcttattgttactctgagacttcaggctctcgaatagaaagccctttgcatcctatttgttattttcaattggcaactgagtctgtttcaaatacgaagatcttcgagttggacccagttgttgtcgtggatagcattaaaattaataaggaaaacaaagctaaatgtgggactatgactttaaattgtaggagtattttatttatatattttccaaactttgtggtagagttttctatgagtgaagtccgtgtagtttctctcaccttggttggggtggaaacatacatggctagctttcaaagttatgatgaagataccaattgtattacgattttgattattaatgatattaagggaaaaattgataggctataacctcaaatactcgaaaaaccacataaactagtaaaataaaagccaaaagctcgtgagaaaaaattgttgtcaaataggtctatcgtggttatatgtgcttataattaatatatcctctataagctcaaaaatttgttttgtcaaatagagttgaagtctaagatttggctagttgataccgaaatttgcattcattaaaagtcttacagttctaatgattttgagaaatttttagatatcttattctaatttatttgtgaaacatgcagctat

SEQ ID NO: 29998 - DNA, 517 bp, Medicago truncatula
  Intron number 2 from transcript Medtr1g083790.1 (locus Med tr1g083790) derived from phytozome v7.0 (chr-ID MtChr1; po s 16647121 to 16647637)
gctccaacaaaattgaataatttttccaccaaaatgtacggtgaagtcttttagtatccttcttttattctaaccttttttttagaataaaaaattgatgggaaacaatttaaccttttatgctatatatttgatgtctagttaacttgcttctatttataatatgatttgatctattgtagttaatccatattttgtgtgaaaactgtgcatttagtgttaaattgatattcatgtttgactatctcctgcttacattaagaaaaaaattctttatctgattttttttgtatataattgataatcattggttttagtcttcgacaatgatagaagcacaactgggttattgcttacctttaaaattggatttggctatcgaattatttgcatgtgtgtgtgtgtgtgtctgtgtgtgtgcatgcatgcatattttactgttttgattgctgaatttgatgtcctttttctgtttcttgtaggcgtattattgactttggaagtggaattgacgagt

SEQ ID NO: 29999 - DNA, 667 bp, Medicago truncatula
  Intron number 1 from transcript Medtr2g077960.1 (locus Med tr2g077960) derived from phytozome v7.0 (chr-ID MtChr2; po s 18097526 to 18098192 reverse strand)
ggtaaaggaggtctaacttgatgtattttaaatgaattctactttataaatttaggtgattaaagaatggaagaaattagagttagttgattatagatttctaagtggatagagttcactgtaatgaaacaaaaactaaatatgtttcaagtctattttgtcacactttcttaagagacaaacaagagttcaactatatgtatgaaggggcatactaaaattgtaataagatgcaatatttcgaggaacttagtttatttggtcccttttatgatggtttaacctgaaatcatcgcatagctaacatagcccagtaacattttcctatcaaaacaaaaaaaataaggttaaagggaggttgtgctacgttgaaattaaagttcattgttcatccaaccccccaaaatgttccattctctcgctatttctttacatttctcaaactatttgcttccaccttctcacatttcgatctcacactttttggtatataatgattcaactttgaacctgaatatttaatcttttcatttgatcctgttactacagtcaaattgtcctgggggttcgtatctcctcttccttcccggtgtggctttcaagttttttgtgtttttctttgtttcctgcaggtgtttgttgggtccgttgttgtttggggcgctca

SEQ ID NO: 30000 - DNA, 585 bp, Medicago truncatula
  Intron number 1 from transcript Medtr2g071550.1 (locus Med tr2g071550) derived from phytozome v7.0 (chr-ID MtChr2; po s 16476154 to 16476738)
gttgaggctataaaacaagaattgcaacgtgcaaggtgataccagtattagactttagaaaccaatgttttaacatgctgttttgcgttattagttatgctgcgatacttgatattgcgaagacttgcgcatgaatatgacattgtgatttagaaaaaatttgtgattgcaattcaaaaagttttgacattgtgactgcaatttatatgttgcatacaattatgattgtttttttgaattatgtcactagacattaacaatatatttacaagagttgcaattttataatcaataatggggaaaaccctttcacaaccgtaaggtgatagttacatggatcaaatgatactttcatatgatgttctagtcctattataaattatgtgagatgacagatcatttaagtctaaatcaatttaatgatttgtcgcatagcatgtaaaggcctgtaatatgtatatatttgtgattttaaattatgttttgaatgttaggtgtgtaggtcaggtgagacccaatatattatatatcttaacactactcttattttctgttgcctgttttcctttagagctgccattgaat

SEQ ID NO: 30001 - DNA, 1029 bp, Medicago truncatula
  Intron number 1 from transcript Medtr2g125830.1 (locus Med tr2g125830) derived from phytozome v7.0 (chr-ID MtChr2; po s 30388920 to 30389948)
gcttcatctcactgtacttccttcttctccttctccttcttttgcttacaattgctactattttttaacctcaaaacagtattaatttgtttgaattcttctccatttactgttttgcatgtactttcttcactatcagacactgttatctaaattaatactctattagtttgttgctttagtgatgataaatttgttttatattatttattacttttggatagttggattagcaaagactgattataaactttgaagcacatacataatagtttgagaaaatgacaataattcaatgtaatcatgtttctatgtcatgttaattgatgctacaaagattataaataaagtaaattctcacaaaaaggataaagagcagtcaggtgcattaaaactcccacaaacgcagggtccgggaaggggtcccactattttggtgtattgtacgcagccttatcctgtttttcattcaagaggttgtttttaggattgaactcgtgacctttcagttacatgaaaagaaattcaaatgatttgtcgagcacatggtaatctccaaacacaaaccctagggatctttaaggaggtgtttggagactgcataattaagggttaatcgtgtaaatgcttatgtaaatgttgttttacaaccaaacaaaacgagggacaggtttgcatatgcactgcaagccgtttatataagcttgggagcttattcgaaaataaagtgattttttttttttttggaacacatcataagctattccaagtacttagacaagtgtttatttcattacataatgggtagagcggcgtaatgagttgcaacctttgtaacatttatagcaactctttcttttttctaacgttgagagtcattctattgtcttaacttgtatgtattgctcatgcaaatggtgaaagtctgcggtttgttcttagacctttgaatggtttttattgtttggtccccaaaaataatggttatttgggtcattaaacatatcacaggtagcttagggacacaaa

SEQ ID NO: 30002 - DNA, 683 bp, Medicago truncatula
  Intron number 2 from transcript Medtr4g015680.1 (locus Med tr4g015680) derived from phytozome v7.0 (chr-ID MtChr4; po s 2974919 to 2975601)
gacaaataaggagaaagaggagtcacaacagggtgattttggtccttctgctatgaatcaacatcttcagcaagaaaaaccgaattgcttaaatttgagggcagcaatttgatgggctggattgcccaagtggataaattcttggatgtgcaatggataatgttgaacacaaaggtgtaacttgagtttgcgagcaccgagaggtaagcagtgcactggctccagtttttgagttagaagacccccctaatttgacgtcaactatggttttgggaaaggagtatgggcagtgtgactgcaagattagtcaactcgtagataataatgggatctatcaatgactatatacaatattatataatgttgatggcataggcctgaagatccagaggagcaactcctgggatatttgaggattgacaggtgaagaaaaatggtgatttctataagttgggtatttttttttttgaaggatttctataagttggtattgatcagcactgtttgtgcaataacatctatttgttcattctatttctggtttatttctatcaataggccgccaaaatacaagaaatgtgtaaggcaaggggaagagggttgctgtgttttgtgtagtcagctaatcggctcccatcccatgcacaggatcctcaaaagaagcattaaggttgctgttttgt

SEQ ID NO: 30003 - DNA, 662 bp, Medicago truncatula
  Intron number 3 from transcript Medtr2g030440.1 (locus Med tr2g030440) derived from phytozome v7.0 (chr-ID MtChr2; po s 8468869 to 8469530 reverse strand)
gggaagtttgtaattttggttagtaatctctttagactcaattatatgctaaagtaactatatacataactaagggtatatatggagtgagttatttgaacttatatatctattggcataaacatttgtgaaattgtttgggagaatgtatgaaacaacttatgacattttcataatttcagcttatgaaaataggttatagtttatacaaaaacagtttgactttattttataatttattataaaaatagcttatacataagtgctcacatgataaacgactgtgatataagctacaaaataagttatttatccatacaaggcctaagaatagtggtcagtttcattttatttatataatcaaaaaatatttcatttcaaaattattctctttttgtttaattttgtacgaaaacttattttattgaagagtatctggagtactatcattaaataaggtgaaatttgtagattatgcttatattttggtcaccaaatacgactacattttctttcttcttgtatttgagtagagtaatagtaagtagggcatagagagaaatgtataagttggcagcacttggcatctttgattataattagtttgaatgttcttcaaaatttcaggtagcacacaaaaatccttgcgtttgattcgagct

SEQ ID NO: 30004 - DNA, 686 bp, Medicago truncatula
  Intron number 1 from transcript Medtr3g020270.1 (locus Med tr3g020270) derived from phytozome v7.0 (chr-ID MtChr3; po s 4553490 to 4554175 reverse strand)
tttttcctagcattacttcggttgtgtctgtctaggtaagtgtgtcatataaatttatcttaatttccttttcatcttagctcaaacttttggtttctaacataaagatgtaagatgtatgaattggctttttaacttttgcagttttgttacctttttgtttgcactctgattctttagattctactgtttgttaatattataccacccagaaaattacacctcaagacaggtgtagagctacatagtttttctttcaaacttgaataatagttttattattttagaaaagaagcaagaattgagattatttgagttatgtgttttaaaagaaaattgtggagggaaaactattaattaaatgactagtattttgaggaaatttaaactttgttccttaaaataaagttaaacattatctccgaaagtaacaaagtcaaactcttattaatgaggaactttgttccttaaaattatacttcctccgtcccaaattgtatatcactttagaaaaataatttgttccaaattgtatgtcactttagaataccaatgaaacattaatgttatttttcctattatatccttaactatttattactctttcttttttcaattctttcatttatctttcccatattatttattaaggataattttgtaaaacaacttataatatctctttc

SEQ ID NO: 30005 - DNA, 142 bp, Medicago truncatula
  Intron number 1 from transcript Medtr1g129240.1 (locus Med tr1g129240) derived from phytozome v7.0 (chr-ID MtChr1; po s 28790523 to 28790664 reverse strand)
ctcttcattttgcatctgcaaagggtcataacgaggttttcataattcagattaacccttttgattattttcttcaaagtttgtttatttatttgtttttctttgttgggtttgttttagattgttgcattgttgcttgaga

SEQ ID NO: 30006 - DNA, 420 bp, Medicago truncatula
  Intron number 4 from transcript Medtr1g111940.1 (locus Med tr1g111940) derived from phytozome v7.0 (chr-ID MtChr1; po s 23970875 to 23971294)
aacgtgagatatactttaattgataacttcatacatgcaaaaatatgttttgtcaatttgttctgttacattattattgcctgaacagcctccatattatttactgttacctttttattgcctgagcagcctccatatttacttctgttattttgaattttttttcgttcactgttttgtttttgttgttattttttaagatggatccgttatctttcagactctcatcatcttctcttttccttagtgaatttcttctttcgaaaaaatgtaaacagaaatataatgttttaacttccttgccattcttggatccctcccgaaaaattatgctgattttgttatagaaaagggtgattcgtgaactttcatattgtttcattctttacttgacagcaatagccgaaaatacctgcttat

SEQ ID NO: 30007 - DNA, 737 bp, Medicago truncatula
  Intron number 1 from transcript AC235753_10.1 (locus AC235 753_10) derived from phytozome v7.0 (chr-ID AC235753; pos 57633 to 58369)
aaggacggccctgtctgtataccatacattactttgtaacgttttgttattattattagtaatattaatatttttattttatgtttattttgagtaaaaaatattgatagtagtaacttgttattattataattattattagtcaatttcatattttaagtttataatttttttaattccctcttgtaattttgaatttttcgtaaagtctattgaaatctttacaaatctgtgttataaatccattaaaatcttgtgttaaaaattctgattgtaaaaaatcattttaaaaaagtcttttaaaatcccataaaatcaatacaatcacacaaagtcttttaaaatctgcaggattttatttgccaaaataatcttttgaaatcccaatccaatacaccccataagtaaataactcgaggagtttggtctattgttataaagatatgttttgttttggatttagagatctcaaactcaagcactgctatcggaggaaatattctacgtataaatgtttttgttgtcttagacaggacatcatccccctattctaaattttatttttctagaaaaagaatgtatacaaattaaattcattaatttaattcctagttaatgaagaaggtaacatggtttcactgtatatcctatatattttatgatatttgttttgtctgttttaatcttcccaccatcatttaggcctcccttaacggccaaaactaaaccaccaagaa

SEQ ID NO: 30008 - DNA, 270 bp, Medicago truncatula
  Intron number 1 from transcript Medtr3g005360.1 (locus Med tr3g005360) derived from phytozome v7.0 (chr-ID MtChr3; po s 261808 to 262077)
tcctcagcggtggaaggtgggtgaatttctcccgaacgcatcaattgaaagcgattgaagatcatgttacggtgtggatgtttcgccattcacaaaccaatcaattgtgttttgctcttagtgtgagaaaagtgcaaacataaaaggtatgaaaattttatgaattaatgtagtatctattttaattttttttataagcttgtgctctaagttttcaattttgatttatatgcaggatcacttataagccattattaatcaaggaattaa

SEQ ID NO: 30009 - DNA, 846 bp, Medicago truncatula
  Intron number 2 from transcript Medtr3g148790.1 (locus Med tr3g148790) derived from phytozome v7.0 (chr-ID MtChr3; po s 38750265 to 38751110)
tattttccacaggtaaggattaattatcatacttaattaattttatatatatctctgcaatctgtttgcataggaggcacctgttttactttaatgattttgatagtagttttattaaatcaattatatggccttgtttggataaacaacttattttgcagcttatataggcacaacaaagtcaacttataagccatttctataacacaaaataaaataaactcaactatttttgtataacttataagctatcctagtgaactagggaaataagctgaaaacagtttatgaacacgtcataacttaatctgttttcgtaagttctcccaaacagtgtcacaattgcttatgctagtaaatgagctcgaataagtcagtccaagccagcccatagtgtcagatcagatattcctagcttaattttttcgacgtgtattgttaaataaattttagcattttactatgtctactatgattcatgcttatttctaagtattaattcttcctttttacttaagattatgttgtttctgttgatcttatatgatgttttataattttattgaatcctttaaattttaaattttgcttgtacttgggttagtgcgatcatattgtattgtatgcttgtcatgtttttgtatttgtgctttctagctagcccgtgcttatattttgtacggtttgtagtgcaagaaaatgagggttgtacaaagtgatatcttgataatgcggtatatgattatcgccataacatcaactttcattacccatcatttgtttgatgatttctcacaaatctgttctgtagtttattccttactcgtttatagagaaagaagcaag

SEQ ID NO: 30010 - DNA, 554 bp, Medicago truncatula
  Intron number 2 from transcript Medtr3g084030.1 (locus Med tr3g084030) derived from phytozome v7.0 (chr-ID MtChr3; po s 19918270 to 19918823)
aagctgcaacgttctactttgttgacattcgtgatgttttgtttttgcttttttctctcaaattaaatcatgtctatatatttgtcgcagaaagtttttcaaaatatagttgcagagattgaccaagctccatataattacttgactgcggtagaagcatggccgttttataaaatttggtggtttagagcgaatatacggtttgagtcataaattatgagtatataaaaataattaaattttcaaagtataaaaataatttgttttgaagatgatagtttttaccacgttaagaaatgaccttacaaaaattcaaaattcataaaaaaaattgagttttttatttaatattcaaatgcttatacaaaacatttcatacggggaaatatacttacttgggcacaagtcaaaataaatatatttgggcatgcacacaaaaccataaaaaaatataagagaataaaattgaataatgtcaatattgttaaagtaatttcgtacttattttttggggcataggacggtcaccctactcactctacctcagatacggc

SEQ ID NO: 30011 - DNA, 544 bp, Medicago truncatula
  Intron number 1 from transcript Medtr2g008170.1 (locus Med tr2g008170) derived from phytozome v7.0 (chr-ID MtChr2; po s 1442411 to 1442954 reverse strand)
cgctgcaattcctagcgctttttccttctaacaaggtgcttttcgataatcgattcttcgattcgcttttttaatcgattttttcgtttacttagtcttttttgtttctggatcggtaaattctagatcgagatttttctgactttagttgctgttactgatctagatctactctgtagctgttaatttcgactgtgcagatttgaatattttgcttaattttgttgtaagctgctttttgatgcatctggatttgatttttgattctttttcatttcgatttgtaagctgtttaattttgttgtaagctgattttgtttgattttgtgatctgtcgattttgttaattatgcagatgatgttcttaattaacaccttcatatgcatgtttccgatctgttaattttgttgaaattatttacattgcatatgcatgaaaatgacgattttttttttacataatttcgtgtttgaaggattatgaaatcacgttgcgtgcgtagtaaaagatcttttttttttttttttttttttttgttctttc

SEQ ID NO: 30012 - DNA, 898 bp, Medicago truncatula
  Intron number 1 from transcript Medtr4g013080.1 (locus Med tr4g013080) derived from phytozome v7.0 (chr-ID MtChr4; po s 2478622 to 2479519)
gagctgatttttcaggtttgttcactcaatctcttgttgctattattttttagggaaccttttctagtttatcaaacattatggggttgcctaattttgtttgtgaaaattttaattttttgaacctaaaatgaattaatttggtgtctagaactttcaatggactcatgtgatttaatatttttaatggactaatgtgatttaagatttttaatttcatttttcctacaatttagagtcattgggtgattatattttgcttctcttacacaacttgcttaccggtggctaaattaaaatgtgtcatttgaatgactgacattaataaataaaacaaaatgaattgagatttatttatattttaatccacaaaatataagattatttctattttctattataatgaaggcaattatttgagtgagaaaatatttatggggcatcacttaataaaggcttcgtgtttttaaagttgagacggtaacattgatcaatattaatttaaaaagaaaaaagaaaacgagcatatatcaaactttacgacactaatgtttgttttcttatttattattaaaccgacatcaaacaagtcaccgtcataatcgtgataattagtaaagtttctaatcaagttttagtgtaagttcctcttcttacaaagagcaatattgattgctattaatcccaccaaatttacttacacattgtaaaaaatacaaatttatatattacatgaagctcttttaagacagagtacttttcttaacatacctttttttttgagggattttcttcatatacctgttttgttaaaaaagcatttaattcataataaataactgaccctcaatatttgattacagttacaagcaccttgcctttaaagtcaaaaaggaaa

SEQ ID NO: 30013 - DNA, 874 bp, Medicago truncatula
  Intron number 1 from transcript Medtr2g042660.1 (locus Med tr2g042660) derived from phytozome v7.0 (chr-ID MtChr2; po s 12014020 to 12014893 reverse strand)
cttcttcgcagaaatcgccacaagatccatctcaggtagtttttgcaattcacttcaatttcactttcgttacgcaattttcatgcctaattgttcgtttaattgattaaataaccaattcacgatacccattttgatgcaattgaactcaagctagggtttattatgattattgtattattatgtttgtttcaaattcgtatttttaaaaaataaatttacagatacgagctcgtagaacaccaatttaagcgaaatagaaaaaatttcaagatgggtctcattcagccattttatgtgttaacaaactaatttagcatttttgtgtgttaagaaccaaatttagctcaaaattgtgtttaaatgattgtatttattataagtaaggttttaaattgagttagtggcaacggttgcagtttgtgatatttgatattaaagaggaacgtggtcaaaagcactcaatgcagcctcattcgtcataggcgtgccacgtgtccgacactgacacccgacactgacaccaccaacacacgtgattacattaaattttgccattttattaaattattactggcgtcaacgtgtaagtgtcgcgtctagtgtttgtgtgtgtgtgtcaatgcttcataattcgtagttgcattgcagtctcggcaacatcggaaacatacatatcatggcgcaaattgcatccatggatctttgttttataccatttttacacattttgtgcttgctttgtgaatatgtgaatgggcatgtgctcagagttgtttttgatgttgttctgaattcatgtgttaaatggtggtgattatttcttctgtgtattgtagtttcaggtcccgactttttccaatttgccggccta

SEQ ID NO: 30014 - DNA, 424 bp, Medicago truncatula
  Intron number 1 from transcript Medtr2g047090.1 (locus Med tr2g047090) derived from phytozome v7.0 (chr-ID MtChr2; po s 13271961 to 13272384 reverse strand)
aacttcgaaaattttcatacacgattcaactcgaggttatttcttttcccatttcaatccttcaattcgattatgctcaattttcataatcttttttaatcgcacaccacttgtttgataaaagtacccactcattattttctcaacataaacggtgttttagtgatttttttgtttgtttatgaactataatttatttagagttttagtgatttttttgtttgtttatgaactataatttatttagagttgttaatgttgaatgatttgatttgaaaatttatataattttagtttggttttttcttttccagtgtgatttttgtaaaaattgaccctttgtgctgaaaatagatctgtgggttgtttttgatggatttcaattgcaggttgttttggttgagaggggtgtttgtttgaaatt

SEQ ID NO: 30015 - DNA, 976 bp, Medicago truncatula
  Intron number 3 from transcript Medtr2g111530.1 (locus Med tr2g111530) derived from phytozome v7.0 (chr-ID MtChr2; po s 26503422 to 26504397 reverse strand)
tgtgaccatccgtcttgtacttgaatccaaatcaggttgattaatttgcagctgccttcttgattttaaatgcattcttctgtaacaagtttctgtacatgccacttgactcaaatagttggagtgggtggcgatttgggtttaggttgtagagtgaactcatgatactgacttcatagataaatgttataatttacttaataacaagttctagggtggttggagtcttccaccttgttattttaaaaaaaaaattgtttgaacacaaaaaagtgtgaaaccagaaattaatatcaattgttaaataattgaacattcttttagaataagaatttaatgtggaacggttttaacaaatgtctcccttcttggttaaaactcttatcaattttggctaaaaacgtgctagtgtttgaagtttgaaaatttagcatttagatgtaaagggtaaaagagagacaggaatgtagcacatgatattataatttacaaatgaaagtctgaataatgaccttatacccagattttttatgacatctcttgatcatttagcccatcctatctaatggaaaaaaaaaacttttttgtttgttattttgttgggtttttcgggtatatttggattagctcattttgggtacaaaactcgtaatttcaatcttaccaaacttgggcaggacaaagtgatttttcctaaatgtcaaccaaaaccaaatacacactaggggcttgggtcaagaacaagtgtagtataatatgtaaaaagccaacctaaaaacactcaggtgtaattaacacaactaagtatataacttagctcaattatactatttaacatggtattcctatgcaaaatgccaatgtgtcaatcactataaaattattgcgataaatgattgtgcttgcataacacatttgaatttcggatgatcaatttcttgcaggtaaaaggtttattaagttggcaaaatctcca

SEQ ID NO: 30016 - DNA, 446 bp, Medicago truncatula
  Intron number 1 from transcript Medtr1g100330.1 (locus Med tr1g100330) derived from phytozome v7.0 (chr-ID MtChr1; po s 20779773 to 20780218)
tcagcttcaaaagtcatcagaagaattgttgacaagtaagtttctgtttattttttctcccatttttatttcctcaaacaaactcaactctctgttttcctgtcttattcaaaaaagagaaaagggaaaaagtaaccgaagaatcgtacttttttcttcttttctttatttatatacatgtagattttcaaactcttttttgaacctatctctaaaaaggtgaaatataaggtagtattgtttttctcaaaagtaaaaaccactgagtttatcgtttcaaattcagatcaaaaagtgtaagaacattctattcaaaagtactattaatttttaatattttaagttaatggaattatgaaactgttcttaactgaattttaaaatttcaactgctaactattgtattagtgttctgattaaagttttttttttttttttttgcagag

SEQ ID NO: 30017 - DNA, 852 bp, Medicago truncatula
  Intron number 1 from transcript Medtr1g039970.1 (locus Med tr1g039970) derived from phytozome v7.0 (chr-ID MtChr1; po s 9283185 to 9284036)
gagaggtattttcaacgtcatctttgtcctccttcagtagtatgataccgttacattgtgcaagtttttgtcttgaaacataactaatatttttggatatataaattctgaccttatttctggaaaatattggagaactgcgtctaaacaagtttataagcactttgattccatgtcatataaaatactagttgatgatgggcctaatttttttttcttttccatttttgaagacttaatattttgtttgcaagttacgtatcaaactggtttatgtttgaactcttgtggttgtataacacatgcctaggattacattgctttcattcatcgtgtttgggattcaaaatgaacatgatttttgatcatgttgattacattgttgtaattatccttgacattttctaacaatatgaaatgaaggcttactggcaagttcagtttgctgatttttctctcttcgctttttgcctctccctgctttgctcttaaggaagtgcaaattaaaatggcttctaattatgtctccaggatcctacttgagagtataatagatgaaactacatttctgaattgtatcctcattgtattgtattgtatcgtatgaaggaggtccagtatatgatctctgctgctaacaaatttcccctcccccgaacaaattagcctctaacatttacctataaaaaatgcatgttatttactggtattcagtgtattagtgactcattctagtggttatcaaacaacataatctagatttatctgttgctgagaattgtttctgcaacaaattcatatgatatgatcatcttggtactttcgccaggtccaattgttgatacagttatt

SEQ ID NO: 30018 - DNA, 689 bp, Medicago truncatula
  Intron number 2 from transcript Medtr1g019950.1 (locus Med tr1g019950) derived from phytozome v7.0 (chr-ID MtChr1; po s 4250771 to 4251459 reverse strand)
tctcctcttcaccaaaaaggtctattcttcaccaggtatatatatgcacacatttataattaaggttaaatatattataggaaaaacatataatttacatgaccaaattttatgtgttaattaagattagtttgaattgtaaatggtttgtattacatatgaatgcatgctctctttttttggactcacatgagtagcatacatcctcaataatatattgttgtcacaccatataaaatagactgcaagataagtatagatgtactttgcttgtacaacttcattttctcacaagtcaatattgcatttttcatgtggattccagggtgggggggtagcctagccactaagttgaatggcattaactttttgtgatcatatcattattaaattgagattcgcaaaattcattcagatacaatggttcaccaaaactcttttctcctttcactaaagaccaatggtgcatgtacaaaatttcaacacacaaaaattgatcatgcaatttcaaatgaaaaattaatcacactaatgacaaatttgatttttttgtgtaattttaaaatatgtataagttgaggaagataaaaaataataaatagagataaacatgtatactatctatcttacgcattgttgtattttgatgttaaaataacacgattagtttgaaattgtaggaactcaca

SEQ ID NO: 30019 - DNA, 801 bp, Medicago truncatula
  Intron number 1 from transcript Medtr3g093010.1 (locus Med tr3g093010) derived from phytozome v7.0 (chr-ID MtChr3; po s 22022312 to 22023112 reverse strand)
aataagtgtgaaccgtgggatttgccaggtgaatttattgttttttataagtaaattttagttgttattatattttattagtagtctggatttgaaaaactacgacggggtttttttttttgaaaaaataaacgacgttgatagagtacattgataacatacatttaaagccattaaaaaccaaagggatgaatttgtgaaaaagcatcaaaatacacaagactacaaatatgactatattcaagtgtcaaaaatacaattcctacagatctgtaacattgatggcaccaaagtcattaattagatctagacatgatcaaagctaatctttcaaccagaatcagataaacactgcattaagatgaaaaatcaagaaaacactacaacaacgagaaatcataacaaacaatgccgtactaagatggtgaaatcataaaaacgtaccaaagaagacttcaattatgtggaaatcgcttatttaacttcaaaaataaaataaaaattggaatggtgatttcgggacaaaattaaccctaaaacatcattcattagtagatctagatgaaaaagaagaagaaaaatggtgaccactaggatttggcaaggagaaaagcgagtggtttaattacgccttagaaatattgtcgttatcttactttgatggttatatattttctcttaattactatgaatcaccgacatatcatgtaaggtatccgcaccaacatgtcactattagatgttgttaaattcaattattttattttttaaagttattacgagtgtggatttgtcagtgtc

SEQ ID NO: 30020 - DNA, 829 bp, Medicago truncatula
  Intron number 2 from transcript Medtr3g040990.1 (locus Med tr3g040990) derived from phytozome v7.0 (chr-ID MtChr3; po s 11323811 to 11324639 reverse strand)
tctgtacttccctgcgttttggctttgggctttgggtttgggcttatttttctgcacatttcttgcttttttcttgctgtctgcacccctatttttgctatctgaacctgtttcttgctcatttttttttacaaaaaaattcctaaaaaatcctagttgtttcttggtatattttttatatttttatggtgttttcttgcatgtaaaaaatgttaaaatggcatgaactaattctatgtgtttttacacttttggtatgcattttgctatgttttgttcttgacactttgatattatgacatggatgaatgatgcctaatatggtgatgaatatgcctctggaaatgtgcttttgtttgctgtttttgaatatgattttatggatttcttgttttacaagcaacaagtgtttgatttagagaataaagtgtcaaatttctctatgaatttggtgtgataccttgcttgcatgtgtttccattaatttcatgtcatggcttgaaacaaaatttctttcaaaattgccatgatgtgatgattatgggttacaagcacctttaggtatcacatcaaaatttttaggtttattgccactttattaccttttctttgccatttttatgcatttccttttgattatttcctactattttgtgctttatgattactaaccatttcatctcatgtgccatacatttcatagcattccaccaccctctccactctccactttctttaagcctagcatttatttttttttgcaagttttaattcatttggtgatgtaatttgttatcattggtctgtagcttggcaaagaggccataga

SEQ ID NO: 30021 - DNA, 730 bp, Medicago truncatula
  Intron number 2 from transcript Medtr4g015430.1 (locus Med tr4g015430) derived from phytozome v7.0 (chr-ID MtChr4; po s 2841421 to 2842150 reverse strand)
gctgctggagagggtaagaatattgttcatttttaatcttacactatcacctgacacgacacaaacattaacacgtcgacactgctaataatttgagaaaatcatatgatttagtatagttatttgtgttggtgtagtgtctgcgtcagacacgacacgagtccgacactaagacacgtctaatccgatgagtatccatactgcatagaaactcactggtttctctagaataatttaaaaactaaattgactgactaaaaaaaataaagatgaatgaagatttgtatattttagagatgttttcgtattttcattagtttaagagaccaaattgtccaatatctacaattttggaggctaaagcgtgacatatattttattctaaagtttctttaattcttctatgcaaggaagttttgttctttttaattctcacaaaaataatcatgctcacctttccttacatttagagcaatgtttattcatgttctgttcttgtctcctaccttcgacaatcaataagaaagtaacataataccttaaaatattttaacttcaaatctaatcaaggaatatattgctcttgtactcaactaaaacaatgaaataattaaaaaaaaaaaaaaaatgtaacataggaatttgtttattttctatttgatttgttaattggcatagataataacaaaccttaaatttatgtgacaacaggagtatttttgccagaact

SEQ ID NO: 30022 - DNA, 853 bp, Medicago truncatula
  Intron number 2 from transcript Medtr3g110020.1 (locus Med tr3g110020) derived from phytozome v7.0 (chr-ID MtChr3; po s 27666117 to 27666969)
aaaaggtgcattgaccagatcaaggatttgcaactgtcatatcgttataaatgtaaacaaatgagacaactattatgatgatcatgcttctttttggggacgatatatatgatatcagatgatgatgcttttcattattcattctcaatgtggaagttcaagtaatggcaatgttgaagaactagacttattactatatagtgtagatttattgcggtgtgttatcttgaagtaaaattttggattgggatccttgttgacactcagattttggttgattcatgggtagttggcatgctttctttatcatgttagactatctatgtttttgttgctgaataatttccattgtgatttttgtttgagaagtcttattatttactatgattttatttccagtatatgtgcgatttctccaaaataagtttgcttgctaaaaattggctaagaattatatattcgagcagtaaaatttgtattctctttgtgccacaaaaatgcagtaatcaccaacttattggttgcagctggtaaataaaacaaacagcaatgtggtgaagcacttgataatgtcattcactctataaggaagacattttaattgtatggtgaaactctcacagttcaaagttaaggttcaagtgttttgtgggcggcactaaatatttccaacccaagtgggtccaaataggaaaattgttggcatcaaaatcccatgatcaacaagagctagactaaattgggtcttcctcaacatgtctttcattaaggtctcagtcacggtgaaagacttgatgaattccaaaatttatgattaggtccacatccaatctgagtaggtgcacaccttcac

SEQ ID NO: 30023 - DNA, 205 bp, Medicago truncatula
  Intron number 1 from transcript Medtr2g117410.1 (locus Med tr2g117410) derived from phytozome v7.0 (chr-ID MtChr2; po s 27578782 to 27578986 reverse strand)
cccccttctggtctcgataaagatcaggcaggtattcttttcatttttctgtttctctatgctttcttccaaaaatttatccccgttttcatttcaactttcagtttttaattttcggtgttgctctttgtgatttttctatgtttgattaattttttttggatgtgtttgaataattaattgggtaattatgcagatatttgga

SEQ ID NO: 30024 - DNA, 505 bp, Medicago truncatula
  Intron number 1 from transcript Medtr3g123590.1 (locus Med tr3g123590) derived from phytozome v7.0 (chr-ID MtChr3; po s 31066852 to 31067356 reverse strand)
gataagaagaaggaaaaaaagtgataaaacaaggggttggtgcttttaattttatttttatttttactttttttctttctcatctttatcttttggtaatgttggggagtggatgtttgaaatttgaagtgatcatgatcagaaccactaacaaaatagggtacataggttattattatttatggatggatgttgttttgtttctttaatttggtgtttttttcgttattatcgtgctaatatcacttttgattgaattttggctttatttcttctataactactagtatattattttgatccagaagattaatgtggctgctgcatctgcattttgaagctacctttcgttttattttaggttataattatcagtgttattccaagcttatatataacctagctataaaagtgatataactaatttgttgagttttcccgtgacaatattattgatacttactattgttcttggggttctagctactagctagtaccaaaaatc

SEQ ID NO: 30025 - DNA, 865 bp, Medicago truncatula
  Intron number 2 from transcript Medtr3g087650.1 (locus Med tr3g087650) derived from phytozome v7.0 (chr-ID MtChr3; po s 20935392 to 20936256 reverse strand)
ctattgccaaggcaagctcaaaaatcgtggatgcttatacatgttcttgagattctgataatagtataaattgccctatatccattattgagatgattcagtattatagaaaactcaaaagcaacaggaactacttttattattagttccgtgatagaaactcaaaagcaagaggaactacttttattattagttccgtggagaagctcatgctcaaccattttgcatagtttcatagtgtcacaatttatttgcatctatgagttgtttgcttttgtttttgggggctttgctacagatctctgatgtatgcaggattctttggtgaatcctagcatattttctgaaggagcttcattaggtgattttcaaaatggagctattacaagtagcacaaaaatcatataattaaaagtggggttaaaatgacaataccattctaattgtttcattaagatgaggtgactttaaatctttggctggtgtgtgcggacctttgttttattggatcttcttgctgtatatggttgtgcggtgcaagaattcagttacttccctgtttcatggtgttttgagatggagcttttcgcttactatcagcactggagctctgacttgtaacattacaccggtttaaatgcagtgggttgaattcttactccaatttgccatctttaacatagaacactgatgtttgactggatctacttcattaatattgttattgttttaatctggggatattgttctgataaatcttgaagaagtaaataacttttttggtcataatctgacatgttcttctgccattctggaactgttctgtttgctttggccagtctattcgcagacccaagactcttgc

SEQ ID NO: 30026 - DNA, 391 bp, Medicago truncatula
  Intron number 1 from transcript Medtr4g012250.2 (locus Med tr4g012250) derived from phytozome v7.0 (chr-ID MtChr4; po s 2038374 to 2038764)
tcgattcacctcgtttcttcgtcaattccatcaaggtttgtcaaatcgcaacttctatctgcttacacttttcttgattttgaattttcattttgattttgcttccgtataacgattatctgaagtaggaatcgattatgtgagtgaaattgaagtcaaatgtgattttcgttcttcatttgttcatctgcatcaaaaaattatcattgtttcggtatttaacggtttgagaaaaattaagcatgaatcagctattttaattgtgattaatttcatgattgatttagcattttcttgttgttgatgaaaagtcttagctggtagaattttgttgaattgtttatttattaagattgattgaacttgttttgtgcagggaaaaaagattttg

SEQ ID NO: 30027 - DNA, 1068 bp, Medicago truncatula
  Intron number 2 from transcript Medtr4g012250.2 (locus Med tr4g012250) derived from phytozome v7.0 (chr-ID MtChr4; po s 2038938 to 2040005)
aacgtatagaaagtggagctgatatagcacgccgggtactatttcttatttttctcttttttatcccttctggcttcatggcagtgtcagtttacgctggttacgctgaagcacaaacacgatactgatactgaaacattcacaccaactaattttgaaaaaaaaaaaaaagagagtcataattcagtgtaatcacatgtgttggtgtcatgtcattgtcggacacctagacacttctatcacaagtgtaggcgctatggtgctctggaataggagtaatatgatggtagtttcttatttttttagtttggatcagtaagcgtgggacttgtgttaatctcacatggcacattatcaaaatagacctttttttagaggtgtgatagggataggatttgagttcacacctcatgatgtacaggaacctatgtagaagctgttttgatacttgcttgagatttgatagcacaagtttgtttgtagttgagcatttatctaaacttctaacctgttgttttaatgagtggatgattaaaattgttttgaatatctcatttcgctgcaagtggcattaaaaaaaaaataggatttatgattaaaggtgaattctataaaaatttattgcatagttttaaatgatgcgagtcaaaaattttgatattgaatgtcaagaatcaactcactctcttgttcccccatcccttgagttactggtttggatcagcactttttgtgttcattatagagtttaatcaaaatgctgtagagaacactgattatttttttgggggttgcatagaaattaaataaaactagaccattgcttagtgtgttgattgagatatttcttttaaaagtgcaaaaacaggaagaaaaaaaaaattacaacctcaaaattaaccatttgaaacaatgattctttttggctatcacattatacacgggtttcttaagtaattagggtttcaaactgtatattacacttacttttctttttattcacacaagtcctgagttattgtatcttttttaggagcgcgaggaaagaaagagacgcttgaaaagaga

SEQ ID NO: 30028 - DNA, 832 bp, Medicago truncatula
  Intron number 2 from transcript Medtr3g162860.1 (locus Med tr3g162860) derived from phytozome v7.0 (chr-ID MtChr3; po s 42617651 to 42618482)
gctactggtgctttcaatcctgatagagttgcagtgtgagttcatccctttcaaagattacattttttttgtttttatttattatcaagttttttttttttttaaagataggatttttatgttggaaatggaacaatttttttttttttaataaaaaatttagattgggtttttgtgaatgacaatgtttaaggcataattttattcggcagctaataagtagcaattaatttagattatgacaactttaggtttctgtttcttagattgtgtttgaagatattgcttagattttgttattgtaaaatggaacttgggtgcgtttgtttaagattttttcagaaaaaatctatttttttataaaaaaatatcacttttgttatttttaagtgtttgtttgggattttaaaaaaatcattttatgaaaaaaaatcctttttactctaaaatgaaagctgttaggattaactttttccaaaatctattatttgcttcttcgattggagaatgaaaactgttcctgcctcggaacacagagttgaatgcaaaggggtagacacttcaatgtcaaagagaggcagggtcaagaatagggcttgagtgattaaaccgggggttagccccttatttatagtagttttgggccttggattatgttatgattgatgcattttgattggttgattccatcatccttatcctcagttcagctccgctgtaaacctgatttggatgaggactagagtgctgcgcctcaacaatggatctttatctggattctggctaatgtattgttgttcattgctcaaaattttcatggcaggtattgtaa

SEQ ID NO: 30029 - DNA, 691 bp, Medicago truncatula
  Intron number 4 from transcript Medtr2g055470.1 (locus Med tr2g055470) derived from phytozome v7.0 (chr-ID MtChr2; po s 14884736 to 14885426)
ccttctttattggttgacaagaagaagccttacatgtaagtcctctcgtttgtctctctatttatccatttattgaatttttgttttttgtagtttcttttattatgatactcttgctgtcatagaagaatccatgcaactctgatgaagatgaaccctaacataaaattattggttttttaaaaaattaaagtaatttttttttttactgaatgctttctctgtaacatattttacaaaaaaggatggcattgttaacatttaaatacataaaggattaaaatggggaagaaaaataaaataagataaaggtctaaactaaagtgttacttgaaattaagttaagggactaatgatgtaattttgccaagattttatcattcgttcaagtagctcaactacaattttgaaataaaaatcaaataagaaacttaaccagatgaagaaaaaaaaaatgtcaattttataaaagtttcgattgagtttctataagtattggttttcttacgttgcggtttggttttgtttgattcggctggtataataaaatctgcaaaccaaaccaaaccatgtgattgagttaaaaaatgatccgaatatcaaacttaataagcctttggaacaccaactaaaacccttgatttaatttgttttcataatttatgtaggaaggggcaccggattcgtgcaa

SEQ ID NO: 30030 - DNA, 967 bp, Medicago truncatula
  Intron number 1 from transcript CU179634_18.1 (locus CU179 634_18) derived from phytozome v7.0 (chr-ID CU179634; pos 72293 to 73259 reverse strand)
accccgtcgataagaagcgcaagaggtatctctctagagttttgccccttttttctttctagtttatttattcaatttgtttataattctagcacttctcttagtttatttattcaatttgtttataattctagtacttctcttagtttatttattcaatttgtttataattctagtacttctctttgcttataactcttctgcacacacgatttacactactgtggcttcttttacttctcgtgttgtatctcttctttgaaaatggttgacctactagcagaaacaaatcctagttttgatatcttagttagtgtaactcatgtttattaaatttgcttcatgtaaattatcaatgaccagaaaaatctttgcagttcctgtgtatgcaaaaaccatatccacatagtgccttctcagccaaatcgcgaatcagtatttccaaggagttcctttctataagattgccttaatttgacatcacacattgactgtatgagccattcatttcatgatttgatttgtgacgtgttagaacataatgttcattctctattgattatgaaacaaaaatatgattctcttttccgaagacatacagattttatcaaagcacatgatgctgcaacttttccattagtttgcaatcatgaacacacccccaagtgggaaactttcctgaatagcaaactacttctagacttcttagaataagaagccatgtccttgaaagattgcacttatttaatgtgtgatggatatattattatgtaatgtgcgcatttatcatgcttaaaattgcataacatcttgtgcatttatctagagtagtttaatacacccctctcctcttctatttcaaaatggtgagaggattgtacttatctaatctgtatgtatatagcagcttaaagaaaatctcagtcacaaacttaatttttgttctccaggcaattgaggaatagag

SEQ ID NO: 30031 - DNA, 667 bp, Medicago truncatula; identical to SEQ ID NO: 28711
  Intron number 1 from transcript Medtr1g034440.1 (locus Med tr1g034440) derived from phytozome v7.0 (chr-ID MtChr1; po s 8240020 to 8240686 reverse strand)

SEQ ID NO: 30032 - DNA, 706 bp, Medicago truncatula
  Intron number 1 from transcript Medtr3g148160.1 (locus Med tr3g148160) derived from phytozome v7.0 (chr-ID MtChr3; po s 38509290 to 38509995)
acaacaaactcataacatcagttgctaccgcgacggtcagttctttctctatctctctctacacgatctgttgccctcaccatagccaacctaattggcttctgatttccctcttttttttccctttaatgaaacccgatgcatatgtttttttggtagatctgaaatcacatcttttttaatttttggttgacgttattttcattgtatcgcagctggttgtttttgttgagattaatggtggaactgaaattcctttccgtctcagtagataggtagttttggccactgctattgattttacatggatttcttttagcataatgtttcttcaatttttcaattcaaactatttaaattggggatcctttgattttgtttatcccacaacaagtttggctgttttcattttttcttttgttctaacttatctctcttttgttctctgtttatgcgactacgccacttagaccagaagtctcttccttcacagattttgtactgataaaaaatctaatgtggatttactatgatatgacattaatttgatgttaatttgctatgtccatgactaagtcatgatttagcttcattaattttcttcttatttcttgagtttttttaagatgcttcttagttattgaattagttgtaaagaattggacattaattatgtagtgatttttttagattcttggcaacagat

SEQ ID NO: 30033 - DNA, 291 bp, Medicago truncatula
  Intron number 1 from transcript Medtr3g064480.1 (locus Med tr3g064480) derived from phytozome v7.0 (chr-ID MtChr3; po s 14717287 to 14717577 reverse strand)
tgcttcaccacatactagaagcaacatcactcctggttagttaacatacctttgtcttttctttgattctcttcttttcatcactattaaccctattcttttcacacatattcctttagaaaacatggccggcataaatatagagactcttttgtcctatcactgcctaactggtaaactttttaacacatattcctttaatctaattatattttttctgccatatatacatgacaaaaatttcacttttgttttttataggtcctttgatcaaaaacccactttcagaat

SEQ ID NO: 30034 - DNA, 566 bp, Medicago truncatula
  Intron number 1 from transcript Medtr3g079470.1 (locus Med tr3g079470) derived from phytozome v7.0 (chr-ID MtChr3; po s 18424787 to 18425352)
gctagttttaagcttccgaaaatactgatcgtgtggtatgttctttgaacaaataagtctaaaagtaatcatgagataattttgccaatgtgaagagtcgtgttgtaaacatgcaaaaatgctgattgtgtgtgcacatgcatgtttttttgaatgagttgagaaacaataggatgacaatctgaccattttactgtgtatgttgacaagatatgctagactaataataaaaagaagatgagtaagaagttctgttccactcttgcattcaaaattaaagtatatgtattccatatattaaactgtggataagatgaaagcttaagtatttatcttctgttatatttgattgcacctgaatatgtctggtgttagtcactgatctagcactgaaaatttgttgacttttggaatatagtatgttatgaagtctgaagagataacattggaaaatcttaagatttctgtttttttattcagtagtgttttgattgtcaaacttagatagatataataattcttaaataccttttctcacgagtgactttacttggtttccagaaaaa

SEQ ID NO: 30035 - DNA, 358 bp, Medicago truncatula
  Intron number 1 from transcript Medtr3g122920.1 (locus Med tr3g122920) derived from phytozome v7.0 (chr-ID MtChr3; po s 30697004 to 30697361)
cttttcatttctcttcacgataatcttcttcatcagtaagataaaccactctctctctttcaccaatttttacttttttattttattttattttattttttttatattatttctttctggggttttaaggtagttgtgtttttaccttaaaatcttcatgtttgtttgatcttatgtcatttgaaatgtttttgatataaactatgtttgatgtttttctgtgttcgtgtctgtgtgttttttttttgttttgttttttcatatgatgttttctgggtcatgtttttttttacttactggtttgataacaatttttgatacagatttgaagggaaatctgatattagagaataaaggt

SEQ ID NO: 30036 - DNA, 724 bp, Medicago truncatula
  Intron number 3 from transcript Medtr3g101780.1 (locus Med tr3g101780) derived from phytozome v7.0 (chr-ID MtChr3; po s 24686682 to 24687405 reverse strand)
aaacttcacttccaagaggattgcacggttcacaggttagttctgctctctatcggtgttgtcaattgttgatcgccgaaaatagttgtcaaattctgttatgctacagtgctatagtgctgctacagctgttattttagaacactttgtatactaaagtgtgtatcgcagaacaatagtggtttgttaaaattgctatgctacagcgccgctatagccactatttgacaaccttgcttactttttattcttcaaattgttaatctaatgcgttgcatatcatgtggggctgaatgataatgattggtgatgagtttatgttactgatggttacaaccataagattgaggggcgaggatgaaaagtctttgtacacaatcatgttacattcaacttatgaggaaaaaactgttaggacctggatttccatttttgtttttggttagcgagtcactcagttattttggatgaaatggtattttgaaatatgaaccattgaagctcctttttctcgaaactgttaagaatgacaaaagaaacataaataaattcaaatgttttcctgtgaaaaagaaaaaactcaaatgttttttcagtggtttttatttgaactgcctttcttattttaaatgcttgaaccgtttaatgccgtattaattctttggaaacagctcaaaatatgtttttcagcaactggtgccctttcattttttacaggctcaag

SEQ ID NO: 30037 - DNA, 611 bp, Medicago truncatula
  Intron number 1 from transcript Medtr3g101780.1 (locus Med tr3g101780) derived from phytozome v7.0 (chr-ID MtChr3; po s 24687639 to 24688249 reverse strand)
gccgtcgattcctcctcttttcaggtaacattcattctttctttttctcactctctaatcttcaatttcaatttcaatctcaatctcagccacattttgattttacttcactcctttcaaccgaatccgaatctcaacttgttcattgttcttttcttctctctttcatttatcaacgcacgttcttaatgaagaaatcgacgtttatgcgtaatgccgagaaatttcactttcaacaaaaataaaaacaaacaaaaaacagctggaaaaataatccgaacgagagtcatgtgtgaattgtgatcaagtgaaactgaaaccacacgattttctttttatctttttttttttttttttattaattagtttacagttataaattcaacttgattttactttgatatgaaggtttattttagatcacgctattaggttgaaagttcttattccactaactttcattttatgttaattcatgtgttgcattgtttaatgtataatgttattgttgattgcgatttagtttatttctttttatattttaaaatttattttgagtttatggttttattgcagaaagaacatcaaattcaggagtttcaagaggggaa

SEQ ID NO: 30038 - DNA, 888 bp, Medicago truncatula
  Intron number 1 from transcript Medtr3g097020.1 (locus Med tr3g097020) derived from phytozome v7.0 (chr-ID MtChr3; po s 23050371 to 23051258 reverse strand)
gaagcatccattcgattctaattatcgtaagtttttttttattttttattactatacatgcatgagaaagaaatcaaaagaattgcaaaatatgaaaaattatcaatggattacaacattgattttgtgatattcattaccatgatcaatgcaacgaatgatatagagacttgaatcctctgcaatcggctatagattgttagatagattaagagagatgcagctggctgcttataaagttagctgcaaaggattcactttgtatttgtacacttgataaatttgttggttttgtacattattaacaaaattgtgaattaacaaagctcttcgaatcgttaataggttactaaatcttgattattaacatttaaaatcatagtcaatacagttgattacatgattaatgaattattcaatcttgatttaattaaacgtttgttggtttccgttctaggtttggtttatgtctcccacatttttgttattttttcttttagttggatatgatttttgttttgcactcataatcgagatgtcagtaattcataattatatatctttgcaactccaattgttgcttaaaaaaactatcccatctttatatctattgttttcattaacaaaactcaactaataagagacattaaccatgattttgaatgtggcatgcatgtactttcagttctgatcaatgtaattgaaaattaatacattttaattacaggacaacctagaactactatttattttctgctgtagccttgtagaaactagttagagcaaatttccataacttcatgttctcattcattaatatccttagattttttactatagttgcttcctctaattcttgtttcaaaacagcatttgaagcagtattta

SEQ ID NO: 30039 - DNA, 867 bp, Medicago truncatula
  Intron number 1 from transcript Medtr3g087520.1 (locus Med tr3g087520) derived from phytozome v7.0 (chr-ID MtChr3; po s 20863102 to 20863968)
agttacttaaggtgtatgatataatctcaactacctcttttgatctaacagttgttatttattcatattattctcacataaatatgttattctcatttgatatgctatatatattcattttattcatcttgtcaaaaaaaaaattatatatcaattttactcgtgatccaaaaaagtcaaactatacatatcacaagttcaacttatttatttaacgagtttaattttcaactcaagtttttatttttgatcaaaatcttctatattattttaatttaatctcatatctctcaaataaaatatcggcttaatacatgttttggtcccttgacttatttttggatttcattttgatcctctaactataaagtgtctcaatttggtcccataaatcttctttcgtttactattttggtcctctccgttagctttttcaaaaactgtttaccatggtccacatgtcatttaagatttgtgatcaagggttagatttgaaaagtacgcaagtatacaatagactcacaacatatgatcatttcaattttttttattttcctaaaaataaaaatttaaaatcaccatcaatcttcatctttttatatatttttaaaaaaagaaatgatcatatgttatgagcacattgtgtacttgtatacttttcaaatctaactcttgatcaccaatcttaaatgacatgtggacaagggttaactgtttttgaaaaaaaaaaaaaaactaacggagaggaccaaaattgtaaacggcagaagatttatgggacgaaattaaaacattttataattagtagataaagatgaaatccaaaaataagttaagagaacaaagatcaacttatatagtccccct

SEQ ID NO: 30040 - DNA, 596 bp, Medicago truncatula
  Intron number 2 from transcript Medtr1g025310.1 (locus Med tr1g025310) derived from phytozome v7.0 (chr-ID MtChr1; po s 6241279 to 6241874)
tgttgtgagttcttcccttttgtgattcttaatttatctcccaaataatgttggagtatattaatttttagttaaactgcattcatctttttatgtatggaggatggtacctggtaagcatggaataaagcatttaagatgtttaaattaccagtaaaagatggtctcaaagaaaattccatccataattttgtatgatacctgtcctaattaatgaatcaaccttggtagatttgaactattcttgttcttgcacttcaatgcatgttggaatgatatttcaatacttactaagtgtagatgttgtttgacaaacttctcaactactagccagacacgtagcaattactatgtcccatttcttcaagaagtaccgattgtttttgttatcatagttttctttccttaaaagtttgtattgaacgatgttgcaatttgaactttctttctcctcaaatatttcccatttgaagtttatttgtcatattatttgttatgtaaagtttcctattcactgtgcttggcattaacactgaagctgttgctaatactgatttataattgatataatgcagaatataccccgtcaattttct

SEQ ID NO: 30041 - DNA, 299 bp, Medicago truncatula
  Intron number 3 from transcript Medtr1g147150.1 (locus Med tr1g147150) derived from phytozome v7.0 (chr-ID MtChr1; po s 32718283 to 32718581 reverse strand)
agagtaacttccccacccatacatcccattcatttcactcaaacgtatttcatttcgcatattatattgtccatctcagcaccaaatcatatttatcctcattttcatgccctcgttttcttccaaactattaattctccatgttaagttatagttaaaaaatatattaatcaatgaagaactaaatctgttagcatttctatttgctaattggaaagtaccttacattccatgcaatttgacttgttatatatatgttctttttaaatgttttttattttctctcagagcttgttgag

SEQ ID NO: 30042 - DNA, 386 bp, Medicago truncatula
  Intron number 1 from transcript Medtr1g009000.2 (locus Med tr1g009000) derived from phytozome v7.0 (chr-ID MtChr1; po s 1015494 to 1015879)
ggattttaccaggttataatcatccaatcctaccgagttttcagttattatttcttgcttttttgtttttaattctcattaaccagtgattaatttaatctgttttatgtatatgaataataatgttctttcgtaagcgactccgtataacttatgaaaataagctgaaaaatcttatgccattaattaaaaattcaattaagctaatacaaataggtcataagacaaaagaaatcaaaatcacgtttttaattattttaaagaattgttggaagattttaagaactaaaattagtagtgaaaaatgacaatcattattgttattttttaataaaaatggattgacaattgcagtgacttggaagtggattttggttctcaagaga

SEQ ID NO: 30043 - DNA, 805 bp, Medicago truncatula
  Intron number 1 from transcript Medtr2g029590.1 (locus Med tr2g029590) derived from phytozome v7.0 (chr-ID MtChr2; po s 7909294 to 7910098 reverse strand)
ctggtgagtactaattatctcttgattatttataacttgttatattaatacctcttgatttgctccaaagctaattagctactatgagttggattcattttagttaattcgaacatttgaaaatatcgttatatgggaaaaatgattccccatgttcatttgctttaattgattagatgttttcaaatacttatacttttgggaaaagaaaattctctctacttaatactacattgaagtcatttcggattggatttagatcactaatatcaagaaatcatacatttgatgcggtcataccgatttgaatcctctaatgtttggatccaaacattagagaattatatttattgtctcacaattacgtaaaatttatttggtttataacaacttaaaaattataaacataggagtcaaatgtggtaaatattgcattggaacttgtgctgtcaacttttgaaaagtatacaaagtgttacttttattttaaaacttcatttttttagttttcttaaccagtgcctccacctctcatgtttgagtgaaaataatgtgaatacacgccgtcataagattttaaattgcctataaattgtatccaaaatataaagctagtttgagtcatttgatctcaatcaaacagtcaaaatgaagtatcacgtgaatgcataaagtgatcccctttatataatattgacttggagcacctttatctctaagctagagatataaagtacaaggagtgatatattattgcatttaaattcaagcaaaatattgacattgttactctttgtgcagggtt

SEQ ID NO: 30044 - DNA, 451 bp, Medicago truncatula
  Intron number 2 from transcript Medtr2g007440.1 (locus Med tr2g007440) derived from phytozome v7.0 (chr-ID MtChr2; po s 1127603 to 1128053)
tattgagcaattcagcaggtgaattacatatacatcattatatatatatatatatatatatattttttttttttttatgttgcagagtctatcttttctgtccttctacttgtgccgatgcatacaccaaatcataatattttaaccaagttacatatggtttgaacttgtgtccttggaatgcagaaaacaattatttactcccaaacaacttaataatcatgtatattttccactctcttgtttcttcttttgccttgaaatctttatatttacattctttggcctttgtgctagctatgactaagtcggctttgttgatttaatatcaatggaaatctgaatccttccttaacgatggtcttgtctttttgcatttcttgctgacgtttatgtctatcaaactgatacatatactattatttgactttttggaaataagatatgcagg

SEQ ID NO: 30045 - DNA, 699 bp, Medicago truncatula
  Intron number 1 from transcript Medtr3g040380.1 (locus Med tr3g040380) derived from phytozome v7.0 (chr-ID MtChr3; po s 11042852 to 11043550)
catttcctgaatcataaaacaggtactaacaatgattttatttttttctatttaaaagtaagtattgtagtgctaaaaaattattctatataaatatatacttcctccgtctcatttcaaatgacacaattgactctgtttagtataccaatgcacaattttgaaattaaatatttttagtaatatattagaaaaaaaatatgaaaatttgatattttggaaatattcatcgagacgaatccgacgacatcttatatgatattatttatctgtgtatattagtagaaaaatactgccaaagtatgttaggtaaatagtgcatattttcaaataggtcatctcttgtaggacgggaggagtgtatttgatagggttgaaattgaaaacgggaagctaaaaaagaattttaaaatatgaagacacaaagaacaattataatttgtagatgatgaagtttcttcaattttttaggtatataaagttttaattttttctttgaaaaaatgttataattttttttgagtgggattcaaaattttataattttttaatctctaaatttacagttaatgataatattgatgtcataacactatcgcttatgtactttttatataaatatatatagtcatactaatctaaatttctggatccgtcattgcagaaacagaaatagaagaagggtcacttccaaattgg

SEQ ID NO: 30046 - DNA, 843 bp, Medicago truncatula; identical to SEQ ID NO: 28750
  Intron number 1 from transcript Medtr1g107110.1 (locus Med tr1g107110) derived from phytozome v7.0 (chr-ID MtChr1; po s 22521289 to 22522131 reverse strand)

SEQ ID NO: 30047 - DNA, 580 bp, Medicago truncatula
  Intron number 1 from transcript Medtr1g100510.1 (locus Med tr1g100510) derived from phytozome v7.0 (chr-ID MtChr1; po s 20895605 to 20896184 reverse strand)
cctcttccgcagtgggcgaaccaggcgctgcaattgtaaccttaatgcgtgtagaatcagtgttctaggtagatgatgatagcctgcaattttgtgaggttcttgctagcttattttgtttcaagaatttgttatcttacattttggttttgaattgtacatgatagctttgcatctgtttgcacaattaatgtcatttatgtttgatattgttcagtaaaagaaaagtttgatattataaacaaagttggcaatgattgctattggggattctcatggtattgataattagtatagtactatatttttgtcaacagtttgtatttatgctagtttaagtgaagacagtacttgtatttgtatcaatgactattgcttaattacataagctctattcatttatttgcggtccattctaattgaaactacaactatcttgttcatcaaaactgctcgtttaattatttattgtcaggatatatccatgaaattcacaatctgtcgttgaaaacaactggtttgtatattccgatagccatgtgcaggcttcgctcttattattctggcttttctgtaacac

SEQ ID NO: 30048 - DNA, 659 bp, Medicago truncatula
  Intron number 6 from transcript Medtr2g110340.1 (locus Med tr2g110340) derived from phytozome v7.0 (chr-ID MtChr2; po s 25906578 to 25907236)
aagcccaaccttagttgcacacccaacactagcttgttttttacttttgttcttagtagctttgtctttgtatcttaatccttctttatatatattatcattgtttctgatcttgtttttttttttcttcaatatgttttgctctgaaatcctatattttttttaaggtttatatgtttattcgtttgttttatttgctctgatactctttcttttgtttttattctttttgttgatgacaaaagggggagtaaatgtatagtattttaaggcactgagccctactataaccacttctaaatttttttaatacttctgatttgattttttatgagtattttattgaaatttaattaataagaatagaactcagggggagcttacaaacctcaccttaaagatctattagactcagggggagcttacaaacctctatcccagtagtcaacttattaattagatcaacaacaattgaacattttaaatactattgtttgtcatcatcaaaaagggggagattgttggaacaaaatgtgtttcacaatgaaccttattaagttttgatgataacaaggtattaaaaattgtcaattggttattactaattattgttcaagtgtacaggaccaaaggctactcaagttatttcaataggtctt

SEQ ID NO: 30049 - DNA, 434 bp, Medicago truncatula
  Intron number 2 from transcript Medtr1g089930.1 (locus Med tr1g089930) derived from phytozome v7.0 (chr-ID MtChr1; po s 18058132 to 18058565)
ctgctcatcaacctacattatccggttgttgagaagtttaagacttagtaagtttgcattatgatttcacaatacagtgttagagtaaattattatttcacaatctaatttgatttttttttaccatgtttcttgaattgttgtcgtgaccttaacacttctcaagcttagagtcaaaagcatcagtcagaacttaagtcagagttcgacttcttctcaatgtacttcatacaacgattttttcaatctgtctcaagtaaggccaattgttgaatttataaacttagtcaaggtctgctttttttttttttttatgtacaaacattctttgaattttttacgcacaaattaaaaatacatattgcattattctttatttcatgtgcatatttgtgttaggatacatattgcatcaccatttggaaagcaactaa

SEQ ID NO: 30050 - DNA, 759 bp, Medicago truncatula
  Intron number 3 from transcript Medtr2g041260.1 (locus Med tr2g041260) derived from phytozome v7.0 (chr-ID MtChr2; po s 11304154 to 11304912)
ttgctcagtggcttgagacaagagcaactcataaggttttgtgatatcatttccctctttctccttgtcactatgatttctttcttacttcagtaaccttcattacttgattaataccaaattttatgtcgttaatgtatttttgcttcttgctgtattaatgtactcacaagtttaatgttctggcttcttgctatattaatgtactcataaggtttagtgtatattagtgtactttggtttcttgctttaggggaaagagttggtgcaagcatttttgtttttagaaaatactaccactacttgtggttcgcacttgcggttctgctacaaactgtaatattgcggaaaaatgcagacaaattcgactaatgtggctacaattgtggttgagatgcctttacaaatacatctaaaacatttatgttatggctgcaatttcagttgcggactgcaatttagaactctagtcgtccccgagaaatgtgctatagcaagttacatggaaaattacaatgatttctttaaacattgtagggatttatcaaggcattgctaaatctaattttaccttcatagttctctctcaactgaaggtgacttgagccgaaagtcttgtctttactcttattatcatttgttttaatattttcattttcttctctcataaacacacaaatcactataagaatccactggacatttaagtttcatggatgataccttattacactattacattcataggcattggttgcg

SEQ ID NO: 30051 - DNA, 500 bp, Medicago truncatula
  Intron number 3 from transcript Medtr1g068090.1 (locus Med tr1g068090) derived from phytozome v7.0 (chr-ID MtChr1; po s 13486534 to 13487033)
gtcttgttacacgctttgcagacattgcagtaatcatcttgaggacatgtttggatgtcttaagttttttcatttttcgtcgtatttgctagaacacgaatgcttttcatttacctaaatcccacctcatacttttcttatttgcagttttaagatttgtcttatcctatcaagtatcaattgttgaatgatgcatttcccaaataactagatttacagaaacttgataatttattttaaattttaatggtggtcgatctcagaacgaaatcaatttcaagagaatcgctatacattcttaaacaacaaattatttatgaagattttacaatgaactcaaatttgttatccttttatggtggacaattttgaatccatccagtcatgtttggcatgtgtagttcaacctgtttccaaaccaagcattcattacatggtttccaaaacactcataagtaaatttaactttgtatcaggcggcgttggagctccaggtataa

SEQ ID NO: 30052 - DNA, 908 bp, Medicago truncatula
  Intron number 1 from transcript Medtr3g073370.1 (locus Med tr3g073370) derived from phytozome v7.0 (chr-ID MtChr3; po s 16950169 to 16951076)
agagatgttactaaatcgaatataatatttctgtttctaaatatatgatcttattcactgaatcacatgaattaagtgtttgttttgatgggatagttggtaatgttaaagaatttagaattatagacaatttaaatgattatgttgaattgcattcattttttaaaatgttttcgttttgatagagtactaaaagatttctatcatttggaaaataagggccaatttgtatgttttgaaaatcttgaggggccaactcgtaatttttgaaattttgaggggtcaatttgtaattttttattgaaaaatggtccaatttataatttgaaattttttagggtcatctcaaaaacttttgaaaaatatggggaacaacttgcaaaattttgaggggtctctgaattgaacttacaaaatacttcacgaattttcaccattttaaatttctcaaaattatcattaaaacaatggaatttacataaaaggatttgaattttcctaaaaaaattaaattacctctaaacgttctctcatccaaacatactctaagaaaatttgtgataatactaatttattttaaaaattgttgttaattttataattataccatccagggagagaaaattagtttatattcacaatatttattattgattatagaaaactatataatataactaggagtatgttgataagaaaataatcattacagctaaatttttgaaaggatatttatttttgaaagaaggattccatatttattgctggaggtagtatttttttaggctttcttcgaagcttttataggtacatattttgttatttagattatgtttttacccaatcctttttaactaacttgtcattatcatctatattggttattgtgtcaaattagagtgtatcaa

SEQ ID NO: 30053 - DNA, 815 bp, Medicago truncatula
  Intron number 2 from transcript Medtr3g137730.2 (locus Med tr3g137730) derived from phytozome v7.0 (chr-ID MtChr3; po s 34986358 to 34987172)
acaaggtcagtttcaatgatttatgcttacttgccacaacttcgattttaaaaagctatgttggtgattctttgcggtcttgtataaattggcatcattgaggcatttccctttgtagtatagcttgtataaggtctatctggattgacttatttgagcttttccgttggcataagcacatgtcagactatttgtgagaccttatgaaaacaacatatgatatcacacgtccataagctgttttcaagcttatttccataagctattatagtttatgaaaacatcttatcagttatacgaaaaccttttgacattattttatcttttgttattgaaataattttatatgtaggtaagcgcttatgcatcttcggctgattactaggcctctgtttcaataacttcttttaactatggtttgattaggttaagcttttcacttgttaaaaatattaatattaattgtaacacagttgaagaaacacaacttttcaaaatgcaagttttggaatttagctgctttacactgagtggaagtgagaaaaaggttttaggggagtcctcgatgggtataagttaatgatgtatctgaattctatcttgtagaaatgaacttaatccttttcactatctatgtcattccctgtctattgaccattcagttcgttatcctataactcgttcttttaatcgtattttggagtttggaccttaagaatttttgtgagttttgactatatccttttattgcaagtacaaagtacccactactttttaattgctattacaggatcttagtctgcaattttcaaatt

SEQ ID NO: 30054 - DNA, 572 bp, Medicago truncatula
  Intron number 2 from transcript Medtr2g080200.1 (locus Med tr2g080200) derived from phytozome v7.0 (chr-ID MtChr2; po s 18427843 to 18428414 reverse strand)
ctttagggtatctataaactccatttatttttgtttttgttcttttcggttttctctacaaaaattattatagtattaaaaagaagtgttaaataagtttttatcctataaacaaacatttgtttgtttagtctcaaaaatatttctttaaagaatagtccccatttccgtagtacgtttgatcttagttttttttggcaaaagatttatcttagttgttaaatgctgaaaacatgtcatcgtatacaatagatgctaaaaataaaatatgatatatttataaggactaaaaactcatattaaaataaattttgtcttataaatatattgtcttttatttttagtcgccatatatgatattacatttaatttattttatcatgtgaaaatttgtgcacctaaaatgtttggggaccattgctttttcaaaaaaaattagagggacaaaattaagaatgatctatttatataaacaaaatccgatcttatttaaactttaaaagaattctataggggaattatatggttgcattttgtaaaaaaattcaggtgtgatttgaggattgtaagtg

SEQ ID NO: 30055 - DNA, 905 bp, Medicago truncatula
  Intron number 1 from transcript Medtr3g169330.1 (locus Med tr3g169330) derived from phytozome v7.0 (chr-ID MtChr3; po s 44149719 to 44150623)
gttgttgaattgtaagaatttagcttctgtttttaatgtactcagttgtgtttgtgaaagtgttgttggcattaggaatatatagggaaagggatggggaaaatgtactcactagtgttgtctcaatgaacagtttatatcctctatcaaaatgtgagggaaagactaaatatctgaatttaaaagataggagaatagtgttatgagtacacaaaaatgtaggtcaaaattgcaatagagtccaattatagaacaccgatattgacatgaggagaatcaaatataataatttaagatgagcacacttttaaaatctcaaatcaatatcaattgatcaacccaattaagttgatgtagagagaaaacttacaacggctcccacccatattttggttatctaaaaacatttttgacgacaaaatgatcgataaaagatatatttatggatgtgtttgttattttgttgcattcaaaataatagttcaaaattcaaaatattatgtctacccaaaatatcaaagaaagtacacttagccaaatttactttatgcaaatacgataaacaaactcattgactggtctaattcctactcatcaacattgaactgtgcatgtgacatgtcaaaatttatattgggttcatttttttcctttaaagattgaattaatttttggaaaaattaaatacaattcaaaatttcaaattcaaatattaatgcacgggttaatgccatatacaactttatggagtaaaccatttattggcatattttatactacaatatcaagggtattgttcattgagtttccttttctagtcattgttaaatacaaatatgtgaatacccaagtagaagatgaatgaataagtaagatccaaagggagttgtaattggagtgcacca

SEQ ID NO: 30056 - DNA, 835 bp, Medicago truncatula
  Intron number 1 from transcript Medtr2g056750.3 (locus Med tr2g056750) derived from phytozome v7.0 (chr-ID MtChr2; po s 15607405 to 15608239 reverse strand)
caatcctgtggctcctgtgcatccggatcttttaggtttgggcttgggcttgttttctttgattttctgcgtttttgtctttccagtgctattcacacccctttttttttgttacctgcacctatgtcttgattaaaattgtgataaaattcctagaaaaattcatacatgtttcttgatattttcttagtgtttttatgacatttttgcacattaaggatccatgaaattttttgtacaattaattcataacaatttaattctctttgaattatttgttatggattcttcttcacacatttgtccttgatgtgagaatatgtgataaaaactacttgatgtgttaatatgagagatttgtgcctataatttcatgttgatttgctgttttgatttggttcataagttcttgattttataaacaatatatgcatattttgaaagatatgaaatgccaagtttattctagaaaatatggcatgaaaccatgcttgcatatttccaataattccatgctataacttgagataaagaaaactctttcaaaatttgttagagcatgagaattagaggccaagaatgctttaggtttcatacctaagtttttagggtttaatgtcattttgttaactttttgtgccatcttgcatgctttcatttcttagtgcttattatgttctttcttttgactaacaagtttatttccatgtttcatgcatctcatttagtattccctccaccttctttagcctagcatttattcttgcaagttttaattcgttttagagatgtaatttgtcatcattattttgtagcttggcaaaggggccataga

SEQ ID NO: 30057 - DNA, 525 bp, Medicago truncatula
  Intron number 2 from transcript Medtr2g073840.1 (locus Med tr2g073840) derived from phytozome v7.0 (chr-ID MtChr2; po s 16741039 to 16741563 reverse strand)
tattttacggaagctagctattatcacaagatcaggtaaaccattaaattctatctcatgatttttccatgttttttcgcattgctatgctagctgatgatgttagcagtgtgagatgaacattgtgaatgagtttgtcaactttctacatttgtgcatctcaatttgccatgcctgaatcatcaagtcatcatgatcttgagattcagcataagtaactttttagacctataatattctcttctcaaagcatgtatattaaaggaaataatagcttatttaagcgtctaataattcataaatcaatttttgcctatacactttatatacacaacgataatgctatgtttcaacaataaaattcttatgttattttgatgatatgttgcattttgaattgatagtagtgagttcacacaggaaatgttcaatgtagcaaatattatctctctagtcttggccaattaaaattgtgacctaaattttgcagggatctccggaatctacttaatagccgagatattt

SEQ ID NO: 30058 - DNA, 978 bp, Medicago truncatula
  Intron number 1 from transcript Medtr2g118010.1 (locus Med tr2g118010) derived from phytozome v7.0 (chr-ID MtChr2; po s 27881114 to 27882091 reverse strand)
ggtgaactcgttgaaattggagctgaaattgggtatgtgtcaattttttttttttttttattattctgagaaattgaatttaggtttttgcttttggatttatttgtaacatgttttgtgattctctgttattggtttttgtaatttttttgtgggtttgtgtttttttgttcaatgatgttttttttttttttttgtgttctgtgaatttttcatcaggttttgatcaaatcatgatttagttggattgtgtttatgtgttgattaggttaactctattggaatttacaattgtttgtaactatgttttcaatttgattgatgagttgaactgctatgcaatagttgtactgaggaatctaagagaagtacatgttttgtgtgaaatttttgggaactttaatgttgttaaagtgtaaaaatgtcggtttattgtcgggtcattagggtggtaaaaataaggattaaaacttagtaagtgtttggtatcatggaggatttgccgaaataacactgattgtagcttttgccgaatgacgttgaggaaactaagaaattacatgtgttgtgtgaaatttttggggactttaatgttgttaaattggaaaagatgttggtttcttgtcgggtcattatggtaggaaaagtatgaattgaaatttagtgtatgtttgatttcgttgagaattttcagaaatcacggtcattgtagcttttgcaaaatcacgtgcctcaatgtgattttggaaaatccactgtgataccaaacatacacttaaccgatagtttgcagtttaatgtttggtgtttcaataatcatttacaataagcaagttcacttgtacatctttggatgccatttcaacttatttgataagttcaaagtatgtgccaattttttttattgttctgtggattttaattgtatggagtatcttctgattaaatgtgatgtactgaattacagctcagatttag

SEQ ID NO: 30059 - DNA, 1038 bp, Medicago truncatula
  Intron number 1 from transcript Medtr1g132820.1 (locus Med tr1g132820) derived from phytozome v7.0 (chr-ID MtChr1; po s 29770857 to 29771894 reverse strand)
agaaatagctttggttactccggaccaagcataaggttagttggacttggacactgttttcttcaacttttgtcaagttttgatgatattaatctttatttggttggtacttggtagatatatagaatatagatcattatcatttagttgtggttatactgtatctgtaaaatttcctaagtttttgttgtcctatcctatgctattcttttttagtgttttaccatgaaattctcctcaactaattatattctaacctaatagagtattttgacttgaaattgatagtttaatttctaaaattaacgaaatgattctgataggtgcttgggtataattcctaaatctaatcaagtagaatgggatgctcggtggagaatttaagtggcttggttcttctcccttgataataactagcttttaagggagggttacatgattgaggatcttcagtttcgagacccttttaaaatttatcaatttcagggataaaatctttagacgtgactaagaccatgtttgaattgactaatatgagcttatttgttgtgtgactatttgggagagcttatagaagcaacttatgacatgttcattagtggttttcagcttatttcagcataatagcatccttaagaatagagtctaagggtgtgtttggatgggggatttagaaggggaagagagggtagggtttaattttcttttttaaagtacggacactataaaatacatttttttaaattgaaataaaaacatgataaataatcatatataatacttaaatcacgcttaatttttgttaaaaaaatgttttatattgttacagcatatgagatatttgaagaggattatatggattaattaatttcataacataatattagaagtttaaatgtttaagttgtattaaatttacattacatagcttaatttccttgtttttcctcaaaaaaaaaaaaaaaaatcatttccttgttcatcttttttagtaacctctaattttgggtttatgattatttgttatcagatatcctg

SEQ ID NO: 30060 - DNA, 417 bp, Medicago truncatula
  Intron number 1 from transcript Medtr2g129480.1 (locus Med tr2g129480) derived from phytozome v7.0 (chr-ID MtChr2; po s 31320725 to 31321141 reverse strand)
tcgcatcattgctgctttcatagtgagtcatcatcgcacacacacttcttgcactttgctgcataacattgttaaaaacgtgtgtttgattttcttgtcgttgttgtttttgttatttatactatattcgtatacccttttacttgcttactcaaaaatttgcttttttaagtaatggggtttcagatttctgattacccttttcattggatatgcttttcttttgcttcttttacttctcttttgattttcctttgataccaagtggggtataactccaaaattaaatctttattgtttaatctctattgggtctgttttgttttgttttgttactttataatgttatatatgttgtgttcttacctttgatgttttttattctgaaggtgatacaagaggtggaaaattttcaac

SEQ ID NO: 30061 - DNA, 664 bp, Medicago truncatula
  Intron number 1 from transcript Medtr3g105150.1 (locus Med tr3g105150) derived from phytozome v7.0 (chr-ID MtChr3; po s 26238989 to 26239652)
aaattgatttaactagagcttttgctatcactggggtacataagcacatgcagccacattagtgtcacgtatcacttcaaaactcttgaaaacaagatgtgccattttgtctgaccttattttcgaaatatatgactactcaccaacgattagcaagccttccatctcaaagaccactaattaccaacataaaaaaacaaagaagtggggttaaacattccgtattaatgtatttatttttttatagacaaaaaggtgaaaacaagttaaactggcttacctatgttcagaaactagtgtaacgccccgtgccaagcacgggatacattttatttaaaatattttaacagggtttacacataataagttttttagatattatttgacttttttagtttgatttgattcagaattttgatattatgtggtactttatcttcatatttaaaattgagacagagttggcaggtacatgccaactctgcttaaaatagttagaaaaagtacgactatgcttaaaatataaaaatactataaataattactatattcttaaaaatatatctaattaataagaggtatgattacctctgttataatctaccattatggctctgccctctctttagaaatcttccgccacctcacccccttttttcgatac

SEQ ID NO: 30062 - DNA, 819 bp, Medicago truncatula
  Intron number 1 from transcript Medtr3g092600.1 (locus Med tr3g092600) derived from phytozome v7.0 (chr-ID MtChr3; po s 21803366 to 21804184 reverse strand)
aattagatctcatctgtgcttgcactctcatttgggtgtatagacaggacgttgcttagttattttcttgtcttttttttttccctttgataaaaaaaaaagtataaaaatatttatccatagaatcaaccaggttatcagtataccactttgttgtgttaattttaaaatatctttattattattattattagctatatgttgaaatatgattttatgtatatgtaaaaaaaaaagtacacacaatacatgtcaatactcttttccttaaaaaaaatagatgtcaattctctaaagtcatgatctgattcacatgcaaaacaaaattttaggttggatctaatttatacaagtattttttatactgtcagttaaaaatatttaatttgaatcataattgataatataaaactttttacaccgtgtcaaaattaaactcgttgttgagtagcttaaacagcttaatcctcattttgacatttttcaaagttggatagattcacgtccacccaatcactaggacggctagctagtgggtgaccaactatttgacaagactttttttgttttttgaaaaaatttggcaacacttagttggtgtaatctcataagtttaatttagtgtgtgtgtttttttagggagttttaatttagtgtgtttttagcgtttgaatttaataatatttgtgaaactttggtcttattttatagttattttactataaaatatcaatttttattttcacgacaaataacgaagaaaatgaagaattttcaagaccaggaaattgagcacgaccctgaacaccaccgtgtgca

SEQ ID NO: 30063 - DNA, 838 bp, Medicago truncatula
  Intron number 2 from transcript Medtr3g105730.1 (locus Med tr3g105730) derived from phytozome v7.0 (chr-ID MtChr3; po s 26540412 to 26541249 reverse strand)
actctcaaacgtttcttcgttaatttttcttcttggtactttttcatcgctcttaatctaacaatattattattatttctttattattccgtcaattttcttactatttatttatttattctttatatttgcgtctcaattacgatcatcttgctttgcttgcaccttctccgcacgcgcttcaattttccacctgagccgcgcgtgtcgtatttctgttatttcaactcttccagatccttcttttcatttttttttttttttatatataaaccgattcgcgttattttttttttttgttattgttcgttttacataaacccttcgctgaacaaatcgttgttgcttcgattctttcattcttcgtttggtaaaggtgattattattccttttttttttctttaatgttcctcatcattatttgatctgtggtggttttatttttgggggttttgggttttttctgcttgattattgcacttgttaatagcgtatgaattaaattgtattatttatttttttaatttttggtttgcttttgtttaaccaatcattgaccttgattgctagatcaatgaaatcatgttgattttgtataatgatgataattgataatttcttcatgaattagtgcataattggtttagcttttagaaatttttgattcatggtctgggaaaaaattccaaaccatgaatattttgagggtttaaacctaattctatgaactctgatggttgtgagtgcttaattttctgtgttttggattttgattcgaaattgtattggcttgatgtttcaggaattaaggaatatagtatctgtgatctttggagg

SEQ ID NO: 30064 - DNA, 659 bp, Medicago truncatula
  Intron number 1 from transcript Medtr3g105730.1 (locus Med tr3g105730) derived from phytozome v7.0 (chr-ID MtChr3; po s 26541345 to 26542003 reverse strand)
agacgtgcgtttaacgagtacacttgtaaataaaacaaaataaaatttcaaacaattaaacatctggcacatatatgattcatcatgatctatttttcctctctttatgtgagtgagtggagtcgagggtccaatttaattgaaagaggtgaaagagttttgtttaatttaaaaagcggaccaatttaaaataaatattttttaggaggttatcccaaagtaattaccaaaataaaaagagggcgattatttttgaggatatcatttaagagactaacatattataagataggtatttatcctatcatattatattttatacttattcaactttttatcattgtacaccaaacaaattacagtatttgtttcaaaacgtcgttaaaatataaagattaaattatttttaggacatttataaagtagttttttttaagaagaaaaataatggttaatgctacctaattaatgaaatgtttaaaattgtgtttaggagtaacttgatttttgaagtttactatttactagaatgaaattttactccaaaaactaaatgtaagttataaaaaaaaaaaaaatgtatgtaataatagtaagaaaagaaaaatagggaaatgagttaagacacagtttggattgaacgattgatcgatcacact

SEQ ID NO: 30065 - DNA, 879 bp, Medicago truncatula; identical to SEQ ID NO: 28657
  Intron number 2 from transcript CU013523_11.1 (locus CU013 523_11) derived from phytozome v7.0 (chr-ID CU013523; pos 47660 to 48538 reverse strand)

SEQ ID NO: 30066 - DNA, 692 bp, Medicago truncatula
  Intron number 1 from transcript Medtr1g090350.1 (locus Med tr1g090350) derived from phytozome v7.0 (chr-ID MtChr1; po s 18262134 to 18262825 reverse strand)
tcagctgtttttcaactcacacccactagaacaaggtaataatagtttattcattcattcatcaatgggttgaattgaatattttgtttaaaactttgaactagttagtgaacaagtttgagttgtgtacaatggtgaagtttttttttttctttctgccttggttaatacttgtggtatatgctgtttttggtgtcactgaatttgtttaaggatgttaatgactttagtttatttctttatttggcaaatagttgtttagaagatatgttttattttcaagtttgttgatttaatttaattggagtcaagtaacatgatatggtttttacaacaagggtattgggtattatgtgcaaagtttaatcctaaattttatggaaatttctgagcattttctagtctgtatttggttagggtactattttgcatgtaatcaaatttgaagttttgtggatttcacagtgatgttgtttgtatgattaaaaagtactagaattcaaatttagaaagggggcactaacgcctacgaagttagaaaccgatgttttttcacttgtaacttttagttactgattgatgtgtgcaaaatcttgttcaaaaaatttacacattgtctgtggacttgtggttttgatccatcactttctctgcctttgtatatatcaggtttgacttgattataactgtgc

SEQ ID NO: 30067 - DNA, 853 bp, Medicago truncatula
  Intron number 1 from transcript Medtr3g092470.1 (locus Med tr3g092470) derived from phytozome v7.0 (chr-ID MtChr3; po s 21731573 to 21732425 reverse strand)
gatagcttctctctttgtcctaagtaagatatctactttagttcatcacttttttttcttatgaagtttgcaacaattgtaaaaatatactattttaatacaacattacaataatggttaatatttcgttttaaagcttcattttcatcataaaaagaagtagcacctgttacaagattataattagctacgacatatatgtgaaacaaacaaagtagtttgacacaagtaaatatgacgaagtttaagtgaaattgttagggttgtatttgtgttcgactctttcgatgaaacaattattaatcaaaacttaattacatcttgtttaaatttgggattacacgaccttttttctacataaataaaaataattcctcccaaattaattgaaggccggaaatttcaacaattagggttagcaaaagcatgtaaacaaatagtatcatcacaacaaacaatagaagccggcaaatgttcttcaaagtacaagtgcattgaaaattgtagataaactattttttccccctctttttggactattcctatgcattacttttgcataccgacttataatttattttcattttttccaaagagaaaatttaaaaggaaaaatagaaaacaaacaaaaaaaactagttctaaggcaaacaatgccaaatcctaaagaagtcatatgaaagaaatgtcttattttttatttttttgttgacgtttaatctcttattatttattgctacttattactagtaattgtcataaaactgtacaatagacgtgtctgaataacttggtcattttgttttcatgtggtgcagcaattgaatttagtgaaagggtaagcttctttgga

SEQ ID NO: 30068 - DNA, 554 bp, Medicago truncatula
  Intron number 1 from transcript Medtr2g029130.1 (locus Med tr2g029130) derived from phytozome v7.0 (chr-ID MtChr2; po s 7676961 to 7677514 reverse strand)
gattcttgcgtaagtaaaattattttactatctagtttgattcttgtatagttttatgtccaatttaatttttaaaacgttatgttgaatgaatttttagccagatcaatatttaagctcaaaatacaaatagaagaataaataaataaaaaaatggagatgcggggtatcgatccccgtacctctcgcatgctaagcgagcgctctaccatctgagctacatccccattgttgatatcattcatgtttcaataaatatgatttggttttctttatttttttttatcaaaaatttcaattaattttcatatttttattcttagcagtggtttatgtttctaaggtaacataagtaaagagtcctgcttaattcttattattgatgttaacttgaatttctgaaattgcatcacatgtgtgaacaagaggtacaaacaaattatttcaaccagaataatggcagtgtgtagtagttgttctgcagctaataaactcgtggtttgatttgtggttcttcaggtatacatcctttgccggtttatttccattgcttt

SEQ ID NO: 30069 - DNA, 818 bp, Medicago truncatula
  Intron number 1 from transcript Medtr1g105960.2 (locus Med tr1g105960) derived from phytozome v7.0 (chr-ID MtChr1; po s 21968379 to 21969196 reverse strand)
caacacaacaatttcgctctctcgtttcattttcggtaaagttcttaacgatctattataattttcattttcaactactttaccttttgcttctgcttattacaaaaatctacatgtgattgaatttcttaggttaatacttttttcatggatgaacatttttttgcagctaaattgattttgctttagatcgatctgtaactactttcttgaattttgatagaatatttgtgtgattgttgtaaattgattggatccgctttcatcagcttcacttgattgatatttgagttttgtgtaacgctgtcgaattttcatgcatcatttgctggagtttgttgttcaaggataattatgttatctaaatagtttagaattgcatttcatttttaattttgataacattgatttacgagatgtaggcaattatcgcaaattttagctaatataatatgtaaatagtggaagcttcctatgaagtacatatacaaacacttctgatgaaaggcgtgtgtggtgtctgacaccaacacaacacacgtgattatgttcaattaattcattttaaagaaaaatataattctggtgtggatgtgtctgtgttagtgcttcatatgttgacgacaataataatttgagaaaatgtaatcattgaacgtagttgcatatgtcggtgttgtgtagtaactcatgtgagacactggacatgtcttccatcactaggatgtatctattttcttgcaatgtgaatctacatggaagtgttatttttttcgaatgtactatatcttcaagcttaaaagtgaattattgttagt

SEQ ID NO: 30070 - DNA, 458 bp, Medicago truncatula; identical to SEQ ID NO: 29460
  Intron number 1 from transcript Medtr1g103490.1 (locus Med tr1g103490) derived from phytozome v7.0 (chr-ID MtChr1; po s 21563552 to 21564009)

SEQ ID NO: 30071 - DNA, 556 bp, Medicago truncatula; identical to SEQ ID NO: 29461
  Intron number 2 from transcript Medtr1g103490.1 (locus Med tr1g103490) derived from phytozome v7.0 (chr-ID MtChr1; po s 21564096 to 21564651)

SEQ ID NO: 30072 - DNA, 588 bp, Medicago truncatula
  Intron number 3 from transcript Medtr2g091680.1 (locus Med tr2g091680) derived from phytozome v7.0 (chr-ID MtChr2; po s 20720296 to 20720883)
aatcaacagttgtgaaagcaatatcgggtgttcaggtatttcgttgtcttttttttttctttctctatatttgttttgtgtgtaggggtgtggatgaccgtgtttatattgtatatatgtcattcttggtacatggtgttttggaattattctttgtgatcgatccatttagatgtaggtgatttgtttcaagtagaaaggaagtatttactcattacttaaaatgctatattttatttaatccaaatagcgtgagttatgaagcttctgaaatctgaattaccatagatttatgaagttttgttaatttcaatatttggattttattttgtcatagatggggtttatagctaggttcatttgattggcttatggaatccataaaaaagtggttatcttctcctaacattttgatcaattgaattggctacctctgtttttgcatcttcagttttgaaaaaaaaagatttacatattaacgtcatagtaccacattatattctgtgcatttccctcgatcttttttatatttatgctgtttatctccgtggtttcccatgaatgttgtgcagactgtgcgtttcaaaa

SEQ ID NO: 30073 - DNA, 580 bp, Medicago truncatula
  Intron number 2 from transcript Medtr3g034290.1 (locus Med tr3g034290) derived from phytozome v7.0 (chr-ID MtChr3; po s 9424820 to 9425399 reverse strand)
gagattggcgttgccctaacgaaaggtatttgatttttttctgccaaaaatttatgattttcactagtattttttattaaaatgaacaatcaatttagtctccaaactatgtaaatataattagtagtcctaaattatgtaaagcccatcagtttagttcctgcacttaagatattaggggcaaaaaggacggattttaatgtacatttagagactatattaacgaattttatatagtttagggacaacttattatatttacatagtttaaggattaaattgatgggtttcatatagcttagggaaaacttattatatttacatagtttagagactaacttgatggattttatgtactttagggaataaattgacgaagttcacaaagtttaggaaatacttattatgtttacatagtttaggtgctaaatcggagagagtgatagtttagggactaaattaatgatttattttttcacttaactttattgctgttgatttgattcttacgtttcttatctgattcaatattgttatttatatagttgtgggaacaataacttcgctagaaggagtgaat

SEQ ID NO: 30074 - DNA, 775 bp, Medicago truncatula
  Intron number 4 from transcript Medtr1g039890.1 (locus Med tr1g039890) derived from phytozome v7.0 (chr-ID MtChr1; po s 9250453 to 9251227)
aggtggttctaatgaacttgcttctgatgacgtcatcacttcaggagcacttgacttcagaatcactattcttcagatgcttcaagcttcctttttgttgattccatagctcttagttttttcttccagaacctacaaaatatatttaaccttgtatatggtcctacacacttgaacaaatattagtatatccaattgacaatttttaataccttgttattatcaaaactctcaaagggtaatgttaaacacattttgttccaacactacatgtcacaacagaacctagaaaaatttatctcaacaacaattatttctttttacaaaatatttgtttttgtcaagcagcctagtgattggagctcacacattttaaatgtagagaagtggggtgtccggggttcgattctcggcccctgtatatattatgcattattcataccaactgagctaaactcacgttattattataaaataatgacttagtagtttattttataagggtcttttaggtatatgatacaagttagttttttggtattatgtaattatagtagttatcttattattattattattattattattattattattattattattatttgtatgcacgagtatatataaggattgtatggccttgatagaaattaatgaaaatataatcaattttcctttttaaattctctaatttcttcctctaaattttggagtctcatcctattcgaactgggtcgtatcaatttcttggatggttgtaggggaagaggca

SEQ ID NO: 30075 - DNA, 838 bp, Medicago truncatula
  Intron number 1 from transcript Medtr3g076780.1 (locus Med tr3g076780) derived from phytozome v7.0 (chr-ID MtChr3; po s 17826884 to 17827721)
cccaattcttgttcgtatcttctcaatactcaaaggtatcttccaattcacaaacccttacttcttattattatcatattataattcaaattattgtttgggttttattttcaccgcaccctctttcatttccaaacacatcccacatgtttgataaaatgcctgttagatgacttgacttaagaacattttttattctttttacatttataattacaacatgagtttaatggatatgtaaatttgttttatcatatacttaaattcgttattctagataaacgatctaaccgttcagtagcgggtcccaattgaagtcagagcagtgctctagatttgaatttgagacctagagagaatcacacttctaggtctaaaaccttcaccaccaggccaacgggttacctataaagagaaaacaaagttatttggtcaacaattttgtttgtgagacaccatatatttaccttgtagatcgcctggtttagtttttttattagctctttggttgagttgagtcaaatcaataactattaaagtatgtatttttatacggtgtcaaatacattgtcaacttttagatattcaaatatatttatcttcgaacaaatagttttttgttcaactacacgcactatttaggacaaggtgttgcaaatagccgctatacgaaaccaatatttttttgcaatccgtggtgttgacaactctgtttttgagtttatgagcatgaacattcaattgatacacacacggtggacaatgtcaattacaatcttgatgaaactgatgagggttttcttgtactattttatataacagacaggtggttgtggaa

SEQ ID NO: 30076 - DNA, 483 bp, Medicago truncatula
  Intron number 1 from transcript AC235749_21.1 (locus AC235 749_21) derived from phytozome v7.0 (chr-ID AC235749; pos 60148 to 60630)
gcttcatcacagatctctcagtttaggtatttcactgtttttgtgttttttaaggttttctttgtttctctgttttgttttgtttgaatcagaattgttttgttttttgttttcagctacattgtgttgttttttttaaacaacaaaaaaactagttgaaattttttgctactagttgaaaatgcttaatgaaaaatgattttaaaggaagataaattagtttcatgttaaaattagaacagaaattaagatcttactttaaccctttttcatattcatgttactataatttctcatcctatagtttttaaccacattgtactttatgttgtttttttttttttcttttaatgatacaaaacccattttggatatttttaaattattattaattatttgatttaataataatattatgaagagaaaacaaagatcttgttctgacacattctcataattttctctgttgttattattacagca

SEQ ID NO: 30077 - DNA, 722 bp, Medicago truncatula
  Intron number 1 from transcript Medtr3g109500.1 (locus Med tr3g109500) derived from phytozome v7.0 (chr-ID MtChr3; po s 27433105 to 27433826 reverse strand)
tttctgttgcatccgtaccttttccactcttgtttgtatatagaacccaaattgttctctcttattttttaggaaatgtttgtattcggttatgtttgatttaaagatttagttatgcatttaatgttaaattttacacttaacaaattcatattgcgatgaattctgaataaattagttataaactgcctatttctgttttgaactctattatcgggtatgggtatccgtggaaacgggtatcagcaaatctgtgtctgtatctataaaacaatgggtagtcaaatacttatttaatatacacgtggatatccgtttagctaccatccccgtgcccgtttagctaccatccccgtgcccgtgacgaattttattgatcggtacccgtgtgcactgcttttttttttttttttttgccatccctggtccaaagaaaagttgcgcgcatatcaaatgttgagggattaatctcagttgagcacaaatatacttagtttacacattttaacaacataacaaagtacataatacttttactttttttaaacaaaaaaaacaatgaaaaaacacaaagtaaaacatttgatgcataatacttttacttgtagtttaagttccaaagcaaaatactcacatttttagcacttgtaaatcctctttagaagtgtcttctgaatgatacattgctgaaaattgatgaaacaatacaggaggtcgtgttg

SEQ ID NO: 30078 - DNA, 599 bp, Medicago truncatula
  Intron number 1 from transcript Medtr3g105900.1 (locus Med tr3g105900) derived from phytozome v7.0 (chr-ID MtChr3; po s 26589226 to 26589824 reverse strand)
caccgtgccggaaacaagagaagacgaagttacaagtaagcgaaggatcagagagggaactcataaccggaatcggaatcaaaggcacaccaatgcatcaaggaatcgttcttacaaagctgacaggaatatagtcggtgggagagagcgacgacgacccaaattatcggcgtgggtactggagattccacgggagaagaaagttgtggttggttcagggtcggttcgtcagagggagttttccaacaagggatttctatttttttttttgtagtgatttgaagaatctttttgttttctgttttaaatgaaatggttttgaaatgattcgacggtgatttgggaatctgtatgtgtgattttgaattttgaaggtttaattgtaattcaattttatataaagctcaagtatctaaaaaattgttggatttctaaaaaaattcaaaaacccatttgatgataatgttggatttgggtatgagatttgattttggtgtgttacagaaagaaacagtgtgacttagggaagcaattatgtggattatgatgatagtgttggatttgggtatgagatttgaagttggaagtttgatttaggg

SEQ ID NO: 30079 - DNA, 940 bp, Medicago truncatula
  Intron number 1 from transcript Medtr3g123890.1 (locus Med tr3g123890) derived from phytozome v7.0 (chr-ID MtChr3; po s 31278349 to 31279288)
taccctcctattcaccaggtctgttttttttttttttttaattaatttgaatgaattcatttaaattggatttggtttggtttggaagattttagggttttcatgatttttttttaggaggggggttcatttgaattgattagtctttaatatgattgtggaattataaaaatacttgcaattcattttagttaggtgtcaatttcaaattgaggaataactttgttgttaaatttaaaaatgaaaagcttcttgttgtagtttagccttattgattgatttcaaactgaatgtttgcatttggctttgtgtttcttgttatagacatactcattgtgaaaaacacttcaggatagataaatttctgagtctgtaatgtgattcaggttggttatgtcaagtatggatcatgtgtagatgctttgttttggttgaatttttttgataatgttgaaattggttcattcaatgtattttgcactcaaacctaatgcaccccaaaagtgtatttcaagaaaaattatatttcttaaactataacctaagtgaaattgaagaggttattgaaattaatcaaactagattcaatgacaacaccataattccataaggcgtagtctttgaatatctttcatgaatatacgttttatgttctgatgtctgggcatttccattgttcagttgtcaatatttttgtgcacgtatgactacaaccacacaatagtgaagcgagtgaaattttaaccattaaatctatggggtgttgcatgttgaaatatattcatgtcgtagaaactttagccagtctttgattaactcatgttagtatcttcaattgagttgtgaggaagttgatcttgccatgattaagctacaaaaagtgtatatttgccaaaaggtgaggagaaaatgtgacaattagtttctttgcagtgtcaca

SEQ ID NO: 30080 - DNA, 1045 bp, Medicago truncatula
  Intron number 1 from transcript Medtr4g160670.1 (locus Med tr4g160670) derived from phytozome v7.0 (chr-ID MtChr4; po s 40762043 to 40763087 reverse strand)
gtgattttgttcaccttcgttcaagaaccaacacggtgcgtttctttttattctctctctctctctctctctctctctctctctctcaaattgtgtatagtaatgcatgagcgttttagatagaaggatagatttgtttatttatttattgggattttgagttttggtctctaaaggagtaattactatattgaaattacaaaatcatataggagttcatggactgaaataattaacctaaccgaaaacatattcaacttttgagtatgcgaaaactgaatgtcactattttccacgtaccctgaatgtcactctagcattgtaatctgaatatgctgatagaacaacggaattaagatgcatctctattggaaattaccaaatactgtagagttcatccataaacagatccagcgacatttttatttttattcctaacattattgggatgagtgaaccatcaatttcgtttttgaaaatgtagagttaaacaattccatccttaaattaacaaaattttgaaatgatctctaacttccctgtctcatatgttccttcaagacaatttcaaaaactaaattgatcaatccaaatagattaatgtgtttcaagatttttaattttatggatcattttagaatttcgttaattttagggaccacgtgtctactattttaaggattgaataggcaattcattcttacagggacacattaataaaacaatggaaatataacaagttaaattgggaacaaacctttgttgattacattatttcatgttcgatggcatgtacatcgtgtgaattgggaaccatatttatttgcaccagcatgaagtagtgcatatacaaataaacaaaaagttgttggttttttattcaaggtgactcttaattcaatactaaactagttacttttactttttcttttcatttctgttgatgcaaaggtgaaattgatttatgcttctgaagctagtgaattttatgcatgttactattgggtgatatgaatgcagatatctgctgttgctcggattcgga

SEQ ID NO: 30081 - DNA, 337 bp, Medicago truncatula
  Intron number 4 from transcript Medtr4g135010.1 (locus Med tr4g135010) derived from phytozome v7.0 (chr-ID MtChr4; po s 32662164 to 32662500 reverse strand)
atagtggcgaggtgaaggtatgtctcgcatttattattgttgtgcgttgtaattttctcttgtgtaatactaataccacatttatcgactcatatgaatatatcttttttccacttataacatgtaagagatctaaaagccattcatgaattcactcctaataccatagcttaagttttgagataattagttgatccttcatttggtaccggagtttatgtaaccaatgtcacgagttcgatctaaaatgaagtcaaattgcataccaggtataatgagtttgtttattgttcatacttcaagttgtcttcaacagttcaacccagagggctcttgc

SEQ ID NO: 30082 - DNA, 754 bp, Medicago truncatula
  Intron number 3 from transcript Medtr5g024950.3 (locus Med tr5g024950) derived from phytozome v7.0 (chr-ID MtChr5; po s 9974904 to 9975657 reverse strand)
gcagtagactagagaagtgtctttttcttctttatgtactcattttttgggtgtttaatataacaatccattcttcttccttgagtgtttaatgtaatctatatgagacctttttaaaaaacataaataaattagcactataaccaacaatgaggatcagttgaagttcatgagatttttactctggtatttgtttttgtcgctcaattggattccttttatgttgatgtataccaacttaatgttggccgttaatttttactctgtattttaattattaggattggcatttccgcataactactttttgtgaaaaccccaaatatgactgatagctgccgtgctgaattaattcttgcttaaccttggtccaaatcagaaactagatttacgagctttaactgtgcatgttgttcggcccttcttagttgctggagttttccttatatgtaacatgtaattagtacaatttacaataagctttatatttccccattattttagccgcatgaaattcatagttttctataattgtttttttttaccaaatcaaagtaacttttacttcagtttctctagttgtcctagttattgtggtatttttctgttggaaataggtttcaaactcgattttattatatttgcaatttggcctatattattaataaatcattggttatacttttttggtgtatcttcttgttagttgctcattgatagtaacaacagtggaacaaatatgcagtttttggtt

SEQ ID NO: 30083 - DNA, 953 bp, Medicago truncatula
  Intron number 2 from transcript Medtr4g079880.1 (locus Med tr4g079880) derived from phytozome v7.0 (chr-ID MtChr4; po s 16206447 to 16207399 reverse strand)
ttccacaacaagtgatcattattcgactgattttgttccagtaactgcatctagttttctctgcacgttcacctcggaagaagcttggagttttgtgtaatagaagaatctgtgagtaggtaggcatcttttttacgtgaaaaacatgacattcaatttgaaacttcaagacaatgctctagattcagggtgtagttaagaaaatgacttttttggaaaagtcattttgtttagccaatggaataaatgttgatgccatgtcagctagtgtcttgttgatggaccactacaaatcattcatcgtacaaaatattgattacttttgatttattaacttattttatttaaaataaaatcatttttgttcttcatctgttcattttgtttgtccttagtccttacttcttcatctgcaaattattcattttgttcttcatcttcgtcccaaaatcgaaaacatgttcatcaccaacaaaactcgttccaaaagcattcaaaatcgaaactcaaacattgagatgatgttcagttgaaccagttccttggtcagtcgtccctcgttcccggtttgaaattgaaatccaattccactttgaaccaattcatatcattcactcctccctttttccaaatcgttcccaaatcacaaagattgaggtgaggttcagtttgtttgtcccttcggttagttagttttttgggggtttttctggttttgtttggagtttttggggtttcattgtgcaattcagattccatatctttaatcgagctctatgtcaaaatttactcttacaattaggttttttatgataatttatttcgctttaaaccctaatttcaaaactactggttagataacttttctttggtaaatttaatttcaagaattgtatgttatatatctattttgctgagtttgttaatgattcagttcatttcagggtagaacc

SEQ ID NO: 30084 - DNA, 778 bp, Medicago truncatula
  Intron number 1 from transcript Medtr7g022370.1 (locus Med tr7g022370) derived from phytozome v7.0 (chr-ID MtChr7; po s 5564917 to 5565694)
aatatagtagagtcgttatttttgtttgttaagaatgattttttcttttatattgaattcaaatttatcgatataataatattactgttataaagattaaattttttgcatttcaattttttttcctattcttctaagacatagaataagtaggagactttgggtgttgttattatttacggttcaattgtgcacagtatgtgtttgataaaatgccacaacaggttttacttcaaaatgtgtgtcacatatctatgcattctttgtcttctatcattttgaaatgttgtcatagtttcaaaattgaatgtgggtttttcgtaagcttgatatgtttttaaaagagttttgttacttctactgtttggttttttatgcattgttagtgtaaattacgtgtggtatgactagacatgatatgattagaaatgagaatactagagagagttagggtaacatctatctaggtagtcaatcccggatagcagcatggagtggccgaccccaaaagcgggatagcggatcccattcagcgggatcgctgggttctcaaatgatagaatgtataagaacaaaggagagattttataaaaaaacagagagcaaaaaaagatgttataacaattactagttagagattcaatgtgtttttttaatgtcattcaaatgtaacaaacaaaaaaactatatgataaaataacagagaatatgtaatgagtgaaggagtttaaggttgaatacagcggttacagagagagagtggaaaggagaagagaga

SEQ ID NO: 30085 - DNA, 696 bp, Medicago truncatula
  Intron number 1 from transcript Medtr4g114540.3 (locus Med tr4g114540) derived from phytozome v7.0 (chr-ID MtChr4; po s 26212625 to 26213320)
ccctctctttgttctcccacaaccgccactacaaggtaaaccccaccttctctttctctcttcctgttaggtattcaataacaataaatttaccatggtgatggttttgttaagattcattattatgaacgcatgtcatagttgttgactttaatttgcttaagaattattattatgaatgcatgtcatagttgttgacttttatttgttctaataactatacttcacagattcatgtttcatattaatcatcaatttcaatatattattacttattgaagattttagttaatcgagttaaaatttgaactgatcgatcataaactaatgttatgtttggattgacttataacttatttgagcttatctattgacataagtacaacgatattgtctgagagaacttatgacatgctcataagttgattttagcctacttccataagctctgctgaattgtttttgaaaaccgtttacggcttatatgaaaatagtttgactttattttatcttttgtaatagaaatagattagacataagcactgatatgagaagcgtttcgtttatggtataagtgcttagctaagttattcatccaaacagggcctaagttttgttctatgccattttgctactttgaaggttttgtgattcttgattaaaatatcttttgcttagcattagcatattgttgaa

SEQ ID NO: 30086 - DNA, 507 bp, Medicago truncatula
  Intron number 5 from transcript Medtr4g114540.3 (locus Med tr4g114540) derived from phytozome v7.0 (chr-ID MtChr4; po s 26214350 to 26214856)
aggtatagtgtgtgactttgtgtgtgggtcgggcatctattattaatatttgggagtatcttatcattattgtcctcgtctgaattaataaatcaacctcagcggaggtgggtcttacgtcttcggccattcagagaattagattagaagaccgactccatcaggggattgagttgaaccgagtgctcaaacagtttgataccgaatttcaataaccaaattgcacccctagttttaagactacataacttgtaaaaaatatggagtctgtgttgtcaaatttcattattttaaaaacattaaaattcaatatggccctctccaaacctctctatctaaacatatccttaggcaccacaggcattaatcagtaaactcaccaagtgtttccttcttgttattgctttattgttattcgatggacactttgaagtggaactcaaattctgaagttttttcttcattctttttgtgcttttaatatatatctgttaaaattgcaggttt

SEQ ID NO: 30087 - DNA, 506 bp, Medicago truncatula
  Intron number 1 from transcript Medtr7g008680.1 (locus Med tr7g008680) derived from phytozome v7.0 (chr-ID MtChr7; po s 1350118 to 1350623 reverse strand)
cggtctctacactgacatcggcaagaaagccagaggtagcttctctctctcaatcaatgggtttttgttggattttttttattttcttttgggttttttttttttggttaattgatgttgttttgatgaaatctgtaatgggttttgtttgttttgttgaaaattttcgttttgttttgggggttttctttgatgaaatttgtaatgggttgtatttgtttttttgaaattttgtttccgtctatgtatggttaatcaatgttcttttcatgaaatttgaaatgggttttgtttgttttgttggaaattttcgattttttcttcatgtatggttaagtcatgttattttgatgaattttgttatgggtattgttggaaagctttgatttttttggggggtttttactttatgtatggttaattggtgttgtttgataattttttttgatgggttttgtttgttttgtgtagatctgttgttcaaggactacaacagtgaccagaag

SEQ ID NO: 30088 - DNA, 662 bp, Medicago truncatula
  Intron number 5 from transcript Medtr4g130270.3 (locus Med tr4g130270) derived from phytozome v7.0 (chr-ID MtChr4; po s 31235210 to 31235871)
tggacagtacttggaaagtaagtggccgttttatgtttgcaaccttgctgttgtcatataagcaatagttggattactgtatgaatgtttctaaatacattcaaccaattttctgtcaaatcatgatgattctataggatgctgattttgttttaatctggcttgatatctttcaattctgatgaagatgaataatgatgctcacaagttttgatttgggatataaccatatattttatgagtcatgctaaccagtgccctgtgccccgaagacactggttaaggaagtcaaaagcaagttttaagttgaaaacaacactcttaaattgattacacaagttccaatgcaatactactatatttgtttccttaacaagtgccccgggggcaccaattagcatttcccatattttatttcaatgtttgatgaatatttgattgcacattttcctcaatccactcattttgtcaggtgctactgatacctatttaaattttcacccatgatatgcatttgagaaaaaccttaatctagccttcatagtcactttttcccaaacagaagggaaattgtaattgtatagagatagataactattatcattctgttaactggctacttacgtgcagttctaattattgttttgcatggcagacattca

SEQ ID NO: 30089 - DNA, 379 bp, Medicago truncatula
  Intron number 1 from transcript Medtr6g059490.1 (locus Med tr6g059490) derived from phytozome v7.0 (chr-ID MtChr6; po s 10740871 to 10741249)
ataaaggtacacccacacacgtcaaaatcaaatattgtatatgttctaattatcatatgtagttatttttcttaataattattgttttgtacaaaatcatccctccacttaaaatgataagtagcaaaccaagtagattaatttgtgattattacgtagatctatttataaacggtgttcttcatgagtatcttaggacactaagaaatattgttgtttatattgtaggtagaaaattaaatatgaagagaatattgtagtaacaaactatagatgattttttttttttaatttgatatatatatatatatatatatatatatatatatattatgattgatcaggtcttggtcctattccaaaaaagtggaggggagtt

SEQ ID NO: 30090 - DNA, 559 bp, Medicago truncatula
  Intron number 1 from transcript Medtr7g088570.1 (locus Med tr7g088570) derived from phytozome v7.0 (chr-ID MtChr7; po s 19263437 to 19263995)
ttgttgaaccaagttaagatcaatttttctgtgtttgatcacatgttttgtggtattgaagatacttgtaccgagtcagataagattattctaagaaaataaacttagataatttgcgatagaattctgatgaaaaaattattctgcaaaactaattgtctctttcaagatatattatgacttttgtggcatggagcatgcatgttatctgttatgacccttcgtttgcatttttgttgcaactagtacaaactcctgcattttcatgattatgtgtcccatggtgttgatgtttctttgggggtgcattttggaaagaatcaatatattcttagaactagaataagtcttccccttgatgacatgcattgaaatttcatacctatttttcgtcattattttcataatatccgcttgcacgggatcattataagctagtaaaatacataaaacaaatgaaatctctattctcactcacacaagagaaaagaccattggtttgtaatttagtttaaaatatttgatgcatgaaaataggttgaagggtcatccagtctat

SEQ ID NO: 30091 - DNA, 1023 bp, Medicago truncatula
  Intron number 1 from transcript Medtr5g091220.1 (locus Med tr5g091220) derived from phytozome v7.0 (chr-ID MtChr5; po s 35671997 to 35673019 reverse strand)
gctccttcaaagattttctggagaactcttcgtgggttagttctttttcactcgaagatttttcagctacatttcaattagggtgttgatttgttttgtcatgaattgatgtgataccatgttttagtataatgtgttatcaaatagaggttataacagtgttatagccttgtaggttagctgaatttgaaaaacttcaatttttccccaattgagaacattgattttaaggatattagtgttatatctgaaaaatgtgtgttctgtagaatgatcctgcataagataaaatgtgtgtttttgacatggattttaattgttatgctgttaagattgtgagaaaataaagtgttaactttttgtttattattacattgtatgtttttttttaataaaagtatgaaattgtgttttttagggtagttatttagttgctgaaactatgtgtataatgtgaagttatgaaatggtgaatatgtatgttaatttaaacagtgttgtcaaatagcggctacaacgctatatctgagaggaatttgaactaatggttattgtttgcgacaatatttagtacaatggtttgtcaaatggagactatagccgtgccatagtagtgtagctgaatttgaataaactactacttttcgtgattgacaacattagtgttaagattgtttgtgttacttgttgaaagcttctatttagtataatggcttgtcactcttgcggtgccatagttcttctatagcatagctgaattggaacaaactgttactttccacgattgacaacactggtgttgagaatgtttgtgttatttgtgaaaaatgtgtattttgcagaatgttaccgcttgagaaaaaacaagtggaagctgctatttagtagaatgggttgtcagagacacttgccatagttggttgaatttgagcaagctgttattttctgcgtttcacaacactggtgttaagaatgcttgtattttttatttttttttaaaatgttttctttcctttttgtaga

SEQ ID NO: 30092 - DNA, 197 bp, Medicago truncatula
  Intron number 2 from transcript Medtr4g023400.1 (locus Med tr4g023400) derived from phytozome v7.0 (chr-ID MtChr4; po s 5064379 to 5064575 reverse strand)
gttgtggtttgttctaatgattttcattgatctttagattgacttcggttttcttccggtctttttgatcttgggatcgtaaagcaactaatctttcagtattttacctttttagattccattatttattctcataaattctctttttagattcttcactcatttaatcaaatatgtttttttttaataaggcaaga

SEQ ID NO: 30093 - DNA, 973 bp, Medicago truncatula
  Intron number 1 from transcript Medtr5g045770.1 (locus Med tr5g045770) derived from phytozome v7.0 (chr-ID MtChr5; po s 19188123 to 19189095)
ttgcaaccacaagtaatttggacaggctgtgcgaggtaacctaactgcttgaaacatgttaatatatgaaaaacagttctaaatcacagtaattaatctagctaggtaaatttcaaaatacagtacaaggttttacatgtcagaatatcttatttatactttgtacatgttaattttgtatttttccaaaaggaattatattaaatagagaagtaacaacgtaagcataacggcacatcatgtttgcttgtgctcatctataaatttttattcttataatatatatcattcaatacttttgtataaaaatattattaaaaattcactattctcatgggcaatggacaaacatgcaaattgtagcatcatacacgatacaatcatacaagaatgttcttttatcagagtgaagtgttgattcatagagagagtgaagatacacaccattgattacttgcatgaaatgagaaattaaacactgctgtttatatacttgtaaagttaacactagctacaacagagggaaaaaaagaacttgcctccacaatgccattcccttttttttttaatctagaaagcataaatatacggaggttttcttgcttggcaaaacatttgagttgcaaggatatttcatgaggtgcaagacaagcaaggatgttgcttcacttttttacctaattgcttgacaagtcttgatgtccacaaggttgtttcttgaagtgcagacaaactcagttatgcctatatatacaaggcgttagttttcagttcaattaagagtgtgtagaaagatgtgaatcttgaagaaccgaaataggggactctcatggttcgtgccttttggattcacggggtggaaacacgtgggaaacacatgagaggtgaaagtgaggaaacactagggtttacgaaaagaggggatccttatgaaatcaaaggctaatggttggttcctttttgtttattagct

SEQ ID NO: 30094 - DNA, 620 bp, Medicago truncatula
  Intron number 1 from transcript Medtr5g032240.1 (locus Med tr5g032240) derived from phytozome v7.0 (chr-ID MtChr5; po s 12999280 to 12999899 reverse strand)
cagctcttcaaaatcttcttgttgttgttgatagtgtgagtattttttttttttttagtaaggcttttgtttctgtgcgtgtttatggatctattaagctatttttgaagaaaaaaattgagttgtgatgcatgttatgttattaggatgatatgattttgtgtgaagttaatttgttatttaagtgcttaaaaagttcattatgtgtttaatgatctgtttatgtgataattatgtttatgtttttgtgtttaactctagttaatttaagacatgcatatgttttttctttatgaatgtgtttatgaaataatcatttatgtttgctttttaactctagttaatttaaagcatgcatatcttttttttaatttaattccatggcactatttagtgattccttgttgtttaaattgcttattaatggtgtgattttatgatttcatgcctttttgatcttgcaaattagtttttttttttttacaatctaattattgttgttaattattactatttggttagttttgtgttgattttggtattggtttaatgttgattttcattttttttgtattttggtggaagattgtgaagtgaactgtggttttgaagttggttag

SEQ ID NO: 30095 - DNA, 859 bp, Medicago truncatula
  Intron number 2 from transcript Medtr5g023730.1 (locus Med tr5g023730) derived from phytozome v7.0 (chr-ID MtChr5; po s 9351434 to 9352292)
atcaaacgcttcaaagctacggtatgaacccgatcttccaattatttctatatttgttcgtgtttttagattctgagttttgttcctgatgcttaattttatgtaataattgaaaattaaagatatgtttgtgtaattttttgattgtattgcttttgattttatcattttttcgtgctttttggtttattatattaatttatctcacttatttgagaatgcacgataacctatctagcacctaatcaaaggtgtcatttttgacatcgacacatatgactatcatgaattatgttattttctcaaattgttattggtgtcaccatgcgagtgacgtgtgtttcaggtgtccgtgtctatgtttttattatatagtctataactccagtatttgcatttgtatgggttaacaataacataggatgaatttgtcgacaatcaatggaacatggaattagatttaaacactattttatttggatgtaaaggggttgtattgtactttttagagtgaaaatacgaggattaaaatcattgtttattttatgctgtcaggaattgatttgttcatatggaaattctttggtgtttcagaggggttaggatcgtctccatttaggagcatatccatttcttctatttagaaagagagacacaagtttgaagaaaattataaaataataattaatagtggtgggacccactatatctctaaatggcatcctccatttattttgataaatggagagcatcctaacttgtttccgagagtatttagcgaatgtgtgaatataattttcttttgtatttggatttatttataggtttggaggcagatcacactgtccatttggttcgt

SEQ ID NO: 30096 - DNA, 811 bp, Medicago truncatula
  Intron number 1 from transcript Medtr5g011270.1 (locus Med tr5g011270) derived from phytozome v7.0 (chr-ID MtChr5; po s 3038844 to 3039654)
aaaagtaagagtttcttttctcacctctagcatgacacgtgtattgtgttactagattagaccacatatattttgtgccgtgggagtttgtttattgtattcggtttaatcggttataatagtttgggatgcaatttgcaaaccataggactaccatatgaagaaaaataaaaaagtactgtactagttattgatttagttattcaaaaagaccatgtgacctgagttgtttgatcattctttactgattgctaaaaaaaaaataaaagacaaaataaattggattaattgtctctatccaataaaaaaattgtgtttctctataatgatattgttttaacgagataaccatatataacattaattaaaaacggacaaatttgtctgttacactaatcttttctaataacaaatgttggtatgttaatgttaatattattttggcaaaattacacttttagttccttaacttaatttcaagtaacagtttggtcatttatcttttttcatttcaatttagtcatttttgtccatttatatatatattttcaagcttcaaatataatattcttatgcaaacatagacgaggatcatataattgaagattgaaagaccataagaaaataaaatcatgaatttgaaaatggacaaaaatgatcaaattgaaatgaaaaaaaaaagaagataaataaccaaattgttacctgaaattaagttaaggatcaaaagtgtaattttgcctattatttttgacattaggacttcaactcatgttactatttgatatctctttgattcctaatgtttcag

SEQ ID NO: 30097 - DNA, 466 bp, Medicago truncatula
  Intron number 1 from transcript Medtr4g114690.2 (locus Med tr4g114690) derived from phytozome v7.0 (chr-ID MtChr4; po s 26310107 to 26310572 reverse strand)
cgctgtcaccaaaacgtattaatcactttctccccttttttccgtgtgtttattcacttttcctcgtgaaccattcttcaattacgcaatcctctttattttttttttactctctttgttttttcctcttctattgatgaacgcaccaacttttatttatttttgtatcttctgtaaccgaaaatcctttccctaatttttcttcttacttttttaatacaatgtgcgttgttgcctgtttttcaataccgggattcaatactggtaactggaattattactagctttattgtttctatgtgaatttggagttattctatttatagggtttaactttacggtttatctgattagggtttatgtttcttttttataaaagaatctttttttgtttttattatttgactttaaatttctgtcatgtttttcagggaactacaaggtttttatttactataattcctaa

SEQ ID NO: 30098 - DNA, 644 bp, Medicago truncatula
  Intron number 1 from transcript Medtr4g084200.1 (locus Med tr4g084200) derived from phytozome v7.0 (chr-ID MtChr4; po s 17629017 to 17629660 reverse strand)
ttcctgagagaacctcagtatgattacttattattgtttatgtgtgttgatacttgatgttagtctttatacaacatgcttgttttttttctttctctttcatatagctcagattgtacgtagttcgattgtgattcttatgctgctcttttttacctcagcgggttcgtccatctcggccagtccatagcaattgtctagtttttctttttgcaggtgagcagggtctacatggatcaatttatttgagtttatctactaacataaacacttgccaaactgttttggagaacttatggaaacaacttatgatttgctcaagttgttttcagtttgtttccataaactttccaggataacttatgaaaacagtttaaagcttatataaaaaataatttgactttattttagttttcgtactcattttgctttatttcttctgtatgtagaatctcaatggatttttgacttactcgtacttatttttcagttattatgatattcgtgatattatactcccctcagatgttatattattttttggtaagtaattacttaaaattgaatgtgtatatgctactagatttcatattaacattgacccttatccttttcagcgctggataatactgtcggtctttgtg

SEQ ID NO: 30099 - DNA, 604 bp, Medicago truncatula
  Intron number 4 from transcript Medtr5g012910.2 (locus Med tr5g012910) derived from phytozome v7.0 (chr-ID MtChr5; po s 3808667 to 3809270)
ctaaatataagattgctgttcttgcatcaaaccaggtacacattattaaatgttcttctcctgttatcttcatgtatgtaaatattaaatatatagttaaaattttgttaacatgtttctataaatagagttagttatccattttatcttcattttatttgagctcataagtataaatagagtcacttgtattcatcattgatcaattgataaatttatcaataaataagatatttaagtaataatacgagtatagatcctttcaatttttcaataataaagaaatggagagcttcattactagaatttgtataaaggcacgaattgagttattgacagatttctcaaactgacgatataagtaaacttttatgcactcgaaagcatagtaacatacctttcaatttctttcgaaaaataaaaggttctctactcataaacgtgcttattcacaaggtacaaagaagttcgagctgaccaaaaatgaataatgttaatgactgagaaattcaagtcaaagtgtagagaattgtgtgtcaaaacataaacgtaatgccctcactatattgttgcaggaccattgtctaattgattcgttgcacgg

SEQ ID NO: 30100 - DNA, 755 bp, Medicago truncatula
  Intron number 3 from transcript Medtr5g034980.1 (locus Med tr5g034980) derived from phytozome v7.0 (chr-ID MtChr5; po s 14377356 to 14378110 reverse strand)
aggtatatgcaaatgcaatgcaatttctgaaaattcacaccaagaaattaaagtttctgtttgttttttaagtttattaaatttttttggttcatcaaatgaagcaagacattattaacaaccaaatatactgttttgattttcattctttgcttatgtttttttctttctttttttttttttttcatgttttaatgtccatttgtcttgtttggtatgaaaatgagtattcatggaagcaagaacaataaattttgagtagtgggaatttcattgatgatgaaacttcaaccttttttcctatttatagtgattgcagaatttcatggttcttcagttagttaatgtttcactaaatgatgtttctactcttgtgtgtgctgcaactatcacattatcttgtgttggaaaatctaaccaaaaaaatcaaacttgaaatataaactaccatgagcctttgcaaggaaaaactttaggtaatttttttttaatctcactaaggaacctaaattatattcaaaatgaccctatatagcccttacacttcatatagacgtctccgatatccaatatatgtgaacgtgtgacactaacacatgtttcaaacatgtgtttccaatatccaacatccgatatatatatcatgtgtttgacactgatacgtgtctgacatccaaatactagacatatcaatgtgtctagtatttgtatcatagtagaaatcgcctaacataaagttttaattggtgctcagc

SEQ ID NO: 30101 - DNA, 550 bp, Medicago truncatula
  Intron number 1 from transcript Medtr4g136380.1 (locus Med tr4g136380) derived from phytozome v7.0 (chr-ID MtChr4; po s 33294102 to 33294651)
gagtgggaagtaaataataataaaaaactattagatttatatataaaaaataaaaataaaaaatatcttcaaatgcagttgagtatactttcatatgcataaaaccatcatggatgaaaagtggtttttcactttataaataccctttctttagccccctttactttactttcattttcttatatctctttgtccttaatattaattttctctccattttgtttcatcaccaaaaaggttagtgttattcagcaaaatattgaaacatcactttaaatcctttcacaatgatatctctcttttaggaaaaatcaaaccattttcacctgaaaaccatgaaaatttttgtagctaaatagccactgatttaaagggtgaagatgggttgtatcaagtttcaatctttttccttttctttttccaatgaagattcttcctcatcaaacaatactataggactaatttaagaatcaattttgctaatatatagactattttttttataggagaaatgtgttgatgatgttttattttgatgcaggttgaaact

SEQ ID NO: 30102 - DNA, 840 bp, Medicago truncatula
  Intron number 2 from transcript Medtr5g007110.1 (locus Med tr5g007110) derived from phytozome v7.0 (chr-ID MtChr5; po s 980491 to 981330 reverse strand)
ttgagctctgtgctttgggaactggtataattttctttaatccttttaagataaaaactcctttacttgattctgttcggtttaagcgttgttcttgattatgtaattaataagctgaattttttagataaaaactcctttacttgattctgttcggtttaagcgttgttcttgattatgtaattgataagctgaaattttgagataaaaactcatttacttgattctgattcggtttaagcgttgttcttgattatgtaactgataagctgaaattttagggtaaaaactcaattgataactgatttaattgcatacatatgattgcatttatgaaaattgtttttaatcagttcggttacatattttttcatcaactagtattaattaattaattaattaatctggaaaattaaatatgagaattgtatgtattgtgaatttctttaagttttatgtgatttgagtttcttgaaattaataactgattttctttgatccttatactttccgttaatttatagatagatattagattctgattaggttcatatatgaaaatttaattttgaacagtaactttattcttgattcatatatgaaaattgttttcaatctgatttttgtttgtttttcttgcaaattaaatttaaaaactgtatgtgtattgtgcattatttaattaatttttatgtgatttgagtttctcgactttagaataactaattcttcagtgtgtgatattggaaattatgaaggtttttttcttttgtttttctaactttgtttttgaattaaattccagctattccaactatcatactcatctctgagattttg

SEQ ID NO: 30103 - DNA, 146 bp, Medicago truncatula
  Intron number 1 from transcript Medtr5g007110.1 (locus Med tr5g007110) derived from phytozome v7.0 (chr-ID MtChr5; po s 981337 to 981482 reverse strand)
agaagccactcttcttctaccttaacatcgctaaggtaattaggttttcgattttgattaaatcgccgtttcttcatttcgtttttttcatttctgattatggatttcgtgtttctttctgattcagaaacacttgaagctggata

SEQ ID NO: 30104 - DNA, 236 bp, Medicago truncatula; identical to SEQ ID NO: 28698
  Intron number 1 from transcript Medtr4g041810.3 (locus Med tr4g041810) derived from phytozome v7.0 (chr-ID MtChr4; po s 9979416 to 9979651 reverse strand)

SEQ ID NO: 30105 - DNA, 788 bp, Medicago truncatula
  Intron number 1 from transcript Medtr7g062360.1 (locus Med tr7g062360) derived from phytozome v7.0 (chr-ID MtChr7; po s 12766384 to 12767171)
ttctttcgccgagattcgtgctaaaagtctcgaaggttcttcgatcctaaaatgttcccatgatgagtgttattggtctccttgattcttcttttttatcatatttggaacatttgatgatttttattatatacttttgaagttttctattgttttccctctgaattacatgagctttaattcggcaactatttagcgtagaatcaaaatagagcaattgggttttcaagtgctgtagttttgaaccaatcaatttgctcgattggtcgttgttaatttttgttttgaaaagatttaagctttgattaaaaatagttgaagaattaaacagggttgtgagtttctgttttatataatttctagcatgagattatatatttttatggtgtgttttttcatgatgttaagctctgtatttcacttttttttgttacttatggtggttgttttggtttttgttctaatcatggcaaataatttgagttcggtgtttcaaagtgagcttgaaaatctatagaaagaggctatgagaccaaaacaattcacttgctttttgaattttcttagaggtttgtgttctatgttaaaaaaaaaaacactaacatatgatgaatcaagagttttagaatcaagtgttgtttggaaggaagatatctttatatcgaagacgtcttaattgatgcaactgtgtttattgttatgttagaatactttatattattcaaaagaggctacaattttccctagcattttgagtttttaggagaaagacagaggagaaaataagc

SEQ ID NO: 30106 - DNA, 835 bp, Medicago truncatula
  Intron number 2 from transcript Medtr7g089220.1 (locus Med tr7g089220) derived from phytozome v7.0 (chr-ID MtChr7; po s 19548984 to 19549818 reverse strand)
gtgggattttcaggctgaattttggaccaaaggttagttaagtcttttttctagctgaaatttagttcatttctttttgaaaacaatttctcataagttatatgggatagttgactaggtttgactcattttctctaccttctgtccatgacaattgcataacttatgtttgtttgaatcaaaggatccttcatggggtaggtgattttaatcacctatgaaacacgacactgacactataggttgatagcagtaataaataatttgagaagatgtaagtaatcacatgtgtcgatgtcaatgtggacactagacacactttcaatttgaagttttggttacataagtacttatgtataataagctattactataacaagcactaatgatcatttggcaaccatctctgagggaagctatttctatggcaaaagataaaataaagtcaaactgttttcataatctatcacggagagctatgaaaacaagctgaaagcaactatcataagttgttttcatgcactctcacaagtgtttatgccaactgatagactgaaatttgtcaatccaagaaggcccaatgtcttatatgggatagtttattctgtccatgacaattgcataatttaggttttaattaagggatccctcattaggtaagtgatttgtaatcacactgattatttgccatggcaatggaatggggagagactatcctcaccttgaactttactatgtcaatcaataataaaaggcgctttatatgggataactgagtttccttattggttatcttgcagtcctttctgatagtatcggatccggctattgcaaa

SEQ ID NO: 30107 - DNA, 238 bp, Medicago truncatula
  Intron number 1 from transcript Medtr7g089220.1 (locus Med tr7g089220) derived from phytozome v7.0 (chr-ID MtChr7; po s 19549951 to 19550188 reverse strand)
gcctcaggtgaattcactgtcaaacaagaatctgggtatgtattaacaaccttaaagtttccaaattttcattcttttcttgattttttgtcttaattcagtgatgggttagtactgaataatatcctcattatctatagtgtataatttgatttgggcacaagttttaaatttttttgttttttttggtgggtttgatacagtttaccttctatattaaagaagagcttgtcaaatt

SEQ ID NO: 30108 - DNA, 287 bp, Medicago truncatula
  Intron number 1 from transcript Medtr5g032360.1 (locus Med tr5g032360) derived from phytozome v7.0 (chr-ID MtChr5; po s 13092028 to 13092314 reverse strand)
agaatttagaactttcctttatttttctcgttaaggttgtttcatactcaattttttcctctcttcttcggtttcatattaatgcaaataatctctataataaatgattcacaaattcttcattttcttgtaattctaactgatctttgatttttgtcgttgatcaacctttaattatcatctaatctaatcttgtacaattttctctaaatttgactattttttttttttttttttactaattgatgaattttgattatataattgagactaatatgtgaagattg

SEQ ID NO: 30109 - DNA, 938 bp, Medicago truncatula
  Intron number 1 from transcript Medtr4g110490.1 (locus Med tr4g110490) derived from phytozome v7.0 (chr-ID MtChr4; po s 25036003 to 25036940 reverse strand)
tggtacgtataataaaccaaatatatattataataagagttaagaattaaatttgattttagtgtctttaaactttatgtttcttcaagtttaatcattatataaattccttacaattttagtcattactttgatttatagggacaaaatgtagagactaaaaacactaatttttttgttgttgtaaaaattaataaaaatagagactaagattaaataaaatttatatatggactgaacttaaaggtcacgattttttagaaactaaaaacatatataatcatatcatgtaacaaataaccctaaaattattaactaaaaaaactattacataatgatggatatatagacatattcagagaccgaaaaatatgtcaaatggtcactaacattagcaatcatgtcttagtgactttagatcacttggtctctaaatcaactacaaacttatttaatgtccgaatttagagaccgatttaagaccaatttgaaaaatcagtcggtccatagtatattttgggaaatattaactaatgtctcttgggcactctttaaggaccataagtaacaagtatttataaaaaaatgtgtaattaatgcattgaaaatcaaaatatttaatttttaaaaaaaataataactcattttagaatgtataaaaaatgttctgaggatactcgttaacaaaactcatatatttttttttatagtagcatagaatctaataagtaggtactatacaaaagtttacatccttcaaatatttttttttttacatatacatctaatcatattttacggtcacaacatttatcactttcttctatgaaaataaacatttatcgttttctaacatacttgcacaatttttttggttgttatatgaacttgtgaaaaatataggtagttgttgggcattttcaactgtggcttccata

SEQ ID NO: 30110 - DNA, 439 bp, Medicago truncatula
  Intron number 2 from transcript Medtr5g085240.1 (locus Med tr5g085240) derived from phytozome v7.0 (chr-ID MtChr5; po s 32563114 to 32563552 reverse strand)
ttataagtttgatagttggaagttccgtgttaaaggttgttcttagatacatgtttttgaaaaacatatgggttgagtgtgcactttcaaacaatttgtgtggaaataactggaacttgatggaaaaattttatagggaataaaaatgttgatgaaaatttttataggaattaaaaagtgtgattttattttgtaaggaataaaaacaaaattctgaatattaattaacccttatatatatatatatatatatatatatatatatatatatatatatatatccattaaacatcaatcaatgttcacattctcttctcttgtgtgtgagtgtgtgagtgagtgtttggtttgagggaataatggggtttttggtggttttttgttttgattgaacttgatttcagttacggaaggaaattttgacattgattttcctcaa

SEQ ID NO: 30111 - DNA, 925 bp, Medicago truncatula
  Intron number 2 from transcript Medtr7g071220.1 (locus Med tr7g071220) derived from phytozome v7.0 (chr-ID MtChr7; po s 14591466 to 14592390 reverse strand)
cttgatactcttgcaacacagaaggaggttttttactttcttttctcttctatgtttacattcattttatgcacattaggcgtgtctcttgtctaacaagatacgacacgtgtctgacaattcagacaagtgtttcattaaaactaatttttcttttttcaaaacaccttagacatttctaaacacatctcgtacacatctaagagtgttaaagacatgttaaagaatcaacaataaattagtttaagacgcaaaagatttgaaccctttaagcaaatggtcataaatttgatatttgacttttgcgtatatagaaaattagattgagaggggagaatccactagtgtgctccacaaattctctgacaagaattagtcacggttaaacaacagaggaaagtttgtaccaaaaacatggtaacataaaaaagacgcgttgaagcaatgataatcaatgtaaggttgaagaaattagtacggttaactatttcgagttttctaatagtagatgaatggatgaaagtgaaagactattatgtcttggtttgaattttatttttctaatgaaacgaattgttcactttagtggcacatatatatgtgaatttataattaagatctataacgaataatttttataattattttttggtacaattttcatatttatttaattataataaataaatataatcagaatcacattaatatattgatgtgtcgtatccgatatttgtatcggagttgataatttatagactcggacataaaaaagcatagtattgtgacctcgatcacagtttctgatctttatttcaaaaccttactctagagtctaattttcaaggttacccatatattttttttttatccttgtgagattgtattttataggtgagcgttgttgcaaaactgtactggggtg

SEQ ID NO: 30112 - DNA, 962 bp, Medicago truncatula
  Intron number 1 from transcript Medtr5g008300.1 (locus Med tr5g008300) derived from phytozome v7.0 (chr-ID MtChr5; po s 1539008 to 1539969)
cagagctgtatgctacttccttaccttgtttaatcaccaaggtgcctcttgttgattatgtatgtttgtttgtttaaggatatttgtttctgtcgtcgttgttctttaaatcataattttgttaagtatttactaattttaagaatattaactagtatagagctcgtgctagatggcacgaaggtaggagaaaaatgaggggaaccagaggtatgaattccttagtagaagatttttcttagcatagatagattgataagctcattcgttggttggactcttatgttggattggaaaaccggctaccatagacccacgataatatcaaaaggaacatgaactgttacaccgccgacaatactatttttaggatggatgacacgggaaaatgcacgcctatcccactgatcttatgagtaaaatctatgatcagtggaataggcgtcaggttcacccgttgtcattgaagattgtgagatctctttcgagtaggatcaatattttgactgcctttacaataaggattaggaggggaagttctgaattttattgtttggcactgtcttttgattgattgtagccttttcttgtgtttgttaaacaatactcaattaagtgaattcttaactcacggaacttatttatggttggtactagacattcttttataaaacttttccccctgtttcacatcagtagttatttgatgtatatataaagggcatggagtaagaaaaaaaacatcaatatttaacaccgtaattaatcaaatgtttttttagcttgttgattaaaatatttaaattatactataaaaagctcatcttttgtttttacctttctgtatgttacaaaaagtttgttctgttctttttcgataaactggcaaatgaaaagattggttacaaactttcggcttctgtgcaggttgtataggttgtctttgtccttgctacctcttt

SEQ ID NO: 30113 - DNA, 869 bp, Medicago truncatula
  Intron number 3 from transcript Medtr7g021830.1 (locus Med tr7g021830) derived from phytozome v7.0 (chr-ID MtChr7; po s 5304599 to 5305467)
actacaggaaggtttgtggaaagatacgtttacagaagttcctgagaattacttattcattttgttaatcaactcacctaacagtgattcgcaaccatggattatttgagggtcctttaatctcatacatcaatgatatcttcgtttttaaattatttgtgctcattttctggaatgatattttcttttagcccaccttttttcttccataaaacagtttgggaataggtgtaacagtaatggataacactgtaaattgctagtgaacataattcagaactctaatataaacaagaccatgtagtcaatgtgtattgaatactttgccttctaccctaattaacctcttagtctcggtcgatatctgaaccgtgaggagatattcgatgacaaacaaaatgtttaaaaataaataaataatgggcatgattcattagtaaaaacactggtttaaaaagaaggaaaatatgatgtggttttcatcttttcattcattaggatcttttgttccatgcatgcatattgtagaaatttgtgacctaacttatccttacaaacccagcttgtaaggtgaagagtgcctcctcgttataaactcttatcaagagtcctatctaaccgatgtggaactaaatccaccccctcaaagccaacataaggcaagccagcacgaggcaactcaaatgtcgcaattaggcgactaggggcggaatttcaacacatataacaagttatttatggtaactcaacacaaatattatggaacgagagttttatatgatcaaactgcatttgccatattctgtcttttaaacatgtgtaaatatgttgcagcatttgcctagatttcaacctgaaaacctgcagca

SEQ ID NO: 30114 - DNA, 956 bp, Medicago truncatula
  Intron number 1 from transcript Medtr4g073280.1 (locus Med tr4g073280) derived from phytozome v7.0 (chr-ID MtChr4; po s 14439227 to 14440182 reverse strand)
cttgtttcgccaggtctgtctattcatttatctatctgtatgtaaatgtttgagtgtctatgttagaatttgaatgttaagataaataacttgattaggcgtttatatcataaacatttatcatatattttcacaaacaagctattttctataacaaaatataaaataaagtcaaattgtttttcgtataagttaaaagatgttgtatgtggaacgaagtgttggacagtgaaggactaacacaagaataatataaatgtagcggagatgatgatgttgcgatggatgtgtggtaagactagacgagatatgattagaaatgacaacattagagaaagagagtttgggcatgtagaaagaatacctaaagatgttgtagtaaggggagtagatcagatgaaggattagtcagatcactagaggcagatgtagatccagaaaaactataaaagaaacgactaagaaagatctagagattgatgagttggactgaaatatggtatatgataggacattatggcgtcatttgatccatgtagccaatctcacttagtaggacaaggcttggtggttgttgttgttgttgttgttgttataaaagctgtttttataaactattctgaagagcttatgtaaataagctgaaaaagcttatgaatatgtcataagttgtttctacaagctcgcccaaatagcttcacaaatgtttatgccaacagataacaactgaacaacatccttttaataaaatgtgattaaatttcgcttaactgttttatgcaaatgtacaatctggcaggaggtcttttctagtttctctcttaatccaacagtcagtattcttcattgtttattggtttttcaatgccatgtcattgattttgtgtttttgtttgtttgtttgttcttctttcattttagtcctttggcacgatcaaagaaaaccgctgaaatca

SEQ ID NO: 30115 - DNA, 880 bp, Medicago truncatula
  Intron number 2 from transcript Medtr5g012950.2 (locus Med tr5g012950) derived from phytozome v7.0 (chr-ID MtChr5; po s 3839379 to 3840258)
tcagggtatgctaatttattctgttgcacttatcatatgacctatattcaaagtttcaaatgcaattataatttaggccctgtttggatagacatctgatagcttaaccacttattataactcatttccatatcaaaagaaaaaataaaatcaaactgtttttgtataacccataagctgttttcataagttgttgtggagaaattatgaaaataagctgaagacagctaaggaacatgtcataagctgttttcataagtttttctaaacaatctcacaagtgtttttaccagcggataagtttaaatacgctaagggcccgtttggactggcttatttttgagcttgcaaataaataaacttttgtgcattattcataagcttgtcaaggtagtttatgaaaaaacagtttatgtatctaacttttgttagtgagaacgtatgaattaacataaaagcttatttatttgcataagctgtttttaataagctgaaaaataagacaacgcaaacgggccctaaatccaactaggcccttagttttatcgtttaagatctgattttgaaacaacttgaatcagtttaacttgattagataattgaatctgatatccggtcaccttagtaataactagaagtaattaagaaaacaactgaactaatcatatgcattgcagtgttggtgggaaaatgatttgtcttcaggtagctgctggtaaaaagtgtctgtacatttttctatttctatgttttggtccttgtatgtctcatgaatagcttttccttgacaagtttaagaatctttgataagttgctgactgctgaaaaaaatcttcgttatgcagtgaagaagaggttgttgcagttgagcctgttgttg

SEQ ID NO: 30116 - DNA, 451 bp, Medicago truncatula
  Intron number 1 from transcript Medtr5g046370.1 (locus Med tr5g046370) derived from phytozome v7.0 (chr-ID MtChr5; po s 19498486 to 19498936 reverse strand)
gggttttattggaaggtttaacctgcaccagcacttactgaacaatatcaatattcatatgttatttacttagtttgtctatattttttttcttctaggatcaaaagtgttattttcttatttattccggttgatattttatatatttcagaagtgtgatttgcttatgtttatttatatttttatttgtttctgtgactcgatttctagttgattaatatctcgtattaggttatggaaaaggaaattatgtcaacaaagaaagtaaaaaaatcctttgtccatcaccttttcaatataaaaaatgtttcattttccctcttggggaatttagacttcttctagtcattttctttgttttagtgttttcatctgttagtttctggagggtaattatctttgtgtaacttgtgttataggtcaagtgttttataatatttggtttttttag

SEQ ID NO: 30117 - DNA, 637 bp, Medicago truncatula
  Intron number 2 from transcript Medtr4g149870.1 (locus Med tr4g149870) derived from phytozome v7.0 (chr-ID MtChr4; po s 37314820 to 37315456)
gaaccaacccctgagtccatcaacaaaggtatccttttttctttttttaactttttaataacattaatacttgtgtagaagagcttatgacttgtccataactcgttttcagcttattcctgcaaaaaattttaggatagcttacgagaacagcgtatttgcgagcagtttgattttattttatcatttgttgtagaaataattaatacatagggcctgtttggataagcagcttatagcacaagtgcttatcatgataagcgcttatgtataagctatttttgtagcgtaagataaaaataagccaatccaaaacaccttatgaaaattgtcataagctgttttcataagtctccaaaaacagcctcacaaaaacttatgttagcagataagctcaaaataaagccaatccaaaccggctcataagcacttatatgaaaaacataagcagttataggaaaggataagctgttaactaaagttatttatccaaacgggaccttagtatataatgtcttgtgtttctgtttgtttgtaatatatgaaagtatattttggattctaacttggaattcttttttaccattgggatgtggtggtagttgtcaagtttgctagggttactggtgatctacag

SEQ ID NO: 30118 - DNA, 809 bp, Medicago truncatula
  Intron number 1 from transcript Medtr5g073680.1 (locus Med tr5g073680) derived from phytozome v7.0 (chr-ID MtChr5; po s 26508967 to 26509775)
ctgaaagtactcttactgcttataaatctgctcaggtcgatctttttctctgagatctaacgttatatttatggatctgttttttcaattattttttcatttttgtctttattttgttgttaatttcattaattatttcattaattattgttaatttgatgatttatattccattgtttgtttgacatattgcgatctataactgactttaggttaggaaaatttatcgtagttgctgtgatttgtgttttttgatggaaaatgaatataatttgtgttaattaggttttttttatgcaaaatttttgtttgagtgatgtgattggtttgtttttttttttagagaaaatgatgtaagcattcacttgatttaacgattttcttaattaggttaaaataaaggaatctctatgataaaagtgatttttgaaatgagttgaaaatagggtatcgtttgtttttggtttaaactgaaagtcttgtatgatggaacgtgtgctagtttattttacttgtttagaatagttgattatgagatgtatatttagtgttcttgttttgtttgaagcgtttatagcttttgtcctatcatgtgcaatgtatatttggttttcgaatctctgtagaccgacacctctaatcgacgtgtctggtgtctctatgttcaattaatttcattttctcacctttttaactggtgttgttttgttattgttgtgtccgtttggatttgaagatttgcgatctgatgttttaatttgactctgcttgtaggacattgctaactctgagctaccaccaactcaccc

SEQ ID NO: 30119 - DNA, 728 bp, Medicago truncatula
  Intron number 1 from transcript Medtr5g074240.1 (locus Med tr5g074240) derived from phytozome v7.0 (chr-ID MtChr5; po s 26779063 to 26779790)
attttaaggtgatatatctctcttctttgtctcactctattgttttaacttttaaccatactttgtacactcacaattatatttatttttcaaattaactctacttttcaccctcgttaccacacacacacatacacctttagctagtaaccaaacaaatgtattatgtacacgtgtctcaattcttttctattaagtatgtctttttttttttagggatattaagtatgtctttagactgtgtgttattctcattctcattattattattattattatagaatctaagaataactattgcttttgtttttaatggtagaattagaatattgtggtgccaaaaacaaatagaattagaataaggcaaattctatggtatacccaataaatttgggtgtatcggctctctttttgtttgtggtacgtctcactgaattattaacaattttttgtgaattcaaagatgccacgtattattattacattagtgagacatacattaccccttcatcatttgggttacctctaataaaaaataagattcgattttggaatataggagatggagattagaggttgaatgaagaagcaaagaaaaatgatgttcttgagatgaaaatgataaatcatttattgcatttttttcaaaaattatttattacatttgataaaatgagtattgcaatttcgcaggtgattccaagggaagcaagggattttaagcttgg

SEQ ID NO: 30120 - DNA, 844 bp, Medicago truncatula
  Intron number 1 from transcript Medtr7g040360.1 (locus Med tr7g040360) derived from phytozome v7.0 (chr-ID MtChr7; po s 9771202 to 9772045 reverse strand)
tggagaagttttgtggaggtacttgcaagtggtttgggggtagaggaagacctaagaaaattattggtcaactaagaaggatttaaatttaaatagttgtgaccaaacatgctttatgataggacagttgacattgtttatctatgtagttgacccaactattgggaaaaggctttgatggttgtgatgagattttagagcggcaatgcaacatgcatgttttgtctcatacatgcttgaatagaaatacacactagtcctttgattccatgattacgtccaaaataacatttcccttcacaccaagcaaagcactagtctaacaggcattcattcatctgttcaatgttaattggttattatttatgccctctgtttggtgttcactggctatgaaaacaatcagtgttcaggatgtgcattatttggtgcataattgtttactcttgttagtttatttatcattttaaatttctgaagttctcattttgttgtattttcttttgtcaattgaaatacagtatcatagtatacatgttttaatattgttctatatgtagcagagaatcttagatgtttgttcggtagtttatattttaggtatgcttcataattctcaattcaaccttttaacccatcaatactgcattttactcagacgccccttgaagtttgaaatactttcaatgttgtgtgctatggtacctatctttctgggggttacagtgtctatctttaatttattaaattattaaaaagtttgatattacattaagacgacattaattgtttatattttggggaagtatattagctaatggtagttctttgatctttttaccag

SEQ ID NO: 30121 - DNA, 788 bp, Medicago truncatula
  Intron number 2 from transcript Medtr7g009520.1 (locus Med tr7g009520) derived from phytozome v7.0 (chr-ID MtChr7; po s 1709537 to 1710324 reverse strand)
taatcaggtaatgttacataacactgtttattggtaaattttgttctagtaaaaatgaaaccttttgcttctaggtttgagttcaatgtcacacgtaacttcattaaccaagaatttggacgcagttaactataactttcaggtgtttccctacatcgggatttggacacttaaaaaccgtggtcgatgactttcaaattcatagttaatgaaactgcgtttatggttaatgagttttgacacttgatatatattaatcatctactgaacgtaattaacgacctatttgaactgatgtaaccacttagattgttgttttatcgtatagagtagaatagactctagcttatctcagcttaacttttcataatgtttcttgttaaacacttttactcattatctaatagttgtaaaaacctttttttttttggtagtgatagtcttttttttggtagtgagttgtaaaaactatttaatgaagctgtaaaattatcttcttaaatgtcattgccataataattagtttttgtaatcaataacaattagcatgcttatccatgtcatcaaaatttgacaaagtttaataattgctaggatgctgatatagaatattatttaaaaaatgttctataatttgttcgttgacttgaatagaaagattgcatgttgtaagttggaaggtctatatggtagaaatgttagtttacttcatagtatctgtgaagagttcttggaactaattgaaaaaatgacttttttttcttaataatgatacaggtccagtgatt

SEQ ID NO: 30122 - DNA, 771 bp, Medicago truncatula
  Intron number 1 from transcript Medtr7g009520.1 (locus Med tr7g009520) derived from phytozome v7.0 (chr-ID MtChr7; po s 1710453 to 1711223 reverse strand)
tttcacaattttcaatattgcttcactctttcaaggtactttactttgttttctcatgtttgtttttgtcactttgtcatttttatgttgttttctttgtttttgttttaatcaatcttgttttatttatattaatcaatatttttatattgagatgtaagaacttaattgagttggattttgttagaacagagtgccaatatatagtatttgtgatcttggcactcttcattcttatttcaataattgaattattgaaataatttagttatgtgattaggaacattaaatttatcagggactattgcatattttgaatgtagtagattaaattgaatgctcctaaatgatatatttataggctatgaaacaccgtcacatagatacagtaacatagatacagacaccaaacacgacattgataattagacaccactgataatctgtataaatgagagtgattgaatataataaccacatgtgtcagtatcggacattgacacgtgtcaaacatcggacacaccttaaatatggaatgttggtgctacataaattaaaatgctatatttaatgttggtctactactttatcttcattgtttgctctaacattgcattgtatagtctcaaaaatggagcaaccaaagagttctgaagtgacttaaatgttccttgcaagatcactctcttttgttctaatttggtgtcaaagttttgacttgctttgatttctgcaggtttgtggaatctgtttctgttttcccattttgat

SEQ ID NO: 30123 - DNA, 817 bp, Medicago truncatula
  Intron number 1 from transcript Medtr4g160740.1 (locus Med tr4g160740) derived from phytozome v7.0 (chr-ID MtChr4; po s 40789885 to 40790701 reverse strand)
aaggtgtgtacgtgaactgagaactggttgcgcaatgatggtgggagggtggtggttgatggtggctgttcagatacaaggaggaaagagaggaagaaattaacaaaaatacccttgatttccaattgaaatctctattatgccattaaacttggacagaaattacaaaattgtccctggtgtcgaatttttgtgtgtgtgtgtttatttttttttttttttttttgtgttcagttatcatttctgacaattatttagtcaatacctcgtgcacctaattaattaacattggttttaggacatctatgtactatgtattaatttgccattagtaatagattattttatcttaaatctaattaagaattcatgttcccttaaaaaaaaaaatcttgttgtctcttttatgaatggttgtgaatcatgttagctagcagctttttcgaagagtataggttttttatgttcgatgtttggcttatagttggggctgttttatttttgatacagatgcatttgctagttagaaaaattggcaatgatttttttagtgttcatttttgacatagtttcaaaagtataaccattgattagcttgtaactcaaatttagtcctgttgacaataataactgattatgattttgcaacatgtcaaatttttcttttcaaagtatcattgaggtttaacttaaattaatgagattgccaaagaaacttgttaacatgaattttttgcttaatcattaattttgatgtaattaaagagatatgctatttacagcgacactttttttcaagaattcatcacgatataaa

SEQ ID NO: 30124 - DNA, 691 bp, Medicago truncatula
  Intron number 1 from transcript Medtr7g017890.1 (locus Med tr7g017890) derived from phytozome v7.0 (chr-ID MtChr7; po s 4213879 to 4214569 reverse strand)
caaactcaccgattcgtcgcactcttctctcaaaggtaattcaattcgattcgttcgatccattctaattcctttttcaatcaaattcgtgattcaattcgtatttttagggtttcgtaattgtttcgcaattgttacttacttgctttgtatggatctgttttgaatctgaattcgtgatttctgatttgtcagacgtgttaattcaatgcttgttcttatttttttgtttgatttttttaggttgactttagtttcgatttgaaggttgatctatttttgtttagtagtttttttgttgatgctttagtgagtgtgatttttgaactctattttgttttgatgaatagtgtgaagttcagtttattgttgttattgttaatctgaatctgaaattgtcattagtgatgaataatattttgaggttaaattgatttgattgatgtgatttacttgttgatgtgtatttatttatttttttaaaattttgatttaatgtagtttaattgtaactagtggaggataatgattttgttaagcatttatgtgaaatagtttttttattgaaaacgcttcactttccaggttgtaagaagaatcgaaactttcgttgatatttttcgttcttttgatcttttgaatataatctgtatcgtgttgtggctaattgcttgctttttggttgtgttag

SEQ ID NO: 30125 - DNA, 649 bp, Medicago truncatula
  Intron number 2 from transcript Medtr4g039010.1 (locus Med tr4g039010) derived from phytozome v7.0 (chr-ID MtChr4; po s 9356319 to 9356967 reverse strand)
tcaactctaagcataaggtttgattttatataataatgtaaaaacttttacattttacttcaaaacttgatttatgtttgtatgaccttttcattttcatgacaatctcaaaagtgtattatgatattattcacatgtattcttacctttgttcttaaataatatcattaaaacaacatcataacggaattatattaaactactttagtaaatgtaacaaaccaaaaaactactttaataaataaatgcaatatatgatcatgtaaattccttaattattatacttctatatttaatatatatttagtaaaatgttaaaaatgattaaaccaagacttttatgcaagaagttcatgcaaataatttactatgctcattaaataacgttgcaatatgatgtatgcaatttaaatttttactatatttataatttataaaagttaagacaagaatgtatatctttatctttattataaacattttccttgcatcaaataaaaagtacatgtggcatattcacattgtccattgtatttgatgcttttaatcaaccaattagaatgattcatgactcatagtttttgtattagccaatcaagacaatttgtttttcattatttccatctacctcttcctcccataaaagatc

SEQ ID NO: 30126 - DNA, 988 bp, Medicago truncatula
  Intron number 1 from transcript Medtr5g104690.2 (locus Med tr5g104690) derived from phytozome v7.0 (chr-ID MtChr5; po s 42009636 to 42010623)
ttagatttccgtttgtcatctgctgctgctttcaggtaaattgctcctcccactctaccacttgtcttcttccgtttgttcgtgctatttttttttctttcaattgtcgctgcttttatgtattcatattattccattaactaactacctgattatcgtgtctcgttgttgtagtccttttaatatatctatctttgagtaaagatcaaatttggtctctcgcaaattttcttgattctcattccaaagacctatgaagcacggacacggacaccgaacacgacacggataatgacacgccgacacggataataatttgagaaaatgacatattttagtgtaatcataggtttttgtcggtgcttcatagccgaagaatcaaattaatcggacacacctaatccgaggagtatccatgcttcatagccgaagacaaattatgacccgtttggattagcttagcttattttaaaacacttatataaaacagtctatgcaaataaataagtttacttgttatttataaaggtagtttttgaaaagaaaaatgaaaaaaatatatatatatatctcaatccaaatggaacctatgcttttgactcatcataaactaggttttgaacggaactctctccttttatctaggttttggaccaactaagcatgacaagattgacatgggtagaatatttttccaatggactaatttgtccctatattaaattatcctaaattaatttgaattttgaatattatattttgtcagaactaactaaatcaggtcgtgaaaaaaagttgtgagggaccaaattgtttgtatttttagtatatgatatgataggatgatatttgtgctctttgcaatttatccaaaagtttagactccattccctttttcttttctttttattgttccagtttatctactcttgtcagtttcaacttcactacaggaatttggcatctgcctagaagtctccttcaataa

SEQ ID NO: 30127 - DNA, 438 bp, Medicago truncatula
  Intron number 2 from transcript Medtr5g104690.2 (locus Med tr5g104690) derived from phytozome v7.0 (chr-ID MtChr5; po s 42010595 to 42011032)
ggcatctgcctagaagtctccttcaataaaaggaggtatgtattctcttattaattattgtaacatgtgccttaaaacacaagttaatggactagttatagaaatttttatgaaattcatacattcaaagttaaattttttttttttttccatcacacgatttctattggtagataacttaacgccttccttaaaggcacatgttggcatgacagaaatctattgaagttattatcattactagtgctatttaatttgcagctatctaacatgttttgttttctttgctttgttttttcttctcaagccaatggaagatgtatgttattcattctttaatgatcttttttattaattttttgcattacaattgtttcctactacattattgttggatggttgtttaattctttatgtgaactcttacaggcagtgata

SEQ ID NO: 30128 - DNA, 658 bp, Medicago truncatula
  Intron number 2 from transcript Medtr5g088760.1 (locus Med tr5g088760) derived from phytozome v7.0 (chr-ID MtChr5; po s 34447560 to 34448217 reverse strand)
gaggtccacctaggccacttaaacgtttacttcaggtaaatttaatttaaagttcattaatcattttgtgttattgtgttaattttgtgttgtagttgtattaatctctgaccattataaatgaactcaaagtgtctttgagatgtcaactcaatgttaaaagcttgattatgtacctcaaaatacaaagttcaaatcttctaaaaaacgattgtaaaataactattattgctattttaataataataataattcatttttcttcactttatttttatgacaatggactcaatttccatggtggagtgctggaaaatttagtgttagttttcaaatttgtttgtttcacattatttcaagtgtgaatctgattttaatgtgttcaaatgtatgttgtgttcccacttcactttttttttcccttctctttttaacataaaggtctagctttctataacagaaaatataagtttggatgttgcaagcttacctaaccaaacattgcccaattgaatccaccctacctaaaactaggttcttcctcccttctcatttgaaaaaggtcaatttccaaattgttttttcatagaaattaacttatccctaccataaagtgaaggtctacatttaatatcaaaagtcaacaatttaataggta

SEQ ID NO: 30129 - DNA, 368 bp, Medicago truncatula
  Intron number 1 from transcript Medtr5g088760.1 (locus Med tr5g088760) derived from phytozome v7.0 (chr-ID MtChr5; po s 34448543 to 34448910 reverse strand)
ccatcatcactcgcaacattaaaggccataacattgtaagtatagaagaaacttttttgttttggtttcttgattgagattaattataaatttataatacaatactacaatttttaattggacaaaactcatgtgtttttacttaggtgatttttcgtattgttcttaagttaaaatattcataactaccacgagtttcttaaattcataattttctcaaaattttatttaaatggattttctcgaagctttttgtggttgtataaaaaaaatattaaaggtaagaacaacaaataatgaaatatacataagttttgtcttgttaaataatttttcttaaattattttgtgatttgaaggaggcgtcg

SEQ ID NO: 30130 - DNA, 1061 bp, Medicago truncatula
  Intron number 1 from transcript Medtr6g099290.1 (locus Med tr6g099290) derived from phytozome v7.0 (chr-ID MtChr6; po s 21884089 to 21885149)
gccaccaacggataggtacagagctcctgcggttggtaaaagtgtacttgctcctgtggcttgaatgatcattgatatcgcctataccgtacaaaaaatatatagttaaaaacgttttctgattaaagaccatattgatctttatatttttttttaaataatcaaaacactagcacaacaaagggagtttcccacagttatgcttagttatgtgcttgtgttggttgacaatccaaactatagtcccctcatttatttattttcctcgattattagatatagtttctatagatagtttagctgtgttattgtttggctccctatcatgaggaattctaattacgtctcatagttgtcgatattcattataaaaataataatacagtcatccatatttttcaagttttacaataaacaccaagccaggacttgaaaaaggataacttgtccctgacatgcatattttgatgtgtgtgaaagtcgcccttagtatgatgatatgcgacaactgggctattaaaggaagaaaaaaaataatagaacatctatccataatttaccatgccaaagaaactccaaaagagtagaaccttccttccaagtttatccatcaaacccgtcgaaatgatagatcctaaggaaagcggaaaaaaaaaaaattagcatttgaggattgaacaactcaatactgtcagaatgaacatgaaactgtacctgtcaaattcgcaactcctatgcagacgtttgcaaaatccgatggcactccggcacttttaaaaacagttgaagagaaataaaacacagcgtttataccagatagctgttgtaaagcaaatagggttgatccaataaaaacaactgcaaaacgaactcgtgaatacaaattgacttttggatacctaaagaaactagtgacaagctaacgacaatgacatatagacacaacgacacaaatatcctagagatggacatagaattatatacctttagaatgatggccatgaagcaattcagagaacttcacagtgtcagtatcttctcctctatctaccttggataac

SEQ ID NO: 30131 - DNA, 685 bp, Medicago truncatula
  Intron number 2 from transcript Medtr5g072570.1 (locus Med tr5g072570) derived from phytozome v7.0 (chr-ID MtChr5; po s 25859253 to 25859937 reverse strand)
aggccttgaacaaagagcttaccagtgattttgaggtcagttaagggccaaacccttaatttggatttagatttaaatggattggatcctttttggataaacaacttaattaagcacgctatttctaattcaaaagataaaataagttaaactgttttcatataagctataagatggtttcctaagttatcctggagagcttatggaaataaggtgaaaacagcttatggactatgagataagttgtttctatcagctctctcaaacagtttcataagtaattatgaatgttcaaatgaacaaatccaatcaggcttcgaattatggaatctcactcagtggtagactccaggatgtgcctgtgtatacttggatgagcacatttaagtgatttgtgacactttcattgtaattttaattgtaatttcagctcttgagttttggtaattgaaacttcaaaacccaattctgattaaaacctgactttagggccaaaaagatgttatgtttattaaggggggagcgtgatgccaagccaaactgtttggtattgaaaacatacaataaaactatcctgtaacaagaataatatatgtataattttttggctatgtgaaattgatatgcactttgaattttctcttcatcagaggttggttcatctttggacactggaatccgctga

SEQ ID NO: 30132 - DNA, 788 bp, Medicago truncatula
  Intron number 2 from transcript Medtr7g089320.1 (locus Med tr7g089320) derived from phytozome v7.0 (chr-ID MtChr7; po s 19595919 to 19596706)
gtgtcagcttcaaggtgattcattttatcattcattgtctttacttttctcttagcttttaggttgaattcttaatatataattcgagtgtgatatttaggatgtgtttggataggcaacttagtttagaccttattcagtataaacggttgtagtataagaacttatggataagctatttccacaattgaataggagtgaggatcaactctgcgtaaactgcaaagagcctatagatatatcatgagtttattttcattagtttaattgttgcaaacataagatatttgctaagtttgaattataactttgaggttaagtttattcatcgtcaagcgaatatggttacccgtagccttgttaaggcgcccatttccaatgctagtcgactattttatgaccgtgttcctccttgtatctaacattatttgattaatgatatgagttgagtttgctttgctaaaaaaaaaaaaaaaaaaactgttccgaaaattcctctacccaagtgttgtaattttttttggtctaaccttcaagcttttagacaaaaggggaccaaagtgtttgtaacaagataaagttgaacaagttgttctgaagattagtatgatacaaactaataatgagtggggtctgttccatgaacaacctttgtgtgctctatctaataacaaaaaccatgataattcaccgacaccgaattatcagtgaaaagttgtaggatgccttgctgattggaaacttactaaaatatttccaccttttttaacaatatgaatagatcagac

SEQ ID NO: 30133 - DNA, 682 bp, Medicago truncatula
  Intron number 2 from transcript Medtr4g142670.1 (locus Med tr4g142670) derived from phytozome v7.0 (chr-ID MtChr4; po s 35591807 to 35592488)
aagataaggacttggctgacaaaggaactgttcaggtagtcatttctttcttagttgttttgtatgagctttatatggagatatatgtctattagttgccacatattgaactggtgaatgtggtagatttgtaactgtgcctttgactgtgaatgcatataagatacctttagtcttgataccattggcttatattccttttcaccgtaacagattagaccggaatatgcttttgatgcacaaatttacatttgtattcttgtctctacctattgtgtcactaatgccattgaaggacacaactactttaaatgctagggttatccttcaaagggaaatgtggagttctaacttctaataattgattacagtttagttcatgatagttttgcatgcaggaatccttgaaatagaattatattatcacttatttctaatcactggttttaccttaccttataaagtgcattttttatttttgaatagttgaattcttgaaatagaattatgttatttcatgttttgactaacacccaaaatgagatttgctgttttaacacgaccaagtctcgctttcttttaattatttgataatttttccgccctattctcgttgtaaatatgtttttaacaagttctcttgacaggattcctacgtaatctgtaaggtatttcaaaaaga

SEQ ID NO: 30134 - DNA, 697 bp, Medicago truncatula
  Intron number 1 from transcript Medtr6g027840.1 (locus Med tr6g027840) derived from phytozome v7.0 (chr-ID MtChr6; po s 6108087 to 6108783)
cttgtggcaagtgcttaaatgtaagtataataatgtttgcaatttggttcttattttctttatgccatacaacccttgttggaatctcacacatcccgggttcaaatatccacatcctaaaacaatttgagaaaattctctcgaaaacaactttttttcctccatcgagaggtggaatcgaatctcagggacttgtaacacatttagaatgcaaaaacaactaatatttgattatattttctgatttttgggttaaactttaggagcaatcaaaaaaaaaaaaaaaaactaatatttgaactttagggtttacattcacgccctaaaatgtctctataggctacaaccaccatttaaaatgtacttataagactaaaattgtttcaatagataaatacaaaaattgattttcttttcgatctgtagtctgtttgaatcggtccaattattttttttatatcatctgaatattataatttgatataaaatttaaaattttgttagtttcatctagaaagtagatgatagactataattctgatagttgaattaatcatttactcattgttgatcgatttaatcatgagagatggcaaatctctagtagttcagtccatatataaatctattaagtcttttcattttgtcacctcgaatttcaggtgacaaacagagatagtgggagtacggtagcaca

SEQ ID NO: 30135 - DNA, 565 bp, Medicago truncatula
  Intron number 1 from transcript Medtr5g086380.1 (locus Med tr5g086380) derived from phytozome v7.0 (chr-ID MtChr5; po s 33114656 to 33115220)
tgtgggtagaagactcattcaacttaagttgattagttcattaaaaaaaaaaaaaaaaagtgtgggtagaagatggactcaaatgtaaaattcatacaaaaacccataccaccttcattggtaaactatttttataacatgaatttatgtgatattataacattttttaaacctttcaccctaaattagactaatttttccaaaatttggttcgtcacgtcacggataaaaaatatatctagtctctacaattcatatttggttttttctaaattacctttgaaaaatggtgggtaatttacccaccaaccaatgaatatgagcaatttattggtggggtcaagatagttcatgaatatgtgcttatgtggctaatgtgtattggttggggtaaattactcaccattcttccatgagtaccctagttgtcaccttcatatttgtgatccatgaatggagactatttcattacaagccaaatattgaatttaatgtccaattgcttatgacttttttgagctacgtaaaggcagggagagtattccagcttacgtccaaaccgttc

SEQ ID NO: 30136 - DNA, 456 bp, Medicago truncatula
  Intron number 2 from transcript Medtr4g097820.1 (locus Med tr4g097820) derived from phytozome v7.0 (chr-ID MtChr4; po s 21004238 to 21004693)
aaaaagtcatatctcaggtacatatcttgaatattcaactgtgattgagttttctattgtaatcttcaatgtatttggttctttaattggtacttacaagttatgctcataaatttataagttttttcttgtttttatgtatatcctagttgcacttgcttaattacgtagaatccgggggttatgggaaattaaagtattgaatttgatcatagttgcatttgtaattatagtttatgtgcagcaattttaacaactcaattatataggatctgggatttatgggaagttattgaatgtttcgttgcttgttcacataatttctcttctgtagttaagcaatagtcatatacgttaatgctagtaagttgtccatcacagatcacggaaatagtggtttgttccaattcagattaatagtttttatgctgaacaattgatttttgtttttgtagg

SEQ ID NO: 30137 - DNA, 798 bp, Medicago truncatula
  Intron number 1 from transcript Medtr4g032760.3 (locus Med tr4g032760) derived from phytozome v7.0 (chr-ID MtChr4; po s 7978105 to 7978902)
tttgccttttgttgttcatactattgctaaatacggtatgttactacaatattcaagcttttctactttggttgtatttatgtttttggttttttgtattcatgctcctctatgttttgaagaaaatgagacttgctagtttgaaattaggccacatgtaagtgaattctggttaaagattatttaagtttctttattaagaagttaaactagtccaaaaaaaaatggtatcgaggagaatcaaagatgagatcatcaggtgttctaagtcaacaccatcagaccaatccaaatagattttttaaaagattatgtgagtgttggatcaacttgaaaattatgaagctacaaatattagcttttgctttgatgtgatttttgaacgtgattttgcttgatatgtcgcaataccaaattcgactattgtcaattggtttctagttgcttttcttttatgttatttttattaacccttgagttatggagaatggatctctgataattcggtcagaagttgaggaaagtatgatcaacgattgttttagttagaatttaaatttgggttctcaagaagaattcttcttaaattcattattaacttctattttgccatgtcttattaaacttacttaactcagttttttaggagtttgtagcattgctccctacaactgattttgctgtttgtttagtgtttttcattttatttttctttcaaatattggtactttataagtattgctaattattactagtacatctgaatactatgatataaatgcagggaagagttcattt

SEQ ID NO: 30138 - DNA, 858 bp, Medicago truncatula
  Intron number 2 from transcript Medtr4g144600.1 (locus Med tr4g144600) derived from phytozome v7.0 (chr-ID MtChr4; po s 36452609 to 36453466 reverse strand)
aaatctgggcaaagcttggtaaccccttttccttatttcacgcactaaattatccattgaagtttcaaactttgggcgtttcattatttttcccctctttgggatttcatctcaattcttcaaatttttgaaattagaatcaaaagggttgaaatttttggtatttatttgtttaatactcaaaatagcatttcgtaacacaataaagcctccatttttatctcttaaaaaattaatttcatgttaggttccactggttaattacttctactgtgtgtgtgcttgttatttttttagggcttcaattttataggggatgctatcataataatgacaaaaagctatcttaacaattttatagggctagttatgtatatcactgtttttattgtgtctgtacacctgatggtgaatcatgaggatgtaatttcattgctgtttactaactactagggtttttaaatagtgataacagttacggttgcgtctccattcttgatattgcggagaatagtgatcatacgcaactgacgcagcttcgatcatggttgcctttgacaacatcaaatccgttatgtcgcccccctaaattgtggcttctgtcttttatttaaaacctgataattactaagacatttgctttaactgttatatgagtttggcttcctcttgaaaacaagtatggaaaataaaggaatggtttttctttgaaaatatgatgaaaactcatctgggtttgtcatcccattttagaggggatatcattaccaagtgaagggatatattttgtgtgaagtttgtgactttcttaaggcacttttttctttcatgcagttcagtctgactcgagataccctg

SEQ ID NO: 30139 - DNA, 566 bp, Medicago truncatula
  Intron number 2 from transcript Medtr5g086610.1 (locus Med tr5g086610) derived from phytozome v7.0 (chr-ID MtChr5; po s 33275486 to 33276051 reverse strand)
ctgatcctaaggttacaaaaacttctaggtaataggtaagcttccatggcaaaattcaaatttgtttgtgtatgcttcttatatttatgcaaacatatctaagttcttcttaaagggctaaattgcatttttggtcccttaactatttagtagtatcgctttggttccttaattaaaattcgatttatttcggtcccttaacttctctccgttacacattttgtacatttcctttggttttaattcaaaaacgttattttcttcattttcatttgtaatttttctgggattcttgttgttcaaggttgatggagatgatatgatatgaagatgaaaaagaggagaagaaaataaagaaaacctaacatttttgaattaaaactaacggaaatgaccaaaatatgtaacagagagaagttataagggatcaaaataaatcgaattttaattaagggaccaaagcgatactacctaaataattaaggggaccaagaatgcattttagcctatatttaatatacttcttgtttagataatatttcagctatttaacatgtgatatacag

SEQ ID NO: 30140 - DNA, 410 bp, Medicago truncatula
  Intron number 1 from transcript Medtr5g077330.1 (locus Med tr5g077330) derived from phytozome v7.0 (chr-ID MtChr5; po s 28492913 to 28493322 reverse strand)
gaggtacatgcataacatatttcttcctttttcattttcaatctttttgtattggtgtatatgtgaaaacaatcataattgtacctacccacatgaacaattcaaaatctttttttcttaattttattttctttgttttaaagtttattagattttgattcatgaggttttaacttttaaagattataaagattacgtattgactcaagtggttaatgaatttcagctaatacggatccatcgataaaaccctagtttgaatcttagctgaattttttttcatcagacgatacttgtctccgaactccacgttgttaggtttttcttccttagggttagaagcgttaagaccaaaaagaactaatgtttgcatataataaaattgatttttttgttttgtttttgttagg

SEQ ID NO: 30141 - DNA, 792 bp, Medicago truncatula
  Intron number 2 from transcript Medtr4g029140.1 (locus Med tr4g029140) derived from phytozome v7.0 (chr-ID MtChr4; po s 6896394 to 6897185)
ttaagaagggaaataaaaggcttcagcaagcactggtatgccattcataacatgatcattgttcggtaatcttaaatatcttgtcgtgttatcttggttgttatcctatgatcttcaataattgtcatgtgttaagttattcaaccatttacataaacttgatttctttttttttgggtatccgagattcgaacaccaacctcttcatatactgtgcattgtcccaatcaacttagctaaactcacatagaaataatttaatacctttcttttatttcaaaattttggaaatatatgattatcttagtcatctgcatgaataccaaaaaagattttttctgattccaagagagaaaaaattcacaaggagacctattgtgtattcatacatacccaaaaatttcagaactcaaatattgtagaatgattgaaatcgttcgaacagccaaccttgttttcttgtgagagaaactccaacttctctctaaactttctttttccatcattcatcgaggagaggtggttttaggtcatattttttacctagaatcacccctctacatctttttctcccttatctttcaatctaaataagtggttttcacatataagtgtttcttttgtgctttttgtgaattcgtcatccaagtgcgacattgtgttcataaattttacggtgcattcatttatggattgttgtcgataagatgtgaattctgaaatattgttgcttattttgatgttcttattattttaggcagaactacaaatttcaaagttaactaaggagag

SEQ ID NO: 30142 - DNA, 805 bp, Medicago truncatula
  Intron number 1 from transcript Medtr4g136950.1 (locus Med tr4g136950) derived from phytozome v7.0 (chr-ID MtChr4; po s 33588087 to 33588891)
gtcttcactgttggtgataaagtacttgccaccaggtttgtttgtgctcttcatgttatactttctttttttatgaatgcaagtttttttttttttttttggagagaactgtatagatattagatggttgtttgatatagctttgtgatcatttctagcatatcatgttcaagatagttatttgaagggcttaacatctgtttggattggtttatttgagcttatttacgacagtctgagatacatacttgtgagactttataagactgtttgggaaagttacggaaacaacttatcacacgttcgtaaactattttcagcttatttccatacgttctccatgatagcttatgaaaatagtttgactttactgtatcttttattatagaaatagcttatacatagatacgtatattataagcgcttatactatgagtgatcaattaagttctttatccaaacaaaccttattttgtcaaggttgagcttatgattgtggattttgatattgcattaaaactatggggatgaatcacctcattgaatatgtatgactttagtactttgagattagtgatatcatatcatgctcaaaacaggtaattttatagacctaatttagtcaaggctggcttatggtcgtggaatttgatattacattaaaaataatttagccacatgataagaatagtaatagcaacctaggtctctgtattgtcaagaaactgccttatgtatatagactcaatgaaaatgttcaacatctgcagtgctgtttttgggactgaaatttggccagctgcag

SEQ ID NO: 30143 - DNA, 798 bp, Medicago truncatula
  Intron number 1 from transcript Medtr7g089630.1 (locus Med tr7g089630) derived from phytozome v7.0 (chr-ID MtChr7; po s 19786515 to 19787312 reverse strand)
cttcttaattctcaggtatagctatgatcacacatgtaattttgatttattcaattttagactagtgaattaatcgtcatttttgtcattgaaattgtacacattagttaatttcgtcgctcaaatttacgaaattgttaattagttcttgaagttgaaggttgtcagtcaattttttctcaatgtcatttaaaaatatatgttgagttggcatgttgctttggtcgtattgaactaatatatgtttcaagaaattgcattgatctctattttgctatttaaatttaccgaagttgactcaactaagctgattgacgatcttcaattttagcgactaatttgtcattttgtaactatagatatcaaattgtctcacatataatctggatgatcgaaaacttaaaatgatgtttttttcttttcaatatttgatttttatgtgcgtattggtcggctaatttagtttttcaaatttatgaaattgcaaatttgttgttgaggttgaaggtatcaataagttaatttcccatctaacaatatatgctaagttagcacgttgtttagctcacgtcgtgttgaaatatgcttaaaactttcgttgatctctattttgcaatccaaatttattagaattgattgaattgattcgactatattgattgaacaacattaattttaatgaaaaatttgttatttcataaatattgagaccaaatatcctgattgttacaattttgatgatctaaacggagattcactcattcattttgatatttgttttttcatgtgttttaggcc

SEQ ID NO: 30144 - DNA, 233 bp, Medicago truncatula
  Intron number 1 from transcript Medtr5g015810.1 (locus Med tr5g015810) derived from phytozome v7.0 (chr-ID MtChr5; po s 5371102 to 5371334)
ggtgtgtctatttcatcttctctttctttgctctggtaagaaaaacaactaaaatctcagttttgtaatttctcttaaactaaaatgtctcaaaatattcatcatcaatgtatcaatgctttagtttattattcttctttttatttcttaacattttattattattatctaatgaaagtttttgtttttttgttgtagtttgcattgtagtttctggtcaagaaaacattgag

SEQ ID NO: 30145 - DNA, 825 bp, Medicago truncatula
  Intron number 1 from transcript Medtr5g011510.1 (locus Med tr5g011510) derived from phytozome v7.0 (chr-ID MtChr5; po s 3115643 to 3116467 reverse strand)
ttcttcagacgctttaagcttccctttttgttgatgtatttgctctttatttgttcttccaagaccattttaagatgtcaaatttttgcctatagtcttgtacgcttgaacaaatattagcatatccaattgacaatttttaatactttgttatcatcaaaactcttaaggattattattgctaatacattttgttccaacaatacggacataaaatattactctaaaagctaatgtgtgtgtgtgtgatttgtgaggttgaagaaagagaataaaatatttggtgtcattcaatgacagcatgaataaaaatatttgtgaggttgtgataattaaacgatattaaaattaaatatataagtgataaaaagataataaaattccttcaaaaatagataataaaattaaattgatcctcctttaaaaaaaattatatggaccggttaaaaaaaatggaagacaaaaacaaattgaaaaataatattaaaaaataaaagaaaaggttgtctgcgtgagttgaagagaggtgcttgtgaaataaattacggagaagtagttttttgaagtagcattcaacaactttttgttaaaactcattccattcaattttatacatttataaaaaagtaattttttttcgaggtactttattgatattgtgtttggtctagtttctccttaaaaatgtagagaagctgaaaaaaaagtctgggcaaacggtaccttaatatactatataactaataatcaatttatgattagggatatttaagtcatttactaataaaagtgtctttccttccttcctctttcattaaaaccaaa

SEQ ID NO: 30146 - DNA, 701 bp, Medicago truncatula
  Intron number 1 from transcript Medtr5g096310.1 (locus Med tr5g096310) derived from phytozome v7.0 (chr-ID MtChr5; po s 38270438 to 38271138)
tggttctagatactctgagaaatacgtagcagacttcaaaaatagatattatttgagttgacatatgtgattttatctaccggtataagcacttgtgacgatgtttttggatgcgacgtgatgactaaataaaatagcttcagatctcaacaactaaaatagttaacaaacaacatactattatcttctaagcatgaactcgttcaaaccattgctactgacatgcacaaaaatggtagtataacataatgtaactaaatcaaaattaagtgctaatatatataataaaaaaataataaaaacttctatatcaaaaaaatgacagaaatcggttagagtaatagtttgaagattaaattgacagaaatggatcatcttcatatctctctctccctcatattttctcaattttcacatctcaacctttctccctttttttcaaatttcaatattttttttaaagacaaatttcaatattatcccctttttttttattctcaatggtctagatctcttatttcctgagttttatttttcatttgagaggatcttgatccctaaattgtctatttttcttttaagaattgactaaacaacctatacaagactagtattatatttgatttctttttttaggggtattatgtttgttttttttttttgaaggatatttgatttcttaataagcgtgacattttcca

SEQ ID NO: 30147 - DNA, 812 bp, Medicago truncatula
  Intron number 1 from transcript Medtr5g018880.1 (locus Med tr5g018880) derived from phytozome v7.0 (chr-ID MtChr5; po s 6992752 to 6993563)
caataacaactagcaacatcaaagctgtgatttttgtaagtatattaaatatcgttgttgggattaattttacttttcttatttttttgggtgaccatgccattaattttactagctataggggtacatattttatatttgtgtgaagttccttcaaaaaaatgtgcgaagttatcaagttttcaatcattaatttttttactcaaagaatattttcaacgttgcgataatgatattttcatccactttaaaatagtcaacctcacaagttgtaattacaaaaattaggctgaagattgtttcccccctatgtttttccatttggttgggtttcaagctttcaatatttttttcatttcatcatatgttacttcttgttttttgtctatgaaaaaacatttgattgattctacaattttgtttttggttatattgtctaaatttttataatatttgttattttgaagccaggatcggccatattgatttatttgttattttgagatggttttaaataccccacaaatagacagtgggattgaaccggataccaaatttaaaaaaaaatcctacgttttaaggactaattttattttatttttttatatttttttttataaaaaaaaggactaaaaacaaataaaagattttacggactaaaaattatttgcggggaaacaaatatataacattttttttttttgtaaaataaaactactacatttttctaaaatgtttatttaaattaataattctatatttatcaattcatggaaaccaatatgaatttaattttaatttgttcattcagg

SEQ ID NO: 30148 - DNA, 553 bp, Medicago truncatula
  Intron number 3 from transcript Medtr7g021920.1 (locus Med tr7g021920) derived from phytozome v7.0 (chr-ID MtChr7; po s 5329833 to 5330385)
actacacttcctcgggttttccctggtttgtaacaagtttattcttgctttatgttaatgcaaatcaaagcttgctatttcatactatttatagctttcaattttgctttatataatcatgtcaacaatgctctaggttttcacaatatgcctaattttacatcgaattttgctgtcttctgctataatatataccagtgatataggtcaaaacattctacttgcttgaaagttttgcgtattaataaacatgacatccatggaaatgatagagaaaaacttaaaagcttgttgtattgatagtagtagaaatgagatacaaaatgaaaagatggcaccaatgaggtaacgctgtgacttatatacttaagttagcttatatactaaccaaccagtaactctaactaactatattttcaacactgtcaatactaatccacttctttgatatttttacatgcttaacacttcattttttctatttggccttatatttcttttgcattttctaccatcagttatattgcattggtattttaaaagaaggttggag

SEQ ID NO: 30149 - DNA, 400 bp, Medicago truncatula
  Intron number 1 from transcript Medtr4g081440.1 (locus Med tr4g081440) derived from phytozome v7.0 (chr-ID MtChr4; po s 16995245 to 16995644 reverse strand)
tcaaaactctactcaattcccaaacctctctccatgttgcttgacctacaagcaaaacttctcctttccattctcacatcttcaaatttctctctttcccatgaatccttcccccttcgttttagacttctttacatatggacaataaaataaaataaacttaccaaacaaacttttgatattattggttcagcagttgagtttctttctaagttatttttatcatctacttcgcaatttgattttgaaatagtcatgttttattattctctgaagctattttacttctgggtgctttttcttttgttcattctttatctcaaaatactaaaaattagtgcttggatattctgtctagattgttggtagataagtgtaggttggtttgtttgtttgtttg

SEQ ID NO: 30150 - DNA, 732 bp, Medicago truncatula
  Intron number 2 from transcript Medtr5g069220.1 (locus Med tr5g069220) derived from phytozome v7.0 (chr-ID MtChr5; po s 25009335 to 25010066)
catttttcaggttccttcaagcattcttcatcctggtaaatttgttttacatttttccagttccaatttttagatcatttcttgcaatgtttgtgttttaaatctgtatttaatcatgttatactttcagagcatttatactttttttttcaacctttttttgtgaacaacacttaaatagatcggttttccttcttgcattaaatcagtttttcgaactaaaattgtttgagaagtcattttaatgaaagacgtatcaaagatctattgaactgcatttctgttttgtatttgatgatattgtgttttaaatggctactactttttttaaataaattaccatgtacaggtttggttgtttctgaggagtttttgttcttcacatgtttagaatttatagtttggttgtgttacatgtttatcttccaaatattttgcaaataaacttactaatcacaatgtctaagtcaaagtttcgttgttttacatgtttttctttcaaaacttttgagttgtgtgtctaacattatgtttttgtcataatttttagttgtgttagcatattttttaggttggtgtttttgtcaactgaaaaacattatgtattttagatggttattttttaaactatatccaacatgttcttttagttccaacattttttgatgtagtcttagtgatgtgattccctattactattgctgttgataaaaaactttttttccagcaaca

SEQ ID NO: 30151 - DNA, 851 bp, Medicago truncatula
  Intron number 2 from transcript Medtr6g017520.1 (locus Med tr6g017520) derived from phytozome v7.0 (chr-ID MtChr6; po s 4126966 to 4127816)
atctagtggacgtgcccttctacaagctaagaaacgtaattaacatttttgttatgaatgtgtctcttttgattttacttctagttttatcttttataggtcaccatgacattatttatggtcttcattcatcttcaatttatttatggttttcattcatcttcaatatgggtttgctttgaattaaaattaagaaatcataatgtaacaaggtaccttaaatgatgttggttccattgatgataacttgttttttttttttttttttggtttgattaaaatatgatcatctaatttcattagcaatataatcataaacttggtattttttttctcatgatatgtgcaattaacaaatttgttcattatattgacaattctccatttagagggtgttgtttaataccatggttggaaaattatttccatgaattaagaggaaataacctcatttagagggtttccctcaaaaaaaaaaaaaaacctcatttagagggaattgagcaaaattattatttttttatcttgaaaactcatttaactctaggaatatagaaatgattttgttcatatgtggatcgacaataattttggtggcatcacagtgtgccgttacactttaaaacttacaacaaattattgtgtcagtgtgatttcgtcaaactcatcatgacttcaaacatgtacctagaagatacatattcactctatactttccttttcattttttcaataccaaacttcttttgtagtttttcaatcaattgttgatccaataagtgaattattttttattaaaaaaacttgttgaattagcttgtggaattaattttgagactcagaactacaca

SEQ ID NO: 30152 - DNA, 752 bp, Medicago truncatula
  Intron number 2 from transcript Medtr5g011590.1 (locus Med tr5g011590) derived from phytozome v7.0 (chr-ID MtChr5; po s 3155999 to 3156750)
cttcaggttccctgacacctgatccaatcccacaggtactttcctatcatttcttgctccacagccatggacaaatatgtgaactatgaagcatgggacatgtctctagctggtgttttttttctttctggatgatgacaacacgctttggtcctttggatgctaactcattcaacacacgggtcagagatgatcaaccgggtggcagtgtcttcaggaaatatttagacttgttgcttggttcgccttaaacaagattaactccagcttgtcagagagcatgaatgtcaaattcataagaaaaaagtattagttaagaaattaaaagtgaattgttatatttagaaataaaaaatttaagctatcaatattttaaattttagttctatttgatttctttaagacacttataaaagcttaactagtgtgatagactatcctgtctgctgcagtacttgctacatgtagtccttggcacatagagtgattagtgtgcatgtgatttctaaaatgtaaaatgatggattatcttagcaaaaatatgttgtatatattaatattagaatttagaagattttaatgtttaatttttttttctttcactttttcatttaagacttaaagcatgaaggaggttttttttcttcctaatataatctagttttagtttttgaaaattttgcactcaacggaaaacaaagttaacgcagggcatctttcatttttggttattttgtttctatcatcagata

SEQ ID NO: 30153 - DNA, 620 bp, Medicago truncatula
  Intron number 1 from transcript Medtr5g016250.1 (locus Med tr5g016250) derived from phytozome v7.0 (chr-ID MtChr5; po s 5662480 to 5663099)
tatcatcatcaatcgtgtgtgttgtttcaatcaacgttcgctttaactctcatttacgttccttccctttaactcattctattctacgttcgctttcttttcttaaacattaaattaaggattgatatgtaaaaggcaatgagaatgagacaaacaaaaaaaagtttttaatttatgattttatatatgaagcttttttacaatatcagattcaaagtagctttcatttttcttgttaggtaagacatattttttagcttataatttatgtttcatttgactcaaaaatcatgttagtaaccaccactttatcacaagcttatagcattttttattagctaatctaaataatttataacttcaaactagttcaaaatttaatatattaattaaagtatataacttgtatgttatttcatattcataaacggctataaatgttaattttattgaacattacaaattcattcggttagttttatccgctataagatataagttagtttgttgactatcgttataaactatcttattgcctattcactattattcatcaaataactcataatgcagaggaatgataacgttctattgttcgaaaaattcaggaaaaaaaaaac

SEQ ID NO: 30154 - DNA, 482 bp, Medicago truncatula
  Intron number 1 from transcript Medtr5g100170.1 (locus Med tr5g100170) derived from phytozome v7.0 (chr-ID MtChr5; po s 40094904 to 40095385 reverse strand)
cattttacgttgtcaaagaagatattcaagattctgtaagttcttcttttcaccttcatttcgcaattgttagaatcaaatttgcaatttttttcatagattatgttgatccgtgactttattacttgatccaatctgattgtgcattgaatttcagtaattgaaataatttatttgataattgatctaattgtgttgttttttatgcaaattttttattttgaagaaaacccaattcctatttttattgatgcaatgtaaagatttgattttgaagaaaacccagttcccatttttgttgatgcaatgcaaagttttgaatttgaagaaaaccagttcccatttttgttgatgcaatgtaaagatttgatttttgaagaaaaccctgttctgatctgtaactatgaacatttattttatcaattttattttattgttttttcatgtgaccagattgataggttgcaatctaattttcacca

SEQ ID NO: 30155 - DNA, 758 bp, Medicago truncatula
  Intron number 1 from transcript Medtr7g041000.1 (locus Med tr7g041000) derived from phytozome v7.0 (chr-ID MtChr7; po s 10391936 to 10392693)
gcttgctttggctgtcatctttcttgctgcattcagtttgtattttaacttttcttctcaccaatatataccatgctccatgcattttttatttttctatgttagaaacacatgagaaattaatcaaaatcaactcctaattactgaagtaacattttaaatacttttatattatgtacataatatagaagttgttgtcacgagttcaagtcctggaaacagtttcttgtgtaaaaacaaggtaaggctgtgtacaatacatcaaatagtgggatcccttcccaaaccctgtgtatgtggaggaagctttagcgtaccggattgtcctttttttttttatagggttaatggtgctttaccctcctgtaatataggtcattttttgttttccccccctgtaaaatattttttttgatttaccccctgtaaaattttttttttttttggaataccccctaataggtcataaaaaaatgaaaaaattctaaaaaaagtcaaataataaagtcgtttttttatgacctattagggggtattccaaaaaaaaaaaaaattttacaggagtaaatcaaaaaaaatattttacaggagagaaaaccaaaaatgacctatattacagggggtaaagcaccattaacgtacataattaaaccatatcaattgtcatatgttgcatacaagcatgtgtaagtatgtgcttgtatttgttccaacttaactttaactgactgactctctcattttcagtcatatttccg

SEQ ID NO: 30156 - DNA, 978 bp, Medicago truncatula
  Intron number 1 from transcript Medtr7g006020.1 (locus Med tr7g006020) derived from phytozome v7.0 (chr-ID MtChr7; po s 819260 to 820237)
cgtggttttcctattttatttctaactctagtcatgtaaactccattttgtatttgtagataatatgaactgatattttcatttatattctgtccgctctttaaacggcgttaacgggtgtatattttattatgtttatttgcataattttgattacaatttttaaatttttaaatattaatgaaaattattcatacatcgatttatctaaaaattgttgtcaaaacatattacgaaattatttatcaactcggtgtattttggtttgtctctatataaaataactatcattttcttattgattatctatattatatataaagataataaccttggaagccaaaacatagctttgtatgaacttagcacaccaaaattgacactaaaaaaatcgaacttaagaccttagccagagaacactcaaatgtcccatgctaacacaattgggccaacccctaatgagttgtgcttttaagtataactaatttgcacttcattcatgaccaatctcttctgatttagatgttacaattctattttttttttctccctattatatgaaaatgcaagctcttcattggggtgtcaatattgaacatacgttgtttatgtttatcttgctattgttgctacacttggaaatttgagcccatttcatcattctcttttaatttgtttttgctgtttttgtctgtctcctattaggtttttttggcggtttgatgtatgcatttgactgttgtgccttgtctttttcttttttaacctttcaaccataaaaagaatatatcctcaccctttgttttcttatttgatcaaaacgatagacagaagttacatgaagcaaaaagtagatagcatagaaggaaagccttgtgtgacaagcgaaccgtttctttcttagaagcaagaagtagaaagttttactcaatgttgtattaatatgttctttgtggttgaattaatttgcagacaaaa

SEQ ID NO: 30157 - DNA, 749 bp, Medicago truncatula
  Intron number 4 from transcript Medtr4g154710.2 (locus Med tr4g154710) derived from phytozome v7.0 (chr-ID MtChr4; po s 38047103 to 38047851 reverse strand)
gaggtaaaataatattaacaaggttcccttttattgttttaggcatgcctgctgggcaaattcttattcttgcacaatgctgaaatgtgatggcccaaaaaggaaaatatcgtgctaatttcagcgctagtcataaatatgttttgtcctaaaatcgtttacagtaatatgttttggccaaagataatcaggccgtaagtcagaagatattattttattcatcacttgttttgtacctttttatttcgcacgctacattttataaccaaagttcttgtcaaacaaatgttctctccttgcattttgttatgaactcatgataccactgctccttttcattatttgtttattggggaaatcattctttgtgctaggagtaaaaatgagttgaatatatgtccaaccttattcaaaatgttttacattttcctttgatatcaagtttaataagcttattgaaaatatctcagtgactgattgaaaattctcaaacttgaagcatctgtgccctctgtgccccatgtatcaaccctgagagactgataaacattcagatgcccaaaaaaaaaaaaaaaccttataatgaaatatttctttcccgaaggtaggtatagatgactgaagttttaaacttgggtttgcagcatgatgtgtgtttacattgtttctcatataaaatgacatagaataattttacctctattgaatctgcagaagcggttagagtccctaacagaagcagagctaca

SEQ ID NO: 30158 - DNA, 811 bp, Medicago truncatula
  Intron number 1 from transcript Medtr5g099880.1 (locus Med tr5g099880) derived from phytozome v7.0 (chr-ID MtChr5; po s 39979208 to 39980018 reverse strand)
cgaggagttctcttcccaagaggaacctcttcaaggtcagtttcttaattcttatcttatttaccattaattaaaaatgcctaatttacaaaaataacaataaattaattggttagggtttagtacaaattgaatcagaattaacggcttgtttggataaacagcttatttgcaccttatacacaagcgcttatcttgataggcactcatgtataagcttacataagctatttctattaaaaaaattatgaaataaagttaaattgattttctgtaggttataagctgttttcatgacctatcttggagaacatatgaaaataaattgaaaaagcttatgaaaaatgtcacaagttgttttcaaatgttctcccaaacgtctttacaaaacttatgccagtagatgagcccaaataagccaatccaaagaggccctcaatctgatagaaatatatagcaaacaaattattatctcattattgtgaactcttttataaaataattattttttttctgctcaagaattattagtagtatagattgaattacagtgtttattttgatgaagttaatttgtacaccgacatttgctcaattaactcatttcatggtgatgtcacttttttaggctagttcctaggctagaatatttctacaaatatctatttgacatgatttgattggatgcatgtgtaaagacattttacaccatcagtgcgtagaatttattctcttattttgattctgaaataaatgtctctgttttgtgatattagtatctgcgcattcctcggttcagaatcgatctgta

SEQ ID NO: 30159 - DNA, 958 bp, Medicago truncatula
  Intron number 3 from transcript Medtr4g087070.1 (locus Med tr4g087070) derived from phytozome v7.0 (chr-ID MtChr4; po s 18213100 to 18214057 reverse strand)
agttaactccatattatttttttccgaggcataattccttagagtgcacatacacatgatgtattttttaacaaatattgtttagcggtttaatcaaaaactgatatatgttcatcatttgcaacaattttaatcaacatctcactcttatttcatttatgaaatgatttgaatattcatcatttattaatccatgaactatgagcaaaaaaattcccatcgtcattccattgaagacttaaactagggttgcattgtatatctcctggtctatccattctatctattcgtattatttagttagttaactttcaaggcaattttggtttttggaagttatttttctacaaatgtcattctcattcttaagaagttaatcaaatacaaccacaacagttttttggaagttatatttcagatagttaattggttggttactttcataggatattagatggctaaggtgaataaaggaatgaaaatacatctggcatgttcggcgagtagtacaatagattcaaaattcggaattaattaaggttactctacatgtcacctatatgatttcaaaattgattggatggttaaaagtagttaataattgagatgaccattttagttatttgtattcagttctattctgaaaaaataattaggttgcatatttctttaaccatttatgatgagatggagattgaacatttatttaaaaaattcaaaggatatgaacttgactccttttttgagggaatataaacttagttcctcttgagctgtttcgatttgaagtttcatgaaagtatgggatatgtttctttctgaaaaactgataataacaaaaattgaaataacaataagaaagacataatgggttattcataggagtagtgatcgggtagagataggttaacaatctcacgtggcatacacctccttaacctacacacataaaagtgac

SEQ ID NO: 30160 - DNA, 812 bp, Medicago truncatula
  Intron number 2 from transcript Medtr4g087070.1 (locus Med tr4g087070) derived from phytozome v7.0 (chr-ID MtChr4; po s 18214754 to 18215565 reverse strand)
gctgctgtgtgtttgattttgaatcctgtgtgtgactttttgtgtggaatatggtgtatcttctgtttgaaccgttagatctttgatctaacggtcactgtgcttcctgcatttttacactatcttttgtgcttttttttggacccttggatctttgatccagtggctgtgatgtgatcttgggagttagatctggacctctggattcatccagcggaccagattaaatcctgctgagcctctttttaattgctttttaattgtgttttaaataccttttttacactttcttggtgttttatgcttctaaaaaaatttctaaaaatatttccctatcattttgatttttcctctaagttttagaatttatttgcttatttttgcatttatttttctttactttgttcttttaattcttgctcattaaattctatatatgtttttgatgcattttttcatattgtgacattttggcatgtgaaataatgtgtgaatatatctctaggaatatgatataatgctttgcttgtgtgtgctcttatgatcctcacattgtagcttaaattcaaacctttcaaaaatggctataatgagggaattataggtcatatgcatgtatgagtgttatacctaaattctaggtgtatttttaccactttatttcatttcattacttttttttctctcttgctattctattcaattttgtttacctttctactatttttatgctttatgatactaaccatctcatctcacatttcattcatcctatagttttggcatcatttttttctattcatttctatatc

SEQ ID NO: 30161 - DNA, 366 bp, Medicago truncatula
  Intron number 2 from transcript Medtr4g158560.1 (locus Med tr4g158560) derived from phytozome v7.0 (chr-ID MtChr4; po s 39839201 to 39839566 reverse strand)
aagaaaagttgagaaacatatatcaaagcttgaaggtgagtatttggaatttctttacatatacataatctaatagttcaattttcactttatttaagattaaaaacctgatttttcagattttcatttcctttaaatttgtttgtgtttgaagtttgaaaattcatagaagatgaaacaaattgtattggttaatttgtgataaaagcttataggttgcccacacctcccatcttatgagatatagtatcaaaatgtggcatggtatagacatggggatattttgtttgcttagtattttaattgactctttgcacttatatatgaacaggagtgagctcatataaggtagatctagacaccaaa

SEQ ID NO: 30162 - DNA, 126 bp, Medicago truncatula
  Intron number 2 from transcript Medtr4g159000.1 (locus Med tr4g159000) derived from phytozome v7.0 (chr-ID MtChr4; po s 40044298 to 40044423)
aagaaagtatacaattaaaagagaatgtcaccagcttaagttatcatatactagtagaatattattctgagatgaatcaaattctcattgtttattttttttcttctttatggttatagctgctga

SEQ ID NO: 30163 - DNA, 587 bp, Medicago truncatula
  Intron number 3 from transcript Medtr4g072340.1 (locus Med tr4g072340) derived from phytozome v7.0 (chr-ID MtChr4; po s 13862110 to 13862696)
ttgactgcgtgtgattgtgtaatgaacaaccttttgagttgttcattaatggaggagaaaatattctaaaagagactcaaagttataactaactactctacaaactaacttcgttcatttttgcttgataatgattagaatcgccaatcagttatgtgtagcattggtatttgaacaacttaatcaatatctaatcataacacattacctaatgtaacttgggcctatcatattgagctagcaacggcacaaatgagatttgacattacatcttcaccgaaaacccttagggcttagaattaggtttatgagtctttacacttatttgttactcaatctcaactcatccatccaatgaataaaaatcgtccctaactttatcatacaaagttgggaaagagttgtagaaagattttgttttctctctctaattttggtcatttatttaaattctgaaatatcagaataaatcaattgagcctgttaaatctcgattaacaatataagtataaactatttgtttcttttaaattgaatcctaccaaattgttttcaggtatttcaacgagaaagacagaacgggcatt

SEQ ID NO: 30164 - DNA, 609 bp, Medicago truncatula
  Intron number 1 from transcript Medtr5g082400.1 (locus Med tr5g082400) derived from phytozome v7.0 (chr-ID MtChr5; po s 31008747 to 31009355 reverse strand)
gaagaagctggacgggggcattgttgtttcagcaacgaagatgatgagaggaatcaaatgaattagactctattttaagcttttattattagcccttggatttattttttccatgtgtcatttatccatgcattgaaaaggagtaaatggaggaacgttaaatggagcaaagatgaactcgtaatgtgaccatagaaaattgaaacttaacagtaagaaagttaaattaatctgtccaatcagcgtgccacgtcagtttagttgtcaagttattgacttaaacccttaataattcccaacccaataccatcaattcactactaaaaatatcatcatagactaatcacaaaacaaaactaattttaaaacatcaaacccacaattcagctttaccacttgtgaaattaataatcaatatacttctcacaaagtttacatcctccaaataaatttaaacaccagctttacaatattttaggggtttcttatgtcaaaaataaatattttaggggtttgtctttcaccctattttcttcctcattatttacatgaagattaattaataacataatctcttctccaaatcatgcttgatttgtagcaattcat

SEQ ID NO: 30165 - DNA, 501 bp, Medicago truncatula
  Intron number 1 from transcript Medtr6g014210.1 (locus Med tr6g014210) derived from phytozome v7.0 (chr-ID MtChr6; po s 3236223 to 3236723 reverse strand)
tcatcaatcatttggaaaataaaacattcctcaaggttcattttttcttcttgttattgttggaattttgtgatttagtttatgttcatttgaatattgtgttggttttggatttagctttgtaagattccttttgtaagtttgctgattggtttatgttatgatgtttcctatgatcattacttgtttgttggatttcaatcattttcttcttacatgacttgttagctcagtgatttgagtttgactttgtaatttcaaaagacgaaactcatggtaaaatcatcatcaatatcactttgattaatgataaaataaaatctttatttatttggattggatagacatagcttagtttttatcaccaaattatttattcatagaatgatgacaaaaagtttgatcagaattcagaaatttcatcctttcttcttagttttcttacttatccacttcactgtttcagattttgcatcctgttttggtattgagtgtgattaa

SEQ ID NO: 30166 - DNA, 914 bp, Medicago truncatula
  Intron number 1 from transcript Medtr5g095040.1 (locus Med tr5g095040) derived from phytozome v7.0 (chr-ID MtChr5; po s 37682127 to 37683040 reverse strand)
attggctatgtaagttttcatttctttgaatttttcatctttgttgattttttattattgtgttattcacagtttaattttgtttgtgtttgttcttgttgggggcttgctcgtttatttcaacactcaaaaaagttaagacgagagtccaaactaatcaatacattttaaaatcttcaattttgaacaacgtttttccaatttattcaattatttctgaaaattttattttttactccaataaatcttaaaccttaaatcttggcattgttgccgtcgtgaaatgaaaatagtgtattttcttcgtgaagaatgaaattaaacactttagttagtatttgagactaataattttcaatattatcttaagaatcgaacattgttgaatcacattagtccctgacacaatattcaagaccaaattgacttacctaaaaatataatgtgattgacgattttaaaatattactatagttttagggactgagttgatgattcactattatccaagtgattggttagtgatataactgtttcaaatcaaatatattaaacataagcagaagattttttttttgtaaactagtgatttcaatgtaggcatgtaaaaactagatgaaaatgcatcagtttacagctataggtccctattccttgaactttctgcatacctatcttcatggactgttcattacttattttctagttttcattttttttttttttttttttttgcttattggtcctcatataattccttgttcacttacaagggtatgatttgaaagtcaatttataatttgtttcactctattatgattgcaagacttacattattgtaatcaatttactttcttttattttcaccaatggttgaattattttcttatgctttggtttggaagtttttggat

SEQ ID NO: 30167 - DNA, 533 bp, Medicago truncatula
  Intron number 1 from transcript Medtr5g012490.1 (locus Med tr5g012490) derived from phytozome v7.0 (chr-ID MtChr5; po s 3584288 to 3584820 reverse strand)
agtctaaaggtaaacctatcatttttaataagaaaaataattttataacaataataaacgaaaagcaaatgtcatgttttattataggtgaggttaggttgcctttgaagaattgtggatttgatctatcaattaatcaaaattagctaaatgagtaaatatgcaagtggttctacaaactaatttccactttatttataaatttgcttatgtgactaattttgattggttgagtggtaaattactcggaattcatcaaaataacttaagacaaaacctttactatactagaaatagtaagattcccctttgaatcatgttaatattaaaggccatctgctttcatttaaaattgagattgcatatgccaattgtaaaccaagactagagccactttcagttttactgtgccgacgtaaagaaactccaaaaaaaattaacatggtgtgatataatattatacatatatacgtgtttgttggtttagaaatatgatttgaatgatagaaaacgatgagacatggttgtgcagg

SEQ ID NO: 30168 - DNA, 711 bp, Medicago truncatula
  Intron number 2 from transcript Medtr4g114130.1 (locus Med tr4g114130) derived from phytozome v7.0 (chr-ID MtChr4; po s 26035625 to 26036335)
acaaagtcaaggtttgttaatcacatttactaattctttgaaacatttttcatcatgtattgttatgtttttgtttaattgtttcatttcataccctccctccttttaaattggtacgcatagacacttatcaacatcgtataagtgtttatctataagctatttctatttcggaatataaaattaactccaattattctcatatattatcccgaagagcttatgaaaataagctgaaacgatttatggacacgtgataacctgtttcttctaagttctgaacagtatcacaagtgattatgctagtatataagctcaaattaattaatataaacatgtttttaatgctgagaatggtactgtttggataaacagctcaattagcactttatatcataagctatttttgtaacaaaacgtaaaagtaagttgtttacgtaaaagctaatttttagagcttatgaaataagctgaaaatatcttatgaatatgttataagttgttttcatctgttctcccaaaaggtatcaaaagtgcttatgtcagtagataagctcaaatgagccaatccaaaccggccaatttgtgtctttcaattctgtttttctttatcttattccttgctataaatccaaatggcagacaaggatttatgttgtagttactcggggaaataatgatgattattttttgaaaaacatatgtagatat

SEQ ID NO: 30169 - DNA, 621 bp, Medicago truncatula
  Intron number 1 from transcript Medtr7g025950.1 (locus Med tr7g025950) derived from phytozome v7.0 (chr-ID MtChr7; po s 6519256 to 6519876 reverse strand)
tcaatctctgatccgttcttcaatctacaacagtgtgtaatcaaccataactggtgcatattcttgttattcagtttccaattgatcctacttcaattccattttatgtttatccaagtgaaaatccaactgcttcgttggttaaccctttttttgatggaagaatttaccattcttggtcacgatctctaaagaaagctatcatcatgaagaacaaactttgatttcttgatggaagttgtccaatgcaagatgaatttgagcatagctataaggtgtggatgcgttgcaataatttgatgctttcatgctttaccaccgcactatgtatagtaatagatgttacatggctaactactaacccactaacttttgtttattaaaaaaaaaacctctaacttttgctatatgatgatagccaaatcttatccaaaaaatattctctgcatactatattttgtccatatatacacaaattgcaagaatcagaaatatatttttcaaaaagaaacaagagagatttctcacatagacccacatagatcaatcattctaagtctaaccacacacttttggtgtataaataccaaaatatcttagccatattaacatattgtggtc

SEQ ID NO: 30170 - DNA, 545 bp, Medicago truncatula
  Intron number 1 from transcript Medtr5g085810.1 (locus Med tr5g085810) derived from phytozome v7.0 (chr-ID MtChr5; po s 32829531 to 32830075)
cccaacttctcatatcctcaaaatcaacgttccaggtaatgacactctcacttttttctcttcttttaattttattgacccaaatggtaccttgagttgtgattctactatgttttgttttgttgtaaatatatagtaatcgtttgtggattagaatatttgtagtactaacacttatgatagatggcgcctctagtgttcgacacatgtccgacatcgatagttcactgacatgatacacataattacatttacattgaattatgtttcatagtttaaagttatcatcaacgttgatgagtctgatgtttgtgttcgtactttgtagatttgaatctttgtaacacatacacttttgatggacaatgactcttgtgttcaacaatgtcctgcatcaataggacaccgatacacataattacattgaattaattttaaactattatcaatatggatgtgttcatgtctgtgtttgtgcttcataccttaattgattttgatcaagttttgggtgatatgtcatttggatataggattcaacaaag

SEQ ID NO: 30171 - DNA, 943 bp, Medicago truncatula
  Intron number 1 from transcript Medtr5g036690.1 (locus Med tr5g036690) derived from phytozome v7.0 (chr-ID MtChr5; po s 15347504 to 15348446 reverse strand)
tgtttgtcaatacatttgaagctttagaaggagaggtacaaattcttagcattttattattcatttcctatacatgactaaaatattcgctcgcgtaaaatagttgaatcaactaaaattaatgtatttgggcatcaacttttatggacttatttttctcttataatttagaacgatgagaaaataaattaattttatttggtttgattattttttctccacaatattcatgactatttattacttagtcttacgtatatacaaaagtaaagtcaaatgtattttaccaaaaaagtgaaatgtgtttaaaaacagaacgagtattttattttatatatttctctttctatatctacaataaatagttaaaattttattaatttgaaaacaaaaaataaatagaaatatattttttttgacaaaaaaggacacttataaaagaagagaaaataatagtcaactattgttttcttgttccaaaaaaaaatgaaactactgttttcttagtttttttttttgacatcaagtatttttttggacatcaattattatttttttggttgagttgtgagacaatgttctttatttttattttagtttttatactactacaattatgcaatgaaatcagatcttacatgtttgggtgtgattttttattttttttggtacaaaaaagagggcagagcccaattttatttttattttttatatatatatatatagaaaaatactaataagtatcacgaccctttattataatattaaaatttgtgacgtttatggataatgtgattttaattcaattccctcttttttggaattttgtttttgtttttctaattaataatgagttttagtggaggatgaatttatgatcattaacaattttctttttgtattgaaaggttgtgaaagggctaactgagctttttccagctaa

SEQ ID NO: 30172 - DNA, 462 bp, Medicago truncatula
  Intron number 1 from transcript Medtr4g041610.1 (locus Med tr4g041610) derived from phytozome v7.0 (chr-ID MtChr4; po s 9890811 to 9891272)
gttatattgctccaggtatgttttgataatgcttttgtatgaaatttcaacatacttctgtgaagccccgatacctgacatgatacggatacgataccgatacaatgatatgggaaatttttcaaaattcccgatacgatactgcttcggatacgattcttcatcatttttggagtatcggggaatcacagatatactgtttatgttttttgaagtattttattttttacacatttattgtttgtgaattgtgacatatactaatatttccttcaaacaatgtttatatttagggacacttttttcttaaagtactaagaattaatgaaatatatgctttctcctttgatatatgcttccaatttatgcatgtttgaattggtaacagaacatggttaacttataaagctttttgtcttctatgcagaactagcatatacaacggaaataaccgaaaagagc

SEQ ID NO: 30173 - DNA, 857 bp, Medicago truncatula
  Intron number 1 from transcript Medtr4g095810.1 (locus Med tr4g095810) derived from phytozome v7.0 (chr-ID MtChr4; po s 20000983 to 20001839 reverse strand)
ttcattgcaaatcaaagttgtgcatcaacgtggtttatcattattaatttacatgattcagttcactattcaacaaattgacatacttaaagtaactcaacacagctcaattaaatgatgacacaaacaatttttattcgtattcggttcatcaatcaccattgaaagagaaaagtttctttttgtcttttttctttcttctttttgtcttttttcttttgattcaggtactcatatttagatttggttgatgacattgaaggattgaccatgaatgaccaattcaacaatgaaggattgcttttgccggaaaattccctcaagaaataaagttaacagaaagttaacagtgttaaaaaagaggtgtttgtgtatttgatgagaatttaagggagattattgtaagttttaagagtgtgtttgaatagagtattttaatgaggaaatgtaattttttagagaatttaaattgacttgacccaaattctattgtttggaaaaatatttaagtcatttttaaaattcaaggcatttagataagaatttttcttttgcaaaatttgaaggatttaaaataacacctaaaacacaaaaatttcacaattctctgtcatttcatcacgcgtttctcacttttctctcccgcgtttcacacttttctctgtgaagctcaccttcaccttcatcgtgcctctctctccttccacagtggtgcttctctctcctcgccgccgccgccgtttgcttctctctcctctccgtcacagttctctctcctcgccgccgtttccattacacacgtttctcaccagctcaggtatgtacatttttttgcttataaatgatagatctcaatc

SEQ ID NO: 30174 - DNA, 634 bp, Medicago truncatula; identical to SEQ ID NO: 28446
  Intron number 3 from transcript Medtr5g064740.1 (locus Med tr5g064740) derived from phytozome v7.0 (chr-ID MtChr5; po s 22380760 to 22381393 reverse strand)

SEQ ID NO: 30175 - DNA, 728 bp, Medicago truncatula
  Intron number 2 from transcript Medtr5g027480.1 (locus Med tr5g027480) derived from phytozome v7.0 (chr-ID MtChr5; po s 11202239 to 11202966 reverse strand)
gtatcaagagcgtttgattcttcttaaattactcgtcgcttcggctgttgggttcccaaaattttgggaatgtgtttgctttgttttttttgttgtcatctttattttgattgaagactgattatatttgttggttattgtgcattcgtcgctaaaaaaattatttgactccgattgactctttgttgaaacaatgttgttggtggatttgaaattgcctttttgtgttgtttgcttttatggctacatttggattataaggtgaaagccaagttgtcgtccgatatgttgttcaagaagtgaaaggcgtacggttgttggtcaataaattggcataattgggaatatatggaggaattagattttgtttgtgggttttggagtcagacttgcagccgattattcttcttcttttcattgttcttttaatttaatcaaggttggtggttctttttgcttgagttttatgtttgggccgatctcctttttttggtttatttacgtgagtctagtaatccgtttgtgagtttttttagtcttcgtgtgtttctgtatttgtgtttggttaattggttgttcgtctctgtctgactctagttgctttggttcaacttgttttggtttgtttagtttggttcgttttggtgtttcaatttatcttgatttagttttgttcaatttagtttcattcagtttgatttgatttcgtttggttcaatttgtttggt

SEQ ID NO: 30176 - DNA, 401 bp, Medicago truncatula
  Intron number 1 from transcript Medtr6g089590.1 (locus Med tr6g089590) derived from phytozome v7.0 (chr-ID MtChr6; po s 18570206 to 18570606)
aatatagtcgactacgtcaatctgaaggaagtcatgtaattcagtatgcttcatttttcaattaacacctgctacacatgccttctgtgtttcaactttcaatatttttgatgtgagaaatagcattaaaagttaatgctacactaagcaggcgtgcgagtttatatatatatagagggcatttcaagtgaaagggcttttaaaatgagaggtgagagggttaaatgctaaccattagattaaattaaattaatatcaacggttgagattagactgttcttaaaacaaacatcatgtgctatcctaaattcttaaccttcatcttctctcttgtacacgctgcttctcttctcttctgaaattcagattccacacttctcttctcttctggaatcgcgaga

SEQ ID NO: 30177 - DNA, 905 bp, Medicago truncatula
  Intron number 2 from transcript Medtr5g072820.1 (locus Med tr5g072820) derived from phytozome v7.0 (chr-ID MtChr5; po s 26008213 to 26009117)
ggcatacatttattttctgaccaaaatctttgggggtactcacaattttccagatttatggtttttctgttcttctggaacccctgttttggttacaattctcattctttggatttttaattatgattgttttgcgtccattaccaattctgaaggatttaattgttccttttggtgtaatggctcggacgccaaattaataatgtggtgatcctgatttatgggtttacttcaataccatttggtcttggaaacgcctcaaacatttatttggtagatttctactttttctatagaaaagtcaaattaatctattagtttagtattctcatattgtatggaatcatgtttataaacagtggcttttccacacagatttttgatgtatggaatgagctggactatgacatacttgatgaataattggattgaggagttagaagtgcttatgttgaataatgaaatttagctgtagattgaagtgcttaaggggttgtggatgtgtttgcacaccaaatttgagagttgatttcagtttttttcttgcttctccatgacttgttcataaaatagagaaacgtaagagatgcaaatcaaatgaatttgtgaagtgtccctttatcaaaaaatgtaattaaattggctaatgttcctttaatacagtttaacgaagacttgtaactacaattggctagtggtgctgagttagttggaccttgagttggagacacaaagaatgtgtttaaatttgaatcatgaaaatgaggagcttgagataattaacttgagttggagcggaaacaaaagttagaattgcgtaagctgttattaataagacacatttcattgtaatcaagttaattaataagacacttttttttataaacttatttcaagagcgagtc

SEQ ID NO: 30178 - DNA, 427 bp, Medicago truncatula
  Intron number 2 from transcript Medtr6g006370.1 (locus Med tr6g006370) derived from phytozome v7.0 (chr-ID MtChr6; po s 836069 to 836495)
ctgctcatcaacctacattatccggttgttgagaagtttaagacttagtaagtttgcattatgatttcacaatacagtgttagagtaaattattatttcacaatctaatttgatttttttttaccatgtttcttgaattgttgtcgtgaccttaacacttctcaagcttagagtcaaagcatcagtcagaacttaagtcagagttcgacttcttctcaatgtacttcatacaacgattttttcaatctgtctcaagtaaggccaattgttgaatttataaacttagtcaaggtctgctttttttttatgtacaaacattctttgaattttttacgcacaaattaaaaatacatattgcattattctttatttcatgtgcatatttgtgttaggatacatattgcatcaccatttggaaagcaactaa

SEQ ID NO: 30179 - DNA, 831 bp, Medicago truncatula
  Intron number 1 from transcript Medtr5g089050.1 (locus Med tr5g089050) derived from phytozome v7.0 (chr-ID MtChr5; po s 34560423 to 34561253 reverse strand)
ctttatctccgttagacggtcgttatcgtcaaaaagttcaagaattagctcctttcatgatgaccctttagggtcattgttgaggtaccccctttttttttttttttttctcattttttgatgacccttttgcttaaagtaccctttttttattgttatgtttgtgtttatatgtgaactcagttactgtagggtcattgatgaggtaccctgtagatttttctaaattttttttatacccttttgcttaaagaactgttttttattatttgtctaatgttatgtttgtgttcatacatggagtctaatgttaaagaactcttttttattatgcttttaatgttatgtttgtgttttacatggactcaagtactatagggtcattgttgaggtaccccattgtttatttttctttggttttggtagaacaactagtaacagaagattaaagataacataaatcgtaaacaatggaacttgatcgtttgtttacgcaatttggccaattgtgtctgcctctgtgactatagagtagctataattccgaatattacttgagtgtattagggtttacaatgttacaagccatatatacagtattacggtccagactagaacaatatccctgaaaggtaccgtgggataaggaacccttgccaactcagctccccccaccccttgccacatttctgtgtctatgtatgagccatattcaacagattttggatacagtttgtttaaagaactctttttttattgtttttctaatgttatgtttgtgtttatgttgttatagattaaacggttgctgaagattgctgaaattagtga

SEQ ID NO: 30180 - DNA, 547 bp, Medicago truncatula
  Intron number 1 from transcript Medtr4g032560.1 (locus Med tr4g032560) derived from phytozome v7.0 (chr-ID MtChr4; po s 7866367 to 7866913 reverse strand)
ctcaacctctcgatcaacccgtttccaaatctcgggtacgttctccttttcaatttccaacactttcatatatccaactaaatttgatttaaaattgattcattcatactcttcgttatagccttttccttttgttgattaacatataggatttataattgtcatagaaaaattagggtttattgtaattcaattttaattgttaattggggttaattgtgtttcagcttggttgattcttttttatcagtctttctagactttttttaactaacaattaggatttattgtaatgcaattttgaaattaatcaattagggttagttaacaattggtttgtgttttcatgttcattgataattaggtttaattgcatttctgcttggttgattcctttttattattctttctaggttttttaaattaacaattagggtttaatgcaatacaattttgaaattaatcaatcatggtttgtttggcttgtttattaatgaatgaataggttttattgcatttcagctttgacattaaccattagggttag

SEQ ID NO: 30181 - DNA, 607 bp, Medicago truncatula
  Intron number 1 from transcript Medtr5g090950.1 (locus Med tr5g090950) derived from phytozome v7.0 (chr-ID MtChr5; po s 35554053 to 35554659 reverse strand)
cattgattaattcaggggttgggtgggacagctgggttagttttgtttgaattttcaatgatgtatacagaatccaaactggttctctctctcttttttctttttttgcctatgtctgtaaagagtcttttgggagcatgccattttgtttgagtttggtagttactggaaaaatgggagttgggagatcaaatcagattgtgggtcctatatagattctgtgtagtataaatgtataatcaattgacttaaagctcgtttgactacacactgggtgagataaaattggggtacaccgtgaaaagctatcacacatgtggaaatcattaacattgagttaggtaaaaatacaggtcttatttactaggtaaaagtgattatacatcttggaaggaagactttcttcgcctgtgttaatgctatttccactgtgtttccaaacaggctcttattttcagaggaaacatattcaaacaaattattacacattaaactctatctttatcaaatactactatatctttatgaaatcaatttcgttcaaagtcacatttatctaagtacatgtttcgtttgcagaggtaaaaacatttttctgcacaggctt

SEQ ID NO: 30182 - DNA, 376 bp, Medicago truncatula
  Intron number 1 from transcript Medtr4g141260.2 (locus Med tr4g141260) derived from phytozome v7.0 (chr-ID MtChr4; po s 34849122 to 34849497)
aactctcctttcaagccggtgaacgccacgctcttgtatgcttccttcttcttcttccttttccccttttcaaattattattcaattaataatttattatacacgcaatctccattgttttcttttaattatttaattaattattgttgttttcaagctaaacagtacctgatttcattcttgcattttagggttattcaatttcccattaatctatgactttactaattataatttaattcttgaactaatttcaccacattccagtccctaattttgtttataatgtttgatgttactcaatggttgaaattttgtttatttatttgattgaattataaaatgcttttttgtttttaattcattgcaggagaaa

SEQ ID NO: 30183 - DNA, 701 bp, Medicago truncatula
  Intron number 2 from transcript Medtr5g006870.2 (locus Med tr5g006870) derived from phytozome v7.0 (chr-ID MtChr5; po s 878315 to 879015)
ccaaaggtgctacattcttctgtcagatttggcatgttggaagagtttctaattctagtatgtatttaattttatctaatgagcaattaattgacatatttttctaatttttcaagtattacttttaggtgggaatgaaatttttgttagagatgatacttattttataggtcaaaatgcatctaaaggttcttttaagttttttcgtttttcccaaagtcgtcctttaagtttcaaaagtcccaaagtgatcctttaagtttcaaaagtctcaaataagtttttttagtttttgaatcgtttcaaacaagtccttttagaggatgatggtgatgatacagatgatagcaacaaagagcatccaccatttgccatgcttaaaaagatgagtaattttaagtgggtgttaggagccagatttggtaccaaggatgagttcaaggaagcaattaccaactatgctatctacaataggacttgtttgaaacaattcaaaaactaaaaggacttgtttgagacttttgaaacttaaatgaccactttgagaaaaatgaaaaacttagaggacctttaaatacatttgacctattttatattcgccggtttaattaattacatgtattgtatatatttattaaacacatttatatacatacactctcaatattatatgcctatattacatacagtttgtcaaccaa

SEQ ID NO: 30184 - DNA, 765 bp, Medicago truncatula
  Intron number 1 from transcript Medtr4g067350.1 (locus Med tr4g067350) derived from phytozome v7.0 (chr-ID MtChr4; po s 13063778 to 13064542 reverse strand)
tgtttgctgttttgctttgctttgctaccttacaggtaatcaatcatcaattcattattttattcaatatcatggcacatactttgtatttttcctactttgtgttttccaaaatcatacatgcacgttacccaactcttcctagtaacttgaaatttttttccttttccacacttatctcacactcaaatctggatcctctacaataagttaggtttagagaagaaattttcttctctttatctaatgtatatatatagtcacttaaactatatagaggttgtagagtaaccaagtttattaaaaaataaaaaatttcaagtgtttttaatttattttttattattattagtatatgccgctttgaactcaactataaacaaaaaaaaaaaaaaactatttatatacatgcaaaaaatattagttaatttgatgtaatatttttaagtaatttatataaaaattaatctattctttaagttactctcaatgatatttatttataaagtatcctggcattttacttttttcatgaattaaatgagaagtatttttgaaataattatattaaataagataagttagtaaaaatttgctaataatttaagataataaactaaaacaaaaattgcttttattttagccaaaaataataatagtgatatattgctccttttggattttgttattattttggtgtttagtgttcaaaatattgatgagttattgtattgtatatgcagataagtgcaatttgtatcgaac

SEQ ID NO: 30185 - DNA, 977 bp, Medicago truncatula
  Intron number 1 from transcript Medtr4g144530.1 (locus Med tr4g144530) derived from phytozome v7.0 (chr-ID MtChr4; po s 36421332 to 36422308)
ctcttccttctcttagccgctggtagtaatttattttattatttttctttagtttttacatttgactaaatatgagaatttctcacatttaagacaagagatactatagtaaaagtgtcctaagtacatttgttaaggattcaaaaaatagaaataattgataacttttatgtaaaaaattactttttgatgttttaatgtgttgaatgtacaaatttcaagaaattttttccattttaaacctcttatcaaatgtctttgttaacattttcctatatttataaaatgttttgtgatatatttcttctttctttagattaatattttatttctttctctcacctatatattaagtgtatagcctatttgtaatattattttttaaaaataacttttatagtgtctatatgttatagtttctttcacaaacttttctataaaaaaacaacaacttagattattataaatatctaacaatagcttgaaataaaaaatcattttaaatgtttttatcttgaatttctaacaatttaaaaaacaacttaaattagattaaaactaatctctaacaattgcttgaaataaaaaattagtttaaacaacttatcatattttattatgttgaatttctaacaagtaatatctaaattattgaatattaaaattacttttaatttatgataaataagttcaaaacaatttctagtgtatggagaaaagagttcgtgtttttctctcttataatcatattgataattgtcaatatttaaataccactcctacgaatactattcaccttatttgataaaaaaaaaaaagaaaaagaatgatacacgtctgtctatgttctgttgtgttccttctgaaaggatgttgggctgtgttgtgttgtgtaatgtggttaattattttaatgaatgtatttgacatgaaaacatgcagatattgcggtgaagacagcagagggtcgaaggtgc

SEQ ID NO: 30186 - DNA, 590 bp, Medicago truncatula
  Intron number 1 from transcript Medtr5g032820.1 (locus Med tr5g032820) derived from phytozome v7.0 (chr-ID MtChr5; po s 13328470 to 13329059 reverse strand)
tctggtgttctctctcctttcaatttctccagaaggttcaattcattctaaacataatatgcatgtagtattcattatttgttgtaccattttatttgctcactttttctttataatgctttacatttgtttgtaaggtgttatttcctatttctaccaattttgatgaaaatataaataacatcattaaaaaggtggagaatatttcctatttctacacaatatgttttcattctcaaaaaacacaatatgttttcaaattcatatttcaatctaaaaacataaattttgaatattcaaactgaaatttagatagtctacataacatagatattataaaattaaaatcaatggaataaattgaaaagtatatattatgtaaagtagggaaaaaaatagacgtccttctttagtgtgtaaataataatagtaacagtctatctaccaaaaaaatcaataacaataataaaaatcataaaatagaatgctaagaaggaagtttgatcttgtaaaaaaaaaaaaaaagagagagagaaggaagtttttatcataattcaatctaatttagtacgttaaattttcagggaaat

SEQ ID NO: 30187 - DNA, 986 bp, Medicago truncatula
  Intron number 3 from transcript Medtr6g086540.1 (locus Med tr6g086540) derived from phytozome v7.0 (chr-ID MtChr6; po s 17717793 to 17718778 reverse strand)
gttgctggtacgtgaatctttttaccgtgctggcggtagatctattcaccaacttcaaaccctttttcgtctctacaaatgttcattcttcattttttttatgtaacttggtatcgtgcccgtacgcgggttcgctaagctgcgcttgtcaggagtgtttgtttgattaggattgattagggtaggttcactttgtttggttttaccacgtgtctgggtcaggtcaaatgccccctcatcctatgtaacttaggattgattagggtagtttcacttatttatatatttcttccttttgcctaaaaaaaatgtgtttgattgtgcgtaggggtgaactcatcatatggttgagtgtggctatatccacaacataatattatccaatttttttcataccgaactcaaacaattattaattatatacgatatatgttcggttcaattcctagcgcctcgatcttaacaattttttttaatgtattagcataaaaagtgggttgcaaggaattaaacctaaactgtaggggtgaaatggacacgcctaacacaatttttgtgcaatgcttaatatgtcacaatttcactttatcaatgtatttagtaatataaatcaaatatatagttaggtctttgtgcaaaacttgtggaagcaaataggtgtaaaatatttgctatggtttataaatatttgaagttaactttgctcttgtcggtagcaattgcaagttttgaatatgtttttcagctatgaagattgtgaagaatcaactatgtaacaaaatcggtgatcagtggctaaatgaccatcttgtaacatacacagaaagatattttcttttcacaattaacattgaagttattttaaatcatgttcaacaaatggataatagacgatttttattgtattgtatcaaacaatgttatttcttatttttagtataatttgaatcataatttctttgaaatttcagtcatatcaatatcaa

SEQ ID NO: 30188 - DNA, 588 bp, Medicago truncatula
  Intron number 1 from transcript Medtr4g047280.1 (locus Med tr4g047280) derived from phytozome v7.0 (chr-ID MtChr4; po s 10940952 to 10941539)
ctagagattttacttttcctcccttgtactttggggtaagtgctgagaagcttatgatcattcaatactttaggtttaacacctttgggtattgttttctcagaagcagtaactgctttgttcttctgatcctttggctttaggattttagattctggtttaatcagactctgagggacagattctgatcttttcagaattttaatctttggagtcttaggatcaggttttgtcataaccttagacttaaggttttctggctttgatataatcttagccttagaaccagaagcttcaggttctgactgaacagcagttacaacattagtaccttcaggcacaaaggtggatttcaatccatccttgatacaatcacagtagcttttgagactgtactctttggatttctcctcagaatatccaatcctttgtcattgtttttgtatgtgttgtagatcatagaagcaaccttgcttctgtctatgccagccataataaagtcatccaatgcaatttcatgtttattgcctgaacctttatcacatttttcttgtagcttctgacagagaatcttgaatctatcttcat

SEQ ID NO: 30189 - DNA, 899 bp, Medicago truncatula
  Intron number 2 from transcript Medtr4g047280.1 (locus Med tr4g047280) derived from phytozome v7.0 (chr-ID MtChr4; po s 10943920 to 10944818)
gtctccctttcaattcttcgttcttcttagacaaggttgaaatgttaaacagctactttgaatcttcagtttaaatttatggatcaattgtagcttctggtgatgatttcgcttctgatgacccatctgcttctgatgagcttctacttctgatgacgtcatcacttcagaagcactccagcttcagaagcacttttagcttcagacgcaatttttttcagatgctttgaattcctttgctctccattgttcttccacgacctattgaaattacttgactagcttttggtcctgtacacttgaacaattattagcaataaccaattgacaattttttaataccttgttatcatcaaaactcattaaagttcattgtgaaacacattttgttctaacaaaatgatgaaatagaatataggataagctattcaaacgaatttttcatttgaaggtttgtataaaaaattataacaaaaacatattacattgataattagaatgctcaggaaaaattggcttagaaaaaaattgattataatttatagttagttattttgttctctaaataatggtgtatatttaaatttaagattaattaagtttctattctgttttaaaagggcaggatcagttttgtgagtaggccaaaacacgaggaccaaaagtgtaattaagccttgttttttaaagaagataaatgtgaacacatttgaaagtgatatttgagcccaaatgtcttctttgccttgaatttgggtaacatctcttgccctaaatcttttcaacagtgtgttcaacactcattctcttattggataaaatcaatgtatgacagagcactttaaagctttgtttgcgagttttgaggggaagggaggggaaggcttaggaaaaaagga

SEQ ID NO: 30190 - DNA, 576 bp, Medicago truncatula
  Intron number 1 from transcript Medtr7g046230.1 (locus Med tr7g046230) derived from phytozome v7.0 (chr-ID MtChr7; po s 11317483 to 11318058)
ggtggtgaaactattttatgttgctgcctcttttttcaaagaacaatttggttggacaatagtttcaaaattagaaaaatcttaactttataaaaaattagttcaatggtgatgagtttaaactatttttgtaccaaatgaactccttagtatgtgtccctcaggactggtgttcaaattcaatattggtgcaaagtgtaaactagcacaacaatagtttggcacaaaaaatacaaattttgaaactgtttgttttttttctgtctgtttctttcttggaattatcacatgtttctttcttgaagatattcttgttatcatgctattctcactttcaaaacttggctaccatttctacacttctttcctccaatcatgcaagtgtttttatttatttattattatattatctatgatttaggcttcctatttggtaggcataatgaaaagatgtagttaatatatatttttcatctctttcaaagttataccttaataatttgttggaagcgttctctttcagaccaatttttctttaaatttggcagcagaacaagaaagagctatcacagaaaa

SEQ ID NO: 30191 - DNA, 689 bp, Medicago truncatula
  Intron number 2 from transcript Medtr7g077440.1 (locus Med tr7g077440) derived from phytozome v7.0 (chr-ID MtChr7; po s 16333825 to 16334513 reverse strand)
aaggttcattactaagatttttcatactttctttttatgagaatatgatatttgtttttttaaaaaaaaaaatgatttttatactttagatcagtgttgtcaaatagcggatatagtggctttataatgcactagagatgggataggattagaaatgataatatcagagagtgagagttgggtagcacctatagtagaaaagatggtggaaaataggattaggtggtttgaacatgtagagaaacgacctatagattttgtggtaaggagagtagatcagatagagaatagtcagatcactagaggcagaggaagacgtagaaaaactatcaaagataaactattaggaaatatttggaaataaatgagttggaccgaaatatggtttatgatagaacattatggcgtaatttgatcaatgtaaccaatcccacttagtgcaaaaatgcttggttgttgttgttgtattgttctatgatatgtaatttatacaaagtgttgccaaatagagactatagcactatctgcagcatagacgaatttgaacaaaccactgttttctccgatccacggttgacaacactgttttagacatgaattttgtgctgttgagtttatatatatgtgataatgatgatgataaatatggtttatgcaattttatgtgttacagttagataacaagtttg

SEQ ID NO: 30192 - DNA, 655 bp, Medicago truncatula
  Intron number 1 from transcript Medtr5g095890.1 (locus Med tr5g095890) derived from phytozome v7.0 (chr-ID MtChr5; po s 38048872 to 38049526 reverse strand)
ctatctttgctgttcaagaacacaacatcaaacaggtttttttaccatttcaattttgtttccttgataatgttttttgtttgaacagtttcctttgtaaaatttagtcaagaatataaagtgatttttaaaactttaatctcattttgtacgttttttcttcgtattgggtcatttcatgatcgatttgtgtttatctctgttataaataaacagtaaataaatggtaaatttagaacaaattcaaacacactaatataaatttaatttaattgtattagtctagaaggagtatccaactggtttgggctgtaacacgtgaaggagttatatatatgcagtaggtgcatgttcaatttagctactaattaacattttctccctgataaattatgaataagttatttataacatttggttataaatatatattgataaaaaacaaatcatattttttaaacttatttattcaaacttaaatgcatatatattatggctaattatattttattaactttaagaaatagatatgtatagagataataatgagacgtggttagatatacatgcaaattaaaaatactaataacatttaatctaactaaaattaattggatattatatttctctgttttgacttgattgaatgtgcaga

SEQ ID NO: 30193 - DNA, 521 bp, Medicago truncatula
  Intron number 2 from transcript Medtr5g028450.1 (locus Med tr5g028450) derived from phytozome v7.0 (chr-ID MtChr5; po s 11740178 to 11740698 reverse strand)
tcaactggtaagatctatcagaaaaatcttccactttaatttttcttttcagtttgttgtatttatagtggttgtaaaccataccgtaattgatgactgtagtatgggaataggtcaggccggcctacagacaggtcaggtcagacttttttcttaaacagagaaggcctaggctttattagaaatctatttagcttaaaaagtcaggccacagaccattcaaaaagcctcttagaccggcctatttaagtaactatgaataatattatttattattatattatatttcgtactttgaattagaataaaaatttgttaactttttcataatttaaacttattagtatacattaattttctgcatatttaaatgtattggtatactagttgacttgcttgactaagaaatagtttgaattctaaaagttgcatttaaaattgaaatgtttttttccttcttagaatttacatataaatttaatattacaaaataagatttcatcttaattatacattcaggg

SEQ ID NO: 30194 - DNA, 673 bp, Medicago truncatula
  Intron number 2 from transcript Medtr4g157910.2 (locus Med tr4g157910) derived from phytozome v7.0 (chr-ID MtChr4; po s 39475853 to 39476525 reverse strand)
gacagaagcctggaacctctggtctccgcaaaaaggtcttcttcttcttcttcactcttttatctccattccattctttcttcaattcattttcactttcattattatcattcgatttgttttttttcttcttcttatgattgtattatattactggatcgtatttgaaatcagatcttatcaatccgatctgttctcgatcatgttgttttcaatctgatttttacgttttctattaattttgattagatcacaattaagctggatattctgtgtagactttgcatgttcgcatcaaatttcataaactatattgcttaatcattatctccaatcacattgtaatttaatttatatttctcgatccctgcatctgatttttttagtttttatcatcaactgtgattagatcagaatgtagaactacgctagataatatattcagtgtctgcatgttcaaatcaaatttcatattcattttgtgcaattactgatccacatttttatttacgattaattatcaattatctgaatttcttatgtgttgcgagatcggttttgtatggacgcgattgttccttctctttcgttgattattagttgttgtgtctaataatggattgggtggatcttttcaggtgaaagtctttgtgcaaactcattaccttgaaaa

SEQ ID NO: 30195 - DNA, 170 bp, Medicago truncatula
  Intron number 3 from transcript Medtr6g070850.1 (locus Med tr6g070850) derived from phytozome v7.0 (chr-ID MtChr6; po s 13475067 to 13475236)
gaggcctgcaaactggtaagcttgtttctttattttgttcgttatatataaactatttgatttatctgctgctatcatttccttctttttgttgtcttctacaatacgaaagttccatttttctgctgtattgattttacaggtagttctcgggttgttgaccattcaaa

SEQ ID NO: 30196 - DNA, 780 bp, Medicago truncatula
  Intron number 1 from transcript Medtr5g012090.1 (locus Med tr5g012090) derived from phytozome v7.0 (chr-ID MtChr5; po s 3395929 to 3396708 reverse strand)
ttcacagcaacattgcaggtttgaatacatatatagtttaagaattattcattcattatagttatatagtttatggaataaactgtcgagtgcgtgcgatattgtttgatatagtgtgagatttgttagaattggtttatggtaattagaagtttggtatgattagatagaattggcttatttgagctcatctactagtataagttgtgtgagactgtttgggagaacttatgaaaacatcttatgacttttttcataagcttatggacctgtttggattgacttattttttagcttatgcaaaacagtttatgtaaataaataaccttttagtattattcataagcttgtcaaggtagtttaggacaaaacagcttatgaagaattttcttcagtaagaacttaagaatttacataaaagcttatttatttgcgtaagctatttttcataatattaaaaataagtcaatccaaacaggccctattttagctaatgaaaacaacttatagtatatccaaaaacaatttaacttaattttatcatgacaagtgcttgtgctataagctgaaaataagttgtttatccaaacatggcctgtatctaacagataattttgagactgagcttaaggactatttaatatatgggtttgtctaacgtgtattaaatagtttatgtattaaattggagatagactgacagagtgatagtaattctgagactaagttatggtttattctacaggttttgttaacctccttgaagtttctaaatcggca

SEQ ID NO: 30197 - DNA, 757 bp, Medicago truncatula
  Intron number 2 from transcript Medtr6g070780.1 (locus Med tr6g070780) derived from phytozome v7.0 (chr-ID MtChr6; po s 13436783 to 13437539 reverse strand)
ttttcgtgaggtatgagctgttgaatcaattaagttttgatgagtttttcggtacagtgttgtagacttgtagttttttttcttcttgtttttaagcatccaattccaatagaaaagagtccctaatattctagaatttgactcagagggaaataaagtttgacgtagagtcattctagtcagaaatcaacattgaccgaagtttagttttgatagactaaatattattgctaaccactttctctgttttggaagtatatggtgctactatatatttgactaaaatgcacttttggtccttcaagtttgcaaaatttgcgattttggccatttattttcaaaatagcactattgctcccaagtttcagaccctttgcaaaaccttgacctcctttaattttgactcgatcaaagctgacatgacacatttcttttatgagttggatattattaaaagtaaactattgctagctctgattattgggattaaaattaatagaaaaaatcataaatggtgacattgctcacgtgactcatcccattatagattagaaaccaaatcaaattaggaataagggttaactccaaagctcactctcatctcaatagataagaagatgacgaaatgatctccaaagggtaaatcgaaagcgaaaatgattttgaaagactcagtttcgaaagcaaaaatgagtttgaaagacataaaattgtaaatgtagaagacaaattcgaaggtggtggttgcgaagaagtc

SEQ ID NO: 30198 - DNA, 1066 bp, Medicago truncatula
  Intron number 1 from transcript Medtr4g025670.1 (locus Med tr4g025670) derived from phytozome v7.0 (chr-ID MtChr4; po s 6182375 to 6183440)
acaattgggttcccccaatccctcaaaagcttagggtgagttcttcgtttatttttaataaatttataataacaataatcgaatactataccgtaatacccctaactgcacttcactcatgtcccaacgggtactctttggattaggcatgtcctgtgtcggacaagtgtcgtgtctgacactgagacatataattacactgaattatatgattttctcaaagactgcagttaacaatgtgtatcaggtgagtggatgctaagtaaaaagaagagatttctaatatggtttaattgatttatgcagtcttcaagtttattaaatatactgtaatcataaattgacgtctttgcctattcgatgccttgaattcccgggtctgttgtctttgtaaaaggccatcatccaacatagactttcaaatagaatttcagaataaatgaagtttttatattttcataaaaagactagtgaattcttcaaaacagcttatataattgaacatgatatgccagattaaaatgctttgaggttcctctaacatttttgatatatgctactatgtttcccttgtattgtgtttctcattaattccatcaacttcatggtggaagagatgtaaaacaatagtttgatttaaaacttcatagtggtcagaggagttgaactgcagttaagtggaggtcggaaatgagctgtaattggggatattaaggtagttttgaggtgcgagagagtaatttttgagcttaaagagcaatttccagatacaaataaaatatatacactcaagaatgattttgtaaattgatatggtttctgtttggattaacttatttgaagttgaaggggaaaaacttagttttttataacttatttccataaaaactctgatattttatgaaaaaaaaaccaaaatatgtatgaaaatactataaatttattttatcctttgttatacaatacttatattcgtagtgcttatgctataaatgtttaattaattatttatccaatgagaaactttgtagggaactgaagaaacagaggaaaatagaagaaatag

SEQ ID NO: 30199 - DNA, 792 bp, Medicago truncatula
  Intron number 2 from transcript Medtr5g095820.1 (locus Med tr5g095820) derived from phytozome v7.0 (chr-ID MtChr5; po s 38015607 to 38016398 reverse strand)
tatctagtgcaattttcctagttgcaggcactacggtttgccacttttgctctttctttttctttgcaccaattttgtattactatacagtaaaatccattgtgaaaatcaaactagttcaattttgtaacatgttcttatgaattgcaatttgatatgcttatataaggctgttcatggaaaccagttggatgatctattaatcaaatgcgaatattgttgaaaaagttaatgaatatttgtcttagtatttctcaagttagaagtcatatgagattgaacaaaattctgaatgtgacacttataagttgtaaagaaataatggagggagtattagttactagacttgagcagtgtttatcaaagactatgcagcgttgaccacacttcagatgaaggcgtatttgttgtttgtggtgttcgacattgacacgtgtagttgcattcaatgacttctattttcttaaattattattatcctgtctatatgttagtgccgtatccggtatcaatatattctccggtgtttgtgtcagtgcgacatagatgatagatcgcaatgtatcagtcttcctgcacattattaagacacgtccttttctttttaatgtaatttaaagtgagattgcacacattcaatatgcatagctgcaaaacttgtgacaactttcgacttttttgtgattgcggtttatttgtatttattcaagcattatttcttgccatcatttctcttaaatgctaagaaatattgcaggtaggtgcagggatacttgcaattcctgcagtgac

SEQ ID NO: 30200 - DNA, 876 bp, Medicago truncatula
  Intron number 1 from transcript Medtr4g124440.1 (locus Med tr4g124440) derived from phytozome v7.0 (chr-ID MtChr4; po s 29097935 to 29098810 reverse strand)
cgcacatttccttcacaaagaacgaagcaccgctggtaatcacagtttcacaagttagtgtttgcacaagggtaatatggtaaacttcaaataaataatatatatttaattttagagcttgtataaaacagcttatgcacattgctaactgtagtctgcaacgacagaccatgacccatattgaggtacattgctaactgccaagcttaacatgcatgcataaaaagcctcctttattattagattagatacttacgggtcaaatgcatgcatcaaaagcgtccttgtttatgcttcttagcatgtagtactattttggaaatcaaaattaccaacatgaaaactcatgtttgaccagaaacaatagtaattatttaccttcttatgaacacatgtttattgtcttaccaccgtgttgagttgtattcaattgaaatgagaatcatcgacctaataatttttcataatgaggcctaatacaaattttaatatatcatatatttttttgtctacagcccttttatttataaactataataaaaattattaatcttttgttgatagacctaaaacgaggattttagtttcctatctacttacctgtggttacttttcttcattgattttattttcccactttctcatgtgtcagtgtcactgacccattgtgtggaaaatataacaaagcatcatcatgtcctgttgagcaggggtacaattttgtttcagttagaatagttcaattatctcttcatgaaatgcaagaggggtatgatagaaaaactcaatggactctgctaaaaatcttctctaccttagcacagtcgaaaatcataaaaacaaattgttagtgttagattactctttgattctact

SEQ ID NO: 30201 - DNA, 753 bp, Medicago truncatula
  Intron number 1 from transcript Medtr4g036550.1 (locus Med tr4g036550) derived from phytozome v7.0 (chr-ID MtChr4; po s 8956517 to 8957269)
gcccctgctaatatcgaaagtctttcaaaaataaggttgaatattttataaataagaagactcataaacttaatatcttacaaaactaagttttttagttaaaatttaatatccaatgtttttacttttaagctaatatgaataatcatgatgctctcctcatgatccaacacttcaataaaaaaaaaactcttaaaaaacaatttttgaatttaagtaccgcctaaagattgtcatatgggtatgctatgtatcaaactaattaaaaacacatttaaaaacgaaattgactatcaaaatacactcaaaactaaagtacactaataaagtagtactttttttcctaaaaaaaaacaaacaaactagtactttatagtgacacaattaattaatgggtcttttcaaccattgtcctcagagcaatggttaaggaagtcaaaaatagcatgtttgcattggtttcaacaatatttcgacttttaaaaagttaaatttatctgctcctcctcaaggtctcaggttcgattccctctagtgtcaatttgggtgggctaatttaccttcttcaaaaaaaaatttaaatttatcatttttcacctttttcaatattatatctttatttttatccccttatccaatgcgccaaagacaatggttagcgttctatttaattaaaatccaaaatgactattcacactttgtgaagtgataaagacaggaagaaggacaaggacggaacggacatagtctatc

SEQ ID NO: 30202 - DNA, 278 bp, Medicago truncatula
  Intron number 2 from transcript Medtr6g065070.1 (locus Med tr6g065070) derived from phytozome v7.0 (chr-ID MtChr6; po s 12104446 to 12104723 reverse strand)
tggtaattgaatctttcgtttaatgtgttttgcgataggtttgatgaactccacaaccaatcaccacaaacaatcatctacttctccaccctcttcaattaacccaacaatgttgctatttactatagatctatcacgataaattttcgcaaattgaaaacaaaccaaacaaaaaacaattaatcttttcttccattttagggaaaaaaattcaaaagagttaatttcatcattgtttggttatggatttgaatgaaatgaacgcaaaagctgaaggg

SEQ ID NO: 30203 - DNA, 791 bp, Medicago truncatula
  Intron number 1 from transcript Medtr6g093190.1 (locus Med tr6g093190) derived from phytozome v7.0 (chr-ID MtChr6; po s 19884242 to 19885032)
ctgatcgtaaacaagaagaagaagttaacgaggtgaaaaattgctttggattttttttgtggatcatttgattttgacctaattttgtgctcatgagagagtgatttaattagttgttcttgagttaagtgatgagtgtgtgtgtgtgtgcagtttagaacttaattttgtagcttataaaataagttattttattaggttcttgatttgttgctttataatgattgttgtattgcttaatatttttgtaacttaaattgattgttgtattgattagagaatgattttagattgtttatcttacttagttttgattagttgctattaggggattgtttggaacttattttgcagcttataaaataagcacttatcgtataagtgtttacgaataagctatttctataacacaagattaaattaagtcaagcttcgtttgcataatctataagctgtttttgtaagccatttggagagcttctaagctggaaatagtttctaaaatgtcatcagttgttttcataagttttcccatagaagctcaaataagcaagaatccaaaagagacagttggaaaacaatgtgtgttggagaaggatttagaataagaaatgaaaagaaaatcaatgaatgactttgttaatttccactcaagggtttgattgatgtcgtgggatatttcaattgtatatctaattatttttgctatccttgtatttgtatctcatttttttttatcgtcaacattaaaatatatcagctggttgaagaagtggagcaggaagaaggtg

SEQ ID NO: 30204 - DNA, 656 bp, Medicago truncatula
  Intron number 2 from transcript Medtr5g067310.1 (locus Med tr5g067310) derived from phytozome v7.0 (chr-ID MtChr5; po s 23876678 to 23877333)
tcacctacaagctttggagcgacatcgaagtaattctaattgtttgtttttaatgattaaaatgtttaatttaattattatatttttaatggttaaaatgttatattgaaacgtttagttttttaattattcaaatgtttgtatttttaatggtttgttttatgttttctatttcagtttaagatgacacattatgtaaaggctatatcacatgcgaggaagattaagaccggaaaattggagatcccagcataaacttcatatcagctatggagtagacttaatgcatccgatcttgcaccactactttagatcaggtttgctagcatcaatagtgcccttatgaccgcattgtctaagaggtggcataaaaaaaccaacatcttccctttacctgttgggggagatggttgtaacactcaatgatgtgacgtgtctactatacattgccatcgaagggaagctgacaagacacaccgactagattacttatgagtatggtattgagattttaacgaatttgttgggtgtaactgaggagaaggcgatttctcaaacatacgcacaatgaagtggctatgttggtatttcttggctggagaagttattcatgaaataccttagtcaagacaatgacttgtaggagccgactgatt

SEQ ID NO: 30205 - DNA, 843 bp, Medicago truncatula
  Intron number 1 from transcript Medtr5g099240.1 (locus Med tr5g099240) derived from phytozome v7.0 (chr-ID MtChr5; po s 39660247 to 39661089)
ccactgtcaaagccactgatctcaagaaggttagttttggttatgtttcttcatgaatcatgatcattgatcaaagtttcatttactgaatgaatctctgttttttttttgttttgttgaattgtttggaattctatagttttctattattgaatgtgctccattttatgcattatggtagtttttcattatagattagtgccttgtttggattaacaactgaattaagcgcttattatataagtagttgtttagttgtgtagattgacttatttgaacttgtcgattgacataagttttgcgaaactgtttgggatagcttatgaaaacaactaatgacattgttcacaagctgttcttagattattttcacaagttatccaagatcgcttatgaaaacaggttatagcttatacggaaataattcaactttgttttatcttttcgtattgaaatagcttaaacatgagcacttatgataaatgctagtgctataagtttcaaataagttgtttgtccaaacaggctctatatacagactatttcaattacaaaagataaaatcaaatcaaattgttttcatataagctataggttgttttcacaagcaatttttgaaaggcttaaggaaataagttgaaaacaatttttagacatgtcataagccgttttcgtaaactctcccaagtggtgtcataagtgattaagcttgtagataagtttaaataaacaaatccaaacatccccattttacttcttttaataattaattgtgttgtacttgtggccttgtgtggtgttctctaatttttttagtttatctgcagataacaactggtaaaa

SEQ ID NO: 30206 - DNA, 898 bp, Medicago truncatula
  Intron number 2 from transcript Medtr5g049250.1 (locus Med tr5g049250) derived from phytozome v7.0 (chr-ID MtChr5; po s 21033120 to 21034017 reverse strand)
gtctcagacaacctacgcaaaaggaggcaagtggtgtttatctattgcttttccatatcatatcattctctatacctcacttcatattttagattctgtacaacatttcaatattatgctacaatctttaggtattttattcaacatgcagtatttaatcttcgtataattttttttatcattgttacaattaaatattttcttttttaaaaaataaactaatcagttattattactcctttgacaaaagctttactaaaacttcactagtttgacaaaagttgaacaaaaattatattttttgacaagttccactattaaatcgctttccttcgctgatgctgtggatgctattgaaagtaaaccactaatcatccttcctttgataactattgtattcaaaattccaaatgtgtaacagattcaattactacagttccttcattactcaacctatcatattttgagacaactattttaggcgtctctttaatgataattttaaagatgccgatgaaaaattaaatagggctgggaggtgaaccagtatggtggtattgtaaactcggatgcctaatagcacacattcaaaagacattatccttacgagaaagggagagaaggggatggaataaagtgggagaaaatcagaaatttattatactttaaattttatttttccacatttacattcaaatatatttgaatccccaaatgcttcatgcgtaacatctgatgtcgtccccttctcaaggttgagttcattttttagttttacttgcaataaatttgtgagctacacgcgatcgtgatttatatagtgcctattgttatgtgttcatgcttaataacatttttgtcatctgatcatcattttaggtgcatactgcctataaac

SEQ ID NO: 30207 - DNA, 320 bp, Medicago truncatula
  Intron number 1 from transcript Medtr5g049250.1 (locus Med tr5g049250) derived from phytozome v7.0 (chr-ID MtChr5; po s 21034133 to 21034452 reverse strand)
aacgccttgaagaagtgagagagacactaaagaaggttgcaattatctcttctaaattggtgtttttcatgctaattatacatcatgttttcattattatttgttactttgattttttattctcctttatttaaatttggtggacttggattttcttaagtatatcccctcacttcagaggagctagatcaatgtttcaccatttgaatgtcttctttcatgatttagtgtgaacctagtttagtcatagaactttgttgtagctggttgttttttctgttaatcttgtactttaatgccaaattcaggacaaagaatta

SEQ ID NO: 30208 - DNA, 354 bp, Medicago truncatula
  Intron number 1 from transcript Medtr5g021790.1 (locus Med tr5g021790) derived from phytozome v7.0 (chr-ID MtChr5; po s 8392103 to 8392456 reverse strand)
tgtcacaccaaattagggttcccaacttcttcaaggtaattctttctttcactctccaatttttactaaccattcttcgttattttaatactaattgtaatcaacattatactgttcttttaatcaatcatttacatcagtttgtttggtaattggttttttcattcccaaatttcttcaattaaacttgtcatttttaatttgaagaaaaccaactttttgtcttctctctttcatcattctttagatattcaatgttcaatgtttgatttcttgatcaaattttaatcacttttttatgtgattgaatttaacttaatttgtttatttttctttttacaactgattgtagtc

SEQ ID NO: 30209 - DNA, 545 bp, Medicago truncatula
  Intron number 1 from transcript Medtr5g040750.1 (locus Med tr5g040750) derived from phytozome v7.0 (chr-ID MtChr5; po s 17414370 to 17414914 reverse strand)
ttttgaagcagtcctccattgcaaaagatcaataagtatatatatacatgcatatagccatgctatttttatttgatttatattttaatgtttttgtgtatgtatacttttgcttaattacttggaacgttgaattcattatttcttcatttcaggaaaatgatccttagctatagaggagaattgtatgagaaagtggtaggcatgcacgtagaaatgtattgtaccttattgagcattccaatttattttcttggtgtagtttctatatgtttagatattggtattctcttttgaatgttatatatatataaagacaattttcatctcctaccctttttatatatttatcataatgtcagtcaaattttaggtggaggttcttagctcatcaaggttttctcaagatcattaaggtttttggagacttctagacctttatgaaacttgatttgtttccaactctattatggatctgtgtgtgtgaatattctataaaaagtcattgacatttactaaattttgtgaccaatccaagagagaag

SEQ ID NO: 30210 - DNA, 770 bp, Medicago truncatula
  Intron number 3 from transcript Medtr5g025960.1 (locus Med tr5g025960) derived from phytozome v7.0 (chr-ID MtChr5; po s 10443753 to 10444522)
agagcttagtataatcagaaaggcctttcttgccggtgagataaactgatatttttatgtgtattcgaatcataactaaatcattatttggttatggagttatcatttgatttttattatcatattttgcatttaatattcctaaacttcaaaatacaatggtaataatggatttctttttgatttgaatttcaggtgctcaaacttgtaattagcaattcagcttgatgcgcagtttttacgaaacttataggtcaagcttgaagcacatgtgacaatgtttagtttacccatttggttagcagtatttgtgtattttcctccaacctaggcgttgctttaaataaataatgttgcactgcttttctaattcaataaactgagaattgatacttctcccatatttctcttcattcttctgtcatgtattttcattttcatactattataaatttatcgttgtagttaaaattgcacgttcaaagttgttccataaaaagctagtacaattgggacaaaaggaacagttggctatgctcttctagatacgtactaaagtcttgaatcttccattgtttcttttaataatcctatgtttggtgttgacttaaaattataccagcgacatagtattaacagcttttcctacatgttttagcgtatggagtcttggtttttagctatagtttctaaattaaacctggtattttatattttgattaaaattttgataataactataaggactttatgctctaatttttcagtgt

SEQ ID NO: 30211 - DNA, 225 bp, Medicago truncatula
  Intron number 1 from transcript Medtr7g080190.1 (locus Med tr7g080190) derived from phytozome v7.0 (chr-ID MtChr7; po s 16874185 to 16874409 reverse strand)
aaaataggtaaatagtttagaacatgaaagggtgtttgaaattatggatctctgcaaactttttctcatattttttaatggacataactgcagtagggtatcaataaacagtttatacaaactatgaaccatttatcttcttcattttctaggctattgatatggcttattggtttaaacttttgattttttttttttaatttataacagaggaggattcaggat

SEQ ID NO: 30212 - DNA, 616 bp, Medicago truncatula
  Intron number 2 from transcript Medtr5g010100.1 (locus Med tr5g010100) derived from phytozome v7.0 (chr-ID MtChr5; po s 2417085 to 2417700)
gggttgttggtaacaggttagttaatttgtactattttgaatcacactacctagctagctttttttggtggtgttcagggtcgaaccccggatcttgcatatattatgcactgttcttgccaactgagctaagctcacatgacactacctatcttcctccaccaatcaagcattttgatttattcccttgttgtgtaatatgaatttttggaaagtatgaaaccctttgaaatctggaataaattaaaaagcatgatatcaatattaggtaaagaaatggactagaaatatatttgtgaatactagctaggcctagctacatgatattattagctcaatattgtaaaattaaacataagaacagatattatttattaatgaagcaatctatagttttagggaagttaagatggcaattctgtcggttcaaatttattctcgtccgttttcagtgtttgtttagcatacatcctttttcacaaccaacaaaattctagtcaagtttttctctaaatgtatgcttataaatcacggttttatttttatttaagaatcttaattacaaagatatatatgatatatgcatattaattactttcatatatatacaatgcag

SEQ ID NO: 30213 - DNA, 628 bp, Medicago truncatula
  Intron number 1 from transcript Medtr5g090240.1 (locus Med tr5g090240) derived from phytozome v7.0 (chr-ID MtChr5; po s 35159078 to 35159705)
aggttatcttactcttattggaataaaatttaagtaaaagtggtagttgaaaaatcaatacatatggttaaaaatttagtccatatacatcaacttttcacttatcgtttttgtttatattttattctaaaaggaatacgaaagaagctggtgttgagcaatcgataaatcttataaaaataattcttttgaaagtggttattgggcaggtcatgggaccctcatgtactttttatgagtgaatagtgaaatcatctccatgtggtatttgttgaacttttggtggatacctctctcttctttgtttttgtgtggacatgtgtttatttttaagatgcatcattttctcttgtatttacctttttattttggaaaatgtgaacgaagattttaaagatataagttaagaaaatcaatatagtattgtacttttaaaagtataagttaagaaaatcgtgcttttagaaagtgtgtattaaactttctcaaaattttagattgcaaaaaaaataaaaaataaaataaataaagtttaaaaatggttagtttcaaaataaagtttctacatttaacattgtccatttgttttttagatttttgggaatctcttgtcttcttttggtttttc

SEQ ID NO: 30214 - DNA, 677 bp, Medicago truncatula
  Intron number 3 from transcript Medtr5g022420.1 (locus Med tr5g022420) derived from phytozome v7.0 (chr-ID MtChr5; po s 8745076 to 8745752 reverse strand)
cggacctttaccaggttattttataacttttttttttcttttctgtaataatttataataaagacattaacatgtcgattggagtcatgttatgtacaaaaatgtttcatggacgtcgagtttttcatacacttgaacgtctatagaatcacatgcgaaaatatgattagttttttttgtcaaaggtctgacatgtagttaaattaaccacaaatttgattatgaattgaattaatcctttattgatctgaattaaccatatttttgcacatgatcaacccaattgtcacacataaaaaaaaagggtgttacatgtatgtattatactccctccgtcccaaattgtatgacgttttgggcatttcacacacatattaagaaatataattaatattgtgtaggaaagagatattatgagttgttttacaaaattgtcctcaataaatgatattggaaagataaatgaaggaattgaaagaagagagcaataaatagttaataatataataggaaaaataatattaatttttcatcggtattgtaaagcgacatataatttgggatgaatattttttctaaagtgagatacaatttgggacggaggaagtattatgtaagaagaaatatttgtatgtatttcagctagctggggttgtggctgtagaggtcactggtgg

SEQ ID NO: 30215 - DNA, 545 bp, Medicago truncatula
  Intron number 1 from transcript Medtr4g097500.1 (locus Med tr4g097500) derived from phytozome v7.0 (chr-ID MtChr4; po s 20881131 to 20881675 reverse strand)
ggtgctggtgttgttgcttttggtgtcggaagaaggttttgagatttgatggtgaaatggtttagagtactttgaattttgtttatgtttttgaggagttttggattttgaaacttgttgttatgggatttatctagttcaatttgcttgcaaattattaaaaaaaaaaacccagatgagtttattgttgtatcaacaaagaagatgatgagaggaattagataaaatggcctatattttaaacttaaccctttgatttatttttaccacatatcatctatctatgcattggaaatgagtaaatggaagaatactaaatggagcaaagatgaactcggttaaacaagagttgatttaaaaatagaaaacccaatgtggtggtgatggaatttttatggaagacacataactttggcttaaactcatccgtcagatcaatcgcacgctccatatagtgccacgtgtccactggttccttattaatttctttggagaataaatcacaacgagtcccaaatcagcactcgccgtcgttctgcttccac

SEQ ID NO: 30216 - DNA, 761 bp, Medicago truncatula
  Intron number 7 from transcript Medtr5g035400.1 (locus Med tr5g035400) derived from phytozome v7.0 (chr-ID MtChr5; po s 14622813 to 14623573 reverse strand)
cctacattcaagaaactgacacggactttagacaggttagcttccgattcaatcacatcaaatggtatgcataaacgtgagagttgagacaaagcaaagacagttgttgaggtttgaattggcttaattttggttattcgagtattttgaatagtggtttatagcaccgaagtgtggctgagtggctatgcagcccatgccatgtaatgtactggttttgttgcaacttgacatgttcaagtcgaagatcaatagtagtttgttcttctaaatcactcaccatcctttctatacaaaacagtagacctatgttttttacgtcttcgatatgagtccaattgtttcctaagctcttagcactactcaggaacctaaaagcttagcactaatttaaatgaagaaatactagagggagagacatatcaatccaacatgaatattgcaagagaagaccaggattggcattaatgttactactgtcaacacaaatcattttttcttttgtctctgcatgaaaaagtctctataattgcttggtcaaggaaagaagggaaagccatactcgttatagttggttttaacaatagctaaaatcgataacatccttatctgaggcacaaactttagtagaattcttgcatcatgttttgtacattggatctgccgcaaccaagccatggatctgccgattatacaaattaaccttcacttatgtcattcaagcaggaagtaaagcagcatcaggaaggcacatctggagc

SEQ ID NO: 30217 - DNA, 877 bp, Medicago truncatula
  Intron number 1 from transcript Medtr7g035000.1 (locus Med tr7g035000) derived from phytozome v7.0 (chr-ID MtChr7; po s 8487686 to 8488562 reverse strand)
gctttggtgcttccattcctcactggcgcaggtatgtttgccactgtcaataactcatagttttttttctttctcaattctcatccactcatttttttgctaaaagatatcattatccttgtttatcactttatattcttttgtgtgactatagtgttatgttgctgtcacataaaaattatgaaaaataataatgtgcattttagtgcctaaatggtagttaattatactaggaaatgaattagtgcctaaatggtgcataatcactccatgcgttaaagtgcttaaagtggtttgaaaatttaggacccgtttactttttatttatcattttccaaaatttatatttattctaaattgctaagatgaacagctcatgcagtaaaaattgttttatgatagagaggctatgaaagacaaatttgaaagaatgcatttttagaaacaatgaaaacaatgctttgatattttcaaaatttctgaaaaatgctaaacttgtttcaaaaattgtaaaagtaaatctatattctcttatgtttttaagttgaagtgaaattaaaaaccgataaattcaaatcgaaagtgaaagtatatagatccaatattctcaacaaggttattattttaactacacggccttacatgattgagaagaaggtgtgtaaaaacatgtcctttcttctcaatcatgcatgtccatgtagttaaaacaatgttgatattcacaaccaatgcctctaaaatgtcacatttttttactctatgacatattaatcactgagttcaactatttttcttaagccaaattgggttgtaaaggcatcacaatttttatttttcaggaatatcaaaacactgtctgagaattatactgttt

SEQ ID NO: 30218 - DNA, 648 bp, Medicago truncatula
  Intron number 5 from transcript Medtr4g154500.2 (locus Med tr4g154500) derived from phytozome v7.0 (chr-ID MtChr4; po s 37945357 to 37946004)
tagaatccagagctgctttgcttgcagcaaaacaggtgccttactgcacaatttcatatgcttcttttgttgtcaatttaattcaaagggatgtattttagcggcatgaatgttgttctaaatatttccagatcgatagataaaactgattctttgaagactaaagatattatgttgtaaccaatattttagaacttcaacttcttatgtatcagttaaatagccaaatttaatgagtttaaatttagactctttgtcatcctagcacctcattgtaatatgtgggagtacggattcactcttagcatcaatttctttacatggtgtcgtggacaaaaggtttaaattattccatatgtaaatacatggttcagccaatttattatttctgaatctacttaatcttaatctttttactgctgtttggttctaatatgaaagaaaaacagggtatatttcaagataagaataatgatttttttggtagctataaacgcaaaaatagttgttttttttgtctgttactcatgtatgttgattttattttttcaaaagtaagttagtgttgattttatactatatttattattatctgatgtttgatctgttgtagggttttcttggtgctgcgtcaagatatctgggttt

SEQ ID NO: 30219 - DNA, 968 bp, Medicago truncatula
  Intron number 1 from transcript Medtr4g108070.1 (locus Med tr4g108070) derived from phytozome v7.0 (chr-ID MtChr4; po s 23799604 to 23800571 reverse strand)
ctaatcttgaagattttggaactttggtgctagaggtgtgttctctcttctaggcttgaatccttttagatttgaagtttagaattgatatgatgggtattgtattatgattgagaaattaggttttcatgaaaatttcaatttcaaggatgccaaagtgttggcttcgaagtggatgttgagtaggatgcacattcctgtttgtttattttttgaatttgaatacataggcaaatagttttattatatcaaacactttgccgacaggtaaatactatcgggtaccctcacactcaatagtatttacaacagctaaaacgaccaagatgattaacgtgtgttccacctttactctctgttcaagatttattattactgaattgtaattgttagagatcatgcggacaattagttagtgattatggactaactgaacaaggaatattatagttagttagtgactgatattatggttgtagttagggaacccactgagatgtagtctcatcccattccattttattttagtttcagatagacaggtgactgttgttgcagctcaaggttttattctttaaaaatgggttcaagactttctttctgtatatttttttgtatgtaatgaatgaattttgacttcttgtgtaccctgagaactgaatcttgcatttatgtaaggcaagaacttaatttaccctgtaatttgagttattttttaaagtatccaatatcagattttaatatccagtataatattctagagaattatatccgggtgttatagttatattcttatagaccacttctgttgtaggttgttcgtttgcaatacatgttagggctgattcttacaattttgtgtggctaactcggtcaggtttaagcctccgatcttttttaacctttttttttaatctatttagtgtttgctgcagagggttcaccatcggcaccccgttttcctaaag

SEQ ID NO: 30220 - DNA, 565 bp, Medicago truncatula
  Intron number 2 from transcript Medtr7g009600.1 (locus Med tr7g009600) derived from phytozome v7.0 (chr-ID MtChr7; po s 1788816 to 1789380)
attatccatcttcaagatcttttaggaaataggtaaaccttttcttcataatttgctactacaaaaatataaattagcaacaattttttttattttaaggcagcaacaaaactttaagaagtgataagtaaactatgtttctaattctgccatcttaattacaaagaaattagcatttgatttcattttttcagtttctaatttttgtaaaattaaatttatgacaaaagtttgaataatggatatgtgaaacaaacctgtttttaattcaataaaaaaaaatagttatgaaagaaaaagtgttggattttttttcctatttttaatttgtgtccctatttctatattttttgtatattagacttatcctaaaaggatttgctaataccctaaaaaattggattttctaatatgtttgttttagaatttaatttaactttcttgatagaaaataatataattaggtgcaaaaattagagacttacatttttttagtagttttttttttttgtagcttctttatgattcacatgtctaactggatatcacatttatgatgtaacag

SEQ ID NO: 30221 - DNA, 380 bp, Medicago truncatula
  Intron number 1 from transcript Medtr7g032330.1 (locus Med tr7g032330) derived from phytozome v7.0 (chr-ID MtChr7; po s 8012319 to 8012698 reverse strand)
gttctaccctcggcagttctgaacacgattcagtatgattctaacggctaaaatatattgttacttcgatttccaagtaaatattgtttgatatatattgagtaaatgagcatttcgattctcaaaattgtaacggtagaacagtctagtcctcgaatttacaaaatatgtgtttcttgctgcattaagacaaacatgtattttgatttttttctcttctgctaacatattaacagatgttcgatataacggactaaatatttacttcacatatttgagggtctaaatttccgttatactattaaatacatatgctgatttggctgagattttcatatatcatgttattaatgtattgttttttcagggtgaactatcac

SEQ ID NO: 30222 - DNA, 748 bp, Medicago truncatula
  Intron number 1 from transcript Medtr4g152030.1 (locus Med tr4g152030) derived from phytozome v7.0 (chr-ID MtChr4; po s 37576021 to 37576768)
atattgctttcctggtacgtagcttttcaaaagtttactagtgcttgtctacaggaatagaagccaagtggaaaatatgcaccgaccggcccatagaatagttcctggtgttcctaatccagcattgattggacatgatttgaaaatcataagatgagactcatcaatgtaagtatgtaacaaccatgtggcttttctagccttaattaacccagctttagacaacattgggtacaaactttgacaaacatttgaatcttttacaagatacaacaaggactcaaagtagttatgctggttctgcagctgcaaaaattagtgcaagaagactgaaaagttattgaaaaattgagaaataaagagagagtaaaatttaaaagagatcaggagaacggagagaaatgaggaccatggtcaagtcgtcatggatcacagagatttaattatccctgcaattgtagggtgttcatggtgtataaactgtattgaaccattcagttcagtttaaatccggttcgaaaccggcttaatatgtttgaaccgtattttatattaaagcaagctattttgagtttttttatttagagattttacatatcatattttttttgttgcatttttttttcttcagatttttaaattaatttttaattaaataatttaatatacaaataatttaaaagaataatataatatttataaaagagagggtggcaggtggtggtccacggcgaagctccggcaacca

SEQ ID NO: 30223 - DNA, 450 bp, Medicago truncatula
  Intron number 1 from transcript Medtr5g081050.1 (locus Med tr5g081050) derived from phytozome v7.0 (chr-ID MtChr5; po s 30407952 to 30408401)
tgaaattgtaaagttagtatgtgtgttgagaaatgatatttgtacgactattttgctaaaactttttgacaactttctctctcatacttacatgatgttattatcctctctcttcctttttctcttcattatttttgaccaatcaaaatagaggaaaacaaagttgtcattaaatggatgtacaaatatcattgctcatgtgagtttatggattttgatagtgaccttacatgggttattagggaaaaaagtagaaaatttaaaaagatgggtcttgttaacaagtgtcttttaaaagcattatttaaagaacccataaaaagaaatcatgtcttgaaaatataagtcaaacatcgttgaagttataattatacaactttcaatataagagttactacttctatgcttaaacaatacctttagagcaattcttaacattttcctaaaaag

SEQ ID NO: 30224 - DNA, 1070 bp, Medicago truncatula
  Intron number 2 from transcript Medtr4g047450.1 (locus Med tr4g047450) derived from phytozome v7.0 (chr-ID MtChr4; po s 11052866 to 11053935 reverse strand)
tggacctattacctgggaaccttgttaacacaaaggtaatttcttttttctttttaggtttaataacaattttcgccccctaactttcacgaagttgcgatttttaccctcagaaaaaaaaactacaaaatcgtcccctaagttttgcaactgtagtagttttggccccccaaagcaaaaaataaaataaaaaaataacacgtgacacctcacttagggggccacgtcagtgtagaccgagtcaaaattacatatgggggccaaaactgccacatgtgcaaaacttagagggcgattttgtagtttttttttaagggaccaaaatcgcaactttaaaaaaattagggggttaaaattactattaaaccttctttttaaacaatacaagaacttcgactatgttaaaaacttataacgtccaacattggaccaataaatcaaagtgtataatgtatgtaagcacagaaaagttgagtacaatggattctaattttttggactaaaaaatatatataaaagagtgttacagatttataaaattatctttattaactattaaaccttagattattgtaaatgtaaaataaacttgcgagtgatatccaaagtataaattttttaggtttaaatacagttttctccccttatatttcaaaatgttacgattttagacccctaataaaaaaattaaaattttgccctctatcttcagggaaatatgctcttttgaccctctaactttagggaaatatgctcttttagccctctatctttagggaaataagatcttttgtccccttatctttacaaaaagttgtgatttaggccccctgttttgggtcacgtggcgtcttctcagcagctttgtaaaattaaggggaaaaattgttttttttgttagaggaccagaattgcaactttttaaaagttaagggatcacaaatgcatttaatcctaaattttaactaagttgatgcaattccacttgtttgtaatgcatgtatgtttatccattaagttttgaagttttgatagttaaaagagatcctctcagtgaaatctgtgccgga

SEQ ID NO: 30225 - DNA, 667 bp, Medicago truncatula
  Intron number 1 from transcript Medtr4g047450.1 (locus Med tr4g047450) derived from phytozome v7.0 (chr-ID MtChr4; po s 11054038 to 11054704 reverse strand)
aagaagttgctatcaatagggtatgtatattttattttcttcaccttcttttatttatcattaacctttgcattcatacaaatgttgatgtttaaatagcttggttgcatgtttttttattttttaaaatatatgcattatttacattttgattttgtttttttttaaataaataaagttgtcacaaatttagtaacatgtttcttttaaataaataaatgttaatacgtattgtttttttttttttttaaatatacgcattattaactaaatattataaaatttatttaaaatttaacttaatttaaaaagtttatttaaatactagcattttgtgcaaattatttagcatccgtgtttaaatcttcagaaatttgctcatccaaaaaataaaaattcttcagaactttcaagttggaactctttggaaatttcaggttgaggtgctaattcaagatgaaagtctagttgctgcatatgaaatgttagatcagttctttgaatttatccttcaccaactctcatatatcagaaagcacaagtatgtattatttcttatctaccttcataaattaaaatgtaatcgtcacaccaaccttttctcataacaaaaaataataattttatgccagggactgcccaactgatataaacgaagcagtatcta

SEQ ID NO: 30226 - DNA, 818 bp, Medicago truncatula
  Intron number 2 from transcript Medtr5g032510.1 (locus Med tr5g032510) derived from phytozome v7.0 (chr-ID MtChr5; po s 13172519 to 13173336 reverse strand)
caaacaccaggtttgatatacatatgtatcatgattaatttcttttttgttatacaaatttaattatgaataatggatatttttgtgtttatatatatatttttgtgtttatgttaaagggatatatgaatatatcaaggtcatatacaaaatttactattgatatgtatcggtataaggcgcatgagttcaccaacacaagtgatagatgttttggtttcgtatttggtcaaagatttgatccttgatcggtgtttatagaaaacatatatcggaagatgtctaccttttaaatggatatcatgcttacactcttattaataaaaaaatttgtctaatgatgaacacctaatttaaattttttttctatttggctaattaattgatgtatgttaggttgatttttgtcaaggagattaatggttaacaccttttaaagtgaatatatgtagtgtcaagagtatattatccttatcagttgagttatgtttacggagtttaggtttaattttatttaacatacctcttgcaacaaatatgagtgacttaaagtacaaagacacgataacaggtcatgtgcatgacaatactatctaacatattcagatacggattttttaaccttgatgtatgtttagttatcaacttataatcactattgaagatggcaagtagggtgtgtcagtgttgaaaacttcaaagtactgagttagattcctaatgattaaaaaaaatcaacttaattataatcacttttctaggtttaggtatgcgattccattttgtctaataaatttttgccgtaaaaaaaaaggtaa

SEQ ID NO: 30227 - DNA, 618 bp, Medicago truncatula
  Intron number 1 from transcript Medtr5g012410.1 (locus Med tr5g012410) derived from phytozome v7.0 (chr-ID MtChr5; po s 3528318 to 3528935 reverse strand)
cctccttctttgactccctttttccacaaccatctgtatgcatgacgatacattccctttgttaccaatgctttattttcttttcttttattttatttgttacattatatgtatgggttttacttgaaatttctgtacagtctacattttttatcctcccaattttatatcgactggttaagaacatcatagtgatttgacatgtaatagttagtacttgttttgttaatttttagtcgtgtttgtgtttttgtcaaaaaaaaaaaaaaaaatagtaagttgtgtcgatgttcttttctgtctagctttggtatgctttaaggtctatatttaaaagtttggttgaacctatatcgatacttgttggttctttagtgattatgtttttgtacttttttttaagtatatttttactttttttatttgtgtatttgtaatctagttcaaccgtatatgaatgaattgaatcatagtcaataaatctttcaccgatttgatttctcaaaatgttttgcttataggcaacgctttgcttttatgagcacacattaatcaccgtaacctattgtttcttgtatgtaaggttgaggggaaaggatcaagaactgaagaagtagg

SEQ ID NO: 30228 - DNA, 913 bp, Medicago truncatula
  Intron number 1 from transcript Medtr6g092850.1 (locus Med tr6g092850) derived from phytozome v7.0 (chr-ID MtChr6; po s 19676494 to 19677406)
aattcgacaaccagtacgaggaggtcatagtagttagtactttttttttattgattatgttgattttttttttcttttctatattattatatacactttcctgggggaaattttgactcacttccagtgtgttatttgcaaaattgaatacaatttctccaacaaataactgtctgctgtttgtttaaatattattattcgtttgtagctaggtatgataatagatgagtttcctacatgagtgagttactgtatataacaacattatcaaccccctcaatcttaacttttttagtgtaccaaagcttaaatcatgaactatctaattctttttccttttcacccaaccatttagtttcttatatgcacaaaaataatcttccttctagtcatatatattgtccactattttcatagggaattccatgtccaaaaatcaatcctactttcacgaacccatgtctttacccacacccattcatgaagatgttcccgttcatttgacattgtacttaagctatacaacacattgtttccgggatacgacccaacattcacactattaagtaaagttttaccgttgttgttgttgacgcctaacacaaccctatcattccatctggaaatgggaccggctattcattgcaatgctataactaggtaggattggaaattaaacatcaaaaaataaggataatacataattatattgtattatatttatatgttggtctcaatatttgtttaaaaaaaatgggaaaataatatttctttatctcctcattttctatgatattatgggtccataataataatatagaaagaaaaaaaaacatgtttgtaaatcacctaacatcgtcgtttgttgtgatacaaaggacaaaaaaagaagaaggtagaagagaactgtcaa

SEQ ID NO: 30229 - DNA, 416 bp, Medicago truncatula
  Intron number 1 from transcript Medtr5g083280.1 (locus Med tr5g083280) derived from phytozome v7.0 (chr-ID MtChr5; po s 31580429 to 31580844 reverse strand)
aaagaaagtaagtttttcttcttttcattattcttcattttttgctatttggtttgtgtccaaccacatgtctcattcctaacatgacaagttttttttagacaattaggattgattatgaattcttcacttaatttttttttatctaaatctgtgtgtcattgtgaatttgatcaaactacgttttgaattcttattcttctgaatgattcgttcttcttatgtgatgtgaagtttattcaccacctgactatttaaaatttaaatactatatttaaaaaggtgaatgaaagagtcaaattctgaataattatttgaagcacccacttgggatgattgttagtataactaataaattaaattaaatgggaattatgttaacaggaagcttgaaagcaccaagagcaccacgagca

SEQ ID NO: 30230 - DNA, 837 bp, Medicago truncatula
  Intron number 3 from transcript Medtr4g079750.1 (locus Med tr4g079750) derived from phytozome v7.0 (chr-ID MtChr4; po s 16124674 to 16125510 reverse strand)
agtgtcttctgaaaggtttctttgtcaatctccacacaccagtttatttgggttcttgaggactaagtggaattttcaacaattgttttgatgatggccaaggcatgaggctagccctgtcaaatttatatatcagctagattatgtaaaatgtttcatttttaatttatgaacaatgtgattttttttcgttgatgtgtaaatttttttcgcatttcctccatttgatattaattatcactaaggtgttaagaaaattattaacgtgggataaagcttgattgttgttgtttgtcttttgttgtgaattagaacaaaagtcatagcaaggcaatgatgtatatggagtcaatatcaaagacaactaacaaaccaaacggtccaagtaatgaaactagtaacttgtgagtatagtaaaatcacaatcgaataaaggaacaaagataaattttgaatatgaatttgaagtagaaaaaccctccattttttgtgaaatcttacttccaacacacaatcaaagcatcaagggagttcaaacacatctacacatctcattgcgctgaatggaaagataatctgactccaaaaccttcctcatttgatttcttattgttattgtttcattcatataaaaaaaatatgtactggtattgctcgagttttagaggtcgaaccattcaaatacgatgctctaactctaggactcgaaccaggattttattgaaaccactttgttttcatgaattgtttactctatttcaattatggttgatgtaatgtacagccaaacataggacctaagttgtcgatcctaaatttgatttttgcgtacagttc

SEQ ID NO: 30231 - DNA, 987 bp, Medicago truncatula
  Intron number 1 from transcript Medtr6g089150.1 (locus Med tr6g089150) derived from phytozome v7.0 (chr-ID MtChr6; po s 18160435 to 18161421)
tctcccccagactaggtcagattggaccgaactgggtcaacaaattcctttgtgttcttcttcttcttttgttcttctcgcagttgttttctactttttggctcgtatttaattgttccatacgctttgttttggttgcttgattatcccttgctccacacatcaagttgttattggtgtgatttttcatcgaattcacaacagattcatgttgattgtatctttaaaaagagatttaaccctttctgtttacggtagatttgagttttgcagtaaatttagagagatagtctcttgtcgggaaatttaatatttctaggctccatttactttttgaaaacatttctgtttggtggtggctaatattaaagagttagacctgtttattaaatttagaattctaccaactgcacacgcatcataaaaattatcttctcaaggatacacatctttctggtaacaggatatgggtctgtttggaaaaaccactttgtttcaggtgatagcacaagcgcttatcatgataagcgcttatgtattagcttgcataagctattttagtaacaaaagataaaataacgtttcatttcctttttataaactatattggagaacttataaaaataagttgaaaacattctatgaaaatatgcataagctgttttcgtaagttctcccaaacagtctcataaaactgatgtgagtgaaaaagttctactaaggtattccaaacatgctataatgtttgtcttgggtgtcacaaaaataaagtggaagaaggttaaaattagagaagggatggttattgaaaagatcgttaatgcacaaaattttattggcttgcttacattagaggaagtatatttctttttgttgttcttagttaagcagacaaatttgaaatactgacttgtgcgaaagaattgagttcattactctaatttattttttttcttttcattattgataaggttactgatcttccac

SEQ ID NO: 30232 - DNA, 577 bp, Medicago truncatula
  Intron number 1 from transcript Medtr5g028920.1 (locus Med tr5g028920) derived from phytozome v7.0 (chr-ID MtChr5; po s 11972572 to 11973148)
agcatatacaaagtgtgaatgctgttttcaaacatatattatatagtcccaacatccatccaattagtattgttatattaaaattataatattattaatttattagtaaacatattggacaaatgaaaggaaacaatgctttatttacattgaaaaagacattgcaagtcacataaactcataagcagttatagatgaatttgagtctttgaaggatcgccgagttcgactttcgtaaatagctactatcaattttaatttcttccattgtcgatttttacgtgcaatcatttgttctgttgttgcttttttttttttttgtaaaatccgttgcttttgcatttttgatataatccctttttattgctttaagtaagtgtattttatgaaatacaatttatataagtaatatttatcgtgaattgtttttgtttatggttaaattcattgttattttttatttttttttaaattatttgtggtcacctcataaaaatattgctagcttcctcactgataaaaaaagagaatggacacatggtgtgaagttctaaaagtattcctgttactatcatag

SEQ ID NO: 30233 - DNA, 703 bp, Medicago truncatula
  Intron number 2 from transcript Medtr5g044880.1 (locus Med tr5g044880) derived from phytozome v7.0 (chr-ID MtChr5; po s 18674484 to 18675186 reverse strand)
tacaaagctggaattgttcctgtttcttacagaaggtaacatttttctgttttatatatcttcattttttattgcattttaagattaaatttgtataatgggttggaccttcatgtcactttcaacttgtaaatgggttttttttaattttatttttaatcacatgtatttggaagtttccttactttcttgttttatattagagtgtaatttcttttagttacaagattttaactttatcttgctagttaatagggttctttttggggttgataattttgtagttaaagtaatgacttttttctctctaaatgggttgatgaatgaaactacactattaattaacttttgaagattatttatatgtataatattaaattaaattttgttatatttgtttgatgaaattatctatctttttatatagtacccttcacttttaattgtaccatttcatctctctaataaataattttaaatgttttttttttcaaaataataattaatactagtactttgaactttgacatcaacaattaaaaaataaaatatttttttattaaaaaaaggacacttagctagaaaaggaagcaatgaataactatttgtaagcaatttatttgtgtttataaaaaaaaagtaatttattgttgtgtggatttgtgtagggtaccctgcagaagaaggggaggaattaggttca

SEQ ID NO: 30234 - DNA, 1019 bp, Medicago truncatula
  Intron number 2 from transcript Medtr5g045920.1 (locus Med tr5g045920) derived from phytozome v7.0 (chr-ID MtChr5; po s 19270922 to 19271940)
gagcaggttcctcgtttttcttttcaactttgagttaaagattattgtttgtttaatgcaaatattagaggaattaattatatctttgtttatattgttataccatgtataaagatgaataaatgttggcgatatcattagttatacgggagagtttatgaaaatatgttgaaaacagcttacggatatatcataagctacttttataaattcttccagatatttatttatataagtgttaatgtcataagataagttcaataagcacttccatatgccccggtaatccttcaacgataaccaatggcatccgttttatccttcaacttgaaggaccaatctgatgttgcatacacgatacatccgtagaggatcgaaatggtcatttaccctttattaaatgaaagtcacccaaatgggttatcgctaaccagtgtttgcaatcaatgaacttttatacaaaactatttaaacaaaaactgtatagatatgatattctcgattgctttggcggatgtaatcaacactagaattaaggcctgtttggattgaagtatttgaacttatctactagcataagcacttttttgactgcctggaatagcttatgaaaacaacgtatgacatgttcatgataaaaacagcttatagcttacgaaaacaatttgacttaattttatcttctgtcttagaaataacttataaataagcacttcatgataaatgtttatgctataagtgctccattaagtttttttatccaaacaaggccttagcaagtttttgtacttgaagtgcttcaccatttagattgctttgatggatggagttaacactagaattgccaagtttttgcacttgaagtgcttcacgatctggattgtgatttgtcaaccttggttcacattatatctgatttatcaactagatattaattcttaatgatgagcaatgagttcatattagtctacgtggtgctctcaggttcttttgggcatttccaagccagcaaatctggt

SEQ ID NO: 30235 - DNA, 480 bp, Medicago truncatula
  Intron number 2 from transcript Medtr6g093400.1 (locus Med tr6g093400) derived from phytozome v7.0 (chr-ID MtChr6; po s 20017274 to 20017753)
gtcaagatcaaactgctagaattcgggtattaacaatttctaatatcatcattttcttgattaaatttgtgttactaattgttaggtttgtattgtttagacatcggatgcgaccctgacactaacacgtcttgtttgaaaaaactatataaattgaatgtattaacatgtgtcaaacagtgacacatgttggacaactgagacgttattttattgtacagagtacaagaacctgacactgaaacgtcgacacggataattgttaaaaaaaatgatataattgaattttataagctatcctagagagtttgtataaataagctgaaaatagtttatggacatgtcgtaagctgtttttataagatctctcaaatagtctcacaagtgcttatatgagtagataagaaaaaatgagtcaattcaaacatgccgtaattgtttttgtttaattttttatctgtgtttgtcttcaggttgaac

SEQ ID NO: 30236 - DNA, 987 bp, Medicago truncatula
  Intron number 3 from transcript Medtr6g093400.1 (locus Med tr6g093400) derived from phytozome v7.0 (chr-ID MtChr6; po s 20017837 to 20018823)
attgaagcacagaagtaatttcaaactctcactatttgttttctttctttttttagcatattgtatgttacctacattacttgctacattcagtgtttttatgtctgagactgtattgcgatttgcggctgcatcatctgttttcaaaggaactgtgattgcgatttgaatccttaccttagtataatcatttattatttttggagatatatcatcttttttttgtctgtttatatgttgatctgtctggaagtttatattatgtagtttcagcaataccattgaatttacttgtatattagtattttgtttagtcttgtcagccaaatggttgatcactttaggatagtatatttataccctaaagagtgaaaagtaaatgtacaatttaggtggttcaagccaagggctcaatctgaaatgtagcgtcatatcacatggaattacttgaataaagaatccctgcgccaaaataacatctcactatctcacttgttcaaaaaaacatctcactatctcaatccttgtaattataatcccattggtcaatgtgtttatgtattttattccattgcataaagtgttatggaagagtattaaatggtttatgtacaggagcaaagcccccatatcaataaccatcctccactgttttcgtatcatgctaggggacaccttaactgttcattcataatgatttcaggcatgacctgccaattatttgaaactttgttgttaaaatcatgaatatttagaatgcctgaacttcacagttacagctttactgtatcttctactttgaccttacttgcgtgtcttaagggatgcatgcattagaatttgtcattctgaaatgattgatcttgcagtctataaggtttttcattatgattgtgcattatcactgtattgatctcattttcgtttctcttttacccttaaaaaatttcagaaattgccctatcgatttgaaggaagcaattgcta

SEQ ID NO: 30237 - DNA, 442 bp, Medicago truncatula
  Intron number 2 from transcript Medtr5g078940.1 (locus Med tr5g078940) derived from phytozome v7.0 (chr-ID MtChr5; po s 29269473 to 29269914)
gttgtaagtcctggaatggatatgcctttcctgttactgcaactagtactgattgtaactcttctattatctaatgaagatgtttgaatttcaaaaaaaaaaaaaaaaaaaaaaactatctgctgcttgttacatttacttataattcaatgttctacatttcacaataacaaagctcattaaattgcatgtaaggaaattgaaatatgagtggtaaatatttatatcaaaatattttatgaagagggaactcgatcaatgaataataacattcagactacaaatcttagctaagtagatttcttcatcttcaaggcagacgaaaaaaacttcattccatgtttgtcaactgtttgtttgggcagccagcagcaacatcacattgttttttttttcatgacccttgaaggaactgccgttaatgcagtaagtatcagcaaaa

SEQ ID NO: 30238 - DNA, 789 bp, Medicago truncatula
  Intron number 2 from transcript Medtr4g128550.3 (locus Med tr4g128550) derived from phytozome v7.0 (chr-ID MtChr4; po s 30298419 to 30299207 reverse strand)
ctcccttaatcttgtggtcaaggattcgatctcaggtaggggattatggaagaggatatagtgggaaaatagttctcattaccttgatcaatggttaatcatttgattcagcttatataatatttttagagatgatatttaacttccatacattttcgaatgcttttatttggggggaggtgggggttgttatagatggtttttttttttattcttattaaaagcagacagatccattcaaaggatttgtcaggttactggataaataaccccacataggccactcataattagtcctcggtcttcaagagatctccttaagaaggatgaaatgatgaatttcaagctgaagtactaagtactagccaagaagaaattcaaagactgtaattgtaacaactgaaccaacccatagtgaccctacatgcttttaatgcttcctcaatttgtagcagctgatgtctccaaaattatattgaacaaatttcaaacttgaaatatctaataatagttagtttgttcaattaaatcaatggattgtcatcaagactttgctctagtggttacttggtaattactgtgattcttgtgtatattacatgtgtataacgattatgtgtgtgcaactgtgggactactatgaacaacatatatccttaccgtttgatcgtttggctgtaaccgtttgattttttgcatcattcatgctactataatattttctatatcctgttttattcttatacatggtttttctttgtgcttgccatcagagtgaagaagggatag

SEQ ID NO: 30239 - DNA, 654 bp, Medicago truncatula
  Intron number 1 from transcript Medtr4g128550.3 (locus Med tr4g128550) derived from phytozome v7.0 (chr-ID MtChr4; po s 30299610 to 30300263 reverse strand)
ttttctgtaagttcttcacacttttccttttatttcacttttaacttctactttttttcctttctaatttttatagcagggtttgttactttgctcagttgtgatggaaaattgttaaaaagaaaaaatttatgatcaaaattattgttgttcttctaagtacacatgcaataaaattaatggttattaggtttatagttttatgattttcaaaaatcaaacccaaaattaaggcctttgattctcttttcataagtcattgtctttttccataaactaattaattattcttatgtctttatgcaatttgtcaattaagatatcctttattattcaactgaagtggttgggatgattttgtaagcaagttggattcattcatgcatggtgtatatgtgtgaattcatttgtgaatttgtgcatgtctttgtctaagactaaaaaaatcattggtgggaccacctaacattttttgaggttcttggctacatcatagaataaaaaaattgataattaaatagtagttttgatatggtggataatatcacaatctagagaggattctcgtacttgcaaatttttggattgttaaaaaattcttcaattaattataaaccgttgagtgtgtggatcattgttagtgtagagacagtg

SEQ ID NO: 30240 - DNA, 649 bp, Medicago truncatula
  Intron number 3 from transcript Medtr4g156540.1 (locus Med tr4g156540) derived from phytozome v7.0 (chr-ID MtChr4; po s 38808832 to 38809480)
gaagaagatgtaagttacttattctttaatgatattttttatcacaagttttgcattatgatcctgatatggattgcatatctgttatgttctatttagtgcacatttggattgacgttgagtttggcgaaatcttggtgtcaccttgattttaacagaagctacacttggagtttcaacaatattgcagtgccagcatgatttagtcaaactcacagtcaagctaaacatttaagtactcaatatgctctatttgttgtggcctgattcagaattgttatttcatcatatctatgttttatcattacataacttggtaaaggatttttagtttatgttgctaaaaaaaatgttctgttaatttcgaaagacagctttgtgttgtggctatgtttcttaagaatgaaatactaattggtttctacatttagtaacattacttttctttattgaatttaagttttcccatcttttttattttttttttaaaacaaagaggcctgaagcccggtcttcttttttctttcttcatgcgtctcaatggttcttactgcactttgactttaatgttaaatggttgtttaaagtttaatatgctttaaaatcttgtcaagctgacatactcaattgttacaggctgtcgggaaga

SEQ ID NO: 30241 - DNA, 911 bp, Medicago truncatula
  Intron number 1 from transcript Medtr5g012660.1 (locus Med tr5g012660) derived from phytozome v7.0 (chr-ID MtChr5; po s 3684253 to 3685163)
aacaaagtgtgggttagtcaaattggagatattttttggggttaattggtgagagaatatccgttttcactttattagtacaagtatttgactgttagtttgtgtttgtctttactttttgtttgagctgactttcaatacgaaagcacgttgtgttagaacttgaacgcgtgttttttgttcctgtcgaaaaacaaaaatatatagtacatttttaaattatttttttttcttttttttaaatttttattgattacttaatttgaccatttattatccattttatttgtcatttgtctaccaaatggcagaagctggaggccttgtatccctagtcttccacttgggaagttatcaccaagtcaagacaccaattagctagttgccaaagtacctgatcctttcaattcaatattactaggattttccaaaatttcaaacataccgacataacatattttattttatcatatggatattcataaaataggaaatgtgtcagtgtcttacttgtaatatagtcttcgaatcctattttattttttatgaatactttcatatactcctaatatttgttgatatatgggctagaatataagaacagtgttaaaaaaaaatatgattataatcatagcattcatatatatgttaattagaaatgataaaagtctcttttacaagtatttttcatctaaacatatttttctaaataactttttcctttccgacgacttatatttcattaatcaaaatatgttcaattttatgtggtatattatcagccaaatcttagaaactagacgaaaatgtgactgccttagcaaaattatttggacaacctcatttgctgtctccaaataaattcaacactaattgataattttgcttgtattatatcagggaagaggaag

SEQ ID NO: 30242 - DNA, 1032 bp, Medicago truncatula
  Intron number 2 from transcript Medtr5g091490.2 (locus Med tr5g091490) derived from phytozome v7.0 (chr-ID MtChr5; po s 35802075 to 35803106 reverse strand)
tcaggggatttttgaagtgggtgatctgtttggttgtatttatgattttcatgcataatggatttacttgtgataattttttgtatgatttacaatggaaaaaagtagcttgcatgtatgtttacaatgcattgttttagtttgttcttagttatgattgattggtgattttctctgcattggttgtggttttataatgttcgtctaaatggtattgcttttgatgttgaattttctttagcatcacaaactgacagtaagtcaatgatagaagtgaattttgttttaaatctactactatttctaaacttctaatttataaataaacatatctgcgacaataaggtttatgattcatcaattgacaatcgccaattgccatgatgttattcatcaatcatgatgtattgtaaacatccaaaatgcagcaactgattgatacataaatactatgcatcatcgacacttctgatcacattcaattataccattttttccaattattaccaatgttgcatccgtgcattgtaaacatcaagatgcagcaacttctgattacatttaattataccatatttccaattattaccagtgtcagtgatgtgttgtgtctgtgtcagttcttcatagcataaactagagaatgtgtagaattgttttcttaataacctctctggttgtttactacctattccctcatgagcctgcgaaactatttatgtaaagcaatgtgagaatttagtatttacattaggctgtagcaacatatgtcaaaggatgtttttggaactaatttttattctcgatataatgatttttatctttattttgcctgttatagatgtcaactgttttgtttatgcacagttcttttgattgttatttacatttagttgacgtttaaattacttggttgctgtgattgagcgccgagcagaatggcctcatatgtcttataggattcaaaattccgtgtcttgagcatagtgtgtaaaatgaatgatgtacataacatatggttatttctgcagg

SEQ ID NO: 30243 - DNA, 712 bp, Medicago truncatula
  Intron number 2 from transcript Medtr4g165590.1 (locus Med tr4g165590) derived from phytozome v7.0 (chr-ID MtChr4; po s 41733852 to 41734563 reverse strand)
ccgaagaaaccccccactgctttcttctacttcttgtaaaacttcttttattcctccttgttctttatttatgatgtttaattcttatttttaatgtgttagtataaactactctttgcattttccatttgttctaaatttttatggaatatattattaatttaataagagtttagctgcattaaggtttatttgtctgtatatatgaaaaagtagcaccacaattactggttcattactagaatgaacaagtatagttaatgttcttactgatctgtgtgtttcctttggagttatactaccgcttaagttgaaggggttctgttgtattttacggattttgacttggaggaatggtgcagagaaggtaatcatttgttgattaaaaattagcattatcccctcaagttcaagagttgagacaaccactcatcttcacacatgtttatcattagtcattttaaaacaattttcttctgatagtttcctttccttgtttctactttgtcttaatgtcctctgttcattcatactactatttacagtatatttggcattgtggtaattaatctagcacagtgactgtgtgtaacaaacaattgcttcttttttatatggaaaatattacaatgcttcaaaattactgtgtttactggacattctttttcattctgaagggaggattttcggaaagagtttaaagatcagaatc

SEQ ID NO: 30244 - DNA, 635 bp, Medicago truncatula
  Intron number 1 from transcript Medtr5g049820.1 (locus Med tr5g049820) derived from phytozome v7.0 (chr-ID MtChr5; po s 21418831 to 21419465)
ctccgcagaattcaggtatatcccccttaatataagaagattgtatgttgtggaaaaacccaaaataacctatcctctaatgatgccacatcctaaaatgaggggcaaaacatgtctatataatgcttttcataactaaatgaccaacctctaatattatgatgtcatgtaagtaccaagttatgttatattggttacattgcacttgaaattcattttcccagtttaaagctgactacatacaccaaatactgtacaatttctaaaaggtttcagttagcttttgtataacagttcacaaagtcagatacccaatcaatcaaaaagttttcactgttatcaatatctatcatcatacatatctctcaaaatacttttaacacttctacacagaaaaacacttgctatgctctaagcacccaacctatttttcacacttcagagtttcctggtaaccatttctcccattctcatttcatgaacttctttttttgttatggttccacagttttaaatcgaaaaactctgattggttttcgtattctaaaatattgttattcaaaagagaagctttattaaggcggcctcagtttgctattctaacatatttgtttgtctttattgtcagatcaatc

SEQ ID NO: 30245 - DNA, 699 bp, Medicago truncatula
  Intron number 1 from transcript Medtr5g072760.1 (locus Med tr5g072760) derived from phytozome v7.0 (chr-ID MtChr5; po s 25981110 to 25981808)
tggagccactcaaatcttcttcaaccatttatgtcagtttttgtttattcttatcttatcttaatttttgttactttatatgatattgcatgattttgtgctttctggttcaatttcttttatatgattatcctgtttcttttgttttgtataattgatatagcttttgatgtctgaaataagataagactaaatcttcaattttgtcttgtaatatagaaatatgacaagtaatccttaaattattccctcaattgctttaaaggactaatttgatgcattaaaaatggtttagggattactaattatatttctgcagtttaggaaccaaataagagtaagagtgatagtttaggaactaaattgacgatttattccatatgataccgagtttttgcttagtaatatcgacaacaccattgcaaactctagaatccttggtagttgtagcaatttgagttgttagtttccattattatttggtaataaactgtaaaatctttctttgattataatttcttctttttcgtatcagtttgtgatgtgtatgtctctgataatttcattcatataagctgctttataatttgagatgatatttgttttgttttttatggctgcaaaactgtgtagaaatgttatcatgcaaatttctatgttacagatccattgtcacttgtaagggatcatagagcaaag

SEQ ID NO: 30246 - DNA, 820 bp, Medicago truncatula
  Intron number 2 from transcript Medtr6g062820.1 (locus Med tr6g062820) derived from phytozome v7.0 (chr-ID MtChr6; po s 11720005 to 11720824 reverse strand)
aaagcttttactatctgatcaggacctacatactagtaagttggagcaaggcttatggtttataacaatagacaacttttgaaaaccagtccaggtaaattttcaattactttgatatagaattacatattgttgatgttgtgatcttggtattgttggttgcatttaatgtcttttaattcgaacagttacatgtatgttagaaagttaagataatcacataaaattagggattataaggctcatgcttccactgctggcactattaatagttgatatttttttggatattatggtgtagagcaaaaacactatacggtctgcttctaccttttgtataattgcaacaatgtaaaaaaaccctctaatttaagaagactaagtttttttcctctgtgagtgtctatgatttgttgtagctgacaggtggtttgcagaagtatagttccgaaataggaaattggtcttttactcttaattcttaagattcttttattggtggttgtaagactcatatctccactatagtatggagtgcaatatagttatgttgatggtatgagtgaaacttaataatgtgtgaaatggagaagttgtgatgcaatatcaattttgtgttagtgtgtgttggtgttagagtagagaaacctactagtttagtattctcatatgagaagaaggataacaaatgtctaaaatatatagtttagtatactctattgttgtgtctctttggaagggagtggctttgaaattactacctcagtgtttgacatatatagtttaattaattattgaacatatttcttttattttgtag

SEQ ID NO: 30247 - DNA, 729 bp, Medicago truncatula
  Intron number 1 from transcript Medtr4g118380.1 (locus Med tr4g118380) derived from phytozome v7.0 (chr-ID MtChr4; po s 27499959 to 27500687 reverse strand)
ggactctcgtaaatacatgtatgtaattatttttattctatctctcttattttacaaacttattgtagtgtatattgattgaattggattagttattagttaataaacacatttacttgtatgtaatagatctagtaaagatcttgtacaagattgtacggatctggaagaaaaaaaatgtcggaccaagattccccggcgtcattgaattaacacaattagtaactatgacggtctaattgagattagacagttcagatctcatgcttggtaatttatatttttaaacaaaattaaaatctgtttgagatctgaatcgtgtgatcacggttgaacagtcacacaaacactgactgtgtgcagactaataggaaatccaatttaaaaaatgacacacaacgtatatgtaaaatttggcacatttcattggcagacaaattaaggaatggaaatgaggctgtaataaatttggtttggtgtatgcaattataaccttaaattgcaatttcattacagtgctaacatttacattgtggtgaaattcaaaaagttgtcgtcgaaattactgttgcgatttctgagacttctaaatcagcaatattgcggctgaatttaaaaccatatatgtttctggaaggtattgctgcaactgtgtcagcttgaataagtattgtcttcctcttccattttttaggcttgaatcagaactcgtggaagacattgtccaag

SEQ ID NO: 30248 - DNA, 370 bp, Medicago truncatula
  Intron number 2 from transcript Medtr5g029140.1 (locus Med tr5g029140) derived from phytozome v7.0 (chr-ID MtChr5; po s 12107203 to 12107572)
ttaaaagcgaaaaggtatccgcagttctgtacacttcccattttttcgataattttgatacttttcattttttggcatttttcgtaaacacattattgcttaaatctgtccctttgtagtgtcagtaatccgtggatcatggggagaatgatcatacaaatgataatgataaagaggatactgatacacatgcggctggatgttgaaaaacaaactgaattaatttataggattatgtaaaatgaatacatcaagctcattatataaagcttagaagaaaattaacaaactaactaaaatcctaactaactaactaaattgtaacacaatttctgtatttctaatatgtagattgttgtcttgggaggca

SEQ ID NO: 30249 - DNA, 491 bp, Medicago truncatula
  Intron number 5 from transcript Medtr5g086710.1 (locus Med tr5g086710) derived from phytozome v7.0 (chr-ID MtChr5; po s 33347841 to 33348331)
tcaggtgaaggattaatctacttgtttctttatttttgaaatattgtttttttttttttcggccaggtagcctagtagctagaactcaccttataaggtgaataagtggggtgtctggggttcgaaccccggcccctgcatataataatgcattgtcctaccaactgagttatgctcacgggacttgaaatatcgtttatattacctcaaaatttgatatcacattaatttgtatgtagctaatttagttcctggttcatttttttttcttctaatatagcatataaaactctttagggaacacgatattaagaaaatcaaagtcccacattgaaaataaataaataattttttttataaaaagtggcacctctattctaaccaactgattttgtaaggattggatgaactaaattttaaaatcctaatacttgagcatattcaagtgtcataacccctcttgttttatgtttattaggaagattttattg

SEQ ID NO: 30250 - DNA, 961 bp, Medicago truncatula
  Intron number 3 from transcript Medtr5g045820.2 (locus Med tr5g045820) derived from phytozome v7.0 (chr-ID MtChr5; po s 19211051 to 19212011 reverse strand)
gttgctgctcttctcttggtaagaaattttttacacctatgcattccttatcatttacacattcaaccctagcaatatcattttataagctcaaccgtatacaaatcaaatcctactatctctagatcaccagcactgtgggtacctaatttctcaaaataccatcttcgcattcttttctagttacttttgtcctccatcacactgtaatttgaataggaaacaagatcttaagtaagtagtggttttatactttgaaaaacgtggcattgcgacaacatttatatgttgcagctatagtaatgtcaatttaactttcctcgtgttttggtttacttctcaatctattttaatttcttgagagccattattggttagtatttttcctttcaatttgttagtatatactgctgaggtggcatagtggagtttgttagaatgtattaccagagagaatattatttctgctacaaatgacaatacctctttgactgaggtgccccggctaacttaatacccctcaatacataagagagagagagatgatcaaacaaccttctatcgaacaacactaccgataccacctcagtagaatatactaataaacttcaaagttaaaatggtgaccaaaagaagttctcagcatatttaaatagtttgcgaaatgaacctaaacacgaggaaaggtaaaccaaacgatgtttgacgtttagcagagtataattaattttgtgtttgctctagtttccttgtccagtacttgaacatttctctttattgagtgtcaaacgtcgaaccttcctaagcccaacttactacttgttggaagcaacatgttaaaacctaaagaaacccccatagtaggcattttaaatttcctagtcaatttcatttgattaactattgacaggtatgtacatggtttgtgcacattggggttgagattgcagcttattcttca

SEQ ID NO: 30251 - DNA, 522 bp, Medicago truncatula
  Intron number 2 from transcript Medtr5g047520.1 (locus Med tr5g047520) derived from phytozome v7.0 (chr-ID MtChr5; po s 20069060 to 20069581 reverse strand)
tctcaggttacatttagcctttgccttttattgttagctttatgtttttcgaatcattattattcaattgattagcccatgatttaatttagctcatgtttccaataacaacttaattaaacacttaggatataagcacttatcatataatggattatgtataagttatttttataactaaagatgaaatgaagttatttttttttatttacttttatataagtatacattgttttccaaaaccatcttgaagagtttatagaaaaaagattaaaatactttgtaaatgtcataaattgttttaataagatttcagaagttcttataacactacataatcttaataaagataatccaagaaaatctttaggatagaatattactgcgtcgtagtttgatttatgtagttgtctccacctactaaaacaaggcttgattgttgtcatgtatttcaactaattagaagtgaattgtgtttgatttttaggggagttggctttgcttgcggagggtctcagtcct

SEQ ID NO: 30252 - DNA, 1002 bp, Medicago truncatula
  Intron number 3 from transcript Medtr5g080030.1 (locus Med tr5g080030) derived from phytozome v7.0 (chr-ID MtChr5; po s 29902064 to 29903065 reverse strand)
gctggaagcaacacaactctctaccttcgtgtgattcgcaactgatcttcttaacaatgtgcaacgtttggatgagttttagtggtggcgtggcagacttatgcttcatattttgtttgaatgcatcattttttttttctttttttcattaagaagggtgtgatgtttagaagtgaataatgctctatattagattcttttaaattttgcatttttagtattgcaagttctggtaggcaaaatagaaaatcagtcttatgtaattcaaaaggtgtgggttattccgataatgcaatggtgcttttttcttttttaatccctgtaatggcacaacttctttattgaataaacaaattaagatgcagtattcacctcctattgtgtacagacgaatacaatgctacacgcggcgttgttgttattaatatattgctttgtagcaacggcgttttcttgatagataaataataatgatggaatcggcaatgatattagtcaaatgcacctaataaaattgtaacaacctttataatcagatgatctcattatatttttagattgatgtgtttccttaaattgctaatccatcagcagtatgataattgggtaggtttattgcggtcagatgtgcgtttttagttatcaagatgctcagatatacaaaaaaaaacatcatttctgctgatgttacagataagatatatgattagtattaattgtcatatacttctctttgattgcattatggaagagattcatatagtgttttcccatgctttgtttcacgatctttttgattcaatgtttggacgtgtctgttcagcttcaaagtcatgtcattaattcagaattgttgttacccaaatcgcattaatgtctatttatgcggtaattcattggtttacatatcatttggaggctcatacttacacatctgttctctctgcaaaaaaacttattgttacggctaattagtagtcaaggtggatcaaacgaaacaga

SEQ ID NO: 30253 - DNA, 580 bp, Medicago truncatula
  Intron number 1 from transcript Medtr4g110760.2 (locus Med tr4g110760) derived from phytozome v7.0 (chr-ID MtChr4; po s 25196259 to 25196838)
tctttcttcttcgacaattctacgattcattcaaggtatctatctatctcttcctcatccattcacaatattttttcggttttattagtattcgggtttcaatttgtgtggttttgattcatagatcaattcgattctattattacatgagggtttcattattgtgaatttttgaataattttcactgtgctagatcgattaaattttcactgattcgtgatttgttatagaagatagaaagctgttccccaataaattgtaaatttttctatgttctgtgtacacgcgggtttcattattgtgaatttttgaacaattttcaatgtggttttgatttatggatcaattcaattttctctgattcgtgatttgctatagataggaagcttttccccaataaattgttaaattttctatattctgtgtaccaatttgcccctatttcaatcaattagggtttgcgtttcggatttgtggcctgccataggttttgtgatgtttttcgtcaaattagttgcttagtttcatattttctattgtatcgatttgtccctattttagttgagtagggtttgaaat

SEQ ID NO: 30254 - DNA, 1022 bp, Medicago truncatula
  Intron number 4 from transcript Medtr6g025240.1 (locus Med tr6g025240) derived from phytozome v7.0 (chr-ID MtChr6; po s 5585450 to 5586471)
ttcccaagggagaggttcacaagaaaaaagagattgttcattatacttagggtaatgcttgttttagcgagaaataacatcccgagtacatcccgagcaatgtattgtgttgtgttgttactgtagcgtctcacttttccatcaaaccacccatttttccagctaaattaaaatcatacggtgtgcatgcttcgtgaaattttcgcctggttatttctcgctagaaatagcagtgctctttttatgtatgattataaagattttctaatttagtaaattatatttgaattcttggtgagaaatcgtactatggatcgggtttcatttctaaatgtaattgttaatttcagtagtctcacttctattgtttgtatggagcttaactactccttagctctgaaaaaaataaaataaagcttaggatataatttcgagcactgctacatggcacaacaggtatcacgcacaaattgagcaactacattttcattccctatttatttacaagttctttacaattaaaaataagttacaagtaaaaataaacaaaaaggaaactccacatcatatagaaaaccctgttaacgataactctttttgacctcctaccaccaacatctggaaactaagccataaccacttatcatcaccataataactcattctgccaatgatgtcttcatcttcgccatgatgttgtggttgctgaagttatcttcatcatcaccgtcgtcgacgttgtcattgtcgccgcaaccgtataactatcattggtttttcccaccatgtcgtagttactgtcgtgtcgaccatcgccgtcgatgttgtcaccgtcacaattatctttgttgtttcagttgttaccatcatagtcaactctcactgcccagtggaggtaagggatgaagctgctgccgcatataagaaagaataaatggtccagactatgcaaaaatattttctagacacttgctatatactgggttgttactgtgattttgattattttttgtgctcaaagg

SEQ ID NO: 30255 - DNA, 316 bp, Medicago truncatula
  Intron number 1 from transcript Medtr5g029360.1 (locus Med tr5g029360) derived from phytozome v7.0 (chr-ID MtChr5; po s 12211957 to 12212272)
aaagtatgcttcatcttcaatttccactttcttaagaatatatttctttttggttaattttccttaatctccttttttattctagcttaattacacccttgttttaattttctttaacatgaaaattcaacaagacaattattagaagaaaaaagggtgtaaaacttgaaagagaatttccctttttatttatttattaatttttaatttgattatgatataaatttgatcttttactcaactaattgttattattttttactatggtgtttgaatgtttgttataggagctactccaaaatcagttcttgaacta

SEQ ID NO: 30256 - DNA, 1052 bp, Medicago truncatula
  Intron number 2 from transcript Medtr4g155800.1 (locus Med tr4g155800) derived from phytozome v7.0 (chr-ID MtChr4; po s 38508626 to 38509677)
agcagcaatttgaaagccaagttgaggacaatctcgtagttatctcatttttttaaaaacatatatatttttaatgatgtcaatgtagttatctcagtcatgttgaaaagcttgtgcagtttctatatcacacacacacacacactgtcaaactaatttggattatatttttcacccttgaacgcttgaacattttaagaatctcttaaatgcaaaaaaactcttgcatttttatccattactaaggtttaatcctaaaaatatggtactggtaatgatagattagtatattaatgtactaactaatttttcaagtataatgctttagtttaagttttatattaactttgtaactgttactataatgctttcctctctcacattgattcagtgccagttgcacatcatcaccgcggatgcaatgttaatactagcggaaaagggctgagactatttgggttcgacatagaatgtgattcttcttctccagcatcaccacaagcgacaatatgcctaatcattcaacaacttctggggatcatcatcatcatcacagaggtggagctttgccgcactttgatttggatccttctaattcccaatattgccagcaccactgatccattcgatccatccatgaagatcatatcattttgttttgcagttagttagttagttagagttagtttggcttgggcaggctaagtatctctccttggctttgcagcatttttatttactttttttgtctctcattttcgctacaaattaaggcaagagcccttgaactttcttcttattatcttttcattggtagatatatacttatattatatatttagtatttgaaattcttcgtagtactgtacgtttttatctaaacttcgtagtacatagtaaaaaggtgcagaactaaacttcatgtgtcaaataatttactagctagtgtgctcatttttgtttttcccgttcttaatttgttcatttaagctttatccatccatttgaacaagtgagaaacttaacactctagtttatttgcgagaatcatc

SEQ ID NO: 30257 - DNA, 859 bp, Medicago truncatula
  Intron number 1 from transcript Medtr5g047140.1 (locus Med tr5g047140) derived from phytozome v7.0 (chr-ID MtChr5; po s 19892416 to 19893274)
tggtggtcgaggtttgaacccccggccttgcatatattatgcattgtacaagtatagatttctacaaatattatacttatatatatttgtacatttatattgtaacaaactatgcatatctttttcttattaaaaaaaactaaacatatttttttcaatgacaccaacaatgtaacaaatataatatcatataatagaaatttttatctttttaaatgacacaaaaaatatggtattgttataatgaaatttgttatagagtataattggaaaagaaaaaaccaactattttaatgttaataattatgttattatttgaaatagtcattgtatagataaatagtcataaatagtcttaaatcgaaataagagaggtctcctaaataaaattaggtggtaaatgacctttccaatacctctttgcggtgaatgttcgaataatatcaacatcatcaagtgacttttgttgtacgcgtgtaaaaaatatttgagtttgccctattttattttattttaagtgggttaataagttattgggttggacctagtataaagaaagtatcgattgagcccggacgagtgcttgggctagctgggtggtttgttcatgatcgtttgtgtgcctccattgaattctattactggctttgttttttttgcgcatcaacatttgtactgcattttttttccatgggcaatgttgtgaaacttcaataaaccaataattatacttagctggaactatcggggcctgggaaactgagtgttattctgtctttacagaatctagttcgggttcataaaatcgaagagagtctgagaatattgtaagaatgttagcaccacaatctactcttcc

SEQ ID NO: 30258 - DNA, 716 bp, Medicago truncatula
  Intron number 3 from transcript Medtr4g101490.1 (locus Med tr4g101490) derived from phytozome v7.0 (chr-ID MtChr4; po s 22085880 to 22086595)
aagtacattattctgtgatctagcaatctataggttttggcactcaagtctattgttctgattatatcaaagttcaagttcgtcaaattgattatgtattcacacgaacccacttttgatcttgctaccacacaatgtttaccttttcgaagagacaaagtttcttccaacaagttgcatccttgtctactgaaaggctttttgaacggtacttgttgaaagtcccacatcagagatgatagagcctgacacaagtttataaattggagacattcgtcatgttacaagatggttttgtagggttgagtttggccaaacacaaattataggatggtttatgtgcctatccaaaatccgtcgggacacccattataagaccgctcgagtcctaggcgtggagagttctgtcgagagtccctgtacatatgtgatttggcgtgaaaaagtatgtacgagtgagaggcatctttcatcttacaagccggttttgtagggttgagttagacccaatataaatttctaagagtacccatttttattttgctcacctttcataatgttagattgcattaaagcttgatgttaaattttctgattttgcacaatttgtgtttgtttaagcttgatatacatcaacataatattgttatgttatgtttttgaaaattagttatacaatgccatgttgttttttttgcaggctatatctgtattgc

SEQ ID NO: 30259 - DNA, 902 bp, Medicago truncatula
  Intron number 1 from transcript Medtr4g135180.1 (locus Med tr4g135180) derived from phytozome v7.0 (chr-ID MtChr4; po s 32759185 to 32760086)
gtgtaggtcttaaggttcaaagagcacatacaaaggtacttacaaatcatccatcaaagaggttattgtacgggcagtggatttaaactcatgatcttaaggatgagtcaactccttaccaaccgagtgaaccttaattggcaatgattttcattatattaaacaaacataaaacaaccgccgcttcttttaaaaatctctaaaatttattctttaaactattgaatatcaaaatcacttttttaaataattcgtaacaaataagaccttggagcaatttcagaagagattttgaagattgctttttcaccaaaaacctcaacacatatggaacttatatgttgataaacgtctcattttttatcaaatatgtgactctttctcatacttgatatatcaacaattttttatacgtctcacgtgggggtccattcaaccatctaggtatactctatctcaaacgaaagttttttcatcaacatacacatgcaatgatgttggcatacaacatcaacaaaacatgttgcctgaccacaattgttataacaacatccgatacaagaatttgtcgtattttgtcaaacatctttgataacaatgtttggacatgagaaaacctaaaacatacattgaaagattatcacactcgactaagaacaatcacacaaatgaatttgaacatcacatcttcatccaaaattttaagacatttgatatataaattattttttttatatattactcaacacccatttttttaatcctatataagtttttgcttgcatttaacataccatcgatcgataatactatgaaagagtggccttttttaaataaataaaaccattaagtagattgtattgatagctgcattggcccttgaggtactcaggcacaggtgt

SEQ ID NO: 30260 - DNA, 488 bp, Medicago truncatula
  Intron number 2 from transcript Medtr6g077990.1 (locus Med tr6g077990) derived from phytozome v7.0 (chr-ID MtChr6; po s 15742510 to 15742997 reverse strand)
agaggaatcaggtaagaaattcatttctaaagtgtctttgcatatgaaatgcatcagcgaacaatcttaaaattttcaatatcttttcatttgcatcgtctttaaaaattaaaacatgagatagctttctaaaattgactattttcgttcgcttgtattttccatgtttggataaacaaattaattaagcttatatcatagacacttatcatgtaagtgcttttatatgttattttctataataatagataaaataaagtcaaattcttttcatataagctgtaagctgatatcatttgcaaatctagagaatttatggaaattacttgaaaatagcttatgaacatgtcataagttgtttccataaattctcagtctcacaagacacttatcattgtatgttcaattatcataggaaaattattcagtgaggtattgtgtattgatatgcaggaaagcagcagactagaatacctgattccaaagaa

SEQ ID NO: 30261 - DNA, 1037 bp, Medicago truncatula
  Intron number 2 from transcript Medtr5g085380.1 (locus Med tr5g085380) derived from phytozome v7.0 (chr-ID MtChr5; po s 32614409 to 32615445)
caagttttggaataagagaatcgcctctcagaagggttgagtcagtttgagttagtttatgactattttcttaggatctgcattaataatgttttcatatttttagtgttttgattttatgcttttttggattaccagcttaaaaaataagtggaatgaatatccacattgtgaatataaaattatgctactcaacatttggtaaattagagctttcactgtttcacatctcaaatatctaatcgttttgtctttttgttttcaatattctttattcacaatgatggcaaggattcttgcttggtgtttactatacttgagtattaatgtagtcactcttattttacactttacttgatacccgtgcaattaccctccaaaattatacaaattaaatacagagacttcgtgaggaaaaggaatcaatcaagattgaaatagaactattagaataagtggtttggtttaatacaactccataaaactaatttgtaaagtgagattgcacctatttataaacacatatttaagttatatctaatttaatgtgaaattttttaatactctttcacgtccatcattattgagtttagtgtgtagatataaatagttggtagtccgataacgaaatcctaataggaagtgatcctacgagaatcttctgaagactatgatactattgtaggatttttttatattggcctaattcatctcaatgtacactattatcaagagtcatattttctaagtgggacttcagattttctcataacacccctttgcgttcaacattattggccttggtgcgtggatataaatgattgatgatgataatagaaacctgataacaaataacccaactgatattggaggatgctttgatatcatattagaatatgtggttgggtttaacagaaggcccctaattaatcaattttatagggaaaaaaaatttgacacgtataaatttaagtgaattattatctttgcttttgtatgtagacaaagtgggaagcaccaaccgtcattttagtctt

SEQ ID NO: 30262 - DNA, 512 bp, Medicago truncatula
  Intron number 4 from transcript Medtr4g032300.1 (locus Med tr4g032300) derived from phytozome v7.0 (chr-ID MtChr4; po s 7688483 to 7688994)
gcgtgcctatcgtaggtatttattgtctacctccagtctgttcattcaattactgtgtaatatttttcccattaataattataagcacaagtcatttgatccaagaagaatgatgaagtgcttgcacttaactacttgtgaatttcctactcgtgttatttttgtggatataaagtatgattttgatacccgtttctattctaattgttctcttcattccaacgtattgatgttggatttgaaatggttgcttctatgatcgtgcaaattaactggtaaagaagctatacaaacatacatacatacatacatacatacatacatgccacttgtccacaaagtctaaaagacagactcaagaattgtccatcccatgttgactttgctgctgcaatgattgcaaattttgttgtattttaattttttttgaatttgaatttgagaaattttctgttgcctgctcttttgtttgaataggtctaagtggggaagaacttgaaaggttagctact

SEQ ID NO: 30263 - DNA, 799 bp, Medicago truncatula
  Intron number 4 from transcript Medtr7g076840.1 (locus Med tr7g076840) derived from phytozome v7.0 (chr-ID MtChr7; po s 15798609 to 15799407)
cggttacgcctgctgtgttttgcagggggctggtacgtgaacccctatcggtgttggcgattcgttcattcactattcaaaaaagatgtgtatgaatttattcagtcgtgtctctggttcgttaaaatgtttgcggacttttacacggtatttcttttgcaatttggtttcgttccccgcgttgggttcgctggattgtgctaatatgtatctgtttgtatgacctttttgtttcttaataccactttggttatattcattttttgggatgactttgtggttgctgagtcaagtttatgccccctcagctttttgtattttctctttatttgatatattttcctttgcttaaaaaaaaacttggtttcctgtcatgaacatttggtttaatacatgttcttcaatttatcaaatgaggtcataatgcttgtgggttcttttcttcgttatgtgttaacataatccaaatcatgcatcgtacttttaatcttctttagctaagattttttcaagaaaagttattagctaagatcattgtatggtccaaactccaaaaaaaatacaggttgtagtattttttgttttgttctcttaaaaactatgttgttagtatttgtgcaaaagaaaccaatcatcataagagttttcttaaagatcatgttagggaagaattgttattactcgaagcctgcttgacaagttggcgtaattctaatttatctgtttcttaacgagatctgatgtaagatccttattccttctaatttagtaccatatatgtttggttgcacttcagcga

SEQ ID NO: 30264 - DNA, 652 bp, Medicago truncatula
  Intron number 2 from transcript Medtr4g069550.1 (locus Med tr4g069550) derived from phytozome v7.0 (chr-ID MtChr4; po s 13304867 to 13305518)
ttaaaaaaatatttggcccgcaagccaggttggactaggtgtgtgtttattggtctctatgtttgacgcagcctttagttagtatttgtcttctctttgaaaatactgttaaatattgtatgaatttgtcatagtgggctttagtttaattttagatatgttcattaaaatttctgaagattcagatatgtatgtaagcaagctaaatatgtattaaaataaaaagatgtccaaacatacatgagcatttaaatatatatgtattgtttgtttttgtgttcctattttctatcgcaagtcacatgttttaagtaccttgggcccatcgtacaaattgatggggagatagtgggatatttttacttcacgattctagtgcgttggatgaaatggattgtaatttgtgaaatttaatattgaagctcaaaggaaagttaataggcttatcgagggagttctacattaaatggtctatatgtagttatggtttatgagagatctttatagtcgaaaaatacctttttgttcatatttttgttttctaagaatacaaaatcatacttcttctctagtgttattttattcttctagataatggtagtatattaatgtttgaactaaaagtttgtaaacttgaactttttgatataga

SEQ ID NO: 30265 - DNA, 268 bp, Medicago truncatula
  Intron number 3 from transcript Medtr4g134530.2 (locus Med tr4g134530) derived from phytozome v7.0 (chr-ID MtChr4; po s 32462615 to 32462882 reverse strand)
ggtggctatatctctgccacaattagaccatacttgtgagttgctatgatctcattattcatcaattatatgtcaattcttttttgtaaacaatgactttatgatgcactttcattttagagctttcttcagacattgttttggcttttgagtaggggctttagagtttccctttttcttcaaataaacacacacaaatgggaccttaatccattaaaaacaatatgttttattgatgttaacttaatttttttgtttttttcagttt

SEQ ID NO: 30266 - DNA, 691 bp, Medicago truncatula
  Intron number 1 from transcript Medtr6g015280.1 (locus Med tr6g015280) derived from phytozome v7.0 (chr-ID MtChr6; po s 3780367 to 3781057 reverse strand)
aacggaaatcaagaatcacaaaaccacccacccaagttttccatcaaataacaattttttttaaaaaaaaaataaaaaaaaaaaataactgtgaagtgagcgcttttgttgtagtcacgtgcattttgctctcaactatgagccctaactatcttccaaccagcgagtcctaaaatccatgttaagtggtaactacgtataagagccagcagaaactgggtcagagatttagttgtctggagaaacggtacggtggtagaacgagtgttgaacagagtctcctggaccactgtttatgtgccacgtgatgcatgcagatctcataatatgacagttggaagtgacaatgtattgtccttctataattcttttgttttcttcttaatttcaaataatccaatccgtatcagtttacgtgatagtgtaataattataattaataataatgatttcaatagtattttaatcattttaaaataattgtaaaaatgtactgtactatctcttccttcatagtttgacttacatatgttaaatcaatattgtgcaatatgatgtcaattaatatgaatgggtgacaactagggtactcatagaagaatggtgggtaatttactccaaccaatacacattagtcacataagcacatttttaagtggtattcttgaactatcttgaccccaccaacaaa

SEQ ID NO: 30267 - DNA, 623 bp, Medicago truncatula
  Intron number 1 from transcript Medtr5g048800.1 (locus Med tr5g048800) derived from phytozome v7.0 (chr-ID MtChr5; po s 20675313 to 20675935)
aaattatacagcgtttcttttgtgggaggtcaaatgtacgatatcaggactttatatatttttgagcatgaccaaatattagtagaactccatgattgggaaaggacacaacatctaattgtttacgattccaaaattgatactttcaatattcaagatattgaaaatgggagtttgttgaagaacccaaaagtctacattgagagtttaatatcaccttaagcatgagactcagctgcaacatagatatggttagtttctgtttgtgttatttattttgccacttatgtaaaagaattcggtggctgtatttgtgttttggtggcctcattatggttttaaataacatttggttggttttgaagcattttgattatgagacttgttgcagtttgctggtttctggttttattatattttggacttgtttatttgttgcaggtctactgattttctgggctgacttactggtattcttgattgttgttgttattgtcgttgttgttgtgagggaaaagctagcaaatacatgaagaatagcttgctatacaagaggattgtgaggtagacataaatgtagttggatattgatcttgattctcatgaggcagcaggctcctagc

SEQ ID NO: 30268 - DNA, 620 bp, Medicago truncatula
  Intron number 1 from transcript Medtr5g036460.1 (locus Med tr5g036460) derived from phytozome v7.0 (chr-ID MtChr5; po s 15186394 to 15187013)
tgtttcatactgtatcacaagtcctccaccttggcgtgagttcgaatccatttttacgttttcatgttaaaaatttgagcttttctgttttttatgtttattttaattttatgcgagtggttattaatttgtaacgtgataatgctttttctttatttatcaatttgatatttttttttttttggaagaactcattaagattatttttttcttcatgtgtctatgtaaagcatttttgctttgattttgagtttggttttttttttttttggttgtctacttgattgaaagttttgaactttatgatctatgaggaagattttcttgttttgctttttgttgcaagtaatgttaatcagattgggtttcagtgcagtcaaatgtcaatgtagtcaagcaggcatctgatcaagatcagacgatccaaattttagcctcagaattttatatcgaacaaaaataaaaaactgtctttagatccgaatcatttggtcttgatcggatggtttagaggtgttgactgaccactgactgcatttaatccaagttcatgttatacctgcgtgttcaatgttgattgttgagcttagaattatgattctaatgaagcggaggcaata

SEQ ID NO: 30269 - DNA, 654 bp, Medicago truncatula
  Intron number 1 from transcript Medtr5g014790.1 (locus Med tr5g014790) derived from phytozome v7.0 (chr-ID MtChr5; po s 4786314 to 4786967 reverse strand)
ggccgaagcttgacgggtcgggtcgatcgtttaagtggttaattcggtttagttgaaatggtttgggatggatatgagtggtcggttacgggttggaaaatacaacccaccggaaaccgtttccgaccgagtacagcccaatagatcactaatgtccagcccagtccagttaagcccacacatatatacttagtcttaacatgaaaccctagttgaagttcttttgtttgttgcattctactactgcggccgctgttcttctccatgcatcagaattattcttttcctccaaagttcaattcaaacatcatccaaaaaacccacaaatcacaaatcataaaatcgttcattttcttccattttccaaaaaaaaacttcaaaccaaaatcacaaatcaactatcttaattaagattttcaacctttctttcttttttgttacataaatccgaatctcaatccacttcctaatatctgttctatgtttgttcatatttttatactttttttttttaatttattttcaccttttaagataatagatttgttgttgttgttgttgttgtttgtaaccaaaaaagatttgttgtttctaatttaatcttttttgtacttgttgttttgtgttcactggcttttgaaaacgagggtagag

SEQ ID NO: 30270 - DNA, 521 bp, Medicago truncatula
  Intron number 2 from transcript Medtr6g081190.1 (locus Med tr6g081190) derived from phytozome v7.0 (chr-ID MtChr6; po s 16578114 to 16578634 reverse strand)
tgatgtaagtttatgataagtgatgataatgttgtattatctgactagcagctgataggaatctagtgagagaaattctgttaatggggattaatcctagagctaagtaattgtaaatataacatcgaggaggtaaaaatttctgcatgtttttgttgctaaaaagaatgctactgttgtaaataccttaggccaaaactgtcttccaacttcgtcttcttctttccgcaacgaaacgttacgatgaacatgctggattgttctcgaatctaaaaggtgcgaaaaaagtatcctccctaatcctcatgttatttaaattatccttacccaaacaacaagttttgtctataatgttagaattaatttgattttaatgagttttaatgggtggaacggtggattttgtgtctatattttaaagctgaaaaagttaaattttagcataaagtaatagagagtattgatttttgtatttagtcctttacttgtgtgataatatttacagctgcaggaaccaagcc

SEQ ID NO: 30271 - DNA, 491 bp, Medicago truncatula
  Intron number 1 from transcript Medtr6g081190.1 (locus Med tr6g081190) derived from phytozome v7.0 (chr-ID MtChr6; po s 16578730 to 16579220 reverse strand)
tgtattatctcgtccttgttgttagataagctaaggtaagccaatcgattctccaatttctcatttcttctctatttgaatttgattcaagtattttgttttaatgtgctccaagtgttcgacaaaatgcctgaatgattaaatttctgttactttaatggtgagaaaagaaaagactttgtatgtacgtgtgtttgtatttaattatttattgttctaagtttgtttcattttggagcaaaacaaaagattaagttttatgcacatcacttgtttgataatttgaatgaaaagagatgatatgaatcattaccaattactttgtttttaattgtaaatgtttctatttctataaattttgtgcatatcacttgcttgataatttgcatgaaaaaggatgcgatgaatcattaacaattactttggttttaactgttaatggttctatttctatgagttttgtttacgtgctagggttgtataagtgtttg

SEQ ID NO: 30272 - DNA, 962 bp, Medicago truncatula
  Intron number 2 from transcript Medtr4g104000.1 (locus Med tr4g104000) derived from phytozome v7.0 (chr-ID MtChr4; po s 22561780 to 22562741)
tttatctgctgtaagttcattattatatagaaaatgctggaagtcagaatatccccccccaactaaccatgattcaaaaacaaactagaagtagtaagggaatgcttgagtatagtttttaaaactttttgtttttaaaaaaaattataaaaaaaaaaaaaaaaaaaacttgttggtttgttgcaattgtttgtttttagaacaagaaatcaagaacagtctagagttgttttttgttttcttattactattcctgtgtattgttttattgttgttatccatttcccccacctgacatccttagctgtcgctctccgacactctccaccattgccaccaccgcccccaggcactcccctccattttcattacaattggtgccacccgcctccaccgctgctgtcaatgcagtcgctgtccatcacccttcaccattactgtcccatcattgttcgacactgccgtttcgtctccacctgtcaccctccactgttaaaatatgttctcaaaacaaatttatcaaagcttttatattttcttatctctgaaagtactttcaaactaatataccaaatagttcttttttagttttgttttgaaagagtttttgaatattgttttgcagaatagtttaagaaaaaaggggaatgctaacttgtgcccttagacaagcctaagtcatcaagttagcatgacaaaaaaaaaacacaattagacaggcctaagtcatcatcgagtctgtcttttatatcatcagttgacattcattatgtgaatgtcattttctgtttctttacctaacttcgataatagatttcggcactgtttcagtcatattacatatgttataatataggccacaagaaattgatttaattaccacttatacttgctttcttcagaaattagggtcccacttgaatatatggttttcaggaatttgccagaggtaagaagtgctc

SEQ ID NO: 30273 - DNA, 579 bp, Medicago truncatula
  Intron number 1 from transcript Medtr6g083860.1 (locus Med tr6g083860) derived from phytozome v7.0 (chr-ID MtChr6; po s 17206474 to 17207052 reverse strand)
attcagcaagtaagatatttctttcttataaattcattttttcttctttttggattgacttatatatttgagcttttgatttgcctgattggattgacttatttgagtttatcgattagtataagcactgtatgagagagcgtacacaaatagcttcgttgtgttatgtccaaaagctgtttttagcttatttttatacactctttagaatagtttttgaaaataacttataacttatatgataagtgtttatgttataagctcttaattatgttatttatccagataagccctatttaggagagttatggaaaaatattataacatgtccataagttgttttcatcttattcacacatgctcttcaagatagtttacgaaaacaacttttggttatatgaaaacaatttgactttacgataagcacttatgatgtaatcacctaattaaactgcttatccaaacaaggcctaaagaatgaaaaacattaggtttattatatattcaatgatgtgatgtctaataaacttattcagaatttctaaatgttttaaacttttttgatttttcttatagggt

SEQ ID NO: 30274 - DNA, 369 bp, Medicago truncatula
  Intron number 1 from transcript Medtr4g152290.1 (locus Med tr4g152290) derived from phytozome v7.0 (chr-ID MtChr4; po s 37712373 to 37712741 reverse strand)
acctcctccaccaatcacactgcctggttctgcaggtaacattttttcatttcatcttaatgttcattttcagtttcgtaattatatttcagtcaatttgattgtactattgctcaaaaatgatcattgtcttgttacaagtatgtctttttatttcactctaaatacaaatcattaaaatccaaaaaagaagagctgaagacattagtttgagtagttttatgtgcattcatatcaaatcaatatggttgtgattccttaaggacatatagattatcgtttacttttttcttattgatcaattattttcttgttgctttgcactgataagcagagagaccgccacacccatttttccaagggaactat

SEQ ID NO: 30275 - DNA, 729 bp, Medicago truncatula
  Intron number 1 from transcript Medtr6g044030.1 (locus Med tr6g044030) derived from phytozome v7.0 (chr-ID MtChr6; po s 9307467 to 9308195 reverse strand)
tagttttctcgtatcttatgcttcaatttcagatttcaatcttcgtttcctcttgtgaccaatgttaacttaaatttgtaaaatctaacataatcaggttgtcacatttatgtaacttttctaatgaaatcattgtttagagtatttctaaagttcatagcataaaatttctaaagttctatagcataaaataccatgcctttttgtacacattgattgttgttgtaagcataagttgctacttttatttgcatcagtacctttgttttcctggtgtaattgtaacaataattaatttaccgttattttgtttttatattgagatgctctcaattttgaatctgagtgttgattttgttgaactctgaaggcattatattcttaatctttatgcatacattgaactctgaaggcatcagttgcgataaatatggacttgattggtatcgatttgtatttcattcatgtatgattgcatctttgtattcgagaattatgaattttctcctcttagtcagcgaatccaattttctagcctaaaatcatgtagtttttcaaaggaaggaaattataaggagcctttagatagattttgtgctgttttcagcaatttattttctattcactcttcaaatatttatctgtttttatttttgttcttagtcctactattattttgcttaatttgataaaggatcagagggaaattctttgagtcaatcttctcct

SEQ ID NO: 30276 - DNA, 686 bp, Medicago truncatula
  Intron number 2 from transcript Medtr5g012810.1 (locus Med tr5g012810) derived from phytozome v7.0 (chr-ID MtChr5; po s 3756368 to 3757053)
ctcgtaagtttcttaatcaaattttaaattcgtcaattttaattatagttatgtgtattttcatagttggtttgttttgcttgattgtatttttaggttttggagtgcattacattgtactcttatattcatattgtaatgcttttttgttttagtcctgcaagttttttttttttttgtttggattcggtccttgcatattcgaaaaccgttgcttttagtctccagcgtgagcttattggggcacgcatgatgtcagagactacaagcaacatgttttgtaaatgtagggactaaacccaaacaaaaaaacttgcagggattaaaaccaaaaacacgaattgcagggattaaaatcatattgaaaccctatttctatcacattacttgtggaactactaaatcttctgattctaaatatgtatacattcagtatgagcaaaacgagtagtgtccttgaaagactgctgtatcgagtgaaacgggcattgtactcatattgaatgtttcatttgtggtgtgttgtgttagtggacttgtgaatagattgaagagctccattttgtattttggtttgttcatgaataaatgatcttcttaagaatgggttgagtcatacactaacttttccatttcttactttcttcttttcataatcggataatatagctgctgtgcgtgagcag

SEQ ID NO: 30277 - DNA, 479 bp, Medicago truncatula
  Intron number 1 from transcript Medtr4g132680.1 (locus Med tr4g132680) derived from phytozome v7.0 (chr-ID MtChr4; po s 31596871 to 31597349)
caacaccaccgtctttatccaccgcggatcgtgaggttagttctcttatctttttcaccatgctagggttttcagattcatttagctacaatctcactactgctctgttactttgattgcgttaccaaattctccatcactcaccttcgatttcctagtttaattttcatatttctttaccctttggtttcaattgcataatttgtgcttccaatttccctaattttactaacttttgctttttcgtttcgtaaataaattatttcattataaaaatttattcttgttcatttttccaatattttcatacctagcttcagtataaatattatcactgtagaaagtaccgttcgtcttcattgagttaattttgagctttgtaattgtaattaacttgttttttaagtgatttttgtttatctacttacttcatagcttgttgcttggtagaatgttggaaacactgacccttgtagttc

SEQ ID NO: 30278 - DNA, 518 bp, Medicago truncatula
  Intron number 1 from transcript Medtr5g082420.1 (locus Med tr5g082420) derived from phytozome v7.0 (chr-ID MtChr5; po s 31018210 to 31018727 reverse strand)
cttaactcttccaatgttagtttctttcattttcttcactttttttgtttgatgttttttttctgtttttttttgtttgtctgttttgagagtaaagttttgaactttatttgtttttttgacatgggttgtcttggttttttttgattataaacaagtgaagtttgaacatgtttttttgtttttgtttctgacagaaaacatgttttttgttgttgttaagattgttctttttctgtttggttttgttgaccatgattttttatgctaagaaaagtttgaacaaaggaaagtttagacttatttttcctttttttacaagagttgactaaataattaatttcatttttttgacatatgttaaatggttttgatgttgaagagcttttcatttatttttaatcaattgaaggttgaatatgaacatgctttagtttttttttttttggtttgtgatttttgtttttgtttgttttgatgcagattttgccatctcctacaactggtgcttttgctgc

SEQ ID NO: 30279 - DNA, 559 bp, Medicago truncatula
  Intron number 1 from transcript Medtr4g115660.1 (locus Med tr4g115660) derived from phytozome v7.0 (chr-ID MtChr4; po s 26829869 to 26830427)
gaacaggaacaacaagaagaggttgctagatgtttgatgttgttgtctagagtattttttttggtcataagggtcgttttgtttctgaatcttctgataataacaatgagattgttctagagacgaaatccaagattgttatcagaaatggtaacaaatttgtagctaatcatgctcgtgaatttgttgcggagaagaaaaagaagctgaaaatggttgggattggtgtttcgaataattcagatttgagggatttcagatatggttcaaagaaaatcaaatttgtagattcaagtgttccaaactatgaattcaagaggcctaaggtggaagcagataaatctggatttgatgattgtagaagcaaatacaataacaatgtaacaactatatttaagaaatcagggatgatgaataaggatttggatcatgatacaaagttcgattcgagaaagaaagcaaactctgaaggatttttcttttagcaacaaaaataaagaaatctatgagaatggtagcaaaagtttgaaatatgagttttttgattatgaaaaggaca

SEQ ID NO: 30280 - DNA, 559 bp, Medicago truncatula
  Intron number 1 from transcript Medtr5g028020.1 (locus Med tr5g028020) derived from phytozome v7.0 (chr-ID MtChr5; po s 11494645 to 11495203)
cttcaaattccatttatacaggtactactaactgcaaatactctttccagataaagtaatataaagtaatactttttaacagtcttcaaactctttctcaattatgctattatttgtaagtacttttattagcactctctgagctttgaggcttgccctggcctcggtgagtcccaggatccaaatcacctaaatctaagttacaaaaaaaaatcggaaaattttaattacactatatttcttgttactattagaagaaaaaatatttaaaagatggaagaaaaaatgtgtgatcggtgttctctacacacttatcacaccgtttcttgttacttgtgttgtgtgtgtagtgtctgacaccaactgactgacactgtgataatattcaatcacttctattttattaaatcattattggtcatacgtggcggtgttgtgttcggtgtatatgtattagcagtgtttcttactgaacaagggaaatgtatttgtttctttataacaaaactctcacttgtcagactaatacaaaccaaacatgatttctagcaggtaaaat

SEQ ID NO: 30281 - DNA, 929 bp, Medicago truncatula
  Intron number 2 from transcript Medtr6g017800.1 (locus Med tr6g017800) derived from phytozome v7.0 (chr-ID MtChr6; po s 4303864 to 4304792)
atccactggccgtgccctcctacaagacttaaaaggtaattaacaaatttgtgatgcatgtttctcttcatattttacttttagttttattctatataaattgttttttgttttaattctttctcaacatggatttactttcaattgaactgtggaaatcataatgtaacaaaagtacctttagtcttgttggttccattgatcttagggccggcatgaagataagactactaaaactcatgagttttaaaaaactcatgtgttgtcaaagtttttttaaagatattgaatgtttagttcattgttgctctcgcaactccacctgactcctcaacaattagtattagagttatggtacagttagttgaaggagtggaagtgagatcttagtgcggatcaagtctagttatgtaggtgactcacacttataagggagagagattgttgaaatttaaatgtgagtggttagttaaacatcgactaagaatgaaagaaatgtatgatatataaaagaagcgagttctatttcaaatgtctcaaggttttgtataaatatatggtgtcatagaatgcgagtgagatgcacctttgttgtaagacggtggagaacaaaaatcgcatgtgcaatttgaacccctcgcccgttggcttaaatctttttattttttttatatttattgttaccacttttttctgttttttttacaaagaaacctaaaataaaaataaaaatcaacacaacaatattgtgtcatgtttaatatttcaataataacaagaaaaataaaaaattaaacaaaaaatatttatttttattttttcaatgccgaaattcttttgtagttttccatttatgccaataattgaagaaaacaaacttttgaaattgtgcagcttgtaaagttgattttgagaaccagaactacaca

SEQ ID NO: 30282 - DNA, 499 bp, Medicago truncatula
  Intron number 1 from transcript Medtr5g082680.1 (locus Med tr5g082680) derived from phytozome v7.0 (chr-ID MtChr5; po s 31156004 to 31156502 reverse strand)
actgctttgttaacgtgagttaattgcataaattcgcgatacattttctagtatcattaaatagaatccatgtacattttttatagctaaaaatgttagtaagttgatgtttatgttaattttcggtgtttgaactttgtccttcacatttcttagttcatcaaccaaattacacgcgtgacacagacagattcattgttctcttgtttttgtgcatcacaattttgacaacgcatattattgaaaagaaagttgaattgtcgccggaaaaataaattaggtttctgatttttgcacttctagcccttacaagtggatttcatgtagtactcatgctaaatattgttcctttttattcaaaatttgtatttctatattaatttcaaacttattttgagttcaattatagttgaatcatattcatgtcacatttacatatgaataatttccattatagtataactaatacctgaactatatgaaactacatagggttgtg

SEQ ID NO: 30283 - DNA, 880 bp, Medicago truncatula
  Intron number 1 from transcript Medtr6g006450.1 (locus Med tr6g006450) derived from phytozome v7.0 (chr-ID MtChr6; po s 891612 to 892491)
aagaagctgtggaagattggagaaggagaacacaggtactgtttcaatttttcttttctttaatgcccttaggtcttgtttggataaacaatttatttaactgcttatcatataagggcttatctgttttcatataagctataagctgttttcatatgttatcctggagagcttatggaaataagctgaaaaacaacgtaaggacatgtcataagctgttttaagaagtcctcccaaacaatctcataagtagtaatgtctgtagataagcttaaataagtcaattcaaacagattcttaattgaccctcctcctagtggtagtttctgtaaaggtttacatttgaatatgtcctataaaattgtagtatatactcaattggtgaaatcatgcctttatgaactagtttgcagttgtggctttaagtagaaagttatgagtaggtaggtagtattgctgatgtaatttgttggtactaatgcagttttcaatgttaattattttgtatggtggaatcaagcttttattaagaatatcaattatgatcttgatgcttcttatggaatattaggttggaaactaggcttaatatctttattatcttacaatgcagaaaagttcaaaaatgattctaggaaactaattaagtgttgctttatgccgaagtaacttatgcgtaccatatttatgtgtctttttgttttcattttctgttgataatttgctttggatatgcttcaactttgtcctgttacgagtcacaattttcaatcgtatctttcaatctttagttctagacagttttctttttcattgataaatgccattttcgatcggttcttcaggatatagaggcgaacaacagaaaggttcaggtata

SEQ ID NO: 30284 - DNA, 243 bp, Medicago truncatula
  Intron number 1 from transcript Medtr5g075140.1 (locus Med tr5g075140) derived from phytozome v7.0 (chr-ID MtChr5; po s 27319696 to 27319938)
ccgtgaacagcagaacttgatcatagagaaagaaagttgttatttttgggtcattcacacatgacatatatgagaagaagatgaagatggagttttgtattttattatttctgggtttttttattttttagattaatgaattggaagtgtgaagagacattgatgaaaattttgatgttaagtttgttgttgttattgttgctgctgtttttagaatttattgttgtggaaattgagtttgag

SEQ ID NO: 30285 - DNA, 773 bp, Medicago truncatula
  Intron number 1 from transcript Medtr5g010200.1 (locus Med tr5g010200) derived from phytozome v7.0 (chr-ID MtChr5; po s 2454830 to 2455602)
cctggttggtggtggccaaaccaaacacagtacatagcttcttacatttgtgcctcgtgtcctgtatggccttatattgttgccacgccttctcttattgtcctgctttccaacatttccaactcattctcaatcctatcatcaaaccctttattcttactctttctcacttgcattatgtgaggaatcaacttgagaagattaagaaggatagtttatgtttatggtatatgtaataggaaaatatttgatgtttaatgcaccattagtccagggaaataatctcattggccacaaacctgtgatttccgccaaaatcaactgaaaattttctcaatttggtcatataagatggttggattagtatttgtcatcaataattaactacaatgaacagaatgcgggcggacatcaaactacgttgttaggtctttttgaataacaagtgagacatgtgattttcgcaaatcattttcctcacaacgtatatcaatatatatggtctattggttatagtattttcttttccatgtaattcaaaattatcattgttttagacgtttatgtagataatgtgacatatgacattgcatatatgttaggtcaagaccgatccaataatctttaaaaataagtaaattttaaaacatattcggatgtatgaaacttttttttgaatatgaggcatttttacttataacatttaatgaaaataaacttattgttggtactcggtagccgtaaagcaaggtctttagtgaccttaccttttg

SEQ ID NO: 30286 - DNA, 440 bp, Medicago truncatula
  Intron number 1 from transcript Medtr6g030880.1 (locus Med tr6g030880) derived from phytozome v7.0 (chr-ID MtChr6; po s 6906759 to 6907198 reverse strand)
atacacggaggcttgcaacagtggttagttactcaatcaaactatttcttctcatttctacttttcttttcaaaaaccttgaaggaccgatccatcactatctcattaaccataaagatgtcaaaaattcgtttttttcctttgtaactgcttttcatctcctctttgttttctctctgtttgcaaccattgttcagagacctaggaatggttccctgtttgaatgtcttgttctgtttgggcatcaactttaatatttcaaagatgattatacaaaatatgccataatattatgggtttctttcattgtcttaatcatcatcttcaaaaggaaggatttttgggatcagcttaaattccttttgaatgttactgggataagatgtctgttttgggggataatagctgtcatctgttactgttgtggtggttgttaccaa

SEQ ID NO: 30287 - DNA, 707 bp, Medicago truncatula
  Intron number 2 from transcript Medtr5g046940.1 (locus Med tr5g046940) derived from phytozome v7.0 (chr-ID MtChr5; po s 19781035 to 19781741)
tgtagctgtgagaaaaattgaatcaattatttcgaaaaataattatatgtcatttctaagtgcataatgtaacacctcaatattttatatacattgtgtgtgtgatatgtttcaaatgagaggagtgtcttatggtgaaagataatatgattaaataatgaccatatgattaaagtaacttttgaagggttaaggtaagaggaaattttatatttatcatttaaagattatgagtgatagagtggttctgagtcatatttgattatgaaatttcatgaaattgatgttatgttaagttgattttcgtgctaattgattatgttaattatgggtatgatgaactttgtgaatttaagttgtttatgtgcttaaactcatatttgatgatatagaataagttgttcttgagactttgacttaaatgtgtgaaaattatgatgttgttgttaaatgtttttgaattcatgatgaatgttcttcataaatgattgggtatgtgtgggtgatgtttgtatgaaaattactccctccatctcttaattattgacgttttagaaagaaaaaaaaaaaaaagcagcaaaattatagacgctttgtgatttctatgtggaattaaataacttgtttccaactttgccctttatgccttttacgcctcctctatcagtaattgcatgtttctttcttgaaaacagccatcttgagcc

SEQ ID NO: 30288 - DNA, 927 bp, Medicago truncatula
  Intron number 1 from transcript Medtr6g064950.1 (locus Med tr6g064950) derived from phytozome v7.0 (chr-ID MtChr6; po s 12029456 to 12030382)
aggtggcagccggagctccgttggtggtggttgttgtacttttttttccgttaaaataattataaaatggggcttttaaggcctttgatattaggcccacaaataagtagattttatagtgggcttggcccaaataaattttttcaattaaggggctttaatttagtgggcttggagggggcttttttaaaggggctttgatatttggggctctattgacaactctacctacgccattcaaataaatgacacggtggtcaccaaacgattactgggggtagaaacagttcacataattgccccctaaaaatgtctttttcaaaaatgtctggtggtcttcaaaacttaagtcatacttagttgactacatttaatgtagcctgtcgaaaatacaggctaacaaattgccccccaaaaatatctttttcatttgtatcttcagatagaaatagaaaaagacgtttttgaacttcgtccaacatggcttctcgtcgaaatggataacatcatcgtcgtcagcatctaaaggcagttgaaaaaacctctttatgatgtcatccaatcccacttagtgggccacgttccaattcttgggaaccaccactctattcattttttaataactgtcaatttaaacattgagacttgttggccatctaagactacaaaaagggggaaaccttttcctcttcacctttttagtttagtttatactttccattcttttattctcctccatcgcaaagtttcattgtgtttccatctggaaatttttccaaaacctcagccaataaaacccttttctccgaaaaaccttaaattatcaaccattaactttttaccgctatggcgagtgattttgatagtccttcgcaatctccaccgaacgaagactgcaaaaattttcatttccatatcaacctggaa

SEQ ID NO: 30289 - DNA, 694 bp, Medicago truncatula
  Intron number 1 from transcript Medtr6g022730.1 (locus Med tr6g022730) derived from phytozome v7.0 (chr-ID MtChr6; po s 5135166 to 5135859 reverse strand)
aaaattgtggataaattaaataaataaatccaattttgagaactttaatttattaaattaagaatattgggtttggagtttgctgcaaatttaagatcttggtttgtgatttgctagggataagggtttagaggagttcagaattggtattagttttaattatgagttttattccctttttgggtcaaaaactcattcttcccgcctgatgatgtttgattctatagttgctagatctctgtcacttattttacaatccatagaaaatttgtgtattatgaatttctgattcctctttattttgtggtccactctacgttcttaatatcttttgattgtttaatttttttgttgaattactttaactccttaaaggcagaatagattggcaagctctgtggttaagatagtgttgtggaatggaagaacttgttttagattataaaaaatattgttaactttttccttcaatccactagaatttgcgcaatttacatcttttagctgacgctttcatcacattggctcgcataacttgctgcacaaacattttgattagaaactattttaataatacattcagctacttctttttatacgtacttatcaaatttcaatgagtattatgtgtattgaggaatcatttcatattgatatcatttcattcacgttgcacagaagcagaaggttcaac

SEQ ID NO: 30290 - DNA, 939 bp, Medicago truncatula
  Intron number 2 from transcript Medtr6g071460.1 (locus Med tr6g071460) derived from phytozome v7.0 (chr-ID MtChr6; po s 13771287 to 13772225 reverse strand)
ggttttgggcttgggtttctgtttgtggttttctgcgtttttttttgctttttcttgctatttacaccttgcttctttgctaattgaacctctgcatgctcaatcttttctctaaaaattccaaaaaaattgttatatgtttcttaatacattttaacacttttgtgatatttttcagtggtttaaaaaatgataaaaaggtgtgtgttatttcttcttgattagttttgtgtttgatctaagtttgtgtatttttgtggtatattttctcataaaatgttggcatgtaatgtggatgattggtgtgtaacttcatggtgaatgtgttgctgatcatgtgtatatcttgctaattgtggatgtagattttcatgtctttcttgttttgcaagcaatgtgtgtttttatcaagaaataaagtgtaaaatatcttaaaaaaatgtgtcatgattcttggcttgaatatgtcctatttattcccatattatagctcaaaatcaaacccctttaacattgctataatgaggggattataggtcatgtgcatgtctaagtgtcataaccaattttaggtatattttgccattttatttcattactttttttttccttttttctctcttgctattttattcaattttgcttacctttctattatttttatgacttatcatactaaccatttcatctcacatttcattcatcccatagttttggcatcatttctctattcatttctatatcaattgggtttgtaataattttagatagattagttccttttaaattctttgcaagaccatagcatgtatctaggactcaatgtaaaggactatggacattataagggatgtacaccgacacaagcaccgacacgcacacacgttgcatgattaccgtttagacgtatgcttaggaaacacgattttttttagacaa

SEQ ID NO: 30291 - DNA, 951 bp, Medicago truncatula
  Intron number 1 from transcript Medtr4g095780.1 (locus Med tr4g095780) derived from phytozome v7.0 (chr-ID MtChr4; po s 19988252 to 19989202)
gtgagggtaaagaaggaaaaatgtgagttatataaatgtcagttaaatataatagaagaattgattctagcccaccgcagaagctgagatttgtagcttctcatagaattgattttggaagacaaaatcacttttagaaaagaaaaccaaacatgatggaaaataaagaaaccacggtgaaggtctccaaacggcgtttgaggctaaaaaaagccataccaaacaggcactacatgtcattaaatagtttgaaaattatgaacgttttttattttttatgaaatttttattaaaactaaaaatctaaatatttgttgctttcaagttataataaatcaaacaaaccatgattatctatttcaatggcactaacaatataacaaaaaaatataatatatttttttaatgacaccaataacaatctttattatagaaaagttgtttaagggtataattgggatattacatttttcaatatccctattttattggtgagagttcttccactgcaaacgtaaaactaagatttctctatgatcactttattgattgaatattttttctacgtttgagaaatcatagccatataatctcttttctcaaaccatgttcttctaccctttactctttcaacaatgttagatatttattttgaatttgaaaaattgtgagttacaaagatatatatattctttgtacgtcgggttatgatattctagggttttcaattggggaaattgaaacctaaaggaaagattgcagtcgttcgcctcctttagggaactggggggaggggggtggaagaattatatgttgagtgttttagatcaatgaagaccgaagagttttagggtgcctcgtgcaaagatagaggaacctcttgtattgatggggtcatcacatcggttgattaagcttcgttatcttagatagttgtaggtttgaatccca

SEQ ID NO: 30292 - DNA, 789 bp, Medicago truncatula
  Intron number 1 from transcript Medtr5g017830.1 (locus Med tr5g017830) derived from phytozome v7.0 (chr-ID MtChr5; po s 6455023 to 6455811 reverse strand)
aacaagttgctgttaaagtcattcccaaagctaaggttctcatgcaaatcaatcactatttcaatgtttctatgagattaagcgtgtttgtttttgacttatttaagcttatccaccgatacataaatttgtgatataccaaacaccgacatcgataataattttgaaaagaaaaataaaaatagcataatcacatgtgacattgttatgtttgacactgacatgtttgacacaacttttatcagacatgttctttgctacaaagcttgtgatacgtattgggagagtttatggaaacggcttatgacatatattcataagtcattttcagcatttttcctagaaacaacttatagtttgtttatataaaaacattttgaatttatttttatttttgttataaaaatatatgagcctgtctggatttgtttgtttgagttaattcactggcatgaacacttgtgagactatttgggagaatttatgaaaacagcttttgatgtgttaacaagctcttttcagcttattttcataagctctctaaggtagcttatcaaaacagcttatagcctatacagaataatttaactttattttatcttttgttatagaaattgtttatacataagcgcgtatcaagataaatgattatgctataagctgtaaattaagttgtttatccaaacagggtcatatcgtatacataagtacttatatgatacgcgcttatgcttaaactgttcatctaaatagggcaattgtgttttaacttttatcttttaattgtag

SEQ ID NO: 30293 - DNA, 670 bp, Medicago truncatula
  Intron number 2 from transcript Medtr4g132820.1 (locus Med tr4g132820) derived from phytozome v7.0 (chr-ID MtChr4; po s 31666675 to 31667344 reverse strand)
taacactacattggggatctcgaggttcaagacagcttggctcgaatataatcgcatattctttcattcttaatgctttgttatacggattagttaatagaatctgaagtgaaaattctaacaatttcttcttgtgatgtactccctccgtttttaaatataagcaaaattgactttttggttcattcaattaatgatgtatgtggtctataatatgaaccacatacatcattaattaaatgaacctaaaaagtcaattttgcttatattttgatacggagggagtaggagtaatagtgcggatattgggattaatgaaccattattgattctagatgtatgaaaatgttaactggtacctccgaggtactggttaaggaaaccaaatatagtataagtaccttggaacttgtgtagtcaaagtttcaaaagtgtaaagaaagatgttttcaatgcaaatattttctatttttgttttcttaactagtacccggtggcactggttaacaagaccctttgataaattcattgacacatattcactttctctcattaaccgcttcagctcgtttgttttccttttttcacatcacatatccatttaattgatttgacttttttttttttttttatagctttgttgggatcaagcaatagtgtttggtggaga

SEQ ID NO: 30294 - DNA, 729 bp, Medicago truncatula
  Intron number 2 from transcript Medtr4g080860.1 (locus Med tr4g080860) derived from phytozome v7.0 (chr-ID MtChr4; po s 16693197 to 16693925 reverse strand)
tttatacgcaagttactctgctacctcaggctgaggttggttttttcttttttatgttctttatgtttggtctgtgtttccaaacatgtttatttactattgataaatgaagagaaaccatattttgacacacaatttgacatcaaaattatttgattaactactttcagtagatggttaatgaatactccctgcagtcactgttataagcaaagaaaaaacaactttttaggttctttgaataattgatatatttgatctttaatataaaccagatacatcagttattcaatgaatctaaaatgtgattttttgcttataatagtgaccggagggagtataacagatatcacaactcattaaccatcccctcaacagtggttatgcagttcaaaatcctagttagttgtgttaagcggacggttaatgatttgtgatgtcttattacactaattaaccatcagttgaatgtagttaatcacatatttgaaagtgttaaccatctaagttgttgtcgaattttgatgtcaaatttgtaacgcaattcaaaagaatgtctcagtcaacatgtatcatgttcttttcgtttttcgactgaaatgttgagatgtgaaagttaatgaatggagtgatgaaggaagagttcaaatatacattatttgtgtttttacacttcccttttgagcaacttcaaatacttggattgttttcgctattcagttggcaggg

SEQ ID NO: 30295 - DNA, 980 bp, Medicago truncatula
  Intron number 3 from transcript Medtr4g079600.1 (locus Med tr4g079600) derived from phytozome v7.0 (chr-ID MtChr4; po s 16068879 to 16069858)
cgaggatatctggaatcagtcgcagacaactagaggtatttattttgtggtcttggcttaatgtttctccttggttattcttttttgcttccatttggtcattccagttttgtagttttataagcaagtcatagcaatctaatttgcttacgctaaatatatttgttattttccttttgatattgtgttatctatgttgtggaagtattttaagaaacaagtgtattggaaaaccaagtcccacatagattaaagatatggcctgactggagtttataaagaaaaagatccctcacctagccaaccggttttgtaaggttgagttaggctcaaccccatattctaagaaaatctatgaactatcttaatagtttaaagagttctaatttgtttgtttttcaatgacggacatctagcaagaactaggcaattctgaagaaagtataatatttcaactgcaactgttattataactgatgatagtaatgaatttttaattttgatagaaaaattcattcaaaacatagtggacaaaaggttagtagaacttccttcttttgcttctctatggcaaaacatgtgcttttttaattgtatagtctcgtagatggggctgttgtcattattttattagcaaatgttttggagatgctaaactggtggtaattattattttgcgttttaagctgttagtgtcattgtcaattcttgtgtgctgatgtaattgttagttcacaataaatacgatattttttgcctctacaaaaaaaggaaactcttgaggtctatgacttttacatgaattttagggtttgcctccatattttccttaagtttcatgggtttgtttttattggtctgattacaactccctcatgtatgctctttttattcaggtttttctagatatttgtctatcacgttatcgtataaaaaaaaattgaggctggaactccgattggcgcaattggagctcaaag

SEQ ID NO: 30296 - DNA, 942 bp, Medicago truncatula
  Intron number 1 from transcript Medtr4g025440.1 (locus Med tr4g025440) derived from phytozome v7.0 (chr-ID MtChr4; po s 6030523 to 6031464)
gtggaaaagaaagaaaaaacaaaaattaaagtaaattaaaagagaaattaaatttatatacaatgaaccaagttcacaatattttcaagtaacagacgttagaggtttgtctttactcaggctccaaactaaagttgacagtattttcaagtaacggacgtcagtgatttgcattatgtggttttcgttcaccataggtgcacatatttctttgaaatataacttaatattattttcactataaataaagaataatatagacacacaaacaatatgatctctgaaatataaaattttaaagagagtatatacactctcaagaatagagaagtggtagatagagaactaacttttcaattctttcaaattcgtaagtttttcttcttgtgctctcattttattttgatctgatttttttcatgtgtgtttttttttttcctacttggtaatccttttgtttcatttttttagtacaaataatcgtgtagcaataggagagtgagagtcatgcaaattctacttataagggaacctttctcaaaagttattttgttgctgatggatttttttttaaagattgttgatggaatggtgtagaccttaaatttggatatgctacattttgatttattttaatttataataaaagtaacctatgtgtatttgactttcaaaatgataagtttttaggacattaaatttttattttttattatcattttttataggatagtatcgtaaactggatactcacttccatgtttgtgatccttgtgtgaaatttgtgtatccataaagcattaatttatgattcaacatgaaatttcttcttcatttgaattaaaatttgtttattgattaaaattgtttattattttttgttgattgtactttacaatttgacatttgtatgcatgtttactcaggtttctgtgtgggctt

SEQ ID NO: 30297 - DNA, 835 bp, Medicago truncatula
  Intron number 2 from transcript Medtr5g075020.1 (locus Med tr5g075020) derived from phytozome v7.0 (chr-ID MtChr5; po s 27219559 to 27220393 reverse strand)
ctttgggaatttgctccaccttcaacgtaaaggtttaattcaatttgtttttccatttgcaacagcgggaatttgtgaaaaattggaatatataaagagttcaatttaattggtatgcaagtaaaatagtttcacacatgtattctataacatagatagttttaaaactaaaataggaaaatgacatggttttttttggtgttaactctctggttcccaataatccaaagttgatgaggcggtaagtaaagcctgaacaaaaattgtttatcccagagatcattgaatttgggttctcatgtaggaaaatgatatgatattgatatatgtaattggacgaatgtgctaaaactttcttacatttaccgtacatacaaattaattcatagttaaaataaaggaaaatggcaaaagcattttttttcccggctatctattttttaattttagttattcatttagaaataattcaagtttgtgaaaattagtttaactaacaatttatttgcagctcaagttttttcatatatttgtctttttatatacagtgtatttttgagtttattattttttctttctcagatgtttattacattgtaaatctgtcattctacattgaatttaactcagacagtacgagaattagtcatttagttgcgtggggggaggaacataagagttttgagcgataagagttgtgggttttgaatcccccaccttcacttttctaggcaagtgttcagtttcaagttaatggaataatggcaggtatatcgtacagtagttgcattgcaattgacttttcttcatctatggcagactaaggtcaggactc

SEQ ID NO: 30298 - DNA, 466 bp, Medicago truncatula
  Intron number 1 from transcript Medtr6g080940.2 (locus Med tr6g080940) derived from phytozome v7.0 (chr-ID MtChr6; po s 16359851 to 16360316 reverse strand)
tcgtcaagttgtggggtgtgtttctctctccttttcttgtgatttgctcttaaaaattggatttttaatgtttgataatgaatataatggaaaatttatgaattttttaaagttttatcaattggggtttcttaaaatttggaattgaatatgatgaacaatttttgataattttaaggttttttttttctttctcaattggggtttcttaaagtttggatttttaaggtttgaattgaagatgatgaacaatttttgaaaattttaaggttttttctcaagtgggtttttcctaaatgattttaaagtatacccttttattcattgttgaatcattgaaaggagaagtgaaaagtttttttttttttttttttttttgtgaatttaatttgaatttttttgttttgatgtatgtgggtttgatttgttaatctaactttgttttgtaatttttgtaattgaacag

SEQ ID NO: 30299 - DNA, 707 bp, Medicago truncatula
  Intron number 1 from transcript Medtr4g118270.1 (locus Med tr4g118270) derived from phytozome v7.0 (chr-ID MtChr4; po s 27445571 to 27446277)
gtgccgacgccgaacagaaacgcaagaagcttcaggtttcatttcttcttccattatttattattgttttttgcttattctcatgaaattaaatgcaaattacattcaattatcactctcttccattttctttttaatccatagccaatgaaaatgtttttacatcttcccatgaaacttattttaaagaaaaacacaaataactatatattaaattcttatattttagttttcttaataaatgtgatttgatttttttttttttcttacaatttgggagggaggtacagtttatcaactttaaagcttatacatataaagcacatatggacataatcttatatcataacataaatcacatatatcacaatttcataatatgatataaatcacatatatcatagtatcataacataccttattattgattgaattaaaaggaaacaacataatatcattacataggatatttttattaataaatcataattatagacttattgagtaattctaaggttactaatgacttggattacttaagcggcttccttgaaaccctaatattatcgttgctcaaattgcttgcttcttcctctcccatcaacatttaaagcttcatttgattccacattgaatagctctctcttcatgtcctccattgcatgtgttagacatagtttctatttgatgagtttgtacagaagtga

SEQ ID NO: 30300 - DNA, 1052 bp, Medicago truncatula
  Intron number 1 from transcript Medtr4g070140.1 (locus Med tr4g070140) derived from phytozome v7.0 (chr-ID MtChr4; po s 13558675 to 13559726)
ctttattttcctatcgattgctgtatccattacaggtattttgtttttcttcaccattttataatttattttagggttaattaagtttttggtccctataaatatttgcagttttgtttttaatctctataaaaataaatcatattttttagtccctacaaaattttctgttagtgtttttagtctctgttaaattaaaatttgtttaattatgcttaaaattctaaatttttgaaagattttttacatacatgttcataacattgtaagacactctttcataaaattttttagttttttaacatgtaatgaattaaatatgaatttttttaaaagccaaaatttcaagattatattaatgaaaatttggacctaataataaaattttaagttacttttttgcggaagaactttgcataatattctaagtaagtatgtgaaaaatatgttacaaatttaaaagtttaagcacaattaagaaaaatttaattttacaaggactaaaagtatgtgttggtccctatttaattgaaacttgtttaattatacttaaacttttatatttttaaatgatttttaacagacatgttaagaacattataataatctcttttataaaaaattagaattttttaacatgtaatgaattaaatataatttttttaaaacgccaaaatttcaagataaaactaacgaaaatttggacctaaaaataaaattttgagctaatttattgtggcggaacgttttataatgttttaaacaagtatgtaaaaaattattaaaaaatttaaaattttaagcataattaaacaaattttaatttaacagggactaaaaacactaacggaaaattttgtaaggactaaaaaatgtgatttatttctatagaaactaaaaacaaaactgcagatatttatagggaccaaaaacttaatttaccttttattttatacacaatatttaatttgtcaccttttaataacaccatttttttcttcttatttgacaatgcaggtgacatttcagggaatcttgcccgtgcttctcga

SEQ ID NO: 30301 - DNA, 393 bp, Medicago truncatula
  Intron number 1 from transcript Medtr7g075810.1 (locus Med tr7g075810) derived from phytozome v7.0 (chr-ID MtChr7; po s 15279782 to 15280174 reverse strand)
ctgtgcaaagacttggtggacaagagagtaagttccacacacataacatttatgtaaatttttcttataattagtagctaagaatgaacagattaatcggttcttgcatcggataccgagttttaaaaaaaaaaacatagctaagaattgaaaagtaacctagaatttataacatggtagtaaaccaaccacttgtgctataccatgatgatcaaacacagatatacttctttgaacttttctagatttcaatttttcctaggggatttcaatatcaagtttcaacaatatgattaatttgatttattttattttttttatattttaattttgtgtgtattgttaataactttcttgtgtgtaggagcaactccaaaattggttcttcaattg

SEQ ID NO: 30302 - DNA, 897 bp, Medicago truncatula
  Intron number 1 from transcript Medtr5g084410.1 (locus Med tr5g084410) derived from phytozome v7.0 (chr-ID MtChr5; po s 32128354 to 32129250 reverse strand)
ggttctgttgcctattccgatcttggtgctttcaggtatcaattaaatttaccaaattttgtacgtagttttaatcatgtttttagtttttttttttttccctctacttaaattggatccataaacataaggatattattcaattgttttgaccaaggttttggtttgtgaagaatgtttttttgttttgtttttgcattgtggacaaatgaaaactcacttggtcatttgatagaggaaatttagaggagggatatttttgtttatttgattaatctttgaaataaggtgcaaaatttctccaactcaatttaaccactctctaacattgagtgattgaggagatttgaaggatagattcgttttcaaagaaataatttgattggtgatttttgttgttgttgttgaatttgtttttttctttttgataggttgttgaatttgttaattgttgacattcaatttgattgactcttatatttattttcttaaattcttagataccttaaagcttcgtatcgtcaataccctctagataaaatttatatttattttaagagtttttatcatatgcaaatttgcacatgctaaaaaattttaaataaaaaatttatttttgaattttaaaacaaaatgaattattttaaatcaataggacacaagaagtgcaagacgaggattcaacggtagttacaaagagaaattacaaaccaatcaacagcaaaacatagagcaagtaaaacaatagttaggaaacaaaacaaaataactagttacttaggtagtatacttaaacattgaagaagattattccaccagacatgaaatatattccagttaatcatgaaccaatctcattttggtgtttggattttgcatattgtaggtatttggtgc

SEQ ID NO: 30303 - DNA, 194 bp, Medicago truncatula
  Intron number 1 from transcript Medtr5g021640.1 (locus Med tr5g021640) derived from phytozome v7.0 (chr-ID MtChr5; po s 8311794 to 8311987)
ggatcttcaaggtatatacacatacatgtacaaatacttttctcccactctttttcctaacaaaatattagggttttgaagatctaatatatataaccatataaagtaatatcaaagttgaaatgctatttagatctatgcttttgtttatgtctatagaagttatataattatgtgaatgaaatggcagagag

SEQ ID NO: 30304 - DNA, 576 bp, Medicago truncatula
  Intron number 1 from transcript Medtr4g157130.1 (locus Med tr4g157130) derived from phytozome v7.0 (chr-ID MtChr4; po s 39102234 to 39102809 reverse strand)
ttgcagctaagcgtggccatcttggtattctacttattcacttttctttttttcttttgtgttggttttttttaatactaagaacctttgtttggatatttctattattggatgaactttgttgattctattacccataatccggagataagtaaggtttggattaagattgtttcagggtttctattcgtccttaactctaaagttcattaatcattttagttcaatcacttacttggttactttaacttccaaatttcaaaaaacatcaagtttattttatatttaattattgaagtttgtaaaattctattgaaacttttgttctcttgcatggttttgcttcacatattttgaatttggaatacaaaagactttaattgaattattattttgttaaatttctgtgaagatctacttcctgtgatagaattgcataattgtaatggataaacactggtagcaaatgttacaatcttgattgtaatgaatatataattaagtttttcaatcatgatgttaacgtctaacttttttccagatattgtgagggagattttgagtgcctggcctgcg

SEQ ID NO: 30305 - DNA, 399 bp, Medicago truncatula
  Intron number 1 from transcript Medtr4g095870.1 (locus Med tr4g095870) derived from phytozome v7.0 (chr-ID MtChr4; po s 20045483 to 20045881)
gtcaagctactgatagtcatagcttagctgaaagagtgagtacacaattcttatctttcactatttttctcttaatttgtcattatttggttaacaaaatgtgattatcaatacactcataatatgtatgattataaaagttattccaacgatcatgattgattgatagtgtaaaaacattttacatataacaattttttaatatggtttaatgctaaaataaccgttaataggaggtagaatctgttttaacaatatagatagtttctacaatgaaatcaaatagacatttattttgtacaatagaatatgatttttcggtttactacttggagtttaaagtccaatgtttgtttgttctgttttgtgcaggttagaagggaaaaaataagcgaaagg

SEQ ID NO: 30306 - DNA, 747 bp, Medicago truncatula
  Intron number 1 from transcript Medtr4g096360.2 (locus Med tr4g096360) derived from phytozome v7.0 (chr-ID MtChr4; po s 20273448 to 20274194)
acgttttcacgccgcaacactcttctgatcttaaggtgaacgcttctcgctttcttaaagcttcaaactttgacctttttgctatctcttgtgctgatttcgagttatatcaatgttttcgttccaattttgttttttaggtttctattttcccaaatcaaacatttttcgttactgatttgatagaaggttattgtgagtgttttatagttaaggggttttgtaactgtaactgttaatattagtctccgatgatagaacaaaatgatataactttcgttcttctgagttgtttctatgcggaagaaaattattggagacctgaactgaggagactctttcaaatttttattttacgggaaatgaaaaaacactctgtgcttcagattgtgctgtgctgttttttttatcgtttctgttttatgggtgttggtaaagttcatgacttttggtgttcctgttttagagctgtttgtgtttttgtattagatttgtttgtcttttttatacgaggtgtgttatttgaacaatcattagtgtgacaacttttgggacaaccttaagtttagaaaccaaaacaatagagagagaaagtagaaacaaaatgtgtatcagaaagaaaattgtcacaaaatgttgtacaaatatcattttgttttttaataatatgatgtttattttttgtgactaatgttcatatgatgttttattgcgtttttttcaggtttatttatttaaggtgataaa

SEQ ID NO: 30307 - DNA, 1041 bp, Medicago truncatula
  Intron number 2 from transcript Medtr4g108610.1 (locus Med tr4g108610) derived from phytozome v7.0 (chr-ID MtChr4; po s 24096545 to 24097585)
tgtttgataaagcttccagttcgaattcttaggtttgttaacaaaattccttgttagaggataagtactattaatttgtagcataaatcctttttttttctttctttctatattattgtattccaatttggaattagttttgtgggaatttctcaattgaaacaaatagtatagtttagttgttatgtatagagaagttacatataaagagcttctcattgtagaattatttctattttattcattaaaaatatagttaacactagtgtaaaagctctttttggggtttttttttgttgttgataaaagttaattaattgcaatattcaattcctaactgtctattatttttggttcatttctatttatatctaaagaaaatagaaaatctgtttctagaacccaaattcctttaaactccaactaaactgataattaattttttttgatcaaaaactgataattaatagactagatgtaagtttttgtttgaacttcaataaattagtttttacgaatttgtactatcttaaaatatgaaaatatataagtatcttgaagcctgaactttttttgcaagacattctcttgcatttgattatgtccttgtatacagggtgtatgtatgtgtgtgacttaattatgacaacttttcttaaagaaatttgtatataccctatatacagggtgcatgtatgtgtcattttaataggatgcatgtatgtgtcattttcctctaaaaaaatgtatgtatcattttaaattccgcaattgagaggttgcttattatcttacataatgtagcacatttatttacctttgttttactggaaaatggtacaaacatgaggcccttttgttgagcttgggaggttaacttcgttggagtaagctgccaaagtccttttaattaggttttgaagtcagcatgtcaaagtcctctcattcaagttgaagaactaagttgggaccttcctttacttaggttctgaagttaatttttgaggcaccgaggtcaatctgttgagatatcaaagtcac

SEQ ID NO: 30308 - DNA, 620 bp, Medicago truncatula
  Intron number 2 from transcript Medtr5g085480.1 (locus Med tr5g085480) derived from phytozome v7.0 (chr-ID MtChr5; po s 32656118 to 32656737)
attcatgtatgttgtgaaagttggaaaatgattacaattattatacgagtaaatagtcaatttctctaaaattgtagattatccgtttgaaattaacaaaacttcaattatcccttaaaaattgcataatgttaatcaatttaccccctccatcaaatttttctgttaattatgatcaaataccccactgaaattttgcacttatgtgcaaaatgcccctaaacttgaaaatttttttttttttttatcctgactcaaaagatattaaaggcaaacaattaacaattattgatcatataaatctttatggaatgtatgtttatgcagctattggtcatataaatctttatggaaagtatgttactctcatgtgttttaaataaaaacatatatagaagacttttttttacacaagttgttggtaattatgttagagtatgcagtcataaagtacacaagtctttgataattgtgtgtccttaaagaaaattcataggttaatatctgcagaaggaagaagaaacaaggcttatgtttgtgaatttgcaacttaattaataatataatttttataatgcaggaaatgccatatctattagctacatcatgttaaatagatt

SEQ ID NO: 30309 - DNA, 374 bp, Medicago truncatula
  Intron number 2 from transcript Medtr5g026420.3 (locus Med tr5g026420) derived from phytozome v7.0 (chr-ID MtChr5; po s 10660192 to 10660565 reverse strand)
cactttactcaagagcgcggtatcaaaaggagccggttaggagtttttttccttacttttctgtgtgtctgatcatataagtgcttatgtataagctatttctatgacaagattaaatcaagttaaactatttttcgcataacctgtttttataagctatcctgaagagctgatggaaataatctgaaaacagcctatgaacttgtcgtaagctgtttccataaaatctcacaagtgcatatactagtagataagctaaaataaatcaatccaaacaggactttgattgtgctattcaactcatgtgtactatttttattgatgtttatgataattgagaaattgaaaatttaaattttgtgcagtttgtttgg

SEQ ID NO: 30310 - DNA, 612 bp, Medicago truncatula
  Intron number 1 from transcript Medtr5g026420.3 (locus Med tr5g026420) derived from phytozome v7.0 (chr-ID MtChr5; po s 10660658 to 10661269 reverse strand)
agtcatcacactcacctcaacaaacttcatttcaggtacactttctttgtggggttctaataaagtttcgatttttacctttaaaatcttcacattgttattgggtcttaattagatcaatcattcattttctccattgtttggtgatatttttacaagtaatattgatatgtgaaaatgcaagtttttggatttgattttttcatttttgaatgtggaaaatggaaatcaatgggtcatttgggttagcttgattggtttaaacaattttgttgtagtttatgtatttattgaatttggactgaattttgagttacccttttgatgaagcaattcattggtcctaagatcatgatgtaaagtttaaatattccatattacttttgaaaaaaataaagttttcatcaatattggttgattgataaggacatttaattctatatatattttttcatattctcttttcactttttatctgcttatctttcaatgcaagaatacaaaatggatagttttttccctccctattaaggctattcactagccttattccttgagttacaaagggagactcataggtttattgtttcatatttgtttgatttgtgcaga

SEQ ID NO: 30311 - DNA, 660 bp, Medicago truncatula
  Intron number 2 from transcript Medtr4g086760.1 (locus Med tr4g086760) derived from phytozome v7.0 (chr-ID MtChr4; po s 18077153 to 18077812)
catttatttaagtgcataaaggcattttgtgtgaggttaggtcgccaaagtaaaaattatttttctattatgtataagacttttattttctttgtcttgttatgtcttttactcttataatttgtctcaaagtttcacatgcatagaaatctctttgatagctatagaagcatgttaaatatatattttagaaggaatacaaatatatatttcttcatttaaaacacctagtaagaggtactaaaacaataataaaataaaatctaaaacattataatggagaatcggattatattacgaaaattttgttatctttgtttccttgtgaatgatatagatatggtaaggagaaatatgaccaaaggtgcttaatatataatctaagaaaattagaattgagtaattagtcttaagagaggagagtaaaatgtcgagttttacactttagtgtattatcttgaggatgtctttgtacaactaccctctaatcactcaatcgtattatctttgtgagagtgtggatgcccaatagttttagcttgactaaggtttcttgattatggaattcagctaagagtatgcttgctttagcacaagaattttatgaaaattgttgtttacaattcaaacagggctaaaacataccagaaaaagacgtaa

SEQ ID NO: 30312 - DNA, 905 bp, Medicago truncatula
  Intron number 2 from transcript Medtr4g033220.1 (locus Med tr4g033220) derived from phytozome v7.0 (chr-ID MtChr4; po s 8170871 to 8171775 reverse strand)
ctcatcaaaatatcctccgcccactccgacatcttgtattctcatcttctccctactaaggatgtgttagagggttgacaaacctttccatggatggccctatgcaagtgcatctaggcccttggcacagggcctcaaacttaaaggggcttcaaaatttgaaaaagggaaaaaaaaacatttacctacagacaaaatctgtcacttaatgtcattttttcgtagttgaaactccattcaattattttactatcaaatatacattgttcgtaggtaaatgtccatttatccgtgggtaaaattcatgtttgaaccattgctgatatatttaactagaaattagatgttaatcactctaagcgttgttgaatttttttcactactatttaaattaaaatcacacgagtacaacaaagccttaaatttatcttcttaaatttaagagagacggtcttgaacctttccctcattccccctccatcttcttgtaccataaatttatctttaggtgtcttttttttttgtggtgtccggggttcgaaccttagaccttgcatatattatacattgtccttaccaactaagataaactcacgggtactagctttaggtgtctaatagttcaatgtaacaagcattatattaataaaaaaatattatagaaactaattttttaatcgaaaatcaatttttctagaaacaaattattttaattgtttccttaaaaaaaaattaattgaaaatgcaatatgcaatattttagaaacaaattttttttcattaattttttttagaggagaaacagtttttttttattcaataaaataatattttgaattgaaagtaaaacattctttaaataattgcaagaatttgatcgagcatttgatccacgacgggtgtac

SEQ ID NO: 30313 - DNA, 451 bp, Medicago truncatula
  Intron number 2 from transcript Medtr5g009810.1 (locus Med tr5g009810) derived from phytozome v7.0 (chr-ID MtChr5; po s 2235027 to 2235477 reverse strand)
atttaatagaacagcttgaaaaaagaacttctcaggtataatgtttgttttcttcattgtagcagttgtaatctgttcagtggcggatcttgctcaaaatgttagggggagccgtaaatactacctaaaatattataattgaaatttattagaggcatatataattttataaaaaatcaaaataatattaacacaaaacaaaataaaaatatgtatacaagggatgagtactaacaagttcccaccgtcgtagcagccagcaagccactatgtaatgtattttttattaaaaaaaaacatggatgagtaatattattgaatgataactatcagattttgttttgaagtaatgaaaaaaaaaacacacacagagaacccacaaccacaacacaacactacatttgtgctttttgcaggtagatagaagcatcgtcttcttcacctccttttc

SEQ ID NO: 30314 - DNA, 828 bp, Medicago truncatula
  Intron number 1 from transcript Medtr4g160090.1 (locus Med tr4g160090) derived from phytozome v7.0 (chr-ID MtChr4; po s 40505921 to 40506748)
catctttgcggcttcattgttcctccttcttctaggtttgtacttaatcttattccaaccaatttttctatgctattaattaaatattaatatttatcccaattagatcgacatttcctctcaattttctaactttgtttaagagaatgtcggtgctccttttaaaaaaataaatttgataattttaatgaatttcacttatatggttagtggaagaatattcataaagcattgtaattgagggagttcctgtattcaatttcaaacaaactgtggtgaaatgtgaagtatgaaatgaaatatttcaggttgtagaaattagaattacaaaatggttttactacagttgtgcctacctagctccatgtggttcttactcaactttgttaaacatatcattactaaacatgacttgctaccttgtggtttgattagtgtcataatattgattgaaaattgttctgacctcaagttagatgcaccacttttttgaggtattttccattttgagtctcatgagtcatcacaattttatccttggttaaaaggtgtctcaatgagttgacaaagtgaatgtttataaactatacttagctcgatttctaagtaatgtgagactttttgtttattggaacagtttttttattaattgtttagacattcagatatcatataaacttgtagagctagcattttatgtcttactctttctttttcacactcaaagaaccaatgaattcgttgtctttgtaattcttaatttttttttaaatctgttgaaattctttgtcagactgttgctcaggaagtttcattgggatctgctat

SEQ ID NO: 30315 - DNA, 739 bp, Medicago truncatula
  Intron number 1 from transcript Medtr5g011250.2 (locus Med tr5g011250) derived from phytozome v7.0 (chr-ID MtChr5; po s 3034278 to 3035016)
taagatatttcatcttctgcaaagagttacccgtggtaagcatgtctttttttgactaaattttttatctacgaaactctcacacacacacttaatgcatagaaaggggtagctcgagtatgaactcgagctccatggataaatatggggtattacaagttcgaacttgatttccaagggttaatatggggtattacaagttcgaattcactagagatatgtctccacacttattttactttttctataagatccgaaatattgttgtcttgacgatcattttctgagtttttgccacgtactaagggacaagtacaaagattcttaaaactcattttaatcgagggtttttagagttcgatctcacacctcaatgtgtgttttcacctcaattgatagtaagttttaagcatcttcatacttatctaagtttgaatttcacatatatgacaaaaacataactcgtgaatgaattggtcaacaagttatcatggggtgcgagaactactatgtatgagtagttggccaactttttatttcaattgtgtttatgggacatgacaaacatgattaagactcggatacctaagttattcatcctaaaaattgaatcttagtgtcacttagacaaaaaaaaaaaaaaaaacatgattaagactatatcttattgtgattattaacattgtgtgtttgatttgatttaggtattgaaggcttttgtacacggtgacggcaattt

SEQ ID NO: 30316 - DNA, 678 bp, Medicago truncatula
  Intron number 1 from transcript Medtr5g011740.1 (locus Med tr5g011740) derived from phytozome v7.0 (chr-ID MtChr5; po s 3240237 to 3240914)
agcacacctaggtttgttaattttccttcatcatgtagtttatatgttttggattgatcttaaatagtctatgtggttttatgaatttctacatgatttttttgccaatgatcctaccacatatatgttgaaacgagtatagtagtagatagatacttgaatcttttaatcatttcattctcgatttgatccatcggcggtgtgtgtggataaatatatgtcgagagatgtcaaccccttgaatgaatctaagttacctcataggaacaaattttctttgaatgatcccaacctagattttctttagtttaaaaacatttactattttgatgtgttgtttttggtttctttaactccagcagaagtttatttcaacaagcaagaatgttctttgtctatgaccagttgctttggttgcaataattcagttttattcattttaatatctccaaatggcatcaataatgtgtataaaatttgtaacaattgtcattgatatgtccactatcattttttaataatttgttgacttttctagtcaatttttattttcttttgacttttctgttcttatctcttctaacaattgcccttctagaacgtctatgttcccaattctgatgcatttttttctgatgctttttgacctttgtgtatgaaacagggttgtgattgaca

SEQ ID NO: 30317 - DNA, 768 bp, Medicago truncatula
  Intron number 1 from transcript Medtr5g019670.1 (locus Med tr5g019670) derived from phytozome v7.0 (chr-ID MtChr5; po s 7359340 to 7360107)
ttcatacaggtatcattggaatttataaaattattttaactaaggaagtttagtataatactttgttatttttcagagcatatatagtgtagtgagatattattaaggactagtccttaaagcctgagatcactattcttaggctagacacctactcatgttcacatgagttcgaattcaggatcttataaggaccagtccttaaagtctaagatcactattttgaggctagacaccttcacctgagttcgaattaaggaccttacagttgtgcaattgtgtgtgtgagttgtgtgtgtttcatatagtctttaccacttcatgtaagacaacaaaaaatggaggactaaaatccttataataagggaccacttcttattatctctactatattaaacagcttttcaaccaaaaatctcaacaaaaaaaaataaaaaaaataaaaaaactatttcatatacattgtttttataaaaattaaaaagtaatgatatttgtacaacaatttagtgacagctcttgtgataaccttttttttctctctttcctattggtcaacaatagtaatagaaagacaaaaaggaaggaagaaagagagtgttacaaaagttgtcatagagtagttgtataaatataatttctattttataaaatttatgcggccatttattattgaaatcctttttgcactttatctcaaaagcaaattaatttttatactcatacaacttagcggggtttcaggcagtggaaaattgagttgggcaa

SEQ ID NO: 30318 - DNA, 864 bp, Medicago truncatula
  Intron number 1 from transcript Medtr6g086210.1 (locus Med tr6g086210) derived from phytozome v7.0 (chr-ID MtChr6; po s 17522761 to 17523624 reverse strand)
cctcttttgcttctgttactggtttcagtttattggtaaattttctcttcttttcctatttaattttcatcaatagtgctcattgttttttattttttgcaatgttattaaaccattattaattcagtaagtataactaatatattaatgtcagtttgagtgaactaagatctgaggttgaatttatcttaagagacaatgttcgaatcattgccggaaatatgtgttcatgtatagtgtctaaacgtgaatggtgatgggtcaagatcctcttaatctctccgaaaatgaagaataaaatttagagagataaacacaaatatgatcatgggattcaatttttaaaatatttaaaaaatggacttcaccagtagtctacttgtgtctactcataaattgtgctctcagtttcttttgaaaaccgtaaagaatctcaactcaatgttaataaaacggcgtgagtcgtgatcttgggatatggatttgctatagtaagcaaatccctgcactcatgcaatcacatatccgttgttatttgattaagatcgtactgtccaaatttaagtttaatatttgtttacacaatcaaaccttcctttgatttgttcccttttcccattacccctaagactaaacttgatcataattgggatttaattattgaaacttgaatttatgaccagataatggataatagtcttttgtatgtcagttaatttgtttttactcaaattactactcaagtttaatacactaaagggtattgtatgtactaaacattgttatcatgatccattgtgattcaatctttgttacttcgtcaaaatataaaatcgattttacttgtttttgctttaggtcgga

SEQ ID NO: 30319 - DNA, 942 bp, Medicago truncatula
  Intron number 1 from transcript Medtr4g025240.1 (locus Med tr4g025240) derived from phytozome v7.0 (chr-ID MtChr4; po s 5955165 to 5956106)
gtggaaaagaaagaaaaaacaaaaattaaagtaaattaaaagagaaattaaatttatatacaatgaaccaagttcacaatattttcaagtaacagacgttaggggtttgtctttactcaggctccaaactaaagttgacagtattttcgagtaacggacgtcagtgatttgcattatgtggttttcgttcaccataggtgcacacatttctttgaaatataacttaatattattttcactataaataaagaataatatagacacacaaacaatatgatctctgaaatataaaattttaaagagagtatatacactctcaagaatagagaagtggtagatagagaactaacttttcaattctttcaaattcgtaagtttttcttcttgtgctctcattttattttgatatgatttttttcatgtgtgtgtttttttttcctacttggtaatccttttgtttcatttttttagtacaaataatcgtgtagcaataggagagtgagagtcatgcaaattctacttataagggaacctttctcaaaagttattttgttgctgatggatttttttttaaagattgttgatggaatggtgtagaccttaaatttggatatgctacattttgatttattttaatttataataaaagtaacctatgtgtatttgactttcaaaataataagtttttaggacattaaatttttattttttattatcattttttataggatagtatcgtaaacaggatactcacttccatgtttgtgatccttgtgtgaaatttgtgtatccataaagcattaatttatgattcaacatgaaatttcttcttcatttgaattaaaatttgtttattgattaaaattgtttattattttttgttgattgtactttacaatttgacatttgtatgcatgtttactcaggtttctgtgtgggctt

SEQ ID NO: 30320 - DNA, 856 bp, Medicago truncatula
  Intron number 2 from transcript Medtr4g128720.2 (locus Med tr4g128720) derived from phytozome v7.0 (chr-ID MtChr4; po s 30393072 to 30393927)
gctggcaggcttattttgagctcaaagatctccaagtatgtaatctctttcttcttcttcttcttcttctttgtttcagatataactcattcaagattttgcgttttccctgattttttctgtttctgcgtgtttttgcctttcttgaccaaatgtttctatttttaaattctcaaagaatgatttgtatgtagatccatgacattttttcctattttgattatatgtgactatagaacatggattttgttattctaaagtgagtaaattaaggttatacgatgaatcaggcattttttactaataattttattatgtatatgtaaatatagtattaacttattgatttactacttatcattgattgatattaatttaccttttaacagagaaaattaattgtcaatattttaactatcattatttgtttttttttttttttttttgtcaagataatttgttattcatgtgcatataatatcaaccattgatgtgttgatcttcggacattattcactttattctttaaagtgacttgcttaatttagagtagtatgatccaatgtttttcaggaaaaaataggtgttgcaagaaaaatgcgattgagaatttttactttcaagagtgatcataaaattttgttagatttagagaccaaatgtcaggctatataattttagaaagtaaattgattttcatttgtttgttttttggctcaatttcaacgggtgacatgttttattagaatacattattgtcctattgtacacatgaacgaactttcattaataattccattcctcttcacaatcttttacagaaggagtcacctagagcagagatagagaggctgat

SEQ ID NO: 30321 - DNA, 728 bp, Medicago truncatula
  Intron number 1 from transcript Medtr7g084650.1 (locus Med tr7g084650) derived from phytozome v7.0 (chr-ID MtChr7; po s 18318235 to 18318962 reverse strand)
accctaggtgattgctctttttgttgcttgactttttacatttgtataattgtttgtgtgtttgtcttgtaattactatttgtcttgtgtttcaatgttgttaaatagcggctacaacgacactatagcactaacaaactgctgttgttccactatttgctatttagtacaaaatattgtggataagcggctgtagcagcactatagcagtactatagcagtgttgcgtagcggaatttgaacaaatcactattttccatgatctgcaattgacaatattaccatgtttgtgactctgttactcatatgcattttcaaataatgaatacatttttgtatgtttgtggtgttgaatttttgatgttagggcatgagatctttttcgatgtttatctatttgtgcatgagtggttgtttgcccaagtgtatcagatgatatgtaactgttcgagagaagccgatattcttatgaaggattttctccgttaatgtttattgatatggttcacgtgtaattttgatagcttgagtatatgagctcagctttttttttttaatttcttttactgttgaaagcaatttatctgcttccactgtaattttcttatcttagagtgcagtgaatcttgtttttatttgcttttttctatctgttgaaagcaatctatcatattctcaattaattttgtttagttcacaagattggaaggcaagattaaagattccag

SEQ ID NO: 30322 - DNA, 412 bp, Medicago truncatula
  Intron number 1 from transcript Medtr6g033440.1 (locus Med tr6g033440) derived from phytozome v7.0 (chr-ID MtChr6; po s 7398388 to 7398799 reverse strand)
gatctggactaggtgtagtttattattattattaaatttgttcattattaaaaatgaaaatggtccacctttaatcacacctcaatcttaggatccatccaatatgaacctcaaaaaaatattcataatgtaaattttcgccatttttatcaaaaaataaattttatattaaggcacaccttttagatcgaatacatatcaatcacccgaattttatacatattcttttattgtttgtggtaactacttttgattatttagaatctgcagagaagagatttactttttattgatatagttatttgtgattattaattaaattgctaaaatggagtcttatgtgaatatttccttcttttaataatactcttttgtgatatccattaactttttgcattccctatattagctt

SEQ ID NO: 30323 - DNA, 985 bp, Medicago truncatula
  Intron number 1 from transcript Medtr6g005770.1 (locus Med tr6g005770) derived from phytozome v7.0 (chr-ID MtChr6; po s 479396 to 480380 reverse strand)
ctgctgtctctgtcattctccataacctccagaaggttggcattactttttttactttttattttatggttactttggcaatgtcgatattattaggctgaacaccttcaccctgttttgaacttgggacgtagcagttgtgaggtggcaactaccacgacccaattaaaaaaagattgatttttttgatcataagagttgaaagattgaatgtgtaaataatgcatcaaaattaaacttagaaattcgatatttgatattgctaggttgaagaccttcgcttgggagctaagttgtctgtgtgagtttcaggtggtggttgccacttcgtctacaaacgaagaaagaaaattgattgattttgatcatagccattaaccacttcatagtttaaatatttttactaggacaatatttttactaggaccttgcaattgtgtgtgtgagtttcagggtggtggttgttacttcggctacggaccctgaaaaaaaatgatagattttgatcataaccactcgatagattaaattatttttatacgaatagtgtatcaaaattaaacttagaaattagacattcaagcttgatattgctatctgatgggtcctaagttgtgtgtgtgtgtttcaggtggtggtcgttgccataacccaaaaaataaatgattgattttgatcataatcacttgatagatttttttttacatcgacaacagtgtatcaagattagactctgtatgtttggttctgcagtgaaatttttttgtagtttgagtgaattgattctagttaaaattgagttgaaggtaaaatgatttatgtttggatacattcatgcaaaagtgagttaaacaataaatttgaatgtaaaaatcaatttttgaatcagaacctagactgtttagcttcaagtagaatcagttctagaggccaaatcaatagtattatagagaaacggatcgtcagctgaatctatagcagcact

SEQ ID NO: 30324 - DNA, 512 bp, Medicago truncatula
  Intron number 2 from transcript Medtr5g066230.1 (locus Med tr5g066230) derived from phytozome v7.0 (chr-ID MtChr5; po s 23253482 to 23253993 reverse strand)
atacctttgaagacaaatccaaaaggtttgctaattttgattttttttaagttttttggagttagattgcttgaaaatagaaacgcatgtcaagttctgagcaaactatgcaacatgagtttttggtttttagattttgttgttgctttgagaagttccgtgtagcttttgctttatgcttttgtttatttagtttggcctctaggttggattgattttgtgtgcttctttcttcttttgtgtttgtggtgtgtttggatgaattcacaaaggtttatcaagttctaaaatctgaacaaactctacaaatgtgttttctccatgattgtattctactttgatctgattcaaaatgttttgatttgtttaagctaattatgcgttagtgcaatttcataaggagtaagcagctttgagtggtgtgttgtgtgactgagttttggttctaagaatttaattttgttgttgctttgataggtgcttttgtttcattggtttgaacttcaaggtgg

SEQ ID NO: 30325 - DNA, 207 bp, Medicago truncatula
  Intron number 1 from transcript Medtr4g111080.1 (locus Med tr4g111080) derived from phytozome v7.0 (chr-ID MtChr4; po s 25336063 to 25336269)
ataagtaaatagttttccttctatgtgagatatatttttgaattcacttttactttttatattatagttttcgtaaggaagaaaaacctctattattttgtttcgtgcgagtgctttttgtttttgtttatgagattatttgtgtcaatggtcaacttctttcatctttcaggcgacaatctccggagattaaaaaaattgttcaaa

SEQ ID NO: 30326 - DNA, 672 bp, Medicago truncatula
  Intron number 1 from transcript Medtr5g066330.1 (locus Med tr5g066330) derived from phytozome v7.0 (chr-ID MtChr5; po s 23324283 to 23324954)
acctgagaccgtttcagccacgcaacaagacggtaagtttctcctattatgagtaaaggatcctcacattttcatacaaatcgaggccaattctatggtgtacaaataagataagtcttgcatcatgtataagttattttttataattagactaataaatctcactatgatatcaaatgagatatgatgagacctattgatccaatggtgaaaaacacatggtgcaagactattttacttttctgctcctacattctcaaaaatcccaaaatttgtttttttgttgaatttgctggatactagattaactgattcggataactttgtctgaattgagtacgaaattattgcaaagaaaaaaggatcttgggggcttttaagaatgatggtggagaagaaactatcattattttttattaagaactgaacttgattgcaagcaaattgtaaccctaagagataagattaaatatttattcttattttattttgttccaatcttcaacactgtaattcatgtaccagtgtaataaaagataaatgattttttggacttcataaaagctaagctccctccccgaacggtgctgctgattgctgatgctccgagtacatgttataccattttgaaatcttaacaatttttttggcttgttaaaaataaaacagttg

SEQ ID NO: 30327 - DNA, 1013 bp, Medicago truncatula
  Intron number 1 from transcript Medtr6g101770.1 (locus Med tr6g101770) derived from phytozome v7.0 (chr-ID MtChr6; po s 22414716 to 22415728)
gaggattcgtggattcagtttcaggttttttttcaattagtttcatacatatttgcctcaattctttttaattttcgtataatatttacctcactactattgcactactactaattaacatttcatgccttaaaagaaaaattcatacatgctaagtaaataggagtacaactaaattgcagcaagtgcaaggatatttgatatcttgaggcgcaagtttaaacctacagttctctatttttctacatgtaatatgtgaaattttcgcaatgtgaccatttgacaaaaaataattcatacctttgcatcgtgtcctagctaaatatataaagtaagagtttaaagattttgagccaaaaaaaaaaagtttaaagattatagattgacaaatatttttttatatgtgagaatataattcttttatttagtcattgaatcatgtattatcatttagatatttgttgattttttttttttttaaagaaatgttattacaaagtaacatagtgatcatgatgttggattgaataaatacatcaaaaaatatatacgtcatcaatgaaaaatatagaattgtatagtcgttgatgaaaatttatccatgatatacagaaatgagaaatcaactatcaaaattcaacttggatactatattttagcaccaaatatatgcattccatttctactattagaaaaaatgtgtaggtttgacattggactatatatatctcaacttggttagagaaaaatgttggagagggataaatcaaattaagttaattaagtgtgatataattttttgggtgtatactggtcaaatcatagatatataggggtaatggtccaaatttttaaaaataaaaattgactattttggtcacaaagttttaattgacttgatatacttatatgcatattgaattttttgttgaaataaaaaaaggaaaaacgtttgagactgttgatccaagaacagaagaagtgattacaaaaataagcagaagctaccaaag

SEQ ID NO: 30328 - DNA, 963 bp, Medicago truncatula; identical to SEQ ID NO: 28977
  Intron number 1 from transcript Medtr4g041930.1 (locus Med tr4g041930) derived from phytozome v7.0 (chr-ID MtChr4; po s 10025098 to 10026060 reverse strand)

SEQ ID NO: 30329 - DNA, 995 bp, Medicago truncatula
  Intron number 2 from transcript Medtr5g091280.1 (locus Med tr5g091280) derived from phytozome v7.0 (chr-ID MtChr5; po s 35702713 to 35703707)
ttcgacgcattttcccaatccccaacctcgtcccggtatgttaaaattttaaacatttgattggtgaaaactgaaaagtgttttttcaattttaatttcatttccaatctgaatgatttttttaattttttttggtgtttattttgcaaattatggttaattttagtttctgtttatctaaaatgcacacatgtttttagagcagtagattatgatatgcgtgtgaaaaaatgttataaataagggctatgtttggattggcatgtcataagctgatttttaacctaatttggataagcttttttcaggatagtttatgaaaacagattataatttacgtgaaaacccagtttgactatattttctttgagtacagaaatagcactaatgaaacttatggttttgcaagttaattttgtatcttgatgctaagttgagcataacgctttattatagtgatcaggtatactttgccttttataattaagtcatattttgcactattgacatatttacaatattatattagctcacgtacatcatgtatatgataaattttatataattttaattttagataaaatcatacaagtttacgagttgagtttacctaagtaaaatgagttgaggtaaactctcgagttgtaaagctttgctaagaagtgtttttatcaattttaatttcatttccaatttgaattgaatttgaaaattttttttttttggtatttattttgaaaattatggttaagtttagtttctgtttatctaaaatgcagacatgtgttaagagcagtatattatgacttgtgggttaaaaaaagttatagaaaagggttgtgtttggattgccatgtcatatgctgatttttaacctaatttggataagctttcattcaagaagcatctgtttataaataaaatcttgttaaatttatgctttttgttcttttacttcagggactgttgatcttgaagcttctaggaaggagaaa

SEQ ID NO: 30330 - DNA, 575 bp, Medicago truncatula
  Intron number 2 from transcript Medtr5g085600.1 (locus Med tr5g085600) derived from phytozome v7.0 (chr-ID MtChr5; po s 32710261 to 32710835 reverse strand)
aaagtgtattatcaattccattgaagggtatgtgcctcttgcatttacctagagttagataattaattccttgttggtttgtgtgctgtttgaaatttgccatttttgaaatttgtaattgtaaatggaattgcactacaagtgttttagttatctatgcaatcattgtcttcttgttagatgcttgtggttgagttctattttctattttgtggaaaatagttttgtctttgtaaaatgggacaaaaattgtgtctgtgttacatcaatttatatatcaaaggtttagttgagttgcctctactcattttgcgctggtactgacttggtctttggcttttagtgaatattcataacttagtattggagttatctttttatttgaattttgggatcgatgaaagcatgattctttggtctatcttgtcgggaatcgtattatagaattaaaaagttgggaattggggacatttatcaaattgttgaaggaagaagttcgcgaggtttatttataattacttgattttgatttaaatatgctgatttgatttccatgtgattgtgttatgtgatag

SEQ ID NO: 30331 - DNA, 217 bp, Medicago truncatula
  Intron number 2 from transcript Medtr5g027010.1 (locus Med tr5g027010) derived from phytozome v7.0 (chr-ID MtChr5; po s 10960996 to 10961212)
aaaatctaggaccatctatcttagtctttttcattcatgatatgatcacattatttgtaagatgattttttgtcttctgtttattaaatatgaactatttgactatggaacttgtaattggattttacttttgtttaccttttctacatttatgattacaattcctttgaatttgatgtatctttgtttcttaaaccagggatacaattcatcaagc

SEQ ID NO: 30332 - DNA, 642 bp, Medicago truncatula
  Intron number 3 from transcript Medtr4g089580.1 (locus Med tr4g089580) derived from phytozome v7.0 (chr-ID MtChr4; po s 18692396 to 18693037)
ttagtaattccttttagttgcattttagtaggtgtgtattcgaatctttgttgaaaatgcatccgatctccgatacattagatgattatgtcattttcattgtttcgtctccggtgtctgtgcttcatagatttgaatagacttatttgaccttgtttactctgacattgacacttgtgaaactgtttgtaagagcttacgaaataacttaaacgtgttcttaagctgctttcgacttatttcctgaaaatttcaagatagtctggggaaacaacttatagtttatataaaaatgattttaaatcatgtgattaagctcaagtggttaatgagctccccctaggacaaatcgtgcagaaaaacccaagttcaatttctgttggaacaattcttggctaggctttactcacctcctggtcgaactttggattaccagggcccttttcttaggaactaaagggttaacaaaaaaaaaaaaaaagaaatttattttattttatatattgttatagaaataggttatcaagaaacacttgtatgatgaacccttaattaagcgtaagcatttaattaagttgtttacccaaagatgtctgatattatttgattatgggcttgtaacagttagtcaatttacgttgt

SEQ ID NO: 30333 - DNA, 468 bp, Medicago truncatula
  Intron number 1 from transcript Medtr5g083830.1 (locus Med tr5g083830) derived from phytozome v7.0 (chr-ID MtChr5; po s 31862781 to 31863248)
tgagatacatgtacgtactctcatgcacaagtttgtttttactattttatcaataagtcgttaaattttaacaaataatatatatgatgaaacatatcaattcaatgatagaagaaagaaaaaaaaacctgtgcacggtagatcaatattattttatttgtgcatgtatatgtatcatttatatttctcaccattctcattaatattgatttgtaaaatactttcaactgaatcttcatctctttgaatgatgtgtagtttgatgtgtatctactgtgctgcaacgttatgtatgctaatgacaaagactcaagaccttagcaagtggtatgaccaaattaatatcaagccatatattttgagaattttagttttacttataagcttcaattaaaataatgtatactattttgtacaacataatttctaacaggctgaagctatacaaagtgttgcaataagggtttt

SEQ ID NO: 30334 - DNA, 1015 bp, Medicago truncatula
  Intron number 1 from transcript Medtr7g089470.1 (locus Med tr7g089470) derived from phytozome v7.0 (chr-ID MtChr7; po s 19681296 to 19682310 reverse strand)
gtgggtttgttttctgggacatgactccaaaatattgacgtcttaagattatttttgccctctaaatagatctttgaatctttcaaatattttacaagagttctaatttgacattgattcatctgataaaattagagataaaatgtgggtttcttgttaatgttgaatatgaaaatcggtcactttcttgtttgcaatatcatagcattggtcataacttttcgtacgtcatgctaaagtggatcaagagaaaatgatcccttatgagaatactaaatgtatggtaaataaattcatttatgttcagaatgatggtttgactaaagaaaatgcttctatagtgtgttgataatgattctcattcttgctaaaagaaaaaatgattctcattcaagatttgtggattccacaaatcttgaatgagaatttaagttgaactactaaaaatgatattcttgaaaggatttcagacatgtatattataggttcttggttataggtaaacaatgttaagaatcacaatacctcttctaatttggatgcagatttacattcaaggactaaggttgctaatttggcatcccaatattattgttattgttgtaatttttaaaatatggcttgaattagatactttgaaacttataaagaaataattggaattatgaaaattcaccattgaaccactttccatagcttttattgaaatggtaagaacaagatttcaagagtttctaggtgtaaaggatgattagaaaaacttagattacaaccctaacaatagccactaaagttgtaatatttcatgcattctgtagccattaagacataattgtgcttattactgcctgaaaccattagaaataaaaagcgtaaccaatgaattgctgacttgtgtgttcgtgatattacatcttttctttgcctacggtttaatcatttggctgctttgatagtgagttgttctgctatggtttcaggcttttggcatctttggcagctttgtctgcgtgaa

SEQ ID NO: 30335 - DNA, 799 bp, Medicago truncatula
  Intron number 1 from transcript Medtr5g020260.1 (locus Med tr5g020260) derived from phytozome v7.0 (chr-ID MtChr5; po s 7630701 to 7631499)
attttctaaaggtttgcctttttttagtctctttgaaattcatctaattgttacataaatgaattttataaccacaaccttatttttgttggttttcaagtgtgagttatatatcctacatcggataaaataataaaggttgaacaccttataagtaaaaggacccataattaattttatttttttaaatgattagcgcatatttaattattattgaatgttaatgtaaaactattttatattgataatgtatggtcaatttttttaacacaaactcattattattttgttaaaaaaatgtatacaagaaaccctttaattatcaatcaattttctatagttgcagaaatattttgtatacacaaataagtctaattaatgtcatttttattaatttatatggtttatttgtggattcaaattaaggatcggataacttcgtgattagttctcccaagaaaatacttaaggtcgtttagtgctcaagattagagataaaataagacaaatgcattatatatatgttaatcattttctttaaaaataatattatttttttgttgaataaaccaaaataaaatatatgaaatactaaaagtgattcatctcaaataacgcgtgcaaaagagaaccactccatggccatgataataaaaaacactcatctctaggtatccataaccacaatgggttctaataggaaagagcaaactatgaatgctcttctaatctcgcaaaaacaaaaccagcttatgaataatgtgacttttgttaacattatatcattatattacaggca

SEQ ID NO: 30336 - DNA, 918 bp, Medicago truncatula
  Intron number 2 from transcript Medtr4g115310.2 (locus Med tr4g115310) derived from phytozome v7.0 (chr-ID MtChr4; po s 26656294 to 26657211)
acaactgtcaccaccactgcagtaagttcaaaaaatggacttcaatcactagttataacttatatatgcggaaacatataagtggagtttcgtcctaaatccgtactttattttcatgtctcaagttgctgttaatgccaaagtagtaaattgcgtaactttaatcaatttttgtcgttgttgagaaaacgagtcatgtcttattaaattctaagcaccataatcagcattaggatggtgcatcctattttttaaatacgagcagtaagtcgaagatatcattcatatcctgccaaatttgcactttgacctttgctgtttttctctgtgttacgactattgaattatagaatattaatgtatcaataatataagagaatgtgatggaatggaagtgatgagagttgagtagggggcatctaagactgtgagcataagcattatggatagtacctgtacttatgagcttagtttactactaagcttgtgtcatgatattgcatcaaaacaataatatttttgccacacttcggtcctcaaaccttaacattggttcctgggcaaatctattctctgtattatcgtatctcatgctctgaatcagtaacgtattatcatcttggttggctactgagtaatttttgttcccgtgaaagcccaaaaatattaaaagctatgattcagttcgtgattgacatttgtgaatttcacaatgaatgcagtattttcaatcccctttttacggttcaagttcatgtttggttgagtttattttggggcactaattagggtttgctaatctctctctctcgagtatgactatggtgtattgcagcaaatgatttaactctgtctgacttctatgatctttattatgatgcaggaaattgataaaaagatacaatctctcgagtacac

SEQ ID NO: 30337 - DNA, 784 bp, Medicago truncatula
  Intron number 2 from transcript Medtr5g016540.1 (locus Med tr5g016540) derived from phytozome v7.0 (chr-ID MtChr5; po s 5841432 to 5842215)
ggtcagaaacctattaaaggatcacctcatccaaggtacttgattataagcaagcaaccttatattaaaaattttaattgagttctcatctgaatctatcacttactataaggaccaacaatttattatatgtgctacactagattgctcattgacccttcaattttaaaaatgaactcatgtatagagtgaatgaaaaaaaaaaaaaaaaaacaattttgatcatttccctttttctttatgcacatagggatcatcttgattagtaatttacctttaacatatagtattcgaaaattgtttaaacttaaaccacaatagacattttcttcgagaaatagaagttcacgaccgtcctttatactaacgacggactcaatgacatgattgatgcaagtttgtctaaaacaagagaaatgaatgaatatatgtaccttaaaatttaagtaatttatttttattattttggtcgaaccgacaccaattaggtcaccgtctcggccgtaaaaatgctaaagaccataaacttctaccgttaagatacgcgaacattgttaggcattataatgtctagtgatttttttaattatttgtccacggtggaccgcctatattaagattgagtgctaaatttagaaaaaaaatcattattatgcagtattatgagttaagttgattttgaattgagtagcagtaatgagtactaagtagtaagttatatttgagagcaatgattattactgctgcaggggttattacaagtgcagcagtattaaaggttgtc

SEQ ID NO: 30338 - DNA, 948 bp, Medicago truncatula
  Intron number 1 from transcript Medtr7g088500.1 (locus Med tr7g088500) derived from phytozome v7.0 (chr-ID MtChr7; po s 19230014 to 19230961 reverse strand)
gaagaattctcttacactaatattcatcaggttggtttttctgaaatttggaccttttttttttttttttgtaatgggtatttgtttaaattgtttgattttgtgtttttgttgggtttgtgggttaaagtttgagtcttttttggttttggtgtgatggttttttttagatatttggatttagaatgaaattataactgcatgtatcaatttagtccctcacattattatggatattccaaaatgatatttgaaaatgcaaattttaatcaaatgtgtccctccgttgattggcattaagtgtatgtttggttctgtgttgacaagacttggttttgagtgattgattttgactaaaatgggttgaaggtaaagtgatttgtgtttggatagattcgtgtaagtgagttgaactatataagtctgtgtgtaatcaattctagaattaaaagccacgaatcctctctttaagtagaatcaatttggcaggcgaaagcaaaacatgtcagaattgattctacacctctagaatcaattttaactgtatcaattaagtccctcatattatagatattccaaaatgaatttttgaaaatgcaaagtttaatcaattttttctctccgttggtatttgtagggactagaatgacattaagttgataaatcggggatgaatttgaaattaagtgaataaggtcagagatacgtttgataacatgtctatagagagggatggatttgttcaacatattgcaattctaaagatcatttaagaatattaataatatgaagactaaattgatagaacattagtagaaccctttaatttcgagtaccaacttgagtatttactctaagattattttatctatcaaattttgcaatgctgaatattgtttttccctcttttcaggtgcctaaagttaagaagattgtggtaaactgtgg

SEQ ID NO: 30339 - DNA, 333 bp, Medicago truncatula
  Intron number 2 from transcript Medtr5g036090.1 (locus Med tr5g036090) derived from phytozome v7.0 (chr-ID MtChr5; po s 15045248 to 15045580)
aatatctattagagacttgcttgaaaactgatcaggtacaatatatcttacgtaaagcagattccctgtttttttgtttttgtttttgttttttcttcttctttgaattatattctaatccatttcttagcacaatatgttgcgttggatgagtggcacaaaactacgagataggatttggaatgacaccattaatgagagagttgggataacacctataacattgtttcttgtttgtcttgttttactaatatatgtttgttcattttctattcattttgctatattgaaaatcaagtattttaaaatctattccatcataagaagccatcc

SEQ ID NO: 30340 - DNA, 851 bp, Medicago truncatula
  Intron number 1 from transcript Medtr5g016070.1 (locus Med tr5g016070) derived from phytozome v7.0 (chr-ID MtChr5; po s 5554058 to 5554908)
acgcaacttcctcgtcatttattctctcgcttcaggtttgttttctttctcaatttgaaattgttaggttttctagaaaatgtgatagatcggaatcttttaatcattttaggttcattttcttcttcaatttaacagcactgttaggtttaatcgaaaatgtgagaggaaattttgagtttaatagtttatagaggttgaaattagaatctgtgtaacttaggtagaacattcattatattcttagtttttgttatgaagttttatttgtatatttttatttttaaatctgttatgttttggaaattgaatattgagttcgattttgttcattttcttcttcaatttaatactgataggtttcgtagaaaatgtgataaatctgattttgatattttgaatttcttttgttcttggaggtggaatttgaatctctgcagatgaatattcattgttttcttaatttttgtaatgaaattttatttgtatattattatttctaaatctgttatgatttggaaactgaatgttgaatttgattttgtttgtaatgattctcaattgagttttagatcggaggtgtgaaattatgaataatgaatattcattgtttgcttgtagaatctccgcgtaactaagctgaataatattcattgttttcttaatttttgttaagaaattttatttgtatattgtttttctaaagcggttatgttttggaaactgaatagtgaattcaattttgtttgtaatgatagttactcagttaagttttatagattggaggtctgaaattatgaatgatcatttcatttgttgcaaatttctgttttctcagttgtggaaggtct

SEQ ID NO: 30341 - DNA, 723 bp, Medicago truncatula
  Intron number 1 from transcript Medtr5g093810.1 (locus Med tr5g093810) derived from phytozome v7.0 (chr-ID MtChr5; po s 36940552 to 36941274)
tttctcagaaattcagaattttggtgctacataaggtaatgtactcttgtgtaatggatcttatggtttttcttagcataaatgttctgtttttttcaattttagattttggttatgtatgtttttgtaaaaccaagtggctggaaaagaaaaataaatgttatgaaatttggattttggacttttttttcttttcaattttgcttgaagaattgtgattttagttcataaaggattgttgcaaattggaaaaataatgttttttaatattatttatacattttttaagtgaattatagtttggttagtgattactgagctagattatgtgaaaagggataatttttacttgttttcatgtttgatgaagaattgtatgaaatatatggtggaaagaaaaataatcagttcaatatgagttttcagccccaccaccttaatttttttttattttttgttttttttgttgacaatattatcagaagaaatgaagaagaaataaagatttacatcagctctaatcagttgttaaacctttatgtcactgtcttacttcaaaagaacattgtacttttcgcaatatttcaaagcttttgacatgattgtgactgcaattactgtttatatcattgattggaagattagaaatgaaatggtatcgatgaaataatgaaaagttgtatgttttgcagggtgtaggttgttgatagtaaattgaagaac

SEQ ID NO: 30342 - DNA, 427 bp, Medicago truncatula
  Intron number 2 from transcript Medtr4g156520.1 (locus Med tr4g156520) derived from phytozome v7.0 (chr-ID MtChr4; po s 38798996 to 38799422)
gtcttggtcagttacttaactccatttattgcttattcttaatcatgtttcataaatttatcacattttatttcttcacacagatatattactacagaaaatgagtcatgcactgtcggtgtaaaccatttattttacatccatttccaatcaaaatctaccattttgcggttattttttaattgcggttgtaaagtgggcttacatggtaataccatgatttctcataaaatgccggtggaaaattattttatatcatagtgcatctccgttaaactcgtcagtttataatctggtcgaattcatatttatttttagacttgaattattgagtttagattttatcgcgatgttgcttcactttttagtgattcgatgttagtatatatgaagttgttgactgccttgtaggtggtggagaaaagta

SEQ ID NO: 30343 - DNA, 371 bp, Medicago truncatula
  Intron number 1 from transcript Medtr6g094080.1 (locus Med tr6g094080) derived from phytozome v7.0 (chr-ID MtChr6; po s 20593658 to 20594028)
ttatagtgtttgatataaccatatcaggttcagaggtttttcttttccatcatgttttctttttttgattcctattttttgatgaaagccatatttcactaactatttatttctttcgtattatatatgcagctgagtctcttctctccccaatcttttgacatctcacaagcgcaaaaatgcctaggggccgcatagactgttctcaccgcttaggcctgtatcgcccacaacctcccaggcgcatatttcgtttgagaaaaaccaaagccacggcaagttttgcaattgctttcttttgatcctagtttcacaattttagtttctctaatattactatttaatccaacaggatttcgaactggcagcgt

SEQ ID NO: 30344 - DNA, 434 bp, Medicago truncatula
  Intron number 3 from transcript Medtr7g005860.1 (locus Med tr7g005860) derived from phytozome v7.0 (chr-ID MtChr7; po s 645044 to 645477 reverse strand)
gcactcaaactgcttctgaagttttatcagaagaagtattttttaagagaaaaagaaaacacaattcaaccccccccccccccccctcttgtgtttttcaccttcagttattacttgcttgattatcttgtttcaattgatagaaagaaaatcggatgataagggtaatataatggtggatggaatcatcacttttattgctaagaagtttggggtgagtgtgaatcaagggatcaagaggatagatgagaactattatctaaacttttatactactttgtcattccttaaaacccatgaccctactcacaattaccaatatgaaaggagaatcattaaagctaattgtttgattattctacctaattcggacattactaatccggaggtggtggaaaatttgctttatgttggtactaacccacaggtacaaa

SEQ ID NO: 30345 - DNA, 524 bp, Medicago truncatula
  Intron number 1 from transcript Medtr6g070040.1 (locus Med tr6g070040) derived from phytozome v7.0 (chr-ID MtChr6; po s 13107483 to 13108006)
caccaccaactccaggtattttattcctatgcatgttttttttttaacagcaaattttattaaaaaatctgatccctgcacaagacgaatagggactggtcatctaaaaactacaaaacaaagacatcgtatatagtatataggcggaacattaaaaaaagaaacacaaaaaaagacgtcaaaactccatcatctaacgaagacctaccttcaacaaccataacaaacaaccgccaacaccaacatcaccgcctaaatcaaaactccgttgcaagcgactactgaaaaacaaaagtccataaacatccatcgcttgctactcatccaaaaaaaaaaactaaaaaccaccccacccaaagaaaaatcatccctccaaaccaaacaacatcttgtcgtcaccatagttgagcccaatttgacagcactaagcgtctttttccaacgcatgtgttaatttaatcacatctcaattttatattcaatgattatttctatatttttcaactttcatgtaggtatacaat

SEQ ID NO: 30346 - DNA, 759 bp, Medicago truncatula
  Intron number 1 from transcript Medtr5g049310.1 (locus Med tr5g049310) derived from phytozome v7.0 (chr-ID MtChr5; po s 21059942 to 21060700)
tcaactttggcttgaggcagatttttatttaggtggtcagcatttgtagatagtttagcattaatcaacttgcaagagtggctgcttttgttatttattttcgctattatttgaagattataatttgaaatattgatgttgtgtcgttcctgctttgctttttcaatattctatatcatgattttttccaaatttgccaggaaacctgcgtcaaatcataaaggagccataagttgttgttactgccattgtcgcttctttgttactgtttccaaatttgccaggaaacctgcgtcaaatcgtaaaggagccataagttgttgttactgccattgtcgcttctttgttactgcttctctaaatgggagtcataacgtaaagttttttcaatcagattttgggtcattttcttcatggtaaaaggatcaaagagccaaatgtagccgagtttatattagccctagctggtgtaagcaaaaaaaaaaacagatggttatggcatgtgctacttcagcaggctctaccacactagctttagttgtcgttgttaatcaaattggtggtggctaagtcatttgcattgtcgcaaaccatgaagatctaagggcctaattcagtttcattgtcgcaaaccatgaatgagctttttttttttgcaaattgactgcaatcttaagagtctaacgaattaaattattgtttttatactacctttgctttggctattaaattctgcagtggtggcgtcgtctgttttct

SEQ ID NO: 30347 - DNA, 730 bp, Medicago truncatula
  Intron number 2 from transcript Medtr6g025490.1 (locus Med tr6g025490) derived from phytozome v7.0 (chr-ID MtChr6; po s 5739540 to 5740269)
gagttgcagtggtaagttacaacaatccatcaattatatacatatatatatagatatatatatatatatatattagtatttacattttccaaaaataaaaatacaagttttgcatcaatagtatttttgcttacaagaaaaacttgaagaagagaagatccaccaccctttaatatcctttacgtttcattgaatgaaacttacttactaaactcgattgttattaattagaatggttaaatacattcattagaaataactgtaagcttcttaaatttgagagtttctcaattctactctatagcaacattttaaaaaaaaaaaaaaattgggaatgccgaactctaacttactaggtcccttctcctaagaaccgaagagttaacaaaaaaaattagggaaatgggttatatagtcatactatataaccaattttataaatttaactttaatttaatatatatgtcgttcaaattaataaaagagcataaaaaacttgtatattttatttcataatttacgtttttttagtttttcttttcaatttaaaaaatcatactatcacaatttataacatgtatcatttacaatgtataagatcaattatgttatattattgatgcaaattaaggaatatgattatatattggtactatggttgcataaggaatatgattatatattggtactatgttatggttgcatattttgagtctttgttgtgtgcagg

SEQ ID NO: 30348 - DNA, 317 bp, Medicago truncatula
  Intron number 1 from transcript Medtr5g036490.1 (locus Med tr5g036490) derived from phytozome v7.0 (chr-ID MtChr5; po s 15218953 to 15219269 reverse strand)
taagcttagagtatgagattaaacataaagtatgtttcataaatgcaactgcttaaaatccatctacaacaattcacatccaatttatcagtagacacaattatacatcactaaatatgtagagaagtatgattttttttggtcaaaatttattctatttagaggagtccaaagaaaagttttgaatgaaatatattttaaggaaataatcttcaaatgtttggaaatatattttaactttcatgctatattataacttagtattttccttttgatttgcagggggttgaagcattttctgattatccaaagctcta

SEQ ID NO: 30349 - DNA, 574 bp, Medicago truncatula
  Intron number 1 from transcript Medtr5g048930.1 (locus Med tr5g048930) derived from phytozome v7.0 (chr-ID MtChr5; po s 20808170 to 20808743)
aacttaggtgtttccagactgttacttgctaccaggtccaaatctcaactcaatctctttttttctattttgatttttttattctttgctactataggtatgaaaatgtattttttatatacaatgatattaatatatgaaatactacaggaaaaaatagtgacactgacatatataggtggaccctggtaataataattttataaaattgaaataatttagtgcaactatatgtattatagttgtgattcttgatattataattggactttcaaaaatagtattataatatgattggcatgtgaatataagttgttcgtgttaagtatactaaatttgtctttttataatttagtgcttaaatatgtattagaaaagtaaaatcaatattttgctaagtataaaagttaaacattgcaatcatgtgattgctcaatttaagtggtgtccatttgaaaagctatgctttcttgatatgattcggtttactatttggagtttaatgttttctgaagtgttaaattggtttatgtgtacttggtttgattataggctgtggtcaacaacttggaag

SEQ ID NO: 30350 - DNA, 288 bp, Medicago truncatula
  Intron number 3 from transcript Medtr6g074320.1 (locus Med tr6g074320) derived from phytozome v7.0 (chr-ID MtChr6; po s 14440773 to 14441060 reverse strand)
tcctgtattttttgaacattcttctccaagtaatttctcagtaatcctttcggatataagttgtgctaatccatctattatagtctaatgataggccatttaaatataaatttttagtctctctttacctataggaagaaaaatgtgaaagtgcccggaatcttaaacccggtggttaattaagtttgattatagtttattgtgttttcataatttaaagattaaataactctactaagttgtttgtttgcagttcaggttggcttacattaatcctgagtataaggg

SEQ ID NO: 30351 - DNA, 778 bp, Medicago truncatula
  Intron number 1 from transcript Medtr6g090080.1 (locus Med tr6g090080) derived from phytozome v7.0 (chr-ID MtChr6; po s 18973678 to 18974455)
ctaaacataccaaggttggtaccttcttttttttcttcaaccctttttaatatttttgatttttttattattttctatctgggtttttggcttgtttagtttggttaatgtttttggcttttgggttgttatggttttagcttctaaattcatgaaaatatgaaaacaaattcttttatagcttttaaatatttatggagaatttttggaaaaaaaagttgagaatgttgctagattgagatatgaatatgattaggaatgataaaattagagagaaggggagaattagggtagcatagaactattgaagaaaagatggtggaaactcgactttggtggtttgatatgtggagagaagacttatagattctttcgttacatcggtagattagatgaagggtaatcaaatagctagagacatatggagagattaggaagggaagggaggacttaattttcatttttataataaggacattataaaatgtttttctaaatcaattatgtgtgattgagcttttatatgatcattaagcatgaattttttttttttttttttttaaataccagacatatatcaaaatactagatttcataatatgatcattgagctattgttgactgttgctttaggatattatgataataatacgattatttaattcgtgcagttgatctgccaatttggaaaagtgcttcattgttttgttttgtttttaacttttttgtgtgactgtatgcagatcttagaaggacttcttaagctacctgacaacag

SEQ ID NO: 30352 - DNA, 330 bp, Medicago truncatula
  Intron number 2 from transcript Medtr6g090080.1 (locus Med tr6g090080) derived from phytozome v7.0 (chr-ID MtChr6; po s 18974462 to 18974791)
tgcagactgttggactaagtatacacttttcacaagccactgttttattttaactaagaatatactttgatgttttcttttcattaagcttaaactatcacaatagttcattcttaggttcttttaactaaggtcttccgattcacaatttaaatctcgaaattatgagggaaagcaatacatttccgtttaatatttcaaccatattatatgtttcatggttcattgtagcagtgtaaagtttaggatttgattttgcaatttatttttatagaaaattaatgtgatcttttcgcggtttatgaaattttaatatttcagggcaccaag

SEQ ID NO: 30353 - DNA, 948 bp, Medicago truncatula
  Intron number 2 from transcript Medtr4g141020.1 (locus Med tr4g141020) derived from phytozome v7.0 (chr-ID MtChr4; po s 34711916 to 34712863 reverse strand)
gggaagaagtccgtgaagaacagtcctaacctaaggtaataaaaggaaaatactatgtataaacttaattttttacaccttaaatttcattttgtatttgaacaaagtagcattacggtggagaaatatcttgcatatttgaaaattatttgaaactctaacaatgattgactaagaatgattgacgatgttaaatgatgactcatttgaggttgaatctgcaaaaagaacgaagaaaaatgaatataagtattactttaaatttaacttatatctttttactactttcttttaatttgttaattagtttagtaattagaaattcaattcttaacttagtctaatttaattttttatgtttatgactttgttgaaacaacatgaattaatgttccaatagtaagaatatggaaaatcctaaactttttatttaaaaaagcgacgatatttattgtgattagtgttttgaatgattttcaagcatcgtttcatcacagcaaacatgtcatcaattccttcaataagtttcacgtttaaattatttatatttgaaattttttattagtaaaatattaattactttttttttactactattcaacataagctttagaaatttaacttaactaagctacttaacttttagttaaactaaccaatggatagggcagtatttcaggtagctagataatgttgtggctgctgggcatagtgctgactaatagcttgagatagggactactcttgtcttaacataaataaattagttaggtttgacaaatggaccctagtttgaaatttcattaaagctagctagatgataaaaaacgagatttggctaagcattctgaaatacaacaacataaaaaaattctttgttttgactttatatattttaacaagctaaaatattgaattgaattaatgatgagacaggaactactacaa

SEQ ID NO: 30354 - DNA, 568 bp, Medicago truncatula
  Intron number 2 from transcript Medtr5g098750.1 (locus Med tr5g098750) derived from phytozome v7.0 (chr-ID MtChr5; po s 39427586 to 39428153 reverse strand)
tctcttccagtttccaatccaatttcaaaggtaaaccttcaatcttatgacttattatcattcattcattctctctaaacaaatcatttcggtttcttatttatttaatcaatgctatcattacattcttcattattatttactcaaattcaataatgagtgactgagatcaaaataatgtgttttatttggattggaatattttgttatgttgtgtctttcagttgaaatatattgttaattataatcagatatatcaggtggtgttgaaactcattaaccatcgatataacttcagtaatttcgtgcctaacgaagttacattgattgttaatgagttttaacaccacctaaatgtaattagccatatatttaaactttttaaccacataaaatagttcttgcaaaagcgaaagttgtctgaaattggttgttaaaaaattatttctcattttctatttttctacttgattaggcttgttctgttgtgtcgtgtgtaatgaatacttactatagctatgcatttattgtttgtgatgtttcagtgattttgtggcattttaagtag

SEQ ID NO: 30355 - DNA, 685 bp, Medicago truncatula
  Intron number 1 from transcript Medtr5g068170.3 (locus Med tr5g068170) derived from phytozome v7.0 (chr-ID MtChr5; po s 24349129 to 24349813)
agaagttgttaattggttagattctattgttcaaggtcagtttcatttctatctttttgttttgtcaactttttgatctgttttgtttgttattcgttaattcgattcttaattcatgtttgattcatagcctttttcatccttttcttaattaatcttaaaaaagtgttttttttcaatgaactctgagatttgttttgtttatttttcttaattttcatcttaattcgttagttcgagtcttttattggttcaaattaatatttcttttgttttgtgtttagtgtttattgttttcatttttgtttttgtatttgtaattggtctgttttctagatctctcgcgtgtggggtttttggttttttatcatggttttgtgtcactgattttgatttttgtttttgttttttctagatctgaaattgttagcatatttcgatttcaattttacctttgtggaccatataaaaattttctttttaattttgtaaattagtgttttcattggttaggtttcttgtgaattttgttttgatgtgccttgaatctcttctcatattaataccactgatttttttttttttttgtttttttttttttttggataatattcttttttcaatgtaattgaagttaaaatttgttcctgtttgcctctgaaattttcagattcttcttccaggg

SEQ ID NO: 30356 - DNA, 807 bp, Medicago truncatula
  Intron number 4 from transcript Medtr5g007210.1 (locus Med tr5g007210) derived from phytozome v7.0 (chr-ID MtChr5; po s 1017389 to 1018195 reverse strand)
gtaagcctaatatctgcaacaattggtcgggttcaattttagggctaggtgagttttctgtgggttacaactgatgcttattgagatagttggaagctgttgtttgctcttgcattttatttgtgttttttttttttatcgttttttatcatgaatgtcataattaagagttaggttatagatgaagattttaattttgaatttgctaatgattactataatgagtgttataaatttatatgcttccttcttttgtttagttgaaaaggaaagagaataaaaatgggaattgggagagcttatggaaaaagcttttgacatgttcataagctatttttcagcttctttcaataagctctccttgatagcttatgaaaatagttgattttattttgtctagaagtcctagctcaactggcaaatgacgaaattgcaaggccggacgtcgtgatccgggttcgaacccgggacctcacaattgtgtgtgagtttaatttcagtggcttacaacttcatctaaaaaaaaaaaaaaaaaaaaagcttatacataagcgcttatatgataagtgcttaactatgctgtttatacaaagagggcctaatttggctgttctacaatgcttaataaaaaatcttgcataatgacaatattttttatatttggcccaagttgaatgaaaaaactatgtagtatttctcttgtcatataattttgtttagaagataatatcatagaataccaataacctttgtcttacattttcttccacaggagagtataggtttcatattttcaatctgctcagt

SEQ ID NO: 30357 - DNA, 960 bp, Medicago truncatula
  Intron number 1 from transcript Medtr5g013760.3 (locus Med tr5g013760) derived from phytozome v7.0 (chr-ID MtChr5; po s 4217039 to 4217998)
ttaggacttcattgtgagtattgtacaatcaattatttcagtgtttttatcttctcaatcactatatttattatactagatcaactgtattgattttaatttaattcaataactcagatgtggatagtctccattgatgttttattagagtttgcaatgtgtcaatgtgtaggatattttaatgagccagtgaaccttttgtttattggatggaatggatgctagcaaaacttcagcaaatatgtcttcatatcatgagtaatgttcttggtcatccttctatcagttggcttctttccaccacttgggtttattttttgagaaggtatatgtttctatcatttttatttagaaattaggaattgacattctcaacaatggaaacttcctttgaacagttatagtttagttatataatgacagcatgtatgaaggtagatagtaattttaaaaactgtgtggtttgttttgttctctatttgttgatattgatatgtttctttgcattttaaagaacttatgtttgaagcatttgacatgaagtgatttgattgattttttatttgtatgccatgacttgctagcaagattataaaaactatagtattggtttgattgatttagaatttgaaattgtctcaactccttttgcattcttcattgcctaaatgtgtgtttaagtaattgttttgttcacatgtctaaattgagcaagtaatttttatatgtaaaatatggccaattaattgattttagaacaagtagcagcaggtctcttactagaaccaggcaggggtgcaaaagttgctatagtataatttagcttcatgtaatgattaagaatggtaattgaaatgatgaccatgctattatacattttaaaaatataaaatctaaattgcagctaagttttctaatgtcacgtacagtcgaagagagtctgagcagcttgaagttaca

SEQ ID NO: 30358 - DNA, 437 bp, Medicago truncatula
  Intron number 3 from transcript Medtr7g005000.1 (locus Med tr7g005000) derived from phytozome v7.0 (chr-ID MtChr7; po s 78490 to 78926 reverse strand)
agcgcaagttatttattctatcattttatatacataagcctatgtaagattttctttgaaactttgtttttgaatattttttcctcactttttaccatcgtttatagaagattttctaattaactttgacatttgtgtagtggacattgggtgttatttgtcattaatcccatatcggaaatcatatattatatggatccattactcaatgactatatgaattacccaaaatgaagagtatgtttgacacgtaagtgtatatatatttatatacatatatacatatatatatatatatatatatatatatttatggtcagttgttgtatatgaaaactatatatatatatatatatatatggtcagttgtatgtaatctaagtttacatttatattttgtagagttctaaaagtatttcgctctgcaagggacgctc

SEQ ID NO: 30359 - DNA, 798 bp, Medicago truncatula; identical to SEQ ID NO: 27876
  Intron number 2 from transcript Medtr4g109360.1 (locus Med tr4g109360) derived from phytozome v7.0 (chr-ID MtChr4; po s 24448654 to 24449451)

SEQ ID NO: 30360 - DNA, 283 bp, Medicago truncatula
  Intron number 1 from transcript Medtr5g106410.1 (locus Med tr5g106410) derived from phytozome v7.0 (chr-ID MtChr5; po s 42796689 to 42796971 reverse strand)
gatcctttgttgtcaaggcagctgctcctgtcaaggtttatctctcactcaaatttttcttaattatatgtttgctttttattaataatagtgtctcagatgaccatattacaaccgattctttctatgtctcttgaggttacaaagtcaactctaaccactgaactaacgcctctttgacaagtatgcatgtgctctgaactatgtttatactaaaaataactttcttttctctttttggtgttcagaaaggtggtgcaaatagacaattgtggtttgcatc

SEQ ID NO: 30361 - DNA, 746 bp, Medicago truncatula
  Intron number 1 from transcript Medtr6g031160.1 (locus Med tr6g031160) derived from phytozome v7.0 (chr-ID MtChr6; po s 7128791 to 7129536 reverse strand)
tatattaaggtgctgcaactcattaacaattccccgtgcgtaatttaactatgattttgaatgtcattagccacaattttcaagtgcacgcatatctgttaatcatccaaattatgttcaatatatgtttttcaggtgttcaaatatacatgatattcattgatcacaatttgtgttcaaatatacactttcatagaccctttctgggctgcatttattaactttagctttatataattccaaaatacagaaaaatgtatactatgtgtttgatggatcatttatgagttgtggtatcttgttaattcattaaccataaactgaactgcgttaaccacatatttgaactgcatcaactatttaatttgatgtcaattttttatttatcaaaatatcatttatctgccttaatacatacttttacatttcatttttctaaagttgtataaaatataaggtggttactactctttgttttcaacaaagtttccaatcacggactcatggttgcttagtagttcttcattttgcgaagaatagtggctgatgtgtactttgtggcttcaactgcggtcattaatacttcaaaatactcgttgttgtagccaagatcacacttaaaaagccttttttaaaaccatgcttattgattaatttaacatcttgcatttagagaagatattatttcatttttttttctatttacaccaggttcttctatacacagattcaacgtctatctgaac

SEQ ID NO: 30362 - DNA, 680 bp, Medicago truncatula
  Intron number 1 from transcript Medtr4g142830.1 (locus Med tr4g142830) derived from phytozome v7.0 (chr-ID MtChr4; po s 35675616 to 35676295)
cagtcatccaccgtgatttgactgagattggggttgtttgaatctcagctatgtaaatgattctgaatcttgaaatcgattctagctgaagcatcattttgtaccttttgcgtttcccttaaatcaattctaaagtaacctcaagcaatatgtcaattttgccctctttaataaaaggaactttgctgtgtatagtgacgatctcttccttccttcaattcatacacatcagctatcatgtcattttcgtattgcaagacagtaagtttttgtgtcaatgttagagaagatatgactccaaagccaaagaccccccccccccccccccttttttttgttcaaaaaatttggaagtccttatcgttatcccttatttaacgaatggatcacccctttcatttatttaataaactaaaccaaaataattatagatgttgaatcacgaaaacatgggaaaagaagcataataaaaagtgtttttacgtccttaaaaaaatgcttttaggccccgtttggattggcttattttgagcttatgtgggcttatctactctcataagcctttttaaaggtgtttgggtaaataaataaaaatggtttatcatagcttcataagctgcttatgccatatttcaataagcctaaattttcagcttaccctccggcttaacaaggagctg

SEQ ID NO: 30363 - DNA, 672 bp, Medicago truncatula
  Intron number 1 from transcript Medtr4g029450.1 (locus Med tr4g029450) derived from phytozome v7.0 (chr-ID MtChr4; po s 7040745 to 7041416 reverse strand)
gttctaaacccttaaaggttttgtgatatttcttccaaagttttaatctttttgtgattattttctgtgggtttggtttgtttttgtgaattgatttgacccttttttgtgaatatcttttgtgggtttgttttgtttttgtgaattgttttgaactctgaagcattgacatagacaccagatacaattttggcacactgacattgtaattgaatataatcaaatgtgtacgacattggcacggataggacgtgctacacgtctttgatcataagtgtctgtgctacagaggttttgactgtttttgtgaatatcttttgcaggtttgctttgtttttgtgaattgttctgaactatgaagcactgacatagacagtagatacgatgttcacacaccaacactaattgaatataatcacatgtgttggacactgacacggattggacgtgctacacgtcttcaatcacgtttttgatcataactgtgtgctacagaggttttgactgttttagtaaatatgttttgcgggtttgctttgtttttgtgaattaatttgaccgttttttgtgattatcttatgtgggtttgatttgcttttgagaattgtgttgatccgtttttggttttgttgtgtaggttgcgggaagggcatttcagattgtgtttaattt

SEQ ID NO: 30364 - DNA, 640 bp, Medicago truncatula
  Intron number 1 from transcript Medtr5g101510.1 (locus Med tr5g101510) derived from phytozome v7.0 (chr-ID MtChr5; po s 40626500 to 40627139)
cttcctgtttgaaggtgcctacctactttcgtcctcctttttcttaactttttttactggttttgactttgttgtgtgagttgagaaattatgaccttattttaattaggaaattgttgaattgtaaatagcgaaaaagcttgcctagaattaatatattttgctttcggtaatagatgaggaatgcctcttttaggcaaaattacaatggcaccatgcactgtggcccttataaaataaccaaattaatttttataatacacttataaaataacttatgatatctcataaagacatttctagtttgcgagtcttttctagtggcatgggattgctaaagtgtggatagcttcacctgttcttctggttgatcagaatttatctgtgtgaaaggtgtgacactgttttgtatctggtgtgttataaatcatttatagctctttgatggttttggctggaaataaagaatgattgttgtcgctaaactgaaacaaatttgatgattgcggatctaatgctgagtttatgtcatggaatgtgttctgctctggagcactgttgtgtcctgtgccatgttgctgattttgtaaattggatgttcccagttgatataccttggaggattgggactctggtagtt

SEQ ID NO: 30365 - DNA, 680 bp, Medicago truncatula
  Intron number 1 from transcript Medtr5g083940.1 (locus Med tr5g083940) derived from phytozome v7.0 (chr-ID MtChr5; po s 31903490 to 31904169)
gtaagaagcgcgggtgaattgatggggtttttcttcttctcccatttttctctgaacctcgttattctcttgacactcttcgctttttcactcgctgacaatgaataattccctctcataattttataccgctaattcatttttcctagggtttctaacaaattttgtaatctgtgtaatgtagtaacatgatcacattgcatatggttgattccattcgattattcaatttgttaatgtcatgtctgagtttagtgcagtgtaaacctggtacagttgttactggtcctgttctcttgcataaattatagttgtgtttactggggctacctttgttttgctggtgttcattttttaatattgctgatataactagtcctttcatatgtgtgacaggtattgttaggtcacttggatcataatctaataaactgtagatcacaagtattttgaaaatgtaaattagtaaaaatagttatcttttttaaagaaccatatattgttaattgtaactattctgaaagttgcatagcttggtaataattttgatgaagttgcacagtgtggtccaaatcattttgtttatttatttgattgtattatgaagttgcccctatttatctgacttttttgcttttctatcagagcactcttgatacacctcttgcaattggagcttt

SEQ ID NO: 30366 - DNA, 816 bp, Medicago truncatula
  Intron number 4 from transcript Medtr5g028980.1 (locus Med tr5g028980) derived from phytozome v7.0 (chr-ID MtChr5; po s 12008811 to 12009626)
cctgtgcatccggatcttttagtgattgggctttggtttgggcttagttttcctttacgtttttttgttttttctgctatttgcactgtttttctttgctatttgaacctatgtcttgatttgaaaatcttgataaatttcctagaaaatccatgcttacttcttgacattttcttgatgttttatggcatttttgcacgctggaattggcaaaattcttgtatgattaatccatggcattttaattctttcttggattatttcttatgattgttttgtcaattctatcattgatttgtgaaaatgtgataaaggccatttgatatgttaatgtgaggtgctcacacctacgatcctatcttgattttgctgttttaaatggattcatgaaaccttgattgtatgagcaacgtatgcatattctagaaagtaataagatgctaattctatctcaaaattggcatgaaactaagcttgtttgtttctaatgatcccataattatagcttgagataaaagaaactatttcaaacttgctatagcatgagaattagaagctacaaatgccttagttcttatatcaaaattttgggtttttattaccattttattactatctttatggcattttatgcgtctttgcctcttgctactctttatgctttatttcactaacaagtttatttccatgtttcatgcatcccatttagcattccctccactttctttagcctagcatttatcttttgcaagttttaattcatttggtaatgtaatttgttatcattggtttgtagcttggcaaaggggccataga

SEQ ID NO: 30367 - DNA, 984 bp, Medicago truncatula
  Intron number 1 from transcript Medtr7g009080.1 (locus Med tr7g009080) derived from phytozome v7.0 (chr-ID MtChr7; po s 1524539 to 1525522)
ttgtgcagtgagtatgatctgtatcctcttctctaaaaatttgttaacaagttttttctttcgacctttatctctgtggtagaaatcccacatcgagtagataaaaaagcttgatgtggtacttaagtcatgagactcttccacctaatagactagtcatttggattgagctctcctcgtgagcttaagtgctaacactctacaggaaaagattaaatattcgcgacttgaataagacaatcatcacccaaattttcatttaaagttgaaaatttatattcataaatgatgggaaataatttaaaataaggaaatagtgtttacgttgttgacttagatggatgaccttttacttaccaagtagaacttgtgttcaaaattgaatttttacacgtgtgaactagctctctgaattctatagtcgttttaaaaagattaacgaacgaagatcaaacttgtttttagaaaagcgaacaagtttacacatgtgatcacacaacttctaccgttatttacatcccaaacttctctcattcaatcattgatttatgacgatttaaatgcttgaaatcctatttaattttgttgcagtttttttttatttttcgattgaatgagtaaaatacgaaataagttaaggaaaaagacaacgtgtattataccctaaaatatcaaattaagacaatagaactattatcataatcataaactattctttttgaactatatatacggatgtaacagttcagtttggatccattttcaataaaaaaaagtttaacctcagcagtgatgttgaacgtcggtttaagttatatatgtggttgacgactagggtttctttttttagtagaaatgaaatagagtctgagtgatgagatgagatgataacggaagaaagtgaacatattaagtagtattttatgttgggctctaatttcgacctaagcacaagtgtgtgcgaggaaggataatattagtaaa

SEQ ID NO: 30368 - DNA, 492 bp, Medicago truncatula
  Intron number 1 from transcript Medtr5g024200.1 (locus Med tr5g024200) derived from phytozome v7.0 (chr-ID MtChr5; po s 9575499 to 9575990 reverse strand)
gttgttcaaatatcactactcatttgtaaatactttgacatcaagtccatttgcattgtttaacgaggtattggctactttggtttgtctgaatgctcgcccaatttttttcttaattaaaaggtgtcttagaaactttttgtaaactacatttgatttcgattctcaagcaatatgtgactttgtgcgatttttttggtctaaatgcaagaattaaagggcacgtgagcttagaccccagccttgtgtgtcattgttctgacctcaaatatgataatttatgacaattattcatctacttgtcatattttttaaatagtttagagacaaaattgaagagagggtgataatttagatgttaaattgatggatttactcaaaatctcatattaaacagagaactagaaaaagtggtatttcatttgcagctagaaaacaaaataaaaaatctcaactgtgtattttctttgcagccgggtggaaattcatcaa

SEQ ID NO: 30369 - DNA, 726 bp, Medicago truncatula
  Intron number 2 from transcript Medtr7g029560.1 (locus Med tr7g029560) derived from phytozome v7.0 (chr-ID MtChr7; po s 7479820 to 7480545 reverse strand)
agtagctaaatctcctttgttgggattagaggtacttgatcttagcttaacatgtaatcctttgatctataaatatatgattctagcatttgaattgatattgatgttattcttgcactttattgttcatctttgatttaattgtgattgagaaatacttttaaatctaggtttagaataaccatctatcaaaacataggttctagacatggaatcgatgttttgataatcaccttgtgtatccaaacctaaagctttcttatcattcaatagattgagaaatcatcgattgaacgataagatcgactcttgaatcattcaatagtttgagacatcgacgattgaatgatacaattgatttcacaatattgtttggacacgaatggtgttgtcgagggatacgtgataatatcaaagaaaagctagaatccatgtatgatcattagggtacgtgcgacgttcgatcaaggaactctaatcctaacaagatttacgccctattaatctcaattttatcatttgcaatttagttactaaaacaaacaaccaattatcttttaacttagaatgatatttggtgtcgaacggtccgcgatatcgcactagtccctgaggagacgatataaatacttacaattattttgatgcaaaaatactacaatttgaaaatcatgttttatactgggttactcgccacggcgagtttgtctgctcgctaggcgagcc

SEQ ID NO: 30370 - DNA, 945 bp, Medicago truncatula
  Intron number 1 from transcript Medtr6g013670.1 (locus Med tr6g013670) derived from phytozome v7.0 (chr-ID MtChr6; po s 2964833 to 2965777)
gattcatcatttttcttcttaggaaccagcttcaagttcgtttctctctcttcaattccttattcatctatacttttagctaaaatcttcgcaatcttaattttttttttattttgattttttaatggttgatttatgttggtaaatacttattttaatgcttaatcgtgtttttattttgctaattgttaaatagaaaagtcattttgggttgtgttaattgtgcttgtttaagcttttctaattaatcagaattttttttattgattataatgtgaagtttattttagtagcttctgaaaaaaaatctgattttatagtgtgtaagatgagaattttcactgttatagacatacttatatttttggaatatcagatactaaaaaacaattttcttattcgattgagaaactgattttagtagtttctgaaaagatctgattttaaaatgtgtgaaagataagaaagaagacaaagacaatgattttgactgttatcttatacatacacaaaccagcttcagcttcagcttcgtttgttgtttagtctatttaaatattaatcgtaatcataagcaaacagaacttggaaataacttttttaacttgaaaatcattttaattgcttttaattgtgtttggttaagctttttctattcatctgaatctaaataaaatgaaaagctgatttcagcagcttctgaaaaatgaatgtatatgttaatatgtagcatctgaaaaatgagaaactgatttcagtagcttcctctttgattttaaccaaacaatctttttgattgcttatatttgtgttttgtagaattattcaaactatgatttttaaatgtgtgggagataatagacagataacaaagtgattttcagtggcttctgcttttgttgtatttgataagcacttgacttaaacaaacagatcttatatctg

SEQ ID NO: 30371 - DNA, 695 bp, Medicago truncatula
  Intron number 1 from transcript Medtr4g104600.1 (locus Med tr4g104600) derived from phytozome v7.0 (chr-ID MtChr4; po s 22905823 to 22906517)
ggactctaagatctgcagttcatacccttgtttctgttagtttcactttctccttcaaactttcatttttattctatcattgtattgttttttcgatcaatttggtttgataaacaacttaattaaacgcttatagcataaccacttattataagtacgtatatataagttatttctacaacaaaatataaaatgaagtcaaacattgtcatgtactagctgttttcagaagctattctagagaacttgtgggaataagttgaaaacaacttatagatattcgataagctcaaatataccaatccaaacagaaataagtttaaaacaacttatagacaagtcatgaggtgttaccacaagctctttcaaacaatctcagaagtacttatgtcagttgatagactcaaatataccaattcaaacagacctttatttgaactttttatgatttacttgtcgaagatatgtgatcttatggttcaatttgtcctaaaatttgaaagtagagtagttattgtcatagctgatgtatcatgaattggcctaattctatttcaagtagctggtgtaagactataattatgtatcattcatttatatgcatgtttttaacatgatagtttggtttgcatgatttgatctttaacttcgaaaggggaatgcaggggagaataaagatttgtgaagggaagaat

SEQ ID NO: 30372 - DNA, 801 bp, Medicago truncatula
  Intron number 2 from transcript Medtr7g070870.1 (locus Med tr7g070870) derived from phytozome v7.0 (chr-ID MtChr7; po s 14452088 to 14452888 reverse strand)
aggtgttcaagttaagctcaccggtggtagacaaggtaacccatttttagggtttcttcttcttcttcttttaatttgacatgctaataagtattagtctggattaacttaatgattatttcattttatgtcaaattatttggttttgttttgtaccaattttgttattatatgaaaatgaaactagtggtttcaaaatatgaatttatattttcttatccatagttaattttctttgttatctcttcgatgatttgttttaggccaaagagaaaaattattaagttaaggtttgttgtggcaagtgtgtgtgaggtgagttagaaaacctacattagatagaaaagtgaattttgagtaatatataagtgagaggacccataaacccaatggtgaagaacttctcattagatcaatttcaaggtttgtgtgataaagggagagtcgttgttaacaaccttagagtgatttggtttgctggcatttggagtatgtatttggaaggcaaggaacaataaattattcaaaaacaaggaagttatcttagaaaacattgccgaatcggtgaaacggtgctcggggaattggttgagatttaagacaaacagtatggaataccgacttgaatcaatggtatgtgaaccctaaagcttgtcttggatgggtggattacattgagtgattttaggtggacgttgtgattttggagcaggagcatcttggtgctagagctaaaaatggtgttcatcaacaccccgtaggaaaggaaagtaagcatatttgctagggtttggtacaatt

SEQ ID NO: 30373 - DNA, 469 bp, Medicago truncatula
  Intron number 2 from transcript Medtr7g014800.1 (locus Med tr7g014800) derived from phytozome v7.0 (chr-ID MtChr7; po s 3555280 to 3555748)
caagaagtgaaatcaagaaaattacaggaacagtatatattatcgaaaccttcatgtaagtggtagtaacttacacgtatataggactaaattttgttatcatttttcttcagacaaagcagctttcgtcagggtttgcaattgaaattattaacaaaatgttatttcaaacaccaacacgaaattcaagtggtgagagaaagaaatcaaactcaaatggaaaaaaaagatgactaatatttctattaagaaaccaaaatacatcgcgagaaacattcctagctaaagtatactggtgaatttacattgttacaaaaacttaaatccatatgttttgcttcatggttgttatttcatttacactatatatgttgtatggtacttagacttacaatatgtatgttttataactgaaatctttatagatgtttattgttgtagggtgcaaaactcagctttcgccctacta

SEQ ID NO: 30374 - DNA, 545 bp, Medicago truncatula
  Intron number 1 from transcript Medtr5g016790.1 (locus Med tr5g016790) derived from phytozome v7.0 (chr-ID MtChr5; po s 5969507 to 5970051)
acaaagtggagcacacagaagaaataacttgggaggtggggtttaaccaaacaaacctctccagagggtggtttacaactcacaaagcttagtgctttgagtaattgcccataaaaactttatatttctttattcacatattcacataaagaattcaattattatgtatagtttcatttacataaatgtctagttattataaccccaagcacgtacatatttatacacctactattttctgaaataatattttcatataataccacggtgatttttttaaaaaactatatatttaatattgttggatatttaatataacaaaatcaaacatacttcacgtatgactagtaaactagtaattcattgagtcggataaaaacataataaatatgaagtttattcttcaaatccaaaacttttaattaagcgtgaagagatctcaaaccagtttagtagatagtaacataaaataatataaatttttactccaaaataataaacccaattacttagatcaaatttctcttgcacagtaaaatctgttc

SEQ ID NO: 30375 - DNA, 709 bp, Medicago truncatula
  Intron number 1 from transcript Medtr5g101290.1 (locus Med tr5g101290) derived from phytozome v7.0 (chr-ID MtChr5; po s 40535539 to 40536247)
cgggattggtggcttcggtggtttattccccccttgtaactcatttttcttttgaacttgtttctaacgtaagggtatgtttgaatcggcttatttcagtttatctattcagcttatgattttgtcacgagttgactaagatagcttataaaaacagcttataggttgtatgagacaaacttgactctttatatcttgtattatagaaatagcttatctataagcgcttaattaagctatttggattatcaagacctcaagctgagattcatagcttttgactctagaattgaattttagtaaattgaagtcattttttttagaatactattccaacatacccgagtggcccactgtagaaatgttttatgcaattccaaccatgaaatttaaagattcttttcttttagactttcctgacattaaatttcgggattaaaggtacttttggtccctaacatttgggcaaatcacctccctgccacatcatttattttgtacagttaaataacacgaaagtctaaaagcaaagaatctttaaattaaaaggttggaatctcaaaaaagaaaattacagaggggtaaactggatttcgatcaaatgtcggggggcaaaaatgtatttaacccttgtttgtttagttccttttaattggatattaatttgacttgttttgcgcaggtgattcatatctcgttgctggtgctg

SEQ ID NO: 30376 - DNA, 559 bp, Medicago truncatula
  Intron number 2 from transcript Medtr4g029220.1 (locus Med tr4g029220) derived from phytozome v7.0 (chr-ID MtChr4; po s 6928456 to 6929014)
atttgtctcctcaagcatctgtcttttctgataaggttttttattcaatttttttaaagcagttcacatataatttctatgcatcatttgtcgcaaccacatcgttagaaacctcgaccaaaacacgcttacaataacatataattttgatcttaacctaaaaggacaagttttcatgtcaatgtaaagacctagagatataaatttagtttaaggaagtcgtaatcaccttccaaaggtatattaaaattgaaatgcacaatttttcaagttttatgagtttatgtactgatttatattactaaactggtctttgataatgatcttgatacattgattttcttttcaatttaagagtctttttgaagttgattggttcatgtgatttcataaccctgaaactgaaaataaatttgctaatagtctccattgccaaatagaccctattcatatctggattgtttttagtaaaagctttgaattcggaaagattggtgatcattttgaatttcttattatgtcaggcaagagagcttatttcaaagttaactaaggagag

SEQ ID NO: 30377 - DNA, 1015 bp, Medicago truncatula
  Intron number 1 from transcript Medtr5g073810.1 (locus Med tr5g073810) derived from phytozome v7.0 (chr-ID MtChr5; po s 26567084 to 26568098 reverse strand)
tgcaaagaaaactaacaaaattttagaagactacagtaccaacttgaatattcatttcaatgttttcaaaactagtaaataggatattgaacggttgagaccatcagttcatgattcaatcagttcaattatagttttttttattggtttattttatgaaaaataagctcaattatagtttaatcaaataattaataaataatagatattaaaaattcaacaaaaaaatggttgaaccaattataattcaactccaattcaattcgacttgaacaagattgaaccaaccgacgaacaaaccaattttcgattgtaatgattaaacttattggtttagtctgatttttaaaacactaattgatcttcaattttagtactaaggcgtggctaaagctggatgaaatcatcttgaaaattgttacactggctcctatttatctcatttattcattatttttgtcaacaacaacagatgccaacatctgacaaatcattaagctcttgattaagcttattgatgaatataaacttgtttgagcccctttcctacgagtcaagatcatctccatttatattcctctgtatttcttccatattctaatgatgttaatggtttgccttgaaaaatgaggaactgatgatggtgatagggtttcttcaagaaaatcattttaaagcttattactgaaagtactatttttcacattaaatcattttctacttttactaaataagactgggcagcagagttcggatctaaaagtaaaatcccaatatcgacaaatcaaagagagcttaattttccccactatagttcttaaacagaaaaacccaaaatcattttttttttacagattttttaccctctcaaggttaaacaatccgaaggtgtaaaagttttgaaaaaaaattgaattgagcattttaaacctcaaattgtagaatccgaacaaatttcatccggttatattaactggaaggtcaaaatttgcaacaaaagaaaaaaaagtcggaa

SEQ ID NO: 30378 - DNA, 554 bp, Medicago truncatula
  Intron number 4 from transcript Medtr5g106640.1 (locus Med tr5g106640) derived from phytozome v7.0 (chr-ID MtChr5; po s 42905447 to 42906000 reverse strand)
caaccagtggaggcttaaatcaacagagaacaggggtaagctaagcttctttattaatgaactgtggcatttgtttgtttttgcaatccttttgatcaaataaataaatataaaggaaggagttcagtgaggttaaagtattacttggaatatgtatatctttctttatgtaaccaattttttttatttaagcatgaatagttcttccatttcattagtagacataattgcattctgagtactaatataactatgctgcaatctaaaacatgtaatatgtaatatgctataactttatttcatagagtgggaccctggtcatttgcaaaaaagtataggatgaaatttctacccaataattataggtctgcacaaattggtgatcgatatacagattttgtatgtgccgttcggctaaaaaaactcaattaggattttctcaatcgaatttgatgaatgattggtgatacaaatatgaatgataaataatgttatgtggatgcaatatttctggtattgaaaaaatacagattgtttgtgggtgcagataattg

SEQ ID NO: 30379 - DNA, 671 bp, Medicago truncatula
  Intron number 1 from transcript Medtr4g137070.1 (locus Med tr4g137070) derived from phytozome v7.0 (chr-ID MtChr4; po s 33656024 to 33656694)
acactactctgattagtgcatcactgttgaacacagttccgtaaagttcttcagttatcttttcacagtttatgtttgtgaaacttgatgaagttaacttcctcatctggtgccaacacatcgaactgatgattaaatgttcctatctttgatccaatcaactcttttgtctttgatcttctccaaagtccttgaatgtatccatgcttatgatgtttgggaacgaacccacactcactttcatcatgtgattcacacaagattgctttaattgtgatttgaggctgcagtttttccaaatacctaagcgttgtaagctctagaccatatttctagctaatgtgagacttaggtttttcccaatacttccatgttctaactaaaatcatgcttttggcaaccctgttggatggtttgttttaggtgctaattgtcacagtcacaggagtgttgtttactgcaattatcgttcaagaaactcaattgagtcgtttcatttaattctcgtgtttcttttcatgtttcttgattactttctttatcttggttgttcttttcaatgcatacatacatttcatgatgatgcttgattaagtatttgtttgaagtttacattaattgctagtagtatattatttttgaccatctcttcataatttgttgtcttcagt

SEQ ID NO: 30380 - DNA, 530 bp, Medicago truncatula
  Intron number 2 from transcript Medtr5g099140.1 (locus Med tr5g099140) derived from phytozome v7.0 (chr-ID MtChr5; po s 39628635 to 39629164 reverse strand)
agctcaacattggggattttgaggtaaatttttataacattcctgcttcaaaaagtattgtagaattatttaattagactgtttactgagttcatgatttgatatttccataactgttattttcatggtcagtctaaacgtattttggcgagcggttattaacatcaggtcatcaaactacctgctgattgatgagtttttgcaatgtcgtgctaaatctatttgattttaatcaacctatctcatgcgctacagtttaaccttgctatcaagccattgttatctgatgtgatctttcaatgatcttgtttagtgtgactggtttgctcataacatattatttgctataatttaaccttacaatatcattcatttgaatgtgtctggtgattcactgtagttttccaatttagtggttaaatttcatattcaataatgtattcagatcattgtgtgtgtttccttactatctttcttctgttgtaatttttttgtttcgcagataaagttaaatcatagaaagttactgg

SEQ ID NO: 30381 - DNA, 393 bp, Medicago truncatula
  Intron number 1 from transcript Medtr4g095970.1 (locus Med tr4g095970) derived from phytozome v7.0 (chr-ID MtChr4; po s 20097449 to 20097841)
actctgcaagtttcacaatttcgatttgttcgaaggtaaattggatttttcttttcaatttcttgaataagtttctttgttgagttcatttttgttgaattttttgtataacttcgattttctgctagcatagcataggtttattaatatctgctgaattcaatcacaatgaaaattttgatttgaatttccataaaacacaattaactaatgcgaatttgatgatttagtagtgatttatgtgtgttaggtaagattaagaacatgattatgcttttttttttttgcatgtatatgttaggtagttgtgatctggttttgattgtttctatctgcatctgcatgtgatgtttttttaatggaagctaattcattgtcttgaaaattcaggtt

SEQ ID NO: 30382 - DNA, 792 bp, Medicago truncatula
  Intron number 1 from transcript Medtr4g115050.1 (locus Med tr4g115050) derived from phytozome v7.0 (chr-ID MtChr4; po s 26539009 to 26539800 reverse strand)
atctgttgatttcagaatccgtggctaaaggacatgtaatgctagctaagtctcttcgcctttatttgagagctagcctgcattcatgtacgttaagtttccctaatatccatcctacttaaacaacaatatattagaaccaatcacatgcatgctcataaaattagatgtgcaggatattgagcttaggaaattgttattaaatgtatttgaagttggtttttgtttttatctgtttttttagttaggaaaccagcagttcataattcttgtatttcagtactgcatcatgctatcaagcatgataatcagggaataagttatttgttatttttataagcagtggatttgctctggtacttaaacttatatttttgaaattcacatggcatcaggagagaagtgtaaggctttatggaagtttgctcttgtttctggtggatttttatgctaaaagtatgctatattttctttgcgtgataaataagaaaagcttgctttgctgctgtaaaatatgtgaagtctgtgtaaactctgtgtgtctctataatgagatcacacccttctatttatagtgggtttacaataaatgcattgaatgcatatttagtgagcactagccttgggagttttatacaataggagacaaccaatctaggaagttataaagttaaaggaatatctaaagattcttaattttaacagctgctatagcctgagttatcatctttatattggtgggctgtgtgtcatactttgatgatttcttttgctttttaaattatatttcag

SEQ ID NO: 30383 - DNA, 219 bp, Medicago truncatula
  Intron number 1 from transcript Medtr7g088030.1 (locus Med tr7g088030) derived from phytozome v7.0 (chr-ID MtChr7; po s 19007208 to 19007426)
tgaaattgtgtagccaaggaagcaaaattcacctcgtaaataacaaacaaactttttctcatttttatgttttttttttctttttctaatgaaataatataaaacatcaaatctatgatttctcttctttaaggataagaaataattatcaatttttgtatttgattatgttttgatgaacatggtattgatgttttctttatttcttgcgttttaggc

SEQ ID NO: 30384 - DNA, 723 bp, Medicago truncatula
  Intron number 2 from transcript Medtr7g088030.1 (locus Med tr7g088030) derived from phytozome v7.0 (chr-ID MtChr7; po s 19007528 to 19008250)
aagtaaaagaacaggtatttgtaaattgtaatacattgtgtgttttatattcatttagtttaataatcaccatgatttcgcatagattgttcaatatataattatgtctatggaacccttatttttgactggcaaggtgtgtcatctcatggctaaaaaataagctgattttgatcgccgcattcacatggtcaatcggtgatcgtttgatcgagatgtagaaaacaaaccaattttgatcaaacaaccaccgatgtgcaaattgtgcgaatgagtggaatttgtgactatatcaaatgcaaatccgctcttaatagttacactctcgatcactattataaacaaaaaaccactttgtacattaattgaataactgggtcattattatagaccagatacatcaattattgaataaacctaaaatgatttgttgtttattatagtgaccagagggagtatgttttttaagaacttcaatttcaaatcactttgtttttaacttgttagcatttcctagttaaaattatggtattcccttattgggatgtgtgtaccatagtctagtatttgattacctttctgtgatctttaatttgttatgaattctagtgtaattcattataaaatcaagaagatttcagttcactatgttgctagtagtcttcaatcatatataatatgcataataatgttatatactttggcttaattcagcttgagcta

SEQ ID NO: 30385 - DNA, 456 bp, Medicago truncatula
  Intron number 1 from transcript Medtr5g021430.2 (locus Med tr5g021430) derived from phytozome v7.0 (chr-ID MtChr5; po s 8186258 to 8186713)
tcgtcccggtctcggaatcggtcctttctccctcggtaattttctcttcatttcaccaattcgattattatattcatcgctcttaattcccaatcggataattttccgatccatttccgaattccgcttcatttccattccattttcatttcttcaaaatccgattaattcgacttcatttttttttttaatttatatattatagtaatctttcttcgttatcttgtctgtaaatttaggtcaaacagatttcgatttttgttttttgtttttgattgattagattatcagttattaatatttatgtaatgttgttgttaagtattgtagagtttttgttcaggttatttgataatttttccggacgaaatgaagtttgtgttatttggaatcttgttggagtttgagaattggtactgtgtttaagagttattgttttctttgtgatgtttaggg

SEQ ID NO: 30386 - DNA, 782 bp, Medicago truncatula
  Intron number 1 from transcript Medtr4g080280.1 (locus Med tr4g080280) derived from phytozome v7.0 (chr-ID MtChr4; po s 16443478 to 16444259 reverse strand)
caactattttgtggaccccacttgtcgtttttcttgttgtgtgtcatacgggtccccaagcatccaccatttctttccctccatcttcacgcaaatttcttccttagcccccaaacacaaaacctcgtccactcttgttcacatcttgttacttttttttttttttttttgttttttaataataaataaatgtttctttaggtgagtaagatttttgtgactcacttatgctagaatactagggaagggaaagctcacatacatagcatctacagtctactagtggggatgtcgatttgggccccaacataatcttaattttttttagtatgaaccataatcataatcggtattctagggtttacaacactcgccacatattgtacatcaatcggttgtatttcgagatgttcatttatatccgcaagcaatgatcttcaagtaattgcgatgtgaaggtcttgtgggacggaagagaatatctcctaaagagaactttggggatgaagatcatacctccgtctccaaatagttaaacaaaatacttatgcacttgcataaacgaatgtatacacaaatattgtatacatttattttgtatttcatgtttattaatgtacaagatcatttaaaaaaattgttgtcaagattcaaaataatttattaatattttatttattttattttattgttaaatgttgttgttttttctatctatttgcttaaaaataatataaatgtgcgcatgtatttttttatgttgatgagatccccacggggtc

SEQ ID NO: 30387 - DNA, 704 bp, Medicago truncatula
  Intron number 1 from transcript Medtr5g085630.1 (locus Med tr5g085630) derived from phytozome v7.0 (chr-ID MtChr5; po s 32720533 to 32721236 reverse strand)
aagaaggacaaacgcatagattctccccttgttaggttcgttcattgttctttgattcacttatagaactgttatttttattatgcagtcttagttgcaaactcgaaccccacatgcttttatttgttattcttcatataagattgaaactttagtgcttaaatgctttatgcttatgaatttagttgtgcccttttattttatttacttgatttttgtgtctaatgttgatgattattgcatttgattgtatctactagctgcctatgaagcactgacattgacacacatacaccgcatacgacactgacacatgaacaccgagtattatttgaaaaattgaatacaatgatatgtgtctgtgttgtacactgcgtggcagacacgccttcgatcggtgctacatggctagctacttgtttgtgcttgtcattacgtagcaccgacacttcagattgaaagcgggtccggtgtttgttggtgtctgcgtcagtgcctctcaattttactaaattatcatggcgtctacgtgttagtgttgtgtcggtgtctgtctgtgtttgtgttagtgcttaatgcctcattcttgtttggcaaaaaaaattctaattttacaagatgatctgcatgtgttttcttattcttattgctatattgttgttttgatttgttgttatttctttgtgcatatgcatacaggtata

SEQ ID NO: 30388 - DNA, 739 bp, Medicago truncatula
  Intron number 3 from transcript Medtr4g096670.1 (locus Med tr4g096670) derived from phytozome v7.0 (chr-ID MtChr4; po s 20419760 to 20420498 reverse strand)
gaaggggttagtaggacattttacactatggattcaaaactgtgtagaaatgggaatgtgatgttgttagctttgccaaatttagtctgaagtactgacacgtccattccagtagaaatttgaaagaaaaaaaaaatgaattaattgagagtaatcacatgtgttggtgacgacacgtgttgggacaccgaatagaccttccatcacaagttatctatagactatcagctacgagtcattctattacttgaattaaagctttacatttaaatataggcttaattgcacttttggccccctaactaattaaaatacaaaacagtcctctatgtattggatctttggcagttttggcccccaaggccacttttaacttagtcttcgctgacgtggcacccacaatggtcaacacatggcacctcacttaagggatgtaggtgccacgccagcgaagactaagtcaaaagtggctttcggggccaaaactgctaaagattcaatacataggaggctgttttgtattttaattagttaggggaccaaaatcgcaacttttaaaaagatagggggccaaaagtgcaattaagccttaaatatattcagttctataaatgaattgcaatggttaatagtttcttactattaattaatggttgatgttaaagtggttggtggagttagctgagattggaagataacttgtgaattgtgataaacattgcaggaacagtgtttgcct

SEQ ID NO: 30389 - DNA, 1041 bp, Medicago truncatula
  Intron number 1 from transcript Medtr5g087640.1 (locus Med tr5g087640) derived from phytozome v7.0 (chr-ID MtChr5; po s 33863644 to 33864684)
ctcatttgctggcgtgattacagtgattcatgaagaattatcaaaagggtttattaggaacaatcaaagagcttcaaaagttctatttttttatgctttagatcccttttggtgattctcttatgaagctatcttttttatacatgtacataaaaatattatttttcttaattttcttagctagaagttttcaattttgatttttattttctaatgggtcatcttgtaacctatgattttcagaaattaatattatgttagaattgataaattaattttgctaagtatttaatgttggtgatgttggtaactttgggattgagaaagtggttttttgagatctcaaaaatttctgagattccattcaaagttctgcagctgagatgaggtaagctaggctgctctgttctgtactgtgtgtgtgtatagatctaaatggacttaggatgacgcaaacaatgtgatttatttatttatttaatatttttcatgcaattagtactattattttaatgacaacaattaaatgatgggaagttgtgaactaattttgtttttttattgtttaatttatcataaccttgtgtgtgagtgatgggggtgataaaataataatagtaataagttttttaattgcattgtttagaacaagcaaaagggcaaggtttctagagtagcttcaaaattgcatcagatggattcaattagttgttactcttttggttaagcaagtttgagtttgtggaagaaagtttaaggtttgatctttatataacatgattttagaagcagaaaagagtagtattagattgcaaatttgcaaattctggtgttaactcttcggttttcaagtaaggccttcaaatgttatttcaagtttgatcagaagataagtaaaatcttaccaagattaattcggtcgattcgaacacagaacctaagtttttagtttaattatctaattttaaagcttaattttattctagaagtgaggtatagagggtagggactagggaaggtaggggttgctcacatcacaat

SEQ ID NO: 30390 - DNA, 442 bp, Medicago truncatula
  Intron number 1 from transcript Medtr7g076960.1 (locus Med tr7g076960) derived from phytozome v7.0 (chr-ID MtChr7; po s 15882086 to 15882527)
ctccaagattcaatcgaggttttgtttcaagaacttcaaccagattgtatagtcaccgatatgctgtatccttggacagttgaatcagcttcaaaactgaacattccgaggatgtacttttacagctcaagctacttctccaactgtgccttccatttgctttctgataatttggtttctgatacacagaaatttactattgctggtttgcctcatacaattgagatgattcctctggagcttcctgattggttaaggacaaagaattctgaccctgccttttttgaataagtgtttgaatcgaagaaagaattctgaccctatggaacactatacaatagttttcatgaacttgaaagtgattatgtgaaacttagtcaaacaacaatgggaatcaaatcttggaatgtaggaccagtttctgtttgggctaacaagaagg

SEQ ID NO: 30391 - DNA, 827 bp, Medicago truncatula
  Intron number 2 from transcript Medtr5g005420.1 (locus Med tr5g005420) derived from phytozome v7.0 (chr-ID MtChr5; po s 156006 to 156832 reverse strand)
aacaattcaagcggccctggttgtttagaagggtacgttcgttaattatataattccctctctcatgcatgcatccatgcattcctttcattcttaatctcttgtgtctgcttctgccaaatcagatctgcttcatttacgacttgattatttttacaatgtcaaatttatacattatctctcatctcatgtatatggtctatatatcaaatacatttatttattattcaatgaatttaaaatatgattttttttcatatatatgagatgagaccggatgaagtaagatagaaacaaatatattaggcgtcgtcgcatatgatgtcagtaatttgttaagagttaagcccgtgagcccaaatcaaaaactagctcattaggtaggagagcctcgtggcttaagtgctcttaggttgcaatcaaggccacactaacttcatgtgttttaaatacttaagatttgaaacaaatactaaacaagcaaacaaaatccaatacttatgattctcatcaaaagaaatgtgtttatagatgcatacagttacaaatagaacaatttctcccatcaaattgaaattttgcacattccattactggtaattcttaatattttatgtaaaatagtaaaatacagagacttgcaatctattggtaaaaaaaactttatgttcatgtcatgatagacagataaatagatcatatgcatgaagaagatattgtatgtttgctgcttcgaattgtatatatatttttcaccactcgtactaacttgtttgcgtttgtatattggtgcagttgtgctgctctctgctgttgctgcctattag

SEQ ID NO: 30392 - DNA, 875 bp, Medicago truncatula
  Intron number 4 from transcript Medtr4g133900.2 (locus Med tr4g133900) derived from phytozome v7.0 (chr-ID MtChr4; po s 32174537 to 32175411 reverse strand)
ctcggccgtcagaaacagtgacaaattccgttcaggtttcctcttttatttatttttcgaattttgctttccttctcctgtttcacacgctatgataattgaattgggtaacactgtgattacgatcataggatttcggtatgatgtgattgttatttcatttatctttccattcctattcctcagatttatttgccctatttcataattgtattaagaaatattatgtgtaaacaacgatgattaatatctagtaatgtaatgctgctcttcaaattatcacaatcacaatattagttatacttattcaaccattcttgtccttttgcttagataacttaattgacaatagggtttttgatttaataccaaagtaatgctttaacatcattttatttatgcaaatagagatagatgattcaaattgaaagaaaggaaaaccaatcatcaagaaaggaagttttgacactcgcgcatctacgcgcgaaggcaggcacatgcacgcgtgcgcgcacacacacatattgaaaatatactctttttagctattgaaaaaaaaagacttcaattacatttttggggattttttttataagaagaatttggctagtttttgttataaattaaactttgtcttcataagcacaccctaattcactaattttcttgcttcgttggacacgtatacacttttgattttgcatttaatttaaaattttacagtagatccatatgattcacttcaaacaaaattgcttggtagtctctgggccacataaaattatgttagtctcttgcttttgtttttgttagtttttttgcatactgtattgattgtcgtacaaaaaaaaaattcagtcaacagagaaacggaa

SEQ ID NO: 30393 - DNA, 599 bp, Medicago truncatula
  Intron number 1 from transcript Medtr4g133900.2 (locus Med tr4g133900) derived from phytozome v7.0 (chr-ID MtChr4; po s 32178373 to 32178971 reverse strand)
aacaacacagttgctcctgctctgatcttcatcaggtttgttctttctttctccattcaacttattttattttatttttttcgtttttgttttctgatttattttcaatcttttttgtttttttttttcaacttctcttttgtttgtgaaatcttttcaaacttctttgtgaaaccttcattcattttttttttctttttcgtttttggttttcttttttattttttaaaaactatattcaattatataagttaggcttattgatgtatttatcccttgcaattaggcggcatttaaaaattcgtccatgtaattgctaatcctggcattttaaccctgcaattgttaatcatttaaaatttcgtccctctccccatttaatcactgccaataagttataataatcaaattaaagtgtttttatttataagaagtaaaattaaaaagtgattaaaaatgaatctgttagagggagaaagtgattatgtaatagttactgaatttgttcgtaaaaaaaattaattattcttcgtgacatttttgtgagtgagttgagttaatcagtctgaagctcccttccagtcgcagccgtctttagc

SEQ ID NO: 30394 - DNA, 816 bp, Medicago truncatula
  Intron number 2 from transcript Medtr4g140180.1 (locus Med tr4g140180) derived from phytozome v7.0 (chr-ID MtChr4; po s 34308093 to 34308908)
caccttctttttagtgctaatcgttgggaaaagaggtttgtgcttttgtttttagtttcctaacatttatgttaatttgtataaagtagcatgggaagaacaaagaaaattcttgattcatgaattggaattttatatatggacattgataactgtctagctagaaattggatacagtattcctagattgtgacataaaacaggaaatggaaactatacccgcttaggcatttgagttctttgtaaaaaaaactctcgtttacgtaatgattttggcagccaagttatcttcatatatattatgaatgagaaattctctagtgcacgacgtattttagcaacaaaaccgcatgattatcactctctttgtttaaatcaaattttaattaaaataaatttaaaaaactgaaatagtgtgttggtggaacacacggtcatgtgtattttactacaacacatgtcgtgccattaagcattagtcattatgaatatatgctttatataatcagaagaagcaagctgtgttgcatcactgctttgatgacatgtagtgttgtaaggctgacatcggctctgactcttcgggaattagtattccatgagcttgcgacattgctccagttattaagttaatatggctgttatgactggtgataatttgactagttttatcctagaatgtggtgcttattagctgatgttgcatgcatgtttcttagcaaatataccacttggatatttttactggtacttgctcacgacaagtgaaatttcaagatttctttgattaatttgtgttgtctatgcaggtcattg

SEQ ID NO: 30395 - DNA, 1050 bp, Medicago truncatula
  Intron number 1 from transcript Medtr5g102870.1 (locus Med tr5g102870) derived from phytozome v7.0 (chr-ID MtChr5; po s 41198998 to 41200047 reverse strand)
ctgctcaaggtgaatcatcatcaggtatgagagttctgcatgtatctcctatgattcctataaactatgcatttttacaatgctgctttataaatatcgaattcaatacaagtggtgatcggataaatgctcgtgtagttttttagatagcttggcatggaaatataatttttggaccaatgagggtatttgttcttggttgttagtaattaaatcaaggacccgctggatttttaggatctttcgtaattaagttgtcgtagtattttgtctataaaaggggatgtagttataccatgaatttatatatcaattgatttgaatgaatgtataatgtgtcgttggtatttaaacctttctttcaaattctatctgtagtatgtatgtttcgtgtgaatatttgtgtgtaattaacttgttggattggcaattgaaccataatttgtaattgtagtatgacataactcaagaacataaactcctccccgcctagttagctcggttggtgagctaagggacgtcgaaggaggtttaagaaggagttcccggatttgattcccggaaactaacattctcccttctaacaattgactaacaactaacatttgcctgtcaaacaaaacaaagaacataaattcatttaacattgggctattatggtcctagacaagatagcctttaatctgaattaaatccccaactacaaatcataaatcatcctaagagagatgagtcctagaaaatattaaaagagataaaaagactcctatagaagagattcaaatcaaatacataaggtttgcatcaatattcacccatccacaacacatgaaaatccatgcttatgcagtctagaagtaagcattgattcttgacacacatttaaaatttctgaccttaatgcttgttcttacctaaggaattgcattttgaataggaaaagacaattcagtattattataattataattagtaattatttatttatccatacaattaatatatttcttatcagggacggtaagaactagaagagctagggttggggtt

SEQ ID NO: 30396 - DNA, 861 bp, Medicago truncatula
  Intron number 3 from transcript Medtr5g035330.1 (locus Med tr5g035330) derived from phytozome v7.0 (chr-ID MtChr5; po s 14586409 to 14587269 reverse strand)
tatcttgaacttctgcaaagtggttacactgaagggtcagtacccttatccctctcttttgctatttgtgtttctagggtttttcctcttttgattaatcaaagtatatttattatttatctatctgagtatggtgttgtagtgaatgaaaatttgaatggttttttttttacctgtttatcattcttctcaatagccttttcttgctgcttggaaagtggaaactttttttgtggtttctgttaggccctatttcgttaaacaacttaattattaggcgtttatagcataagtgcttatgtataagtcaatatattatactgttttcgtaagttatccctatgagtttatggagataattaagttgaaaagagcttatacaactcttcaaatagtttcacatctcacaagtgtttatgtcagtaggtaagctcaaataagtcaatccaaataggtctttagtttcacaatttgttttgggtgccattattttgtagtaattggtctccggaatgctttggctatgaccataattttgtattcaatttcgtcttgtagtagcatgattatatttgtttcaatgttgatgttttccttaaaattgcacttttgtgtagtatatgactatatgttgtggatgagcacggtaacttgaagcagttttaagattaaacaatgatcataatttatgaatttgtttgcttttggcttaactttttaagaagtgattatatataataatgatatagtcgtgtatatactagatttctcaacagcatttcagtgtttatctcatggcaaattttagtttaaagtttataacactgtagtacaaagtaatgaggtggatggattgcagag

SEQ ID NO: 30397 - DNA, 665 bp, Medicago truncatula
  Intron number 1 from transcript Medtr5g035330.1 (locus Med tr5g035330) derived from phytozome v7.0 (chr-ID MtChr5; po s 14587457 to 14588121 reverse strand)
aaggctacaaatccttaactttttcaataatagatgtgagcttgagaatggtctattatatgaataaatgagaaactataatttcatcttctatattgtagttttcatatttggttgaacttttaccacgagtattatttgtatgtttaggaagaaaaaaaattatgtttgcaaatactcacctacatagactcaaactcacacacaaaatcaactagggatttacttcctctcaaagtaaatctaccaataatcgatcatcttcttacaccgtataaattataagtttttgtaatttatatcctaaactgggtgtttacaaaacggtatactccaaccacttgcactaaattctggtggtaaaatttattttttaaatatgtaatatatttagcatctaattagcaaaataaatggattaacgtggtccaatttgatcgtgagtgggattgtgtgtattggttgttcctaataagaagctcttaaaggcataataataggcaaaataaaaccaaggtgtatttaaaagatcatggttaggactaactaaacatcacgtggtcaaaactctatgaagtgtggttttgtaaaatcaaaaagtttctgatatataataaaagcattaatgaaaccatgaaatcactaaaccttaatcccagagaaag

SEQ ID NO: 30398 - DNA, 837 bp, Medicago truncatula
  Intron number 1 from transcript Medtr5g104020.2 (locus Med tr5g104020) derived from phytozome v7.0 (chr-ID MtChr5; po s 41707600 to 41708436 reverse strand)
tttttcttcgtgaactcatcagcaacgcttccgatgtaagcttcttcctcttcgttttttttttttgcttttttattttattttttatctttattagggttcgatctagtttaggttctattttattatgattttgatgatttcttttgttatcgttttaattggattattttttcaattttagggtttatgttaattgattatatactcctagggttttggttggtggcgttgtttaggatctttgtgatttttccgttgttgtttaacagtgatgattatgatggttgattatgattaacagtgatgatttgttagtcatgtttaggtttcattgattttaatttaaagttaaattgtgatgattgttctatcgttgattcatattagagtgatacttgaaatacctaaattgaaattaaatttttaattagtcccgtttgtattgataacaaccttgattatgtgatctatttgttactgtgtaatgttttcatttaatcatatactatgtaatgttattgatataatcggcactttagtctttgaatgaaagttgtatgtgacaagtaatctatgttaatcataatcaactctttaatttttgaatggaaggtttgttgatcctttaattttcaaattgaagttgtttgtgactagaaatccttgtttctagaagtataattgttactattactttggattgttaggattcgattttatgaatgattaatgtgatagatgattttctgttgtgggtatgaatattgttctgattatgtgctggaattttgtaatgtaggctttggataagattcggtttgagggcttgaccga

SEQ ID NO: 30399 - DNA, 377 bp, Medicago truncatula
  Intron number 1 from transcript Medtr5g095800.1 (locus Med tr5g095800) derived from phytozome v7.0 (chr-ID MtChr5; po s 37991766 to 37992142 reverse strand)
tctattgtgctactacggaattgttgtaatcagtgcaaatcattatatttattctaagaactgaaatcacgccgtatggaatttaattacaagagtttaatattttgttttgataagtacactaatgaaagttgaaacattataaaagaaaagaagtttgtttttttagggaaaaaaaaaagctaaaactaaccaaaagtactgtaataataatacaataatgataactgaacacaaaagttgagacacatatacgacaccatccgtatattcactgttgcttaatacttttttttaatttatttttttatttatttttcttctcttccttgcctttaaccaccgtctccttcctttaccaagtgcagtacaaaacc

SEQ ID NO: 30400 - DNA, 574 bp, Medicago truncatula
  Intron number 2 from transcript Medtr5g014880.1 (locus Med tr5g014880) derived from phytozome v7.0 (chr-ID MtChr5; po s 4853159 to 4853732 reverse strand)
gatacttctgctgttgtatgtttctaattctttcttctttcgtcatttataatttggttctgatagtaatttgagaaaatgacataaatcatgtaattagatgtgtcggtgtcgtgtcgttgttggacacaatatgtatccgcgacgctcctaatccaaggagtatctgtgcttacattgtaaggttctgtttgggtacacaacttagttaagagcttatagtatatgaactatgaagcattgacacaaagtagacaccgaacacaacaccgacacagtaatgtcgaccaccgataaaaatttgaaaaatgaattaattgaatgtaatcacatgtgtcattgtcatgcctggtgtccttacatcggaagtgtcggaattacaaagcttatagcataagcgattatcatataagtgtttgtgtataagctatttttataacaaaagataacataagatcaatttattttcatataagttataagctttttttttttttttttttttatgctgatatgaccaagaagattttgatatttaggttcgaggatttttggggcaaaatcagcttgagga

SEQ ID NO: 30401 - DNA, 458 bp, Medicago truncatula
  Intron number 1 from transcript Medtr7g026610.1 (locus Med tr7g026610) derived from phytozome v7.0 (chr-ID MtChr7; po s 6867047 to 6867504 reverse strand)
tcaggcttcttctaacccaatcaacactgtatttggtaatttacttattcttttgttccagcactgtttaaacttttttagttattattataattttgattttttgtgtgttgttctttactttaattagtacaacatattatagatcaccattttagggcttgtttactttctaaaaacatatatttggtattcattttaaattgctaacatgggtttgatatactcatagttaataattgtgctagataaaagatagaaggcaaactagaaaaaatgttttttcagaaaccataacaactatgttttaccattttcaaaacttccaaaaatgtcaaatatgttacaaaaattgtagaagagaatgacaagtgaaatattgaatctatgctctcatgtgtttattagttgatatgaaaatgaaaataggaagtaaatgtgcccttttttttttgcag

SEQ ID NO: 30402 - DNA, 638 bp, Medicago truncatula
  Intron number 2 from transcript Medtr4g147350.1 (locus Med tr4g147350) derived from phytozome v7.0 (chr-ID MtChr4; po s 36951199 to 36951836 reverse strand)
gttggagtgccagaggtggactaggaaaggtaatttgctactgttcagaatctgatatattaattaagtcatgttattttgtatggtttacaatacaacttattatggtacatttggatgctactagtactaagtaattacaaattttcctgatagcaaatcaataaagaatgtatttagttgtcataattgtgtgtgtgtacgtcgatagatctgggaattgattgtcactgcagaacttacaatgttagttttagataaaattgattttgggactgaaatcaatttcaaactggaagcgaaacataacaatttatagtcaaatcacgaaacacatacatgattctgaaaggtacaagtgtggaaccaaactaggctacatcaaactaatttgtaataagtctttttgtgttaagtcagagaaccgtaggttgtgcctttttgctagtttatgatacctttttaaaaaatactagtcactaatattaagtgattttttcataggcctgaagacatggattcattatgtcttcttctcattggaactttgctataaatgattctagaaaataaagaggagttcacacattttgtgttgtgcagaatccatacacattgggtgaaccctgtggatcaag

SEQ ID NO: 30403 - DNA, 997 bp, Medicago truncatula
  Intron number 1 from transcript Medtr5g035750.1 (locus Med tr5g035750) derived from phytozome v7.0 (chr-ID MtChr5; po s 14804211 to 14805207)
gtgataacgttcacggcaacatcttcctcgagcctgtaaccgctttttccgtttctcgcttcttcgtttaaactttctttctaatgcatttcgactttgattcctttctctgttctcgattacgatgttgtttctgtttagactttacaatagaaattgttgcatgaagtcttgaactgttgatttacggtagattgaagtagattctgtgattatccaaaaaaaaagtagattctgtgagaatttgtatatgcgtaatgttcgtggattttgctttttgttaccgttataaacagtgaaggaaaatgtggaactgctttggaatagttgattaccgatttacacggaaattgttgaggatttaattaaatagattaattcattcaaattttgaactagcgttagcgagagaggttagaaggaaaattagtgtagataaacattctatttctgattaatgttattaaacggttcaaatcttgtactagcattaacgagagagattggaagaaaaggtagtatgagatctccgagtgatgtaaaaactgttttaatttgctcgaaccgaaccaaaacgaaattgctatagaatcgctcaaataactgaaacatcgatcgtgccggttcacagttcaaaagttgaattgtccgattctgttctggatttgaaatattgattctgatatatactctttgagtcagttagggatgcattttagtataaaacataattatatgattcttttgtaatataatgtgatatatatactctttgaatcagttagggatgcattttagtataaaacacaattatatgattcttttgtaatataatgtaatggttaaaaatatcaaataggtatggtactttcttttgatctaaagtgcattaagagttttatttgtgttactgctaattgtgttggctttgatggaacttggaaatcttttgtttgttgcagatctttttgaagtttgttgacacagaacaatttca

SEQ ID NO: 30404 - DNA, 501 bp, Medicago truncatula
  Intron number 1 from transcript Medtr5g103320.1 (locus Med tr5g103320) derived from phytozome v7.0 (chr-ID MtChr5; po s 41386524 to 41387024)
ttctctttcaacttctcagaatctgtaagtttccgatcttcatttttcttcactgttttagctttctcttgagttcaatgtttgcatgtttcatttttctgaagttcatttttgtttgaagttaaggtttttgaaaatgatcattttttttgaggaaaaattaaaacttttatggtttttatttgatgatttgtgataatattcaaccccattttttgttttgctgctagggtgaaaaaagggtacaatgatgaatagaaagtgattattaaccataaatgtgctgtgttgttgagtttttttgttcaacacttcaactatggttgcccttgttttgcatgagcttggttttttttttgttttctttggaactagtgcaaaattggaattttttagtgttttttttctttttcatagctcaatcattcatgtaccctagctgggtaatgtgttctttatcttgttttgttaagtatcgctcataggtactaacaagtggac

SEQ ID NO: 30405 - DNA, 855 bp, Medicago truncatula
  Intron number 1 from transcript Medtr4g110580.1 (locus Med tr4g110580) derived from phytozome v7.0 (chr-ID MtChr4; po s 25144198 to 25145052 reverse strand)
tcctctttccaccgttaccatctccggcgccgccggtggtggcgattttggattgaagcagttaattttcaattacgtttgctttcaaggaaacaaactgtgttttgcggtcgagaggttgttctgttatggcagcttttctggattttacagtttctagatcttaaagaacggtgtttcgtaatgtcgtatggaatgatttggttgtgtacttgaattggaggaagcaacatcaatttggacttgtcatagagaaatgggtcaattccaaaacaataactcataaaatcataatgattgaaatggttcaattatacccaaaaatctcaaaacataggtcaatttcagtactgagaaaaaggttgagagtttcactatggttgaaaacgaggtaaaggaaaatgaagaaaatggaaatggccagaccaggcgagaagcatctttgatattgtgaggatttgattaatttgatcaaagattaacatagttttggatttttttttaatttcttattattttattttatgaccttttcatttctaattttcagaatttgtaattagtttggtggagatgaaaacaatgatgaaggagatgaacaatcataagttcttaattcatgttgaatgtgaaaactagtactgtgtctggtgtgggtggaagtttgttgttggaaggaggtaaagagagaaagtgagggagatatgatagtgagagaccatgataaaaatgtgttattcatttaatctaatggtcataaaaaacttgtgcatggtgcacaaatactatgtttgtgcatcctacatgccacctctggacaatagtataagtgaacttaattatttttttatttag

SEQ ID NO: 30406 - DNA, 924 bp, Medicago truncatula
  Intron number 1 from transcript Medtr5g028460.1 (locus Med tr5g028460) derived from phytozome v7.0 (chr-ID MtChr5; po s 11752778 to 11753701 reverse strand)
ctcagatttacaagccgatccagatattgagcaaggtatgtaaattttatgtacacattaaaactttttactttataattatatattacaataactatataaataaataatatatatctaaaaattacattgtactaataatcaacttattatcaatattattaacatatttcttttaatataagtcacgagataatcgttcatcattgtttacgcattctaatcttcaatatcttcatagcaaaaaaggatcgttttcaacggttgtttacgcattccaattttcaatatcttcattgtcaacttcaatagttgatacactaatggataaatcacgtcttttagtttcaacaaaattttttaagagatcttttattactaaatataagtgtactccttttatcatctctaaatttatgatctcaattgaacaaaacacaagattaaaagcttgtaatattattaaattggttggaaggcgaattcaaactcacaatttcccatctgaaatttgactttcttctatctgaaattgaactaccttgattttaagaatgttatgggggtaagagagaagcaacattacactgcacctcctgatagtgctgatagtgagagagaattccgcattatgtgcaaaggaactagttcagagggttcatagttatattttcataagagggtacattcaattattttagtggacacaaagcatgcataagcatttttacgctacaaacatatacatagacattgttttaagctacaaacaaatacacatttcttcaatttcttttccctattataagtatacttcgattttttgactatcacattcgtttccttcactataatggacaaatagcttttcactcatttttttaatcaaaggaatatatatactttaaattacaggtgtggtgg

SEQ ID NO: 30407 - DNA, 650 bp, Medicago truncatula
  Intron number 2 from transcript Medtr4g081550.1 (locus Med tr4g081550) derived from phytozome v7.0 (chr-ID MtChr4; po s 17051695 to 17052344)
acaactctgtgtttctggtgtatcgttcagagagggtaattttcgtggctttcggctcattgtgtttattattgtaggacttgtgtttaagggcaatgtttattattaaattacacaaacccacttctctcatcgttgtggctaattttttacatgggaaatttgattccatgtaggttggagtgataatagaattgagaagaccaagtctatgattattgatgaggtcagaaagttaaaactatattttgttttagttcaactttaacattaactgctcgttagtttcatcaattgttatggtatgacttaatggttcaagagtagaaatcttgtttgaataaattagttgaacttaagaatataagatgactaagatatcctttaatccctcaaaaaaaaaaaaaaaagatatccaataaaggatcctgttttgtcacattttgattctacaactttagcctttatagttgccaagtagtttattacttgctagtgtatatctctggacatatagcttatgtatgtgttgttgttgttgttacactactagaacagtccaactgtatatgccaaagaatatctctagacaattatgttcatcgttgtttgtttgttttcttgaatttgcttttggcagggtattgaaa

SEQ ID NO: 30408 - DNA, 516 bp, Medicago truncatula
  Intron number 1 from transcript Medtr5g084640.1 (locus Med tr5g084640) derived from phytozome v7.0 (chr-ID MtChr5; po s 32232581 to 32233096)
aaggagaaagagcgttcttgggaacacggtagagaagaagaagaaggggtatgggttttacaccttgttttctttttctgaatacttttttaaaaattttgtatgaccgttgatgaagaaagataaagaagatgaagaaaataaatagattagatgttggtggttcagtgttgtacacagtagacctgcaatcaaactgttgaaattatataaaaaatattagacattaaaatactaacagagatgaccaaaataataaacggcagaagagttatgggaccaaattaaaacatttaataattaagggatcaaattgagaaaataaaatatgttaagggatcggaggatgtattaagccaatttttaaactaaatttcatttatcattacatttttcatctatcttgaaatgatagatcatttttcttccttttttttttattatgtgttgttgaacaatttttatttaattattttggaaggagggaagaccaccgccgcttgggcagacgaggaa

SEQ ID NO: 30409 - DNA, 908 bp, Medicago truncatula
  Intron number 1 from transcript Medtr7g009060.1 (locus Med tr7g009060) derived from phytozome v7.0 (chr-ID MtChr7; po s 1507963 to 1508870)
aattctggtgtcattgcttgtctcagagccaataggtcccaccttccactttcttctttactttcattttcgtttctctttctcatttttatgaatcttttttagataagtagaacttaaaacttaatttggtcccttataattttcatatggcccagttagaaaaaataatatccaaattgtcagtgtattatatctctctctcctagtaaactgtgagggactgaattttgtttttagtcaacacgtaatcaatttatgggatcagggcaagatgggagggcgtagaatttcattagtacttgatgcaattttgtggttgaatatagtatcaacatttcaaattgaaagcgtgttagagtgtatcacacgacaatgacacatgcagttagatacaatcacttttttctttctatcgaattatcggtgtaacattggtcgattgaaagtatgttgagtggtcgacacaacaatgacatgtgtgtggttatagacaatcactttcattttttccaaactatcagtgttacataggtagattgaaagtgtgtttgagtagccgactcgacaatgatacatgtagttacatacaatgatacgttgctgaatgttgatgatgagaagggtattttaccttgtgtatgtctgcgagcgtgtgtgtttgtccattccctttctgctgaacttggacattctttttcatgttataaggagttaaaggaactgggttcggactctggtgacggagaaattattaacaataacaactgatattctaacatttgggtaaaacgaaaaatttgaaaagtcacaactacagttggtaaaaaatttccaaatctgtttatgttggcttactttttgtttgtcacttacatatagtgcagaagtggcattggaagctgcaa

SEQ ID NO: 30410 - DNA, 628 bp, Medicago truncatula
  Intron number 1 from transcript Medtr5g084480.1 (locus Med tr5g084480) derived from phytozome v7.0 (chr-ID MtChr5; po s 32161659 to 32162286)
gtgagaaaaagtggtcaaatatcagaatcatcaaggtaaatttgcttctattcactaccacaattttggcttttaatagcattattttaatagcgtttctggataaatgctattaaaaatgcaactcataaacctgttatagcacttttcagaaagcgctaaggaaaacttgttaaaaattgggttagatagcgcttttcctgaaacgctattattattgtttgcattaatagcgctttttccgaaacactattgttggagggggtatagatagcgcttgtcacaaacgctatgtttgggcttattaaattaaaaaaggcagattaacactttctctctccaacattgggattcaaagtcagaacgctttctaccgtccttctcctaaatcaaaaccaccttcttctccattgcatcagtgaaaatctaaacccaaaaccatcttcttgctttggtctaaatcgaagtcagagtcactctctctctcacaatcgacgtcggaatcgaagtcattccgtggtaagtttttctctttcgattttttcgtttcatagcttcctcaaaatcgctcaatgtttgtttttgtgttgcagttcaagttcagctcttcctttgaagagaacgtcag

SEQ ID NO: 30411 - DNA, 667 bp, Medicago truncatula
  Intron number 1 from transcript Medtr4g144250.1 (locus Med tr4g144250) derived from phytozome v7.0 (chr-ID MtChr4; po s 36246964 to 36247630 reverse strand)
cttctgggattgctggtttcaccgctgcttattgggtttgttctcttcttcacctctttttctctctaagaatgctcattttaacacgttctttttaatatttactcttttattagatgaaattcactaactgtttttcccactctcaatatataatacatcatacaatatggatgattgcattacgtatataggtgcatttttaattctattcatcagacaacatgcatgcttctttttcctcacacattttgaattttatagataaacaaattgcctttaatacactagagactgtgaacagaaaatgttggttgtcaccaatgtttccttgtagagtttggaaaataaattatgaaaatggtcaatggtgtgaatggcaattaagagagcatagtaaaaatttagaagatgagataaattatttagtgtaacggcaatacaaagaatcttcggacgatattcttttgtctacaattatatcttatatattgtccgtccattcataatgttttatgaaagaaatgtattgtttggtagtgtttgcaatataatgtaattatattttgacaaatggtgaaatgcgaaaccaaatgaaatgtgacaatgtgtaataaataatataaatataggtggggcctagatcgaagaaggacagggagagatt

SEQ ID NO: 30412 - DNA, 880 bp, Medicago truncatula
  Intron number 3 from transcript Medtr5g103570.1 (locus Med tr5g103570) derived from phytozome v7.0 (chr-ID MtChr5; po s 41496924 to 41497803 reverse strand)
ttcggtgagtttcatttcaagctttgatttattcatttgttttcgtttcttcaagcttgctttgtgtacatccatgactgttttgctagtcaaatctaaatgattttaatcatttctaacaaaaaaagaaactgcattttgattttttaagttcatcttcaatatgacaacaactttaccagttgcgccaatgttacccctcatattgattgttgaatgatttgagatttatacttttcttcctttaagtgttgtggagttaagggggaaaattagaagttcagattcatcatgtgaaaaaatattaagagtgaaattgtttttggataagtatagatgcatgacatgataatcatttaccatttacaatggttttcgaggtagatgtatgtgaaaatttcaatactcaaattcttgcttaaacacattttacaacaaccaagtcttttcccactaagtagggctggaaagtggttacttaaacacatgttgacctttaataaaatatactctatgcaggcttcatataccaaatacaatattataccatatagataaaaaaacatgcagtaattattattaaaataagcttgccaatgatgttctaaagagttggtgtattggacagttatttttgcataggatctgtggtgacttcctttatttattactaacttcattaagttatgatctttgagtttgtactgtgtatacgaaggtaaagaggagagagatatatacgtgtagaacattccttctaattaccctaagtaccacttgacggaatgtcattgccatgatttttgccttccaagtacttcaatattcaatttcattcattttcagtttttttctttctttccaatagagcttgcaagag

SEQ ID NO: 30413 - DNA, 1001 bp, Medicago truncatula
  Intron number 1 from transcript Medtr4g096210.1 (locus Med tr4g096210) derived from phytozome v7.0 (chr-ID MtChr4; po s 20178411 to 20179411 reverse strand)
atatcgttggaggagcttctgcgcaacattcttaggtcagatccgccaccttattattcttcacatttacccatttgttgtggtcattttcagggtttgattcgtattattttactttgaatgagacaaaagatttgtgtgtttggcgccacttttggatgtgctaaaattgattctagatgtgtaaaattgattttgacatgtttggatgcttttcaatagaattgattttgcctccataattgaatataaattgatgttatgatttgtagcttttcactcaaaacgtgattaaagtatgtttggtttgatttggtggtgatgatagttgattttgagtgacttgattctggaaaattaattcccattaaaagtgagttgaaagtaaagttaacgttgtttgaaaaactgagttgaattataaatttatctataaaaatcaattttataatcaaaagctacagattctagcttcaagtagaatcatttttggaggcaaaatcaattctactcgatatcaataacacttggaatcaattccacacctttagaatcaaatatcggctcctccagaagtggaaccaaacatacacttagtgttcaactcactttgatatgtgtatcgaaacatgaactactttacattcaactcacttttaactaaaatcaattcatttaaaaattaaacaaatttttgtcaccacaaaaccaaacaaaccttaaattgtagtttcaagttagaatcaattttggaggcaaaatgagtcatactcctctagagtaaattgtctcaaaatgtagaaccgagcatagactaatcagatgaagtatgtttctgcatacgagatacaccaaataaatcttgtgcatgttttgctaatggcataatgcatgtgtttcatctccatgttttgactatttcaaaaaaaaaaatctccatgttttgatttaatactatttggctaggttcagactccactgcatttgcaaaggaattgggt

SEQ ID NO: 30414 - DNA, 681 bp, Medicago truncatula
  Intron number 2 from transcript Medtr5g062330.1 (locus Med tr5g062330) derived from phytozome v7.0 (chr-ID MtChr5; po s 21912441 to 21913121 reverse strand)
gatgtagaaatttttgagtttgatattgtgatgaataattgttggggtttggtttgttagtcaatttaggaattttgtactaagattttgcaaatcaaagtaatttttcttttttcctgtgaaggtttagtggcaaagtaaccttaaatttaccaatttttttcttttgaaaggaaaggatgtatgaggtgcaagcattgaaagaggcatgtttcagttttcatcatttttggttaaagttgctttacttcattatatcttccactccgaatagggaagagcttttttcatatcctactcatagatgtgcatgtttagatttgtatatcttccaaaaaatgctttaaaccttaacctctttttctacttgaagtttttgattgagtttatgtctttcaaaactattttggactccactgctgaaaaagattaaacttatgggacttgcattggaagatttgaagtatgatttttttcaatattatctcttaattttttcaataatatattttttttctctatgcttgagagatgtctaagctgtaactatgcttcctattaaataaatgtcgtccaagtcctaaattatgttcagccttattgtattcactgagcttgatggcaaatatcttttttatataattaggtggaggacggagcagtaaaaacagattttagatt

SEQ ID NO: 30415 - DNA, 763 bp, Medicago truncatula
  Intron number 1 from transcript Medtr5g024930.1 (locus Med tr5g024930) derived from phytozome v7.0 (chr-ID MtChr5; po s 9965993 to 9966755)
aagttcttcaaccgtgtacagcaacacttggttgataatgaggatgtacagatttcgtaggatgatacagagattccatctgttagtttctttgataaaacttagttgccgccaaagataaaagcgtatttactgttccctagtgagaattggtttgctttatattctttgtttgtttcatttcatgtttatgctaatgtattagtcttgagatgattgcataatttcatagaccattgttgacttgatttatagatgaatggatgataatagtttgttatcgaagagttactaatgttctaatatagtagtttctgcaataccatgttactcttagcactagtcatttggcatgctgtcaaaatttgtggcttctagcttggtattttatccctgtaacttttctgttgtcattttagaagtgagaaagtaagagtgggattttcttatctgtgggttgaaaatcataatcaaatcacgaagcagatgtgattttacacaaatgggaagagatattataagtagctcctttgatattttctccccggtatttggtgaattgatgcttgaataggttttaaattctatttgttctctccttcctcctaagtggaatctacattatcattcccttctcaaatcatatttgttttttatggtgcgttttgttgtaaaaaaaaagtacaatgtcgttttcagtctgaaagacaaccgtgtgaccatctcagtcagttgaactaagccaagaacgatcatctacagc

SEQ ID NO: 30416 - DNA, 830 bp, Medicago truncatula
  Intron number 1 from transcript Medtr5g087270.2 (locus Med tr5g087270) derived from phytozome v7.0 (chr-ID MtChr5; po s 33671941 to 33672770)
tgctagaatcaaagctgaaagccctccacgtagtatgtatgaaacatttgttgcatgtcttctttttcattaaaattgtgttcttttttttttttttttttttttttttttttttatcttttcttctaccctttttatttagaagttttgatattgatcaccttgttgtgagtttttttggattaagtaattaattggattttgaatatgtttgtgtttatgatttgagttgagactatgaaatatgactaggaagatgttcatattaattttcttattttagtttgtgtttgtttttgaagaatagtcaattaaagcaagttcctttttatagtgaatcatttttgtttggtaattaatagctagtatgttgatgataatgagttatgtgatttttggtaaagagagagccagagtaaattaaaatgaagcaataaattgaatcatagttttgatttaagttacaagattgtgaaaattgttgatttgttatgaaaattagcaagatccactccttgtatgagcattttcctatggtattgaattgaatttttctttgtttagattgttatgaaaaaatcaaggatgaacatgagaactttcaccacttggaaagcataatttatgcttatttatctaatttattaagtgttttaccttttcatgttcttgtaacaaccaaaaaatctagtgtgtaagtttatcaaaaagcataattaagatcaattagtaacttgattagagtgcttgtatatgtcctgaaaagttgatccattttttttatgacacatgtaggctcgagttcgaaggacagaagcagagaaactggc

SEQ ID NO: 30417 - DNA, 749 bp, Medicago truncatula
  Intron number 2 from transcript Medtr5g025700.1 (locus Med tr5g025700) derived from phytozome v7.0 (chr-ID MtChr5; po s 10307463 to 10308211 reverse strand)
cctttctttgcaaggctcctaattttgatatcttggtatgttttcaaacttttttgctatatttagtgttagttgttacttcatattcaataattacagacttatgaaagaaactagaatgctaagttaattattggcttgcttattatcatcatttgcgtaaaagaaattgacatatttgctctaaagttttttattaacgtaaccaagttctagtaaaagggacatgccaccatacaatccagttgtcatattgatattttttttctctcggtttgttctggttttttatggtgaagttaaactatagcattatattattatattggtgccatgtggcttgctggtactggccacaggttggcaagatgaatcatttttagattggaaaaaaccaaatttaacatgggacagttggtctgtctcaaattatagatattatttgtccttcaaatgccaaaaatatttctccttgaataaaaacaatttgaatctttagattaaatccaaaagaagttgaaattaagggttatttcaattggtttatttgaacttacttgtataaacatttgcgagactatttgaaaaagtttatgaaaacaacttcgaacagaaacataagttgtttcaacttatttatataagctcttcatgatagtttataaaaacagtttatagcttaaatctaaaattggtaatggtcatacttggcaggcttagctttggagttacagttattttactaattg

SEQ ID NO: 30418 - DNA, 642 bp, Medicago truncatula
  Intron number 2 from transcript Medtr5g045150.1 (locus Med tr5g045150) derived from phytozome v7.0 (chr-ID MtChr5; po s 18852136 to 18852777)
cacttctcgggaacaagtgagatattcttttggatctttcttcatattctctatttggaaatctttgtatattaacctatttacatggagactgcacttgttttaatgattttgtttctatgaagttataacaagagagatatataattttgaagcacagtgatttaccaaaagcactaaaaccttgagagaatacaaacgataaaagaaaccctactcctaatgagacaaggtcacataagatattgtatcacatgttttattttttttgaaaaagcaaaataaatgtgtttttaagaagaaaaaacaagagaattccaactaaaatacaaagttatcagtcaaaaaagaagaataagtaagagtgttccaacaaaaatacaaagttacgaagaacttgatacattcatactaacatcggacacaacacagataataatgtgagaaagtagaataatttaaatgtaactgcatctattggtttgtgtcgcaggttagctttacattagaagtctctgtgctatttctccgatcttaagtataagagaaaattgcatagtgatttttgtctagtacttgttgagattttttttttttgataaagagtaattttcatggatgtgaataatatgcacttcacag

SEQ ID NO: 30419 - DNA, 584 bp, Medicago truncatula
  Intron number 2 from transcript Medtr7g010300.1 (locus Med tr7g010300) derived from phytozome v7.0 (chr-ID MtChr7; po s 2194272 to 2194855 reverse strand)
tatagagcagggattgtacctgtagcttacagaaggtaacttcacattttcattttttctttctctgctctattatttttgtatttggaaaacaagattttgttaaataaaattggttaaactttagtttgacgtaaaatgattgatgtttggatatcttttaccgaaaacaagtttctggtaaaatttaagtgtaaaattttcaacctagctaactaaaaagttacttttcatgagatttgaagataaagtcaattttggcttcctgtcaccaaattatgcaaacttaattcaattaaaatttagtttgacttgaaataattgacgtttggacgtcttttgttcagaaatcagttttgtattctctcaaaaaaaaaaaaacaaaagtttcgtgtaaatttttcaacctaacgtaaaagttacttactatatagcacttatagtaaaaaacgaaatttgaaggcaaaatcaattttgaccaacatacacaataaattcgaatattttttagcctaaaaactaaacacacattgtagtcttaaagttgataattttctttttgttcttggattttgaagggtgag

SEQ ID NO: 30420 - DNA, 423 bp, Medicago truncatula
  Intron number 1 from transcript Medtr4g132590.1 (locus Med tr4g132590) derived from phytozome v7.0 (chr-ID MtChr4; po s 31509735 to 31510157)
ggttgtgggaatcaggttattgcgtttggctaaaagtgagatattgttgaagtttttattttggttaaaaattcatcaacaaatgcatgtttcccctctttttggggttttagctgtctaaaatatgctactaaagtctagaatattttgtcggtaagctgtcggtatctaattgactttgatttgttgtttgttatttttggaatttcttgcttgggtttctttaatcttcaatgagacgaggaacattttgttttgcattatacttttttgttgtattattctctctcttgttgctcataggtggagtagaaattgctaaatcattgtgcatgttttcttatcagattatctgttcttactatctcttttgaccgatgatttgcaggaaaaacaaaagggaaaaaaaacaacaaaaaagat

SEQ ID NO: 30421 - DNA, 339 bp, Medicago truncatula
  Intron number 3 from transcript Medtr4g092710.2 (locus Med tr4g092710) derived from phytozome v7.0 (chr-ID MtChr4; po s 19447042 to 19447380)
cgccaagctacagcacaagttagttactattgaaattattgtttctgttctatccttgtgtgtattatctgttcttatcattgttatatattggtttgaaattattgttatccttgtgtatcaaaataagctgaaaacagcttatgaacatatcataaactgtttccataagttctcctaaacagtttcatgtaacttatgtcagtagataaactcaaataagccaatccaaacaggccctaaaactaacttcaaaatagccagttatttttattgtaaaaccatcttattgttgtttctttttttccctttcttgaggtgttggcatctcaaaaacgg

SEQ ID NO: 30422 - DNA, 605 bp, Medicago truncatula
  Intron number 1 from transcript Medtr7g077730.1 (locus Med tr7g077730) derived from phytozome v7.0 (chr-ID MtChr7; po s 16439045 to 16439649)
attgaaatttgtgattccatcaattctaatcattggtaacaatctttaactataagcaaaggggaaagatggcatatcaattttgtatagttttatttattttattttatttttatgggtttgactttaatcatcattcacatatttgagtttaggttttttaatatgatatgatgtttcatgcagatgtatgtatgtttttttattttcaaaatgaaattttgggcaaaaaattgaaatttttgtttaggttttttaattttgggtgttgttgattatattattttatcatgttttgttgaagaattaatcaattgtaaccttcccaagaaacaagtgttaaatttattttttttattactgtttatatattttttttctttttcatgcagagttgttggtgtcagagtgtaacaagaatttctagtatgaattttccttatgaaaactaagtttagtggatttgtgaacaaactagtttgtcaacttgtttttcgctacttttccctttttttttttttacctcaatgaattggttattgggaaatttacagtgattttttaactgaatatttgatatctttaatttatcaggcagcctaaag

SEQ ID NO: 30423 - DNA, 1064 bp, Medicago truncatula
  Intron number 2 from transcript Medtr4g095400.2 (locus Med tr4g095400) derived from phytozome v7.0 (chr-ID MtChr4; po s 19835731 to 19836794 reverse strand)
aagtgcaatttgaagataggcttttcaccttacaggtttgtgaacggtgctgccttgtgcttaatttgattttgagatgcttgaaaatggcttcatgaccaagccttgtaaatgttaggccagatttataaattatcaaacccccccccccccccccccccccctttaatgtttatctttctgatattactagatggtttatggcctaatttgatccatgtatccgaccccatttagttggaaaaggcttggttgttgttgttgttggattacatagatgttttagattgtgcattatgttacatactgatttaattgaagaattcgtaggtcacaacctcttaaatgaaggttcaatatgtttgttgatactgtgttatcagcctgttgtgtacattaaacacgcctagtagtttactggattaagtttgttacttattgctcattttgatgttagaatgcctgcatccttaagtgtattgcactttttgaaaacgggcttgtgtatgggatttgggaagtgaatgatgatgtttcctgtcgtttttgagaaattgtttattatattttgacgattgtcttggcacatgactttaaaatgtaacacactacaacctaaccgttagtttgcacatatatgtaatgtggcttttgttagtcttaacattgagcatctcttatgtatagattgaatctaatggggaagagaactaaatctatttaaatgataactatatttcaaatgattaatagctaagttttttagttgcacaatcaagagcctttttcggtttaggattgttaggctgcttaattttttggacagtacactttggtggggtataaattttagcatattaccgtcacgctctttcagtattagacatccatgttttgtttcttgcggaaatcatatttgtgcgttctacatctcataattatcttctagtttttattgataattataagttaaaatggtaaaagttttctttgcttttgttttaatttttagcattctaaatcttgcagatttgggatacagctggccaggagagattccaaag

SEQ ID NO: 30424 - DNA, 689 bp, Medicago truncatula
  Intron number 1 from transcript Medtr4g095400.2 (locus Med tr4g095400) derived from phytozome v7.0 (chr-ID MtChr4; po s 19837218 to 19837906 reverse strand)
acgctcttgaaagtcatcattctcggtgacagcgggttcgtctctcgaactcttcaattctagggttttccgataaccataattatcatattctacagatcttatacaattttgtttccttctgcttatttttattcttactgttgcaattcgatctttgtttgaactcaattattgacatgcaagctcaaaattgtatcgtagtttgtcatttttcttattcttgtttggatcacgagaattatagctacaagtaacttaatttataggtgaatttcttattcttgtttcgatcacaagaatcatatctggtgatacgtgaacacctatgataatttgagaaaatgacataattcaatgtaattatgtgtctgacatataccgacccttgtgtctgtgttagacatgtgggacattgtgtagtatcagtgctacagagtatctagagtagcttaatgcattggtgaatttttcttataattgtttggatcacaagaatcatatctgaagtaacttaatttatagaattttttcgatactttcaaccatgttaatgttaagttgcatgttaatgttaagttgatttatgagctgaattatttgttttatctaccatttgttttttctttttcttttttcttaacatcgtagtgttgttgatgatttgcagggtggggaagacgtctttg

SEQ ID NO: 30425 - DNA, 267 bp, Medicago truncatula
  Intron number 1 from transcript Medtr5g086640.1 (locus Med tr5g086640) derived from phytozome v7.0 (chr-ID MtChr5; po s 33295299 to 33295565 reverse strand)
gggaatcttctttggggtttaatctcttcccttcttgtttcttattataagactatgcataactaatcctctctatcttttggattaagcatagtttctaatactcttttgtagattaaatatttaataaaattacgtgacttttaataagaaaaaaaatgcattccctttgattttatgtatacgcaaaagttatcataaattttgaacttgttttatgttaatcctccagttttcagaggaaaggactttggaagtccggacttc

SEQ ID NO: 30426 - DNA, 687 bp, Medicago truncatula
  Intron number 2 from transcript Medtr5g076000.1 (locus Med tr5g076000) derived from phytozome v7.0 (chr-ID MtChr5; po s 27737037 to 27737723 reverse strand)
ggtaggagaggggaattcttaaatgcatatgttttttgtgaagatatttttcttacttcctacttaatattttattcaatctccactaaaattcttcaattcccttaatatgtatcgttttgtatatgggctatttttcttttcttttttattagttcttgacatttcttaaaaaaatagcaagttttgacttaatgtataaaatactataggagtagatcataaaatcaataattagaagggttcagtgaagcaaaacggtaagcatgtcaaacctagctggaattcctacttttcatacaataaatctcataaattacgccaaagtagtttgcataaaatataagataattttttattgaaaatgatgagactatgaaaagagcattcataaacttaggatcatatacattaatcaattggcctgaaagtcaaacacaagaagagataataaggcttttgccatcttttgacaaaaacaaaattcttaatgttgcgggataaggttctttctgttgtagggttagataaaaatgctctttttcagggagagtaaacaaacacgtttgcatgtatttaagtgacacagtttccagttcaacaatgacatgaaaggaaggattttattttgtggtctttgcatactttatgcattgttcataccaactaagctaagttcacgagggc

SEQ ID NO: 30427 - DNA, 728 bp, Medicago truncatula
  Intron number 1 from transcript Medtr5g076000.1 (locus Med tr5g076000) derived from phytozome v7.0 (chr-ID MtChr5; po s 27737764 to 27738491 reverse strand)
ataggagccgaggaagaaggaggaagggagccgtgaggagtagacattgtttgagaagaggaagatgaagattcaactggaatgaatgcaaactggaaagaaagaaaataggctttgtgagaccgagagaaagattaacttgaatgcattatattattagcattggctcacaactacattatttattgaatacctattatcaactacgtacagtaagtagtaacccttcaactactacttcatatttagagactcatatttattgttgacaatacattagagttatactttacaaaattatactttacattagagtaattcttaaaagaattaccgtatcatttaaaattatactttacaaaattatcattcaaaattaaaaacaaatagttttataaatagtatgattaaaaatattaatgttttgttgaaactgatatataatttataatctgtgacaatttttttttaaagtgacttatatattagaatgaatggagtagaataatattcaaattcttcaccataacctcactttacaatgaataatggtgtacaaatcacatttttattttgtataaatgagagagaggagagtgttaggggagatagagattgaaagagacagcaagttgtttgttacatataaaagcaagttctatttttcaagtacgaatatgaaaattccccttaattgtagttttgtgctattaatagcattcctaggt

SEQ ID NO: 30428 - DNA, 1002 bp, Medicago truncatula
  Intron number 1 from transcript Medtr5g078000.1 (locus Med tr5g078000) derived from phytozome v7.0 (chr-ID MtChr5; po s 28859483 to 28860484 reverse strand)
cccttctctaatccttacacactttcaccaaagaggtttgttttgtttctctcattctcaatttcttattgccattttttcatctgggttattgtaccaccatgaaaaaaatgtatacctaattcattgcatgtgccttttgtactttttattattttttggctatgatgtttttaattttttaatttagacggaaaaattgttccttttcaccattttgttttgataaaaagggttttttgaattttgttgtaattgttgtttggtagagagggtgaaattatgctgtactatgtttcatgatatagtggcagtaagggtttgtattgtggattgtgaatgattggcacttccctcatttttgttgtatgatgaagatttgaagggattttgttaagattttcaaggttttcgagttcaaccctagcgcgccgcgttcacttagtcgtcgaatatttttattaacgttggcattaaagtatgcaaaaatctgtaattgataaatttttagagaggtttcgtggtttagttgatagaaatgagtcttatagccaaatgattagcttaactagatatttcattttatgaacaaaatctaatctaacttagctgaagcttttggattctaaacaccttcagttattttttgttcaatgtgaaattcttgaattgatatatgaaacaaggcaagattcttgctcacagtcaccatcgagaacacaattgtaccataacgcttattatttttcactaattggagcaaatagtagttagttgttgtactgatcggtccttattttgacccatttgctagacgtgtagcttacattaatcacaaaatatgtattgatgggatgattgaagataggacattgatttttattatgattttatagttgaaatatgatatgcacattctttttagtgttaattgtttctctcgttttgtttgtcttgattgcacttatgtattaaaatattgggacaggcatatattccatc

SEQ ID NO: 30429 - DNA, 968 bp, Medicago truncatula
  Intron number 1 from transcript Medtr6g017890.1 (locus Med tr6g017890) derived from phytozome v7.0 (chr-ID MtChr6; po s 4410858 to 4411825)
gctgccactcctcctgacgctgattctcccaccatgtatgcttcattcttctcttctacgttcattttctctttcttattgttaattttttcatggattttacaatttttttttcataaagtttcgattttttcatgttttgattatctgggttttgcttaaacgttaaaaaggttacatttttagtttttgattaaaaaaggttgcatttttatgtagtttgggttattgggtattgaaattttgactttttttttttagaattaagtcaatgttattgggacaatgaattgtgtgatttttggaactattttgctcgttacattatgaagatctatgtttggtttttccatgttttgattatttgtgtttttgtttgtagatacagaaatcctaaaatggttgcatttttatgcagttagggttaaagggtgttggaatttttagattttttttagagttaaatcaattttcttgggaaaatgatttgtttgaaattgtgtgattaatgggacccacttttgaagtttgttgtttgcttgattttactggatcatacatttgatgagattttgatcagtgtttttgatgaggtgatggtgcattcacccaaaattatttgaaaatcaaaggttatagagttttaaatagaggttgtcgattgggattgcgtcatgatccttgatattgcgaagaattgcggttaaatgtgacctcaactgtggccatgtttggaaacttatgaagccgttatgtcacggcctagcatccacattccggtatcggcaacataagaaaccgttatgtcgaggcttagattgcgatcatagaccgttatttgaaaccctaggttctgtctgcttgtgtttggatgcgtatataattcttttttcttaatgttttattctgaatgtgatattctgtgatgcacagatttgacaagatcatcaacaaggagattccttcta

SEQ ID NO: 30430 - DNA, 858 bp, Medicago truncatula
  Intron number 2 from transcript Medtr5g075430.1 (locus Med tr5g075430) derived from phytozome v7.0 (chr-ID MtChr5; po s 27489365 to 27490222)
cggtgcctcaacaaagtttgagggtggtatgttttctaattgttgaataataatctattcacacaaacttgcactcaaatcatttcaccagcttgtaacgtgctgaaaatttgtaatttgaatatgctttagatttgggaagtaaatactagtgagtggaagaagataatgattaatttgccaattaatggcttgctaaatgctagcttaggtcaacaatacctgtaggttaggggatataaagatggcttggtttgggagagttcaggagtggatatattgataatggtcctcaacataggaattggtaaattgactcaatgacactctgtgtgaatgacattattcataaatcataataggctttgaagccccgatactaaaaaaaatgcctaagtatcggtgtccgacaggcatctgacacggatacattttgatacggaccgggaaagtatccagcaattaatcttatttttttacaaaataaataggccgatacgtatcggatataattttattgtggtccggatacggtttgcccatgatagtagtagaacttatgatttcctttttgacttaagatatttaattgttacttgttttaatgcgaatgtttctttattatcattatcatttttagttatgtttatatattgtgcatttatatacttaatttaaatttaatttttttattaaagtattttggctgtatcgtgtctatttaaaattttccatatcgccgtatccgtgtcgtatccttatcatgtcaagtatacgtgcttcatagataataggatttgattaatgttcaagtgcaaatggaaatttataattctttgggttttggtgcaggaatca

SEQ ID NO: 30431 - DNA, 854 bp, Medicago truncatula
  Intron number 1 from transcript Medtr4g073420.1 (locus Med tr4g073420) derived from phytozome v7.0 (chr-ID MtChr4; po s 14532910 to 14533763)
gagttttggggtaaaattctactctctatttctctattatatctcttcatttcaattcaaatttcacttttaaccactgcattttcacttcatatccctgtttttcttgcctcaatcacaaaattatcgtcatattttgtgttccagtagtattatacaaaaaatcatatcaattatgcaatcaaatctgagaaaaatatatccaatttgagaaaactgatttctctttttcaaaatttgtaacagtatgaatgttgctagttcatattcttcttgtgtaattcgtattcaccatggtatcacggtgggtattgtagcttctgcaaaatcattgggttatcgtgattctggcatacccagtgtgacaccaaacatacccgtagactatgataacgtagtttttttaccggtttgtaaggcgaaggggtgacactctttataaactctattaaaagtcatatcttttttctaatacacccccctcacatccaacaatattgggtttaatgcgttataaatggtgggtgacttggttttacaattattgatggaactcatttttgagagaaatgtttagaaaagtgaactagaaaataatattcattatgagagagttgttacatcaaatagtacatatctaataaaatccacaactgtttttgttcttcttttctttgctatagttttttattttagttcaattgttagatagaaatttttaatttcccattgttagatagagatttttaatttactaaattaatgttgcaatgtttaatgttgcaatgtcgtcttatttaacattggtttgtattttaggtgttgaggttaaggctggacaatcggttaaagtt

SEQ ID NO: 30432 - DNA, 776 bp, Medicago truncatula
  Intron number 1 from transcript Medtr4g079210.1 (locus Med tr4g079210) derived from phytozome v7.0 (chr-ID MtChr4; po s 15822915 to 15823690)
ttcatcgtcaccggtcaccattgagatcgttcatctcttagttaattttatcatgtttatgccattaatttatactcattatatttcattcttttccatgttcattttctatgtcattgatttatacacgttatgtgtcattgtttagtgaagattagaaaaagcaattcaaaaaagaaagcattgcgattatcttaggactagaaaatgaaataaaactaaaaagaaccccgtaaaattttgatcatgtgtgatgtgtatcgataaaaattgaaataaaattataaaatatatatactactcaataaaaagtgcatccctagaaaattttcaaatttgcacgcataactttttatttgttggttcagaaataattttataagttttagagatttaaaaatattagagattaacactagtcaattctaaactgatttgaattttgatctgttatgcttcaattggttaatatttttactaagtttattagttataaaaagttgtttgaaaaatagagaacatgaaaaaacaaaatacgaaatacaattatacaaagttctataaaatattttgtaaggatatgaattttttttaattgtatttttaaacaaaccgatcaaccgaatcaatccaaaaccgaaccaaaccgattaatttggtttggttttctttttgaaaaacattgaaaaccgaaccaatccaaactgatgaaggtttcatcggttcagacatttttttaagtgaaaaccaatccaaaccgaaccgttacacccgta

SEQ ID NO: 30433 - DNA, 568 bp, Medicago truncatula
  Intron number 4 from transcript Medtr4g144650.1 (locus Med tr4g144650) derived from phytozome v7.0 (chr-ID MtChr4; po s 36472364 to 36472931 reverse strand)
gactctgaaggtttgtcgcattattgatttcactgtgctattgggttgatttttactactcatttaggattgagagttgggtcagaaaccaacttgactcttttttgtcagaagcacaaatgtgactcattgaactattaactggaaaaaatttgagtatttttttggttagttcgtatcattgatttttctctttgagcattacttatttttttgatactagaaatatttgcaaaacataaatgatgtgatataaaacttctcaatgggaatgtatattagtaaaatgctttttaaagtgtctaattgtttgttttttctctttggtagctctagtctttactagttcattgttttatgtatgagttccttatttttgtgtgaagtatttgtgcgattaatcaaatgttgagtagtaagcatatatttcctttggtacttacctgctttatgataattgtaatgataatgtgactagggagcataagtaggttgagaattcaacctttttttttcttcctattctgcagcttcacttacagaaacatttgccatttataggaggcat

SEQ ID NO: 30434 - DNA, 606 bp, Medicago truncatula
  Intron number 3 from transcript Medtr5g095360.1 (locus Med tr5g095360) derived from phytozome v7.0 (chr-ID MtChr5; po s 37796575 to 37797180 reverse strand)
atttcatttttggtgaagcccagtcttattttgaggtaataataataataatataatgataatacttgaccaaaaataaaatgaaataatgataataataataatagtaacaataacaataataataataatacatattacttcttttaaaaaaataaatatttataatattttttattgtcttaaaatatataatttttattcattataatttttttctttttatagtcgtaaaatgtggtaaaataatgataatatttttttcttttctttttgtagaatatgtttttattttagtctctaaatttttgttcataatgaaattatcccttctaatatttattttagtcttcatttgagggactaaaattaaatattctacaaattttccaaggattaaaccaaaataataaaggacaaaagtgatataactataatgactaaaaaaaacaaaaattacaaagactaaaaacaaaaatgacatatatccagggattaaaaaacatatttaaattttaacttatttacaatttttttcattaatttctatctttgataccttgttcaaaaaatgaaacaacgagattttttttacctgttccagga

SEQ ID NO: 30435 - DNA, 934 bp, Medicago truncatula
  Intron number 1 from transcript Medtr6g014050.1 (locus Med tr6g014050) derived from phytozome v7.0 (chr-ID MtChr6; po s 3188432 to 3189365)
ggtaagacatgggatttcaaatacatgacaatgatctggaattctagaatattgtcagtcttgagagccgatggagtggagtgtgggcttgcattatactatagtaccacctagtttcttctcagcttggtgttgtttgtttttgggagattcaaatttgaatttctctaaatacagagcttcttctgctacatgtgctttatcttctttgtgcatgtggaattttgggaaattctgaaagtgttgtgcttgatgagttttgaagaaatttagtccgtgttgtcaatcaatcgcgaattgcagaaaaatagcagattgttgaaattccgctgcacaaaaaatgctctacgccgctatagcattttatttgacaacattttgtagtaaataccgaattgcagaacaaattgctcaaattctacaacttattatagccgctacttaacaacactgatttagtcttgtctaggctacagtgatattgcttgaattgaaatgcattgttcatcactctctttacgaaaccggtctactacatttgagtttccatttacgcttcatcatgcttgtaatcgtatgttgttccataaactggtttttcttccttcacgttaggaactcggaagctagaattagatatgtgacacagctaaaaaatacttccagtttggatagaataagttttagaaattataggatatgacacatcatcagcacaatatatagtgtaagtttagtataaagacacaaaaatgtaactaaaagagtaacagaagaagagtgctttcttttttgttttgttttcatagttttgtatcggtttcttctgtataaaatactagagtatgtcaacagagatcagctttaatgaactgataatttttgtgaatattggtcttgatgtttaccgtttgcaactacgcatgtcaagagg

SEQ ID NO: 30436 - DNA, 723 bp, Medicago truncatula
  Intron number 1 from transcript Medtr5g009180.1 (locus Med tr5g009180) derived from phytozome v7.0 (chr-ID MtChr5; po s 1942633 to 1943355 reverse strand)
cctcttgtttatttcttccacttctaccagctgaggtgagtatcctctttatttaactctcatatttttgcttatacatttttatttttatttttattttctagttcatttgcctaatattattttttagctaattcaattatagaatctccaatgttacttgtatccaagacttccatctttgatttttatttgtgtctaattatcaacatgagtttcttgcttcggtttgagggagttagttaactttagtttgtgaattttcttgcttgtagtcaacatgagtttctgctggaaattcaattttcgggtttacatttaatcttcatttctccagctcatgtactactgctactatatcacttggactagttattgaacgttttcagctgtatggaataatctcttgttactcaatgtgaattatagtacattaatgacaattaccgttacaaatcaatgtaaattaattgatttaatcaatgagaaaggcacacatcatttctttcattgacatgtattaattgatgatattgactgaaatcatcacaaccatttatatttatgtttttcttttccatatcaaaatgaaatgagtaaatgactcatcatttagtacagtatacactatttgccgacactggatccattttgatatttcccttatatggtctctaatctatgacagtgggggagacattgaaggaaggcaggtggggaagt

SEQ ID NO: 30437 - DNA, 476 bp, Medicago truncatula
  Intron number 2 from transcript Medtr4g161000.1 (locus Med tr4g161000) derived from phytozome v7.0 (chr-ID MtChr4; po s 41000492 to 41000967 reverse strand)
agaggtatatttttttctgtctaaaatgtaaaattccagtatgttttggaatcttataacatgttagatgaccctttttagtttcaaactacgaaagtatgaaaccactacttgttaactgtaacaataggagttccatgtcagacataagcaaacttgggtttgcttggatggctaatgtgccagcagggcttgttcaatagttaacatgctagaggaagatgccgatatggtagaagttatagaaacatcatgtaatcaactccagaaatttgatgttgtataatgtatagcttagttgttgtcattaatgctaaagctaacttattatgttgggcttttgtcaaaaaaaacttattatcatggtctctttattgtattagtgattttgaaaacgaaatcttggaagccagcttattatttgaaaatgtgtttgtcttccaggttggcccttgtcagtggattgaagtgggtgg

SEQ ID NO: 30438 - DNA, 967 bp, Medicago truncatula
  Intron number 1 from transcript Medtr5g079240.1 (locus Med tr5g079240) derived from phytozome v7.0 (chr-ID MtChr5; po s 29484708 to 29485674 reverse strand)
ttccttggctaggaatttttgatcttcaggtatgtttgttaaattctaccttgttaattttgtattagaaaacgaaattatgagtcatttgataaaattacctttcattaataaaatagaaaggtaagaaatatttaagaatatgatagaaaaaatatgctactgtaaaacttacttattataatttgaaacaatttccctcaaaaacaacttataatttaggagcgagggagtattatgtataggaaataaaagattaattattgacataagtttaattttaagtctcataaataaatatcgtgattgtatataattttcttcactcaatatgtaattgcacgatatttgtcgttcaataaataaaatggttacctaatttcaaactcaactacccttcacttgtagttatatagtattccaatgattttacttataaatacctcaaataccacgtgattgtttgaaattgggggctaaatttcacaatctcaatatttgaggtgataaaagtaggagaatttttgaaaaaaatcagacgaccggttctttgcacaatggaaaaatattaaggtcgtgataatttaatttaatttttgataattttttggtggtgtttaatctttaacaatgaaagattgcgataatttagaaactaaattaaataaagttttaaatattttacattcccttaaatatattgttatcgattttctaagtgcagtttagttggtaagatgcttcaactatattcatagggctatgagttctagtcatgaaggagaaaaatggatagcattgatcctcttttaagaaaacatgctctaatggttttattttttattttttttaaggatgctctaatggttttgttaagtacaatgaaaatattcatttagtaattgatattttatgttttaactcattgttagggattaacaaaatcttgcaagaaagtcagtaaagc

SEQ ID NO: 30439 - DNA, 764 bp, Medicago truncatula
  Intron number 1 from transcript Medtr5g039880.2 (locus Med tr5g039880) derived from phytozome v7.0 (chr-ID MtChr5; po s 16969336 to 16970099)
aactcttcctttctgttcgttctcgcgattacactgtaactctctctctcttccctctgtttgtgtttttagggtttagaaagttataggttcttcttgattttttattcgtattactcacaatcacaaatatcacttcctgttgtttaaagtttcgatttttaagatacccattttagattgttttcttggttcttcttgatttcacttgttagattgtttgcattctatgttttttgggttattgtttccatgtttattttttggaagctatttatattgacttatgtagaagcaattgacatttcacgtacattcatatttttgtccacaatgtccatatatctatgaagcactgatactgacagggacacactgacacatctaataatttgaaaaaaatcacataatttagtgtgattacaagtgtcactgtcgtgtcggtgtcggtcacgtgtccgacaccgggacacgcctaatccgaggagtgtccgtgttttcatagccatatatgaatatttttatgtggaaataatggctcaaagcagcacttttagtcaatggataactgtgatttgcatgatctatgcctccctatgctcctattcaggtcttgtagttctgtgttagtatcatcataaagtgctctagaaaaaattagagagttgcctcttttctttgggatggtgaacttatttttgattttaaattatgttttttaaagtcaattaacagatttttacctaaaattaagagactcttcc

SEQ ID NO: 30440 - DNA, 837 bp, Medicago truncatula
  Intron number 2 from transcript Medtr5g023180.1 (locus Med tr5g023180) derived from phytozome v7.0 (chr-ID MtChr5; po s 9091775 to 9092611)
ggagatttaattgagaagactaagaaagaaccgtggtacgttttttcttgcctcattgtgtattctataattgaagctgcatttcctggatgttgttaattacgtcgcagtttagtggaaatgcttgtgaaaaaggagatgtgaaatcttaataactgagtttttttagtatcagtttaggcaatttttcttcagaaatacatttaggctctgtttgatataaaataatccttattgtatagcggatagttgataagctagcgtataacagacgagcttatagtggatagttgataagctagctaatagcagataaaccagctgattggatatcgataagcttacaagtcataaattaacttaaaagttcttgtacacaagaaatccaaaactgtcctcttagtttagctgactggtacttgtgctagttcaaaacacaccttaaactgacatgcaatgaatttttaaataaaatcaaattctatatgttctacacaagggatgaaatgaagattatatgtataatgggtctgttagttgtcttatcgtgtcggcagaagaaattagcaacaattgattcttttgagaaggacatattgcaacctattctttccttgcttctgtcaagtaatatgaggaatgcgctgaagtttgaataaaatctatcatttgtagatcaatgtgtggatactaaggaaaattctagtttaaatattatgaatatatgatttagtgcttccaagcagttttagataattgcttaattttcttactttctatttttaacttgattttgtttcaggtacactgctttatacttgctgctgtttgttgtta

SEQ ID NO: 30441 - DNA, 449 bp, Medicago truncatula
  Intron number 2 from transcript Medtr5g023130.1 (locus Med tr5g023130) derived from phytozome v7.0 (chr-ID MtChr5; po s 9073870 to 9074318)
gagcttgcaagtacttgttgttcctcaagattaaagtagtatcagactcatttattctcaagctttatttttaggagcaagagctgaagattgcaaagactcccatcaaatttcaatactttgagattttttctctcatatttgccatgttgccaatcaagctgtcgtcttcttagcaaaatttgctattatgtcttttattgattttgtttgggttgaagaaacccctcatacttttgctattgaggctaaaaacaattgatgagaatttggaaacaaagatgctattagaaaatcgagatttgaaaaaaaaacaattttatgagataaattcaaaccaaatattttccaatattgaataggcttaatggtgcagccttgaaaattaacattaacatttaaactaaattgtaggactttaccccaaagggagtccttccagaaattct

SEQ ID NO: 30442 - DNA, 895 bp, Medicago truncatula
  Intron number 1 from transcript Medtr5g048590.1 (locus Med tr5g048590) derived from phytozome v7.0 (chr-ID MtChr5; po s 20550950 to 20551844)
attgctttgtaagttttaattacccttttgttcatttttgtttttggatcggaaagtttgtagctttgactttaatttcattgatttgttttatgggttgttgtgatttgaaattgaattgacttaattgtggattttgttttggtgaattgacttgatttgagtgatttgcttttttttgaagggttttaggggtttttgaatttgagctagatctgggtttttgataagaagatcgttgaatttgagctagtttttatagcttgatttggtttttgaattgagtgtgtttgttaggaacttcatgattaggttttattttttgcttgaatttttttaaaattggagaatgagttttgactttggaaattgttgagcattttgaaatacactatagttttgtttgatttgattcgattttagtttgattgttcgaatcaaatgccttgattcctgttcaatgcggagttaggattttatacgaagttttcaaacatgagaattgattttaaaaggaattgattctgatttgatacattctcagctggatctattcaaattgttaacatttatatggatcttgtttttcattatctttctggaatgattgaggcaaataatgtgaacatatatattgtggatataatggtttcgagtcaaatcaaaagtgaaatttcatgtcttattgtttgaatttcccattttcagctaacattgaattgttgagtctgatttgttatttgtgtaagttggtttttcgatatctgtgacgataataacagcatgtttattcgtaatttcatggaatgtaatgtatttcatatgaaaatgtatatatatgattttctcaatgttttatatttcaatgtgcaggttgctaaagacccaactggcc

SEQ ID NO: 30443 - DNA, 607 bp, Medicago truncatula
  Intron number 2 from transcript Medtr4g023390.1 (locus Med tr4g023390) derived from phytozome v7.0 (chr-ID MtChr4; po s 5060502 to 5061108 reverse strand)
aatctaacaaaggaagctactctaccaggctaagggtaggtgctcccaaaagtgtccaatttaagctttgatttttctcttttctgttttttcttttcttgagggttttggtttatgtcccccctcttttttgtactttctcttttcttttaatacgattagggtgttgtagtaggagacccctctgcaccccttctttcgcttaaaaaaaaaaaaattcatacaaaaaaatattgtgtgcatatgctttttccatctttatatatatatatatataagaacattttgaaaaaacaaagttgtacaaatataagtattatttaaaatttctatacgtatttaataattttttttaaatatatttataattaatttggatttgactatgaaaaattaatatcgaatatatttatacacaaattaaaatttagttataatcatacataaatatacacattaattacaaaatcaattttttctggatagaaaaaacaattatttttaatatttgtaaaaatccgcaaatgagtttatagaaagagattgtgtgtgtgtgtgtgtgttaattataggaagtccttgaaagttttggtgttttaggtttcca

SEQ ID NO: 30444 - DNA, 448 bp, Medicago truncatula
  Intron number 4 from transcript Medtr4g036350.1 (locus Med tr4g036350) derived from phytozome v7.0 (chr-ID MtChr4; po s 8883510 to 8883957)
tactctttttggagagtatgttgaagagctgagctctttcctatcgtccggtgaatctcaaaatgttgttgtagccattatgttggcaaaagttaaattgtttcaaggtaataatttatgactagcaattgtgattgtttgtttatacgaatatatatacttgattcatatacttttgaatcttaatgataggaaaaccagcattgcaaaatgcattttcttccactagaatcacattcaatcctgaaattggtgaaacaaaggaactaaggaaaaggtatatatatatatatatatatatatatatatatatatatatatatatatatatatattttttttttaatataacattttttttcttcttaagttataatattattgattgatactttttattatagctttcttagtgcaaatacaaattctcctgcatcgggattgatcc

SEQ ID NO: 30445 - DNA, 715 bp, Medicago truncatula
  Intron number 2 from transcript Medtr4g080670.1 (locus Med tr4g080670) derived from phytozome v7.0 (chr-ID MtChr4; po s 16613154 to 16613868)
gagctggacctccccaaggtatgagcctcataaaaaaaattatagcccagttaacaaatattaaatatatagagcgagtgttaaacatcatatttgtggaagtggcctagtggtatagttgcaagttggtattgcctaggtctctagttcaacattcaggttctatgttttcttatttacttttcctttttgcttctttaattaatatttttagtatgagagagctttgatttagacatcatttttttttatagatttgaggttcatctatcctctcatcaatttagccaaattctcttcaacatattggattatatatttacaaatgaaaacataatacaaatttttttcttcttattttgttagaacacttgtaatttttagctcatacttattctataagatagttaaactcaacaaatattatacaataaattattcgcttaaattgtatttttattttattgattagaatattgatcttttatgtgttaattgcaataaacacttttttcttaatcttgatggattttattttcaatttaaatagataattactcttttaaaaaaaatatcttttttattttgttaggggcctttttttatatgagagccgagcctccaattatctagggacggccctaactatgtgtatgaagccatgtccaaaatgaaccaaaaaattggtgcatttgccaataggttatcaaactct

SEQ ID NO: 30446 - DNA, 713 bp, Medicago truncatula
  Intron number 3 from transcript Medtr4g080670.1 (locus Med tr4g080670) derived from phytozome v7.0 (chr-ID MtChr4; po s 16613912 to 16614624)
gagcacatcagaaggtttactgaacagtgcggtaagggaaaccataatgagctccacaagttatagatgttcatttttgtgttataggaacaacattcttgtggtattaattccttccaccaaactcaacccaaacatgggaaaacatggaaaggtgtttcatgacaagttctataggttctacaagctctcgtatttgttcccacgtacttcagttgcttcttcttttcttctttttttccatttgttctacaagtttttgtcactcaaaaatttcttgtcgtgattttcaacaattcttcttgaaaatcattttgctaacaaggtgctccagccacaacgattttgtgttacgtcttgcttaacgcggtgacaatagagaagaggaagagcgacaatgtctagttaatggttaaatccaacatcagcatatcattacaagttcctctctggttgatcatactcacgtcatccattacatctaaatcttgtcgctacattaatttgcaacctcaattactgaatcaacttccaagtgagacccctccaaagtcaccatggcatctttgtgttttggccactccaacattgtttggttttagatttgatgtctttgttggtggttttatgatattattgttatgtttattttcttttcttttttatgttatttttagtttgttttaggtttgtacccgtaagtgttcactgaa

SEQ ID NO: 30447 - DNA, 956 bp, Medicago truncatula
  Intron number 1 from transcript Medtr5g010080.1 (locus Med tr5g010080) derived from phytozome v7.0 (chr-ID MtChr5; po s 2402816 to 2403771)
atagaggttgtgaggctcattctggtattaattctatctaaccacccccttttcatttttataatctttaagtaaatagtcattttgattcttaaattcgtgtgacactgtcagaattcttcttcaatgtataaataatacaacaacgtacataaattagtcttttttgttatttaatattttatgtccgtcaatttagtccataaaattattaacgaaagatacactctatgctctttttctaatttcgaaatatttagggactatgactctgtttggtagaaagtagttgatagtggattgacttatagcaaataagctagctgatagtggataagttggtgaattaaatttgtagtgttttgaaaattatacggtataagctatccattataagtttgtgattaggggccgtttatttggattggcttatttactatgaaacacagacactccacaaattaggtgagtcttggtgtcggacacacatcggtatccgacaccggaacatatgattacactaaattatgtcattttctcaaattattatcggtgtcggtttcttgtcctgtgttcgtgtctatgtccgtgcttcatagcttatttttgagcttatgaaaagtagtttatgtgtcccatgtccgggtctatgtccgtgcttcatagcttatttttgagcttatgaaaaatagcttatgcaaataaataaattgttatgttaattcataagttctcactaacgaaaaattgtatttttacaagttgttttttcataaattaccttgacaagcttatgaattatttatttgcataagctgttttggataagctaaaaaataagccaatccaaacgggcccaaggtcttgccaaagactctatataccaaattgggtatttactcaattttttcattttttttctgagtttaaacatgatgatgaaatatgaacagggg

SEQ ID NO: 30448 - DNA, 657 bp, Medicago truncatula
  Intron number 1 from transcript Medtr5g043800.1 (locus Med tr5g043800) derived from phytozome v7.0 (chr-ID MtChr5; po s 18131753 to 18132409 reverse strand)
ctaccataagaagggggctgtcattggacctgattgtacgctaagctgtctgcaacactaattttacactattagtatgtcttctaaaaaaaattatgtctcaggtatgatatgtccataattagacaaactatttcttcgtagaagcataaggtgcaacaaaactctccttttagaattttagcattgatctttagttttgatttaaatttatataaaattttagaaaaaaccattttaaatgtttgagtttgtgtaagtattttaaaaaaattcttttgttcaaataattgtttttatgaagaaagtaaacatttactttaactatttttttttcttctaaaatatcgcttgtaattgaaaaaaaaaatacaaactctatttttattattatttcaaacaaaaacaaaatatcaccaaaaaaatatatcatactttttaagaaatctctaaaaaattattgcttatttcttttggacaaatagtcaaatgacaatactattgaaaatttacttagactccgaatctgaatctagtcaagtcccgtcttctctattcttgtatggagactcctacggaatagattaccgacgaaggataatttgtttgtgtgtggtgttatttctcatgataaccaacattgtgtggtaggttgcg

SEQ ID NO: 30449 - DNA, 809 bp, Medicago truncatula; identical to SEQ ID NO: 30118
  Intron number 1 from transcript Medtr5g073770.1 (locus Med tr5g073770) derived from phytozome v7.0 (chr-ID MtChr5; po s 26551496 to 26552304)

SEQ ID NO: 30450 - DNA, 863 bp, Medicago truncatula
  Intron number 1 from transcript Medtr7g068170.1 (locus Med tr7g068170) derived from phytozome v7.0 (chr-ID MtChr7; po s 13899067 to 13899929)
gctgtggagggtgagatttttcactcatgttttttaattttttttttatattggttttttggatttgaattttatgtagaaattatgtgttttattttccattgtgtgggtgagggagattgtgatcacacattttttttttaaaactcggtatgtgatcaatcagataccgaggagatcaattctaccgtccactatcgggctctcatttaaatctctaactgacctagtttatataaattgactgtttttatgcttttgagagaaagtttcatttttaattttcaaagaatgttttcatttccttttgatttgatctttgggtacttttttttttatgaattgcatggaaaacaaattgtgttttaacactttctctcatgttggtaaaattgtgatctgatcaaataatttctgttttgtgaggtttttgtattttttatttgttttggtgaattgtttcatgggcatttgattcatttttgaggtagcctctagtagaatttgaagaaattttttaatttttgattaattttttagcaccctttttttttaatttcaagaagaagaaaaaaaatctgattttgattgatttcaggggtaccctttagtttagttaaatttgaagaatttttttttttggttacaaattacaatacgttgctttctgcatgtatttttcatttgcttttatggcttacccttcttaatcaacagttgactataattattcaaagattgctatgtttcaatttctaaatttttagcaaaatatttctaggaatcatgaaatcacaaactcttatgttgtgacaattttactaaaacatttgatatttttttttatgtgatgcagctgcaag

SEQ ID NO: 30451 - DNA, 822 bp, Medicago truncatula
  Intron number 2 from transcript Medtr4g142790.1 (locus Med tr4g142790) derived from phytozome v7.0 (chr-ID MtChr4; po s 35660241 to 35661062)
atatagttacgtgctttagtttatttctgtgttttatccgattatagtgttcttatagatgtaaaaaaaaaaaaaaaaagaaatcatcgggcttcttcacgagattgtcaaaacaacgccaattgagactggaaagaaaccgtatacgaatattgtgttgaaagataaaaggtattattttctaatttgtcagcattagaagataaattttgtataagtttgataatgatctgaaatatgtatttccttatgcagtgggaatatggttggattaacactatgggaaaaatactttgtagctttatcatttaccatctatttaccttgagttctttgcttccattttgtagtcaataacaatcaaaatatatgtaacaattggtcaggttcgagactgcttatcaacctccattatccagttattgagaagtttaagatttagtaagtttgcattatgatttcacaatatagtattagagtaacttattatttcacaatctgatttgattgtttattgaccatatttcttgaattcttgtcgtgaccttaacacttctcaagctcaaagtcaaagcttcagtcagaacttaagtcagagttcggcttcttctcaacgtgcttcgtacaacgattttttcaatccgtctcaagttaggccaattgtgcaatttataaatttaatcaaggtctgctttttttatgcacaaacatgctttgagttattttacgcacaaatttaaaatacatattgcattattctttatttcatgtgcataatttttgttaggatacatactgcatcactatttggaaaacaactaa

SEQ ID NO: 30452 - DNA, 955 bp, Medicago truncatula
  Intron number 2 from transcript Medtr4g141920.1 (locus Med tr4g141920) derived from phytozome v7.0 (chr-ID MtChr4; po s 35128653 to 35129607)
tggtggatcttgtatctagtggaaaactgatcaaggtatattacaacatgtttcattatgtcataactattccatctcatgcaaacatacaataaaaaattgtcgtaaatgcatttgttttcaacaacgtatttttttgtggttttatccaatcaccagtgtcggtgcactttacaaccctatcctatgggttaatgtaggaacatgagcatcaaatgatattgaaacatggatatccccatttgaagcagaggttgacctgtctttacatcccctatcttttgggagtgggttctcctctgcaatactgttttatatttaccgcttcatggacaaatactaagtcaaacatttactctaaagaggtagtggatttgtattcggaaaaaccaaagtctcacattggccagaaataaggcctaagtagagccttagaagttggcttggtggagttgagactgctgtattatccatgaaccaagttcagtagtgttgggtgtgagaagatgtattagaaaaaacttgtgtgtgagataaggcctaaatagaacttctaatatctaggcaatctcctccttacaagccactttttttttcttttttttaaaattcagaatacatatatttgttacaaataagctgttgctgctgatgctcttgttatattctattctctgtattctgctgcttagatacggctgctggttgtgagtttgggttcagattctagtatacaactctacattttctaatgttgactggacaaaattagtattttttgatgtgaattaaaaacagtttttgttctttatattttaggaatcaatgttttttcttgatttagtgttatacatttattgtgagccatatttgggtgctattctcatttttggttgattcaattagagatcttactaatgggctgagctttatatttcaggtgaaacataggtac

SEQ ID NO: 30453 - DNA, 738 bp, Medicago truncatula
  Intron number 2 from transcript Medtr6g098950.1 (locus Med tr6g098950) derived from phytozome v7.0 (chr-ID MtChr6; po s 21613672 to 21614409)
cctgtgcatccggatccttgtaggattgggctttggtttgggcttagttctttttatgttttttttgttattttcttgctatttgcactgcttttcttgctatctgaacctgttacttgcctacattttttataaaaattcctaaaaaattcttagttgtttcttggtatatttttggcatttttatggtgttttcttgcatgtaaaaaatgttaaaatggcatgaactaatttccatgtgtttttacacttttggtatactttttgctatgtttttgttcttgatactttgatatgtgttatgaataaatgataccatatcttatgatgaatatgcctctggacatgtgcttctttttgctgttttgaatatgattttatggatttcttgttttacgagcaacaagtgtttgttttagagaataaagtgtcaaatttctctatgaatttggtgtgataccttgcttgcatgtgtttccattaatttcatgtcatggcttgaaacaaaatttctttcaaaattgccatgatgtgatgattatgggttacaagcacctttaggtatcacatcaaagtttttaggtttattgccactttattaccttttctttgccatttttatgcatttccttttaattacttcctactattttgtgctttatgattactaaccatttcatctcatgtgtcatacatttcatagcattccaccaccctctccactctccactttcttta

SEQ ID NO: 30454 - DNA, 613 bp, Medicago truncatula
  Intron number 2 from transcript Medtr6g093600.1 (locus Med tr6g093600) derived from phytozome v7.0 (chr-ID MtChr6; po s 20217271 to 20217883)
cgggctctgggattcttgccattgcagctcttaaggtattcaattgattttcggagtactagagttgaacttaagtgagaaaaattgttgaagaacaagcatacttgagttgagaccacattaataagctttagtttaattatgttcaatctcagaaagctagaaaatgcagtcctggactctctggttttcctccttatgctggtcataacttatattcttagttgcaaagcccccaaatttattttttgagcaacaagtccaacatattatcagtttttatgcacttcagcacttgttattttgttgtgatatctttgagcataagaaaatgttttggttgtaaattgcattggtaacttctgtatatagacgaatacttgcattggtaaatgaagccgaaatacttcaaaagtacaaaagtattggtgtttgacatgtatctctactaatactcgttggatatttatcaatacatactcaaaaagtttccaatatttttacagcttttcgatattgtttacattgtttttatgtatagttgaatcttccatttcaatttttgacattctgttttgttattagttcggtgctgcctttgcagttggagttg

SEQ ID NO: 30455 - DNA, 1019 bp, Medicago truncatula
  Intron number 1 from transcript Medtr5g087040.1 (locus Med tr5g087040) derived from phytozome v7.0 (chr-ID MtChr5; po s 33538938 to 33539956 reverse strand)
gaaagatcgagaagaattacttggttggattcgtcaacaagcggctagggctggatttactatttctacagataaatctagtacaatagtgccatacatgacgatgcaatgtgagaggagtggtgaatacaagccacctaagacgaggaagaagccgaagcttgaaggcacgagctcaaggaagtgtaattgtccgtttaggttgaaatgcttctttgaaaaaaaaacacaagaatggtggattgcaatgctttgtggagttcataaccatgacttggcgtcaaatttatcaggccggttgtgtaaccttcttggtggctggttgtgtaattttgatatttattgtcaatatgtaactaatattatataaatatatgaaatgatttattttggatcgtttacgtgtcattaagtgtgtttaaattattaccggtcattaccggcgaatttgtgaaatttggatcgtttatgtgtgattacgtgattgtgagaagaacgatgtttttgagtaatttggatcgattatgtcgtattatccgataatcttgttaaactggcgtaattcggttaagttatgagtgtggcgtgattatgggtcattctacacctttcaagtttcagttctgttattgcactgcatttattgcagtttctgttgtctgctatgaacgttagttaactcacgttacacattacattagcgcatgttaacttacgctaagttattctacaaatatcactagcgcatgttaacctacgcaacgtatcttaagttacgttgtaattcccactagtgcatgttaacatgtgtaggggcatttcagtcatttactttgggaatgagcgaatccatttaggtaatgagcagaattcctagcagttcatatagcttggggcaggaaaatgctgttgtggatcaatgggtcaaactaaaaattggccatcttggttcgattatttaggcccaataccccacaaacattctaaatgtacccctaaggtttcttttgtaggtgaag

SEQ ID NO: 30456 - DNA, 905 bp, Medicago truncatula
  Intron number 1 from transcript Medtr4g121360.1 (locus Med tr4g121360) derived from phytozome v7.0 (chr-ID MtChr4; po s 28438233 to 28439137 reverse strand)
acaagaaaatccttggcatttgttttggtcatcaggtactaaatcaaatcaatccatatttagtaaattataaatcactggttatgttgattaatttactcttatttttcttccaatttcgaacctttcattttctttctattaatatttgttatttaatgtaattgattcgcatttatttcagtgctggtacatgatgctataacacatggtccaggtggtccactttcaaaaacaaaaacaaaaaaaaaaactaagacagctttaaaaacgaacgtgtcagttgttttatggcgtaaagaaaataccttagatattcttaggattggttctctctactttggaatatttaacgcactatctatactcaagttgttttaactttgtttattgatttagttttaactttttcttttggagaatgttgatattgccttgattaaacgtagataatgactagacgttactttagttgttcgtttgtacctatctatttattattcatgacatccatattacactaatatttatttaaccagacaactccaaaaatcataataattaacatttttcttttttaaaagaatattttgtccagtttttgtcgacatgtaaatctttaaaagtatcacacttgtctatatgcatggcccatatgatgcaatcttcacatgcatcactttacgttacgacatgatgatatggtatcaactcggttatataagtgctttattagcatggctttgtcttttttcttgacatataatgtaaagctgagttagaagtattctattattaatataatatattttacgtgcaagtttttcctaccattaattaacttactttatataatgttaatttgattagatacttggccgtgcaattggagggaaggtgactcg

SEQ ID NO: 30457 - DNA, 846 bp, Medicago truncatula
  Intron number 1 from transcript Medtr5g027090.1 (locus Med tr5g027090) derived from phytozome v7.0 (chr-ID MtChr5; po s 10994521 to 10995366 reverse strand)
gaagattattctggaatattgttattggtcttacggtggtcacttatcctaaacagttctttttttattttatgttgcttgtgcttttctatttttccaatttttcacgaagtaaaaataggggggttttgccatctgtttgcttggatatcgacgaacgggtaagttttatttattgaattattattgatcactattattgaaaattaaatatatgaaaaacaatgcaattagtattgtttgtatgacaatatatattttcaccctttcttattatcaacatcgaagaattgagtttttttattacaataaaataagaatcaaatttaagtataaatttagaatgcatggctaattatccattgttctgatctaccaaatttttagcaaggaagcttaatacattctttcaaacaatactcaatatctcaaatttttatttaggttgtatttttgaataaaaaatgataagaaatatttatttactaaatttacaacaaagtttaatagaaaggtatgtaaaaaactaatggtgtatgacataagaaaagaaagcggagtaaaaaaaagatcaataaaatgtaattcctttaaagtcaaactaaatataattttcttcttctgtgagtattttgatgcaatccattcctcaattaaactgctgaagctaagggggtttatcacttcgttttctaagattaagccaaaggttgaaataatatgtggaaggtatgatatttaacataaaaaatctattttctaaatctgttgtttgttgtttctaatgatgtgttttaatgaattatattagagcatttaccttaagagtcctagctcagcttgtct

SEQ ID NO: 30458 - DNA, 558 bp, Medicago truncatula
  Intron number 1 from transcript Medtr4g143020.1 (locus Med tr4g143020) derived from phytozome v7.0 (chr-ID MtChr4; po s 35744966 to 35745523)
actattctctctcagatctgcttctttcataataggtaacgtgttatcaatttctttctattttcgttccttcacacattcttccagttctcgcttcacgcattttattttatggatctacgtgaccgtttcttgattgatcgcttaacttgtattttcctctgctatttcatgtgcaaaattttattcattcgttttttatcttgttgttttgatttactagctcacacgtattccgtcaatctattagatctgctacttatctttaataatgtgtccaatccattagtgatatatgttatgtatcaccgacaccttactatcatgtttgtgtctgtgcttcgtatataatatgtgtttctggaatgatctcattatttggcaatgccatgaattaaggaaaattaaagaacacaaaaacctagttatatacatgcacgttgttattgataatccaaagattcttagtattctgcattctattttcaacaatgtggactgtgtttaattgttgtttgtattatccttgaagaattccactttttgataagtgacaac

SEQ ID NO: 30459 - DNA, 672 bp, Medicago truncatula
  Intron number 2 from transcript Medtr7g034740.1 (locus Med tr7g034740) derived from phytozome v7.0 (chr-ID MtChr7; po s 8337977 to 8338648)
ggcgagcgaccagtgcacattagacaggttatatattttaataactgcaataatttgctcatttttgtgtatgtttcttacctgaatacaatggaagaagtgcttaatttgaagttaatactaacaagtgccccttaaggcattgtttaagtagtcaaaagtggaatgtttattactttttcatgtgattaattggtgtttttaagtcaatttctttttatggattcctgaaacaatgcccttgggtaacttgttagaatgaccctttaaaaatgagcagattgctaccctattctagcagaacatatttcaaaatcccgggagagatagctcactaataaatgaacaaagggtaagtagttcgactcatccacattcacgtggtaaacatttggaccatgtgttattacaaggacacattgcccttgctaaatcaaatggaaagtagatatataattggtctatttttgacattgtatccatagatagcgcacttgccgtatttataagatccatatcctaatcaacattgcgtttgatatagtcaccatctttaatgcataatttgctattttcgtgtgtctttttttctgccaagagaacatgttatcgagttagagtactaattggatcggtactttgtctctttcccgtttttctagtccgatcaaa

SEQ ID NO: 30460 - DNA, 760 bp, Medicago truncatula
  Intron number 1 from transcript Medtr7g027280.1 (locus Med tr7g027280) derived from phytozome v7.0 (chr-ID MtChr7; po s 7188708 to 7189467 reverse strand)
ggtcatctgaacttgatttgacgcttaagctttaaatacagattttatattttgtacccattgttgctaagatttaaattcagtttttatagtttttctttgatgtcattgttattgttaatttgattgctcctctacggttggagttataacttggtattcgatttttgttatgtctaatcattctatattttaaaaagaagttgttactacatatcgtagttttctttgctagcttatgtattttataaattgtttgaatttatacatttttatttataagtaacaaactttatttgacaatgagtaaactagcagaagatgtgttaaactattttaaatgagcattcaattgagaagaaaatgtttgttggacatgcaaaaatcaattgacatcttgagagagagaaagaagtagaaaaagtggtataatagatgtgatattgatgatgtgatagaaagattgagagagagagataaatagaaaataaagtgataaacaagtgtatgatattttgagatgttcaaatataagaattgaaattaaaattaactttgcttccacaacaattagttgagagacataaaatacataaagataaatattgataatgtggtataacataacagattactctcaatcctacaattttatgaattaacatataagatgagaacctatatgtttctttaattttaaattattgaatcctttactctcctaggcaggggcagtttcaccgcccggcgaccccgggcg

SEQ ID NO: 30461 - DNA, 484 bp, Medicago truncatula
  Intron number 1 from transcript Medtr5g022920.1 (locus Med tr5g022920) derived from phytozome v7.0 (chr-ID MtChr5; po s 8946777 to 8947260 reverse strand)
tttctctgcgatcttgaccttctgttttgcattaggtttgattcttttctacaattatttctctaattctttgttttgtttctgtattttgggtgaatttgcaatgtcaatgtgttgtgttttatgataattttgtttttcaatttgttgaaaatgattcagatgattttgtttatgtgaaatttagaagaaaaaaatgaaacttgggaggtgggtttatgatattttgttgattgggtttggatttttcattgttttggttatgttttctaattttgttatttttaatgtaaacaaaatttacaaaattgtaggttattaatgatcttctatttcttggatttttaacatttagatgtgacaatttatatgtttgaagttttaaggtttaatggttttttttgtttgttttttgaataaggtttaatggattgttttgttctctgcagttggaacattattgggtgctttgacaggagctttg

SEQ ID NO: 30462 - DNA, 1018 bp, Medicago truncatula
  Intron number 1 from transcript Medtr5g089340.1 (locus Med tr5g089340) derived from phytozome v7.0 (chr-ID MtChr5; po s 34721595 to 34722612 reverse strand)
agtccgttgatcaggtcctttattctcaccacatgcattcctttctgaaattacatttgttttgtagaatttttcaatgtttcattgtagaagaacattttatttttgaaccttaagctagagaaattaacatttccaattatagttataaagtagcaatgttgttgaacagcggctaattcggtgcaatatcgctataagcataacatagcggaatttgaacaattgtaattgctccgcgatattggtacaaaatgttgtcaaatgggtggctataacgcgatatagctagcagaatttgaacaaactgctgttttccacaatctgtgattaatccaacagatggcggaactgtatatatttcttaaggaaaatgttaagttttgtaaaattacgttagattaatgcgtttttggcaaaagccacactctggagcttaaaaaaaattgtggtgctattattattttgacaaactcgctgctaattcaaatatgcacaaaattcgagttttgaactctaatttaaattgaaaattgtcatatgttaagtttgggggaattatggcagattactatttttttttgggtaaaagctactgtttgaagctctcatgatttttctatactcgccaccaattcaaatatgcacatagtttaagtttagagtttagacactcttgacttttaaataaaaaatttggtgtagcatgtagattgatatacatatatttggcgtagcatgtggattgatatacatacattgttgatatctagaagagagaaagaaagaaaaaaaaaaactgtatatttgatggttggtacttgttgccgactctatatttgtgagttttacagccttactttttcaagttcatttgtttcttctaaaaatccattgaatgacttaatgacgacatgtttctgttgtctttaaatacaaatggtgaacaaagttatgttctaattttcatttacttttattaaaataggttgctttggatattgagtaccaccataat

SEQ ID NO: 30463 - DNA, 886 bp, Medicago truncatula
  Intron number 1 from transcript Medtr4g143200.1 (locus Med tr4g143200) derived from phytozome v7.0 (chr-ID MtChr4; po s 35813637 to 35814522)
ggatttgttttcttgcatcctgagtagtaattgaaaaaataaaatcattctgcccctcgagagtgaaagtggttggaataccaagtatgcccagcttcctctttttattttatttggtttctttctgcccatttctttagcgaaatttcttaattgttatcagtggcttgtgtcttaaaattttgccatacatacagcttggtaatattttgtattttattattcttagggcaattacaccaacctcccccaagttcttaaataacacaaaaccctcctctagtttttaataacacactaacctccctaattgacaaatatctccccttccaattcacaccagccctgaaatttggctttcttattcaattttgtctggtttagaggtttacaaacaataggatggagagagggaagagctcagctagcgctttatattggaaggaacagatacaaatacaaccttttttatttctttatttaatggaagtttgactgagttaaattgaggagaggttttttatttctttatttaatggaagtttgactgagttaaattgaggagaggttaatgtttacttaaaaactagaggggggtgtttgtgttgcttaattaaatctcaggggaggtctatgtaattcgcccttattcttaatattgatcttcttcgtctattttcagatttgattgaaattgtactgtgcatattctagaaacttttttttactgtttattgctcatatctattgtgtggctgtcttttactttctaaattccaataacatcccttcctctagatattaattcggttatgtagcatataaagtaccattattttctgttttaacagtactgataatcaaagtgttgaccgagcatatcgta

SEQ ID NO: 30464 - DNA, 621 bp, Medicago truncatula
  Intron number 5 from transcript Medtr4g118420.1 (locus Med tr4g118420) derived from phytozome v7.0 (chr-ID MtChr4; po s 27661705 to 27662325)
ttctgattattattcactctttctataaaagtaatattattcttatgtttcttatttttgctctgatacttatactatctctgagtttttttaacaagtttttctcatttttttttaactctcttttgttttgtctttcttctattctttttgttgatgacaaaagggggagtaaattatagtattttttttaggctctgagccccattaatttaatcaagttaaattaatagaaccggtttctaaactcttagtcttttaatgagaaatgcttctgagttattaccttatgcgcattttattgaaaaatttaattaacttgtatagaacttagggggagcttacaaacctcaccttaaaagtctataggactcagggggagcttacaaacctcatacctggaagtcaacttgttaattagatcaacaacaattgaacattttaaatactattgttagtcatcatcaaaaagggggagattgttggaacaaaatgtgttttacaataaaccttaataagttttgatgataacaaggtattaaaaaattgtcaattggttactgctaatatttgttcaagtgtacaggaccatagacaaagttgatcaatttaataggtctt

SEQ ID NO: 30465 - DNA, 1057 bp, Medicago truncatula
  Intron number 1 from transcript Medtr7g040500.1 (locus Med tr7g040500) derived from phytozome v7.0 (chr-ID MtChr7; po s 9928239 to 9929295)
ggatcaatatagaaggaattggaaaaggcaaagaggttaagtaggttaaaaaatataaaagctggatttaaatatcttaaataaaaaatggttaagtatgttttttttaaatgaggttaagtaaggtttgctccttataaatattttaaatgctatctatagttcctttaacaaattcaacaagttttggtcacctaaatgtttttcatcacaatttttggtttctatttttaagtaaattcatgtacattcgtattttttaaagaaattttataaagatatttagaatattataacaatttttccaatgaaaattcatatttaatcgatccattgttatcaaaaattaaacttgtgaaaaaaatccaataatatagaaagatctttttacgcaataaaaagaattttttgtcaggattatcagttttgtaaatcttatattgctcaattacaatttcaattgacatgatttatggattacttatttcttcaaacaaatattatgaataacataaaccataatagtgaaatgaggtatatttgcaatgactaaaatcaaaaaaattattttcatattataaatactaaaagaaaaaattgatatattaatgagggagtgggagcggaatgtggcgtaaagtcagtaacacagaaagtatctctttttggagtgttccttggttagtgaagttcttttgtggagtagatttaggcgccaaagggttaggaagttcttttgtgaagttcttttatggtagctgaaatgagtaggttaggttggagggttgatggaagggtttggaagtggcgacggagactgttcgctagggaataggagcaggtggtgcagtgtgattctctattcgataacatttttttcttgcatgataatgttttgcataaatggattcggaaacatgatcatgatgttggctattatgtaaattatatttaatgctttctcaattagaatgaggaaatgggtaacgatttgcataacgacataatttgaaacaaagtagtgcctccaagtgtcgctttttgcttggaggcttta

SEQ ID NO: 30466 - DNA, 330 bp, Medicago truncatula
  Intron number 1 from transcript Medtr5g047830.1 (locus Med tr5g047830) derived from phytozome v7.0 (chr-ID MtChr5; po s 20202795 to 20203124)
ttgtgcggcggcagcggcgcaccacgacagtgaattacgatgaatactaatttgaaatttatttcaattccaatcatttgaatggattacagtgattagagtaattacagtgataatttgaagaagaaaaatcttaatttgattacaatggttacaaaatattaattttcagttcaaatcattggtctcattattttttgtttgaatggtactgtttgtttctgatgagattggtgaattgttgactttgagtgtttggatttgtcctttagtgctattgtttcctttgcctttgagtttgcccaggttgaaaaaatttaaggttttttt

SEQ ID NO: 30467 - DNA, 537 bp, Medicago truncatula
  Intron number 2 from transcript Medtr5g018440.1 (locus Med tr5g018440) derived from phytozome v7.0 (chr-ID MtChr5; po s 6711491 to 6712027)
aaatacgatcgtaaacagatcaagggctcaataaggtatctatgtattttacaaacttcatctaactaaccaattagtccttaactttctgggatgcaagtccctaaaaaaatactttacttggtgtgtgtttggtatggccttgaaacttaatcacgtctgggtagaagcaatgttttccagcttcagccaaatcacggtcaaagtgcaatggaaattggttttgggcttccaaattttggaatcaaattcatataaaattgttaaaataaaaatatagatatttaactgtaagcaaatagtcaaataaaaggattaacttgagaatttaatagaatagaaaataatttttgaaatacttgtaatttcatggatttatttgaaagtgttctataaaggagagattaatctggtggtttattcaatcttgaccgttagttatgttttaactttttgtttagaacttgtttccaaaagttgatttcttctttgttttactcagagattattccgagtgtagcacggtgaattgcccag

SEQ ID NO: 30468 - DNA, 702 bp, Medicago truncatula
  Intron number 1 from transcript Medtr7g084800.1 (locus Med tr7g084800) derived from phytozome v7.0 (chr-ID MtChr7; po s 18391072 to 18391773)
atacttctaggtatgcttttcttcttcttttttctttaattttctttattattcatataattatttagtgttagtgttatgtgttctggaaaattataagtggatttgaactttcaatagaaatggttgatctgctttgttacagtttcaagttagatattttttaattttattattggttttatgttatggaaaattattattactgatgctgaattatgtatttttgagtagattgaattggagttgaaatggctgatctgatttgatacaatttatttgatttgtttaagttagattaatttaaaaaaaattatgttgcattgtttaaaaaagtgaaatttgattgcttgcagattcatgcatttcatgttgctaagctgaattttgaacctgatttgcttatattgagtagtaattgcttaatttcagtgcagctccatacaatctgattaaaaatttgcatttttttgtattttgaatgcaactccaattagttctagttgtaatactgattcaagggtaatcatgaatatagggatttttacaaacattaattttctaggaaatgattttatcaacataacacttttttattgtttttgtttgattattgaggtgtatacttgatttaggatagtaatgttgaaatgggtttgttatacaggatcaagcttccatctggtgcaaagaagattgttc

SEQ ID NO: 30469 - DNA, 834 bp, Medicago truncatula
  Intron number 1 from transcript Medtr5g008490.1 (locus Med tr5g008490) derived from phytozome v7.0 (chr-ID MtChr5; po s 1602679 to 1603512 reverse strand)
ttctggcagctggttctgcaggtagtattgctgttgttgtccttatgcgtttcttctttggaaaaagaagatgagagaaaaatgatccaatttcatgtttcctgtatgtttagatgaacattgagtttggcaaaatcatagcaagagcaatttaattaaagcttcaaaatgtagcttcttttaaaatcacagacttatggtgaatctgccaatgtcactacgaatctagacatacacttcagtggaatgatgaagggtttcttaccatgatttggatgttggtagtcattataatgtttttttttttttgttatattgtgtttgggagttatgtgttttattttgatttacgttgttttggttttagtagctagctggttgtttcattaggagaattaaactgttttatttagtggtagacacttatctttctctttataatctctattttcataacacattatcatcaggtctaacaactgaaaagatacacaactctttttaatcgattttaatttgtaaaataagttcaacaattcaaaataccatatgaattgacgagcaaagagaaaactttgcttctcaaagagtaagtgaaggttgaccctacaaccatgtggatggaggacaaggtgattatgaatcacccaagaggctacacaaacatttgcgattacattcaattattttatttttttaaaactattactgatatttacgcggccttgacatgtctgattatgtgagtgtttcatagtataattaactcataattcttttatacgatcatttgttttatcatttgttatttcttttcagtggcggttctaccgt

SEQ ID NO: 30470 - DNA, 819 bp, Medicago truncatula
  Intron number 1 from transcript Medtr4g159930.1 (locus Med tr4g159930) derived from phytozome v7.0 (chr-ID MtChr4; po s 40436738 to 40437556 reverse strand)
catcaatttttgaataaagtcatatctgaaattttgttcaacaacaaaaagaacgaagataaaaaaaaaaccttttaagtgatttccaaatacaacaatagaagcttgaatcattgcaaaaactcaaaaaataatcgattcaataatgttataacatttcaatttttattcttcttgttattaaaattttatcaatgaaagtaacacttctatttgatgcttattttgtcacttttgtttttgttaattttttccagtgttagacagtttttgtggtggttggtttgaatcaataagattgtgaaaaaaatatttgtttttgatacttagtagcagtgatttgtgaaattgaaatttgagatgaacaagacacaatttgtgggaagaaacaaggaacttgaataaaattgaacaaatttatttatgatgatcattttagagttaatggatagaagaaacaaggatttgctggtgaaattaatgcatatatgaaaatatgaagaagatggggacgatgcacattgtttccagaaaacagagaaagagaaagtgagggtgagaaagttgcaggtttttttggacgaaattaccccttataaatatgaatggacaaattgcccatgacacatagggggtgtagaatggtgttgacacatgggaatgtttatgtataatcacacatttgctatgaatttaggtctaactataaggcagtgaatatttagatcaagctcgctctagcatgcaaaaagcatactagagtgtgttagtgcccatttttcagcacagtgcccaccagaaaattagcttctcaagcgg

SEQ ID NO: 30471 - DNA, 305 bp, Medicago truncatula
  Intron number 1 from transcript Medtr6g025280.1 (locus Med tr6g025280) derived from phytozome v7.0 (chr-ID MtChr6; po s 5614478 to 5614782)
ttccaaggtacgtttttgagccatatttcttcttgtaatctattctaatcattttttctgctatcactattttaaagatatccgttagcatggttatcagtatcttacaatgcatacagtcgtatcatgattcgattcaatatcgaacctattgataagaatctttagtgcatatctattttggacacgaatcttatcctgtattagacggaatcaaaagttttttcttcttcacagaatctgcttacatattccatcatgtggatgcaggttaaccttttggttgtctaacactatagtattaa

SEQ ID NO: 30472 - DNA, 315 bp, Medicago truncatula
  Intron number 1 from transcript Medtr5g023960.1 (locus Med tr5g023960) derived from phytozome v7.0 (chr-ID MtChr5; po s 9480482 to 9480796)
aaaagaggaagtggctgagagtgagagagagaggggttacgttgctgtgttttcttcttcttcttcttgttttttttttttctttttcttttttttgagaaaagaggagttttaattggtttttgttgtattaataaaataaataaaaaagaaattaaatgccacctaagggtggtacaaaagaggtgtgggaaaaagggtgtacaccaaacttaacccttttattatacatctattttgcttaacaagctattatttgattttgtttgtatttttgcagttgtggaaaactcatcccattgaagaaatcaattc

SEQ ID NO: 30473 - DNA, 706 bp, Medicago truncatula
  Intron number 2 from transcript Medtr6g077970.1 (locus Med tr6g077970) derived from phytozome v7.0 (chr-ID MtChr6; po s 15732971 to 15733676 reverse strand)
ggataaagaactgaatctgtgagccaacattcatgaaatacttttgccagagtcatgacctatgcagtataaaataataatgcaatttgtgtttttatttgaataaatttcaggaggccatccttggataatgtattcgaatgtcgacgcgtttgtaaactattctttccttggataattgaaagaaaaagaaaataccatgaagttgatgttgcaaacttttcttgttcaaggattattgagtctctgattatattaaattatgatgcaacaatctttaattgggagcaaagaactgtgtccccctcctttaatagtttatacttctatattttttgtattgtttagttttattcatttttaaattgggttccaacactaattatttatttttaaaactttatgaagaatttataagaggtaaatcaaatttcaaatataaatatcaagttactgtatagaattagaataatagttggaaatgtcagttccaaagatgagattaagtatttgttcggccgcaaacacaataaatatcataatgacttttgacttttaaggtctaaacaaaatatcacagctctcaattcatttttagcatcccacttgaaaatttcagtttgacttttaaggcattaacattgacttttaaggcacacattgatttacagaagtattactagtcttcatccacctatccatcctt

SEQ ID NO: 30474 - DNA, 875 bp, Medicago truncatula
  Intron number 1 from transcript Medtr6g077970.1 (locus Med tr6g077970) derived from phytozome v7.0 (chr-ID MtChr6; po s 15733680 to 15734554 reverse strand)
ggctacagctatcaacttgtcatttctgtttacaagtaagcatgaatgctttcaatcatatataatctttatgaaagatctttcagaatgaatgctttcaaagttttggttttttatttccaatcattacgttatggttgtaatgagtggattatacatcaagaagagaaatgaaatgctataacttattagaaagaaagtcatttttctcaaaaattaatatacttttatctcctacttgttatcttttttcttctatttatttttaagttcttacaaattggttcgacatttctctttaatgtatctagtggattaatagtggatcctctcatgttgaaataagcatgagtatgagatgcttctaatatctaccttcaatttccctatcctagcatgagcatgagtataagaatttcacactgtcctatcagtaattttgcaactttctttaactgtgaactaagcattcatttcttcttttacaggtcaataacagaaattcatctgtagttgtctggctttttgcattgtcatacgaaatgttttgagtatgaattgaacattgcacatgatccttctgcaaactcgacatatttcctttcgtgttatccatgcctgccctggtgaggacttgtatttcgaattacctctcccaaaagctttatagggaggaacaaatgtgtttctttttttgctgaatgggcagagtttgttctaaccttaaattttcataatgaaacatgttttgtatttgttgctattgtaagtacttttattaatattttattcaaaacggctatggttggatgggtttcttaaactaaacgtactatccttgcaggaaaaaagcattctgatctaaaggaactcat

SEQ ID NO: 30475 - DNA, 968 bp, Medicago truncatula; identical to SEQ ID NO: 30219
  Intron number 2 from transcript Medtr4g108300.1 (locus Med tr4g108300) derived from phytozome v7.0 (chr-ID MtChr4; po s 23913898 to 23914865 reverse strand)

SEQ ID NO: 30476 - DNA, 980 bp, Medicago truncatula
  Intron number 1 from transcript Medtr4g108300.1 (locus Med tr4g108300) derived from phytozome v7.0 (chr-ID MtChr4; po s 23915109 to 23916088 reverse strand)
ctgctcgccactgcgagttggaggcgagtaaagtggtacctctgcctattttatacttttctttgttttttcatcttttcttggtgtcttgagttagaatcctgcacaaatgggtaaagtaagatagataaagcgtaaaagggtaataatcacttatctctcggcttttccctcaataacttgcagaacaagtaacaaaagtacctaaaatatatcatgaatttaacacttcgtagcacttatcatattcatggacaaatttttagtcaaaagaatgcttatatataaggatagagggagtgtaatacaaaccattcaataccaaaaaaagaaaatttgtttgtactatgttgttttgtctcgtgagttgctttaacttgttcaataccttttatgagcaatgtaacacacacattcttattctctcttctcctctattttttattttttggttaaacaaattgttggtccctttaagtccttataaagaagttcagcacataattttagtttttgttaaattaaaatttgtttaattatgtttaaactttcaaatttttgaactattttttacatacatgtttagaacattataaaaaaattctctataaaaatggagttgaaaatttgatctaaatttttactaattttatcttgaaatttcgacgtttaaaaaattcatatttaattcattacacgtgaaaaaaaaaatataattttctattaaaaaaattattaaaaaatttaaaaatttgagtataattaaacaaatcttaattgaccatagcctaaaactatatactgaaagttttttataaaaatcaaaactttataaaaatcaaaacatgtcactttttatccaaggactaaaaacaaattttatgaggggattggatcccctcatgttgtttatgttgttagatttctgcattttctaatctaatggctgagagagcacaaaaggaaaattaataataaaa

SEQ ID NO: 30477 - DNA, 622 bp, Medicago truncatula
  Intron number 2 from transcript Medtr5g088970.1 (locus Med tr5g088970) derived from phytozome v7.0 (chr-ID MtChr5; po s 34530961 to 34531582)
tcaggggtaccgttcttggttacaagaggtacttgtttttcttctccatttcgatttatttgcagtatttataggttaattaaatctaatttgggtttaagattatatataatttttttcttatgttgtttattggattttgattttgatctgtttagctgaactttatttgtgctaagaaatgttgaatgttgttttagctggactatgctgttctttgaattttatagttcatgttagatattaaagttttcttaagtacattcagcatctaatttgtgtttttgatatataaatttaagagcaaagactcaatttggtccttcacaaattttgcattatcacagtagggacaatcagtccgcctgttatatgattactgatttgggtactattttttgtatggagttaaattaaccggccggaaaataatgaaatgagaccaaattcgatcttcactctaaatataaatatataatttttcctctgtcggtgcataatgggtctccgcttgtgtattttggttttgatgttggtctggtttgctggggattatttgtgctaagaaattggtaatgctgttataggtccaaggttaatcaatacccaaacacctctcttg

SEQ ID NO: 30478 - DNA, 951 bp, Medicago truncatula
  Intron number 4 from transcript Medtr5g084940.1 (locus Med tr5g084940) derived from phytozome v7.0 (chr-ID MtChr5; po s 32379819 to 32380769)
ttgaaagaaaatctcggaccggatttctctgagaagtaagttgcactcactaactgaattttgattttatgaattctttatcgttcattgtttatcttataagagcttttttgtgtataagctttgactctgtttggtatggtaaaggcacatatttgagtttatagtttatgacttatagcttttaagttcttctgactaaaagagactcgtttggtaattgtcattttctcacgagcttatagcttatttttttgagcttataatgttttttgataaactaattcaagtagcttaaagcttacagcttctcactttttatctcaattttacccctgcaatcttaattgaaaaaaataaatattaattaatataccctttttatgtcatttcatatttataagctacttcacgctaattttaaccaaaaatttgtccactatcagctataagataacttataagtcattctctataagctagtttatcagctatccactattttttaccaaacaaaacctttatatacaattagaaaaggaataagagtaaactctggataggctcgttatagcaataaaaataagctgaaaagaagttatggacatgtcataaaactcttgtcataagatagtccaaataagcgctttaaatggccataaaaaggcttaagttgttagtatgaagtgcatgaatatagtttttaatttacgattagtttcctcatggaagagttctttgttgttaaggtgtgaacaatgcattaaccaattttatagctttgattggacttacctttgagacaactgatacaccacgtacacctcttaaatcaccatgtacacttattcttttttctataagtttacaatttcacattttttaggtcttctttttgacgttacaattcttatttttgtgaattccattatttcagatttttgtccattg

SEQ ID NO: 30479 - DNA, 934 bp, Medicago truncatula
  Intron number 1 from transcript Medtr7g018130.3 (locus Med tr7g018130) derived from phytozome v7.0 (chr-ID MtChr7; po s 4378667 to 4379600 reverse strand)
aacccacctaggtaatatttaattttcattcatattcttttttattttaatttctaatcttttaaattatttatattattattgttatggttgccaccactcaaattttaattatcttatcttattttgatcttttaaatcatttacgcttttttttttttttacagtggtgccttcaattttttttactgtagtttttttgcttgattcttcattttttttatcaaatttttttatcaaatttttatttttatggacttcataatttcctctctggaatgataatctgggtttgataattgtatttggtggaattttttgctaatagtttgatgttattatatgatggttatcttcatatatgaatatgtgtaaccaagtggttcggctcaagtggttaataaactcgaatcgatttggagtacatgagtttaaatccaagtggttcggctcaagtgcttaattggtttgattcgatttggagtatgtgagtttgaatccaagtgattaagctcaagtggttaatgaactcgaatcgatttggagtacctaagtttgaatccaagtggttcggcctaagtggttaatgaacttgaatccattacgagtacctgagtttgaatccaagtggttaggctcaagtggttaatgggctccaatcgatttggagtacgtgagtttgaatccaagtggttcggctcaagtggttaatgaaatgaacttgaatcgattaggagtaccggagtttgaacatagctggaacaatttttaacttgactttacttaccttatggccgaaatccgggattccggattagtagccccttcagagttggagggttaggaccaacaaaaatatataaatatgtttgtgttggaattgtggttttttgactaactagcttcttgctatgcagggttgtgattgataata

SEQ ID NO: 30480 - DNA, 778 bp, Medicago truncatula
  Intron number 1 from transcript Medtr5g100440.1 (locus Med tr5g100440) derived from phytozome v7.0 (chr-ID MtChr5; po s 40171516 to 40172293 reverse strand)
aagaagaaggtgaagctgataggggtgaggtatgtgaaaagcactgacacttctgatcgaagacatgttggtgtcagcatgcgattacattcaactaattaattttctcaaatggatcactggcatcaattttcatctatcggtgtcgctgtcttccggtgtctgtgtcagtttgtgtccggtgtctgtgttggtggttcatatgctgaaactgaaaataaaattgaaaaatgaaaagtaaatagtgaaaatgaaaatgcatttggttttggatttgtgtggttgggttgtgtggggtttaaggaagaaagcgtgtgtatgtgtttgtgtccatgtcagcgaaaatcactgagattttttttgttgggagatgaatgaatgataccaattggtccattattcaatttatatcttctttctctctctaggtttttctctctctatctttcaccctctctgtctgtgtgtcgggattttggggagagataactaacgggtcaactgtcaaaaactaacacacacacacatgttgagtttctttgattacgctttcgttttctctctccatatctatttataactatatctatggttatgtgtctgtaactataaccttaaactacgcattgttgttctgtctctgttcctgtcttaatcgcatcgcactctttgttagtcttttcttttttaacggttttagattaacattattaattgtgtgtttgtgtttcttggtgtgtgtggtttttcttgtgacaggtaaagggtataaaagtgg

SEQ ID NO: 30481 - DNA, 709 bp, Medicago truncatula
  Intron number 1 from transcript Medtr5g105170.1 (locus Med tr5g105170) derived from phytozome v7.0 (chr-ID MtChr5; po s 42226744 to 42227452)
gtaaatcatacgctgatcacttctcacctattcaggttagaatttttctttattaaatttatgttttcgttgttgatcgcttttatgtgttgtcatcaaaatttgagcttgcatgtgattcatctttagggttgaaattttttgctttgcttttcatatttttcaaagtatagataggtaaaactatagatactttagacaatatattttcaacttatgttaattactagctattttccttgtgttctttcctcgtttgagttttgtgttttttttatgatcaacttgtacatagaaattatggcacattacatattgcatttttttttttgaaggaattacatattgcattttgtttgctggtatgtgaattttggttctcttctattacaatatcacatggtatagccatgtaaaaaattgtgtgtctctctattagtaaatagtaaccatcaatgaaatttgatattatcatttatttaatactcatgagaagagaaatatgttcaatttaacgataatgacttaaaccccctaagccgaggttccgcatttacaatttttgggggataaacttttatcttcttaatgaagtgtattggagttttatcttaatcaatgtaaatattcaaagccttatggatttccatttttcttttcctatttttttgcagaatagttgttgcaaaccttcaagcgactgcggttt

SEQ ID NO: 30482 - DNA, 1037 bp, Medicago truncatula
  Intron number 2 from transcript Medtr4g121940.1 (locus Med tr4g121940) derived from phytozome v7.0 (chr-ID MtChr4; po s 28763529 to 28764565)
gacttgatagactcactcgggtgtgctggtggtgcagtcccttagcgtgcgcctctgtagtgaagtccattaaggatttgggtttgagctcagtcgcatcacttcatgaaaatgtgtttcatgacctatgaagcacttacacagacactggatacgagacacattgacatcagtaataatttgagagaattaattaattgaatgtaatcacatgtgtcagtgtccgacacagacacactttagacaccaaaaacgcattcggtcagaagtgcgataaaagagttcttgacaaacaacattttagcaaataaatatgtcggtattttgaaattgcaatcaataaccagtggctaattcatgacatatatctactgatataggcattttctttatagtttcttaatagccaatacgttagctaataagttctattagtgatgattgtggattatcattgattaagaaaattagatataagggttgaggaagaattaatcaactaaataaggcaaataaaaacgtaccttgaggcattggacaaggatagggaccacacaatcaagaatagtccttttcatttataagctatttcaataacttgttgatgaacaccccccaaaagtccacaatacaacagaagttatatgtgtaaatttgtgagcctctaaatataaaaaaatgttatgtcaatttttcttgattgaaaaatagtaggcatcttgggttgtataagctgattcacatcaaaacccgtgagaacgttactgttccaagttaggatacagtgatattaggacaaatgttatcaccacaaagaccatatatataggctgatgctgatgctgatgctatatagtacttaccctcacattaacaaatactgaaatcttgcacatttgttgatgagtaagcttagtttcttatcagtatttacattattccatcattaagaattttacactatgagtgcattagctgaataatataattggtttgatacaggatatttaccttgacctcttttgatttcaaggtta

SEQ ID NO: 30483 - DNA, 853 bp, Medicago truncatula
  Intron number 1 from transcript Medtr5g019290.1 (locus Med tr5g019290) derived from phytozome v7.0 (chr-ID MtChr5; po s 7162223 to 7163075 reverse strand)
ttgtttttcttagacctgaacaggtaaatttttctttctatctaatttttcatttatttcagtcaatttaaatatttaaaaaagtttatttgttatttttaattattgtgggttgatacagaggggtaataatgtaatgtaatgatggaaatggtgaagatcaaatataggttgattttgatcaaagtgattatttggaaactgataatctttttatgattatttctcgtttttttcttccacaggaaaatgaaacattgttgtttcgagaaaagtgttaaaggactgctaaaagcccaccagagctttcattcatcaatatcattcattcaactagcccttaattatttttagtctaggattagattaaattagaatagaaaatgctaagtataaaattaattagtaccattaattgaaagttagggagtcctagattcaatcaaatgaggattcacaattgggattttattttccaatcctctcttggttaagcattttatgaatatacattgtcgtgtgccttaggttagacatgcgtctttggattgacagtgagtttgatgaaattatggtgtgccagcgtgattttgacaaaagttactttggaagcgatttcgttaaactcgctgttcatctaaacatacacctggtggttcataggttttagtaaaattgttctcatatatgtcccttttaggtatagttgtgaagtctttcaatttcacaataagtttgtgtcattcctagaagaaaaaccaaaagtagatagaaaaaaaaaaagatttacccaaactctgtaaaattttgtgatacaggtagccaaaacactccaaagtctgcttcctacacc

SEQ ID NO: 30484 - DNA, 994 bp, Medicago truncatula
  Intron number 4 from transcript Medtr4g108790.1 (locus Med tr4g108790) derived from phytozome v7.0 (chr-ID MtChr4; po s 24180364 to 24181357 reverse strand)
aaagtaacatttagtttagaagctttgcaatatgcatgggttttttttttttttttttttccatgctaaaatatatgtgaaataggttatggaaatgtttcgtgaaatatttcttcactcatcaaggactttgcttttgcataactgaaactaagatacaaaagattctggattagatatgcatcgtatgatacttaagtgtgtcatgtggaatcattttcactgagctgtgtcatgtgaaatcattttctttgagctgtagtaaatattggatgagaattttatttgctgcatactttttttttttggtccagatttgctgcatactttatactctagttatgtgtcatatttttcaattcctctagatactgcagtcatatctgtactttaaatcgtagctttacaatagcatttcttctgatagtttcatgttattatttactatacaattcaaacaatgcaaatgatagaaaatagttattattttatcttttccttgtttggttggttgggtagagaaaacgggagaagggaaattttgctaattagaggaatgcactttttttttctcatgtcgtgatggaggggtgaaatatgaagggggggaaataatgtgaggctcaaattgaagttttccctctcaagtgaagagacaatgaaaaaactttagaagacaatttcactttttccattttttacccatctatttacctctctcatctagcttgcgatccttttgattcttatttatcaaggttgaaaaagatactgcctcaattattattcattttctttcttttcactttgaatccaaccaaacaagcaaaaaagaagattatacttttctttctatccattttctcttcatctagagtcccaaaaaatagacaaaattcacttaatttctctttattttatctcctcttctattcctttactttctgtccattttattatcttccattatcttttgcatccaaatgagacatat

SEQ ID NO: 30485 - DNA, 825 bp, Medicago truncatula
  Intron number 3 from transcript Medtr5g039510.3 (locus Med tr5g039510) derived from phytozome v7.0 (chr-ID MtChr5; po s 16777907 to 16778731 reverse strand)
agtccacagactcaggtatgttggtgagaacgaatatcaattagtctctttcagcgtgtaataatatgactatagttgttaagcttatttttatgttgaaattggaatggaaatttatgttttcagctctagatatactcaatgacatgatgttgcaaagcatattgcatatttttctgagatttacttgagttgcggttttgaggaggcattttgttaattttcactctcttctttcgcaccatttaaatcgtagattcacttgcaaaattccaatcgtaaatataatgttttgttaaaaggtcggcatttaaagattagttctttcttcaaaaaaaaaaaaaaaaaagttccatgagagtaacaatttccagtgcacagaaaacaccaattttcaaattttggaaatttaatttgtatttagcactagtatgtgtacaattttcttgttacagagcttgccaaactatgactttaaggcagtggtttctgccatatcgcatgtttagtagctcatttatatgataatgataatttgagaaacaaagagatatggggttttgatttcttagttttagatatgacacttaacgatatactaaggtttaggtgttggtacacgtgtattacaatattgttcataatgagatattttacttctaaaattcatatctgtcgtcatatgaattattgtattgcatgacatcaatggtttatcctttaatctccattgcgttgtaagcattcagaaatctgtttgtactaaaagaaggtggtaattttcatacaggaaataattaggaaatacactgaatcatccggtaa

SEQ ID NO: 30486 - DNA, 453 bp, Medicago truncatula
  Intron number 1 from transcript Medtr4g079500.1 (locus Med tr4g079500) derived from phytozome v7.0 (chr-ID MtChr4; po s 16003009 to 16003461 reverse strand)
gaaacagtaaaaagttggacaaaccctagttttttcaaaaataaactgaagtggtaatactttcaatcatcaaaatgatatgaagaatgaaaattagaattggctcttgattttgttcttttgtttctttgcatggtagagtcttgctggccacactgaaaatatcaaattgtgtgtattgcaacatttcccgaaatttgtgatttatgaagcatgaaaattatctcacatttgtcttattatacgaggtttttggtataatccattactcataaattaagcaattatgagtgttgtgttactctccaacacattgtactgtacatagttatatattgctccacctgaatactatatatttagtcatgatccaataatgtacagtaacaaatcttagtttgttcttattatgaaaatataaaaccttaattttgttttcttttgggaatcagt

SEQ ID NO: 30487 - DNA, 1042 bp, Medicago truncatula
  Intron number 1 from transcript Medtr6g078370.1 (locus Med tr6g078370) derived from phytozome v7.0 (chr-ID MtChr6; po s 15957798 to 15958839 reverse strand)
ctctctctctctctctctctctctctctctctaaggtactttctctctctctctctctctatgctcttctttttcatttttcatttctttattttatttattaattattattatcattttcaaattcttgttctttcgacattttttgcataccccatttttcttattcttcatacacaaccctagaatttcattctccaatgtaaatgtcagatcttgataatacttcaattcacctcataaaaatctacactttacaaaaacctcgtaatttttcgattttttttttttttttgatatttttttttttgggtttgttggattttttggatacccttttggttgattttttctgggtttctttgattttcttggatacccttttggttggatcggtgattgtgaaaatctcaagctttttggttgttttttgtttttgaagtttgggaccatatcctaggtttcgttgttttcaaggaacagtttttttgttgttgtgaaattggttgtggaagttttatattgtagatgaaacaagcatttatgcttctgggtttatttggtttttgaggttttttgttttattcaggttcagtgtactaattgtagtttacaaatatacaaaggaagcttgatgcagaaatttgattatgcttgatactaggtaagtcccaagttctttaatttgccttcaatttggttaaagtttcgtcttttcgtgtgtttaaataatggttgccacttgccattggaatgcgatgtatgatttttctgcttttttgatattttggattatgattcatgacaattatttatgtgagattcaaaagtgtaacatttaatgcattgttgacttataaactttctatttttaattgattaagggtgagattcatttgtgtacttgtttccatttgtgttttttcttttggttctggtttttatgtggaatgaaaattctcgtgtagtttttgtcttattttctgatttctgtttgtgattttgttttgtgagttgggtttaggttggtatagatttggca

SEQ ID NO: 30488 - DNA, 959 bp, Medicago truncatula
  Intron number 2 from transcript Medtr4g128180.1 (locus Med tr4g128180) derived from phytozome v7.0 (chr-ID MtChr4; po s 30051856 to 30052814 reverse strand)
gtttaccattagctgattctagcgctagaaaacaggtaattataaatttagtttatatatcgacatcgtaatatctcattatttaaatatctattttcttgaagaaaaaaaattatatcaattcttacacatatatatgtacaatcatgtctcattatttaaatacttgtgtaagagtatttcaagaataataatatcatgataaatagattaaacctcctaatatatgtaggagtttggtttcaaatatcagtccatttattcaccataaaaaggtgaatttttatccataggttacttgacacaaaaaaaggttatacctaaatttacttatgaagtttttgttaattatagagatattgataattattttacaacagtctcataaaagatttgaatttaatacctaaacttttctttatttttgacaaatttaataccactactaggaaagataaaattagtgaggaaaattagtgacggaaaaaataaaatccttcacaaattccttggtcacaaaatttaatgacggaattaaagacagattttaccttttccctcgctaaattttgtttttttagtgatgtacctttaaggtttttttttttttttttttttaatatataggaaatttaataccttaagtaaaattataactttttttggttaaaatatcgcccctataacctaaatacatagtaaaagaaaacaaatttgacacctatggcacttagcttaatgctaatgacttgggcctttaattaaactttttttgatggtgatttttataattaataactactccaaataacccaaaaaaaaaaatctcaagctaaatatacatcacttttctttttcaatatttatagtacttgattttggcaagttatgttatttaatatttgtaatgtggcaattataaaggtcttaaacgagattagcagacttgtggagctata

SEQ ID NO: 30489 - DNA, 724 bp, Medicago truncatula
  Intron number 1 from transcript Medtr6g102290.1 (locus Med tr6g102290) derived from phytozome v7.0 (chr-ID MtChr6; po s 22782848 to 22783571)
ggtttcgcacaataccaccaacacccagagcctttgtacgtcttatttaatactataagcgctgctaataaaaattgatataagcattactcttcacataaaaacttatatgcatgtaaaatatttaaaatgaatgcattgattacttatatgcatgtaaaatattcaaataaaaagtgtagagttttcgcataaatcataaaacgttaggatatcaacaaatacatcaataaaagaactaaaaacaagtttagtctaatgtatccctcaaactttttttttttttttggtctaatcttgacaataaagtcttgtctctttctttacatccatcaaaaaaacattaatattagtttttttttttttgactaaaaatagtgtttaaagtattaaatattatattttttaacttataaatttatgatatacacataaagttggctcatcaagtttaaataaaccttttaagaaaaattttttacgaaaaagatggagaaatcaagaaatttttttttctcaaaaaaaaaaaagaagaaattcttctatgaaaataatatttttgttggcatttttaatcattttatcaggtcaaaactaatttgtgatttgaaatttttatctattgtcatttaattttccacttcttctattttcccttatactcagttcatattttatatacaacattattcttattttcatgtatattttttttcttatagat

SEQ ID NO: 30490 - DNA, 743 bp, Medicago truncatula
  Intron number 3 from transcript Medtr4g109580.1 (locus Med tr4g109580) derived from phytozome v7.0 (chr-ID MtChr4; po s 24577968 to 24578710 reverse strand)
gctggtaagtgctaattcttaactttacttcactttttgtcaatgtcaatgaatggtttcatttggtcactcctttcttgataaccagttaccatagatattttcctctttggtttggtagttgaatatgttgtgttgtctatgaattattgacacaaacaccggacacacactcgtaattatttaggaaattgaagtaattgaatattatgtaaccacatgtgtcggtgtcgtgtggacacaccatcaatctaaagtgttggtgctacataacggttgttcttcaacacttttttggttttgttttgatatacttattatgcaaagttactgctaactttcacaagttccaatttattacttttaaagatttgtgtttgtcaaaggttacacattatagttgtaaaaatgtgccttggcatccatctaagatatggatgataccaaacagtcaaaatacgtttttgctggaccttttatgcttggcattaatcatgtgtacattactatctgtttaagcacatttacaaattatgagattttccaatgtaatatgtggttttttgtttcttttgttctttagcaaccatttgaatcataggtgcattttttaacaaactactctgtggatgaaaatcctgatctttattggcttctttgctgaaattccaaagaaaatatcataatatctgttttatatgatgataggcagcagcagaagccgaggctgctactaagtcaat

SEQ ID NO: 30491 - DNA, 835 bp, Medicago truncatula; identical to SEQ ID NO: 30297
  Intron number 2 from transcript Medtr5g075020.3 (locus Med tr5g075020) derived from phytozome v7.0 (chr-ID MtChr5; po s 27219559 to 27220393 reverse strand)

SEQ ID NO: 30492 - DNA, 532 bp, Medicago truncatula
  Intron number 4 from transcript Medtr5g078930.2 (locus Med tr5g078930) derived from phytozome v7.0 (chr-ID MtChr5; po s 29265982 to 29266513 reverse strand)
ctgagagaatgtaagttctatcgtttattttttagttttgttataatggttgtgtcatgtcaaatttgaagaatttagcttgattttttatatgctgttgtttatatatctagggaaaactgagtaaccttgaccttgttgagtagattatggccctgtttggataaacaacttaatttgcaacttatagcatacaataaagtaaattgttttcgtataatcaatctataagctgtttttattagctaccctggagagcttatggaaataagctgttttcccaagttctccaaaataatgtcacaaatgctcatggctgtcaataagctcaaataagtcaatctagacagaccctatgtttgaacacaatagcttttcatattgtagttcaattgcatgctcatagtggatgttagctggttattattttcctcatggcttgttctttttattctcgtgcacttgtacgtatctaagttagtttcttcaatttacagtcacaaaggaaggattattgaaacatccccgagat

SEQ ID NO: 30493 - DNA, 539 bp, Medicago truncatula
  Intron number 1 from transcript Medtr6g012780.1 (locus Med tr6g012780) derived from phytozome v7.0 (chr-ID MtChr6; po s 2419275 to 2419813)
tcctggaaattggaaagctgttcctaccaatactggtaattagttaattacttactcttctatttccactctcttaaatgattttatcaaagtttttttttcttgttttataagatcatgattgaagaaattttgatttatttaatgatgtgatttgaaattaatagtctattttagtgacttatcaatgttttttaatttttgttttttaattagaccattatcaaagaaattttgattcttttaggttgtgatttgaaatagtttttttgtttgtaattttgtcaattttttgtcttgttttatagaccataatcataggaaattttgattcttttaaggttacttgatatagtttttttttgttgaaatttatcattgtttattttttaaaattttatttttatatcttgttttatgaaactataatcaaaggagattttaattcttttaaggttgtgatttcaaattaatagtttttatttttgtgttttgatttttcaggtttgttaaggtgtagtaagagttgcagacttaga

SEQ ID NO: 30494 - DNA, 833 bp, Medicago truncatula
  Intron number 1 from transcript Medtr5g007960.1 (locus Med tr5g007960) derived from phytozome v7.0 (chr-ID MtChr5; po s 1382745 to 1383577 reverse strand)
gcctcaaggtataactacaccaatctttattcattatttaatctgtcagacaattaacattaattaattaattacttaatgcaattgcctttgctatgttaatgtattaattcatagatcgatcctcatgattactatcttatggaattttgaaccatgttaacttgattttgaagaaaccaatcaacttaactaggattactttcttctaaacaattatgcttatttaatactagttcacttgattacttaactatggttaagtttttttttttttttttttttttttgtttcatttcgtgtgaaccggatattctttgcatgcaactgtagagactaatcacttgaggtgaaatcaattgtcaacaaagattttatctttcttctagtagatgaactatagtaacaaatttcttctaatcggttgacaaatttatcatctttcttcgaatcagctgaattataactatagtaagacctttcttataatttagttaactattatttaggtaattgattaactaaggtttttgcctttcctctaatctgatgaactatagtaagaagacctttcttctaatcaaatttaactttggttaatttaccaatcaataaaggtttcatctttgttatcaagagattaactatggtaagacctttcttctaatcaatttaactttggttaagtcattggtcaacaaatgattgatatttcttcttatcaggtgaactatatttagatcccttctctaaccaagttattgtttatatgtgtggtgattattttactgattacaggacaggattttgcttctggaattgtgaaccttggt

SEQ ID NO: 30495 - DNA, 672 bp, Medicago truncatula
  Intron number 2 from transcript Medtr4g108250.1 (locus Med tr4g108250) derived from phytozome v7.0 (chr-ID MtChr4; po s 23873417 to 23874088)
acatgtgagttacacatttatcctcctcttctcacttttcccctcttctgtttttcctactttttagcttcatccggtgttttgcaccataatatgtatagtatatacagatacattgatgagtacaatacatatcacctctctgaaatatcgcactttctcaacttaagccgctaaagttttcttttttatcacaacccacttgatgattgatttttactggaaatgctttaggatagtaggatacaagaatttaggttttatttatattgaattatttattttgagtcaactgcttcttttaaaattttaaagaaatttagtagtgtgcagatttctattttgcttctcaggtcggcctttgtcattaaattaacaaatgtttgcactcttcttcatctttgcattttcgttttgaaacttccaaaatctcagtgtaagtcttctgctactatgtgtattcaagccctataaattataaatttttgtactttatcttttgttttgtgtgtatattatttgctggtatactttgctgctattttttttttttttataagatttggttctttttatctcaactctggttgtagttattaagtctaagttcttttttgcacattcaaatttgaaacaggggtcttggaaagaccattcaaacaatagcatttc

SEQ ID NO: 30496 - DNA, 956 bp, Medicago truncatula
  Intron number 3 from transcript Medtr4g145050.1 (locus Med tr4g145050) derived from phytozome v7.0 (chr-ID MtChr4; po s 36699051 to 36700006 reverse strand)
cgccaattgttaagttgaataaggccttgaaattggtaaatgttatctttgctcatttgctattactaaatttagtaataatgtttatgtactttatgtctatgaagtggttggtgaattatttgataggcattcattcagattttggagtattaacttatagcgatgaatgttttgttagatctgtttgctaagattgcagcaagtattaggtaacaacatagttgttttccggagtttattctaaaaaatgatttccatgtttctgaaggatttactccgtttgatttatatttactttctgaagtgcgtgtgttgattatatgcaaaattataagatatcttagaaggctgcatttcaaaaaaactcaaataaataacagaggagtgagcaaaattcgttcctagtgtctcttagcttatgatgttcaattttataacaaaatctgttttctttccaataatcttattttatgaaattgaaagtgttttaaaaattggtaaccttaatttaacatgcaagtaaagattgaaaaaattatttatttgttatggaagttacttgtatttccactacctctaattttcacacaggctcctttgtcgtggctcttgatctcctgagaaatttttagaaagaaatatgtgaaattttcattcattatgttggatctcagtatgaaccaatttatggttgatttggatttgtaatataattttttatctacactcacactcgcatcctcaaagtaaaaaaatatgtttaaatccaaatcttgtcacaaagtggggtgagtggataactcatgtatatcttcaaattccttttagttcaaaagttttttttttttttttttttttttgagtataatctaggagggattttatcaaatattgtgaattgcttgatgctgctatgagttacttgtcagtatttctgattggcaggctgaggt

SEQ ID NO: 30497 - DNA, 598 bp, Medicago truncatula
  Intron number 1 from transcript Medtr5g105810.1 (locus Med tr5g105810) derived from phytozome v7.0 (chr-ID MtChr5; po s 42522391 to 42522988)
aaatcaattgcaatcaacaggtagggcatgccactttatgcaatattgatggttccttttttactaatgttgtaggcattaaaatgtgtctccgtgatgagctccagcattttgttttggccaagattaaaatatatatatagggtgtaatgcataaaacgataacaatggattaaaaaaacaatggaaaaaaaaaattgtcaaaaaaatattgaatgcatatgtttgtatttgaaaaagaaaaaaaaaagaaaaagaaaaagaaactaaaactcaagaaaaaaaaagtaactaaaacatgtgtttattgtttactttcaaattaggtgacttctataacaaaagcaacaaaggttaaggtttagtgaatgctccaaagcagtaaaattgcctatagatccgcatgaattagaagaaaaagtcaaaacaaaatacttggccaacttaattcactaaattaagagcaaccaacaagaacatttcagccttaatattataattttgttctgtgttgtgttgtgtgaattcagcattgtaccattaaatcaaaactatgttagcagtttctcaaaaccccaacaaagaactccaattcacg

SEQ ID NO: 30498 - DNA, 860 bp, Medicago truncatula
  Intron number 1 from transcript Medtr7g047750.1 (locus Med tr7g047750) derived from phytozome v7.0 (chr-ID MtChr7; po s 12062910 to 12063769)
tgtgtctgttttttttgtgacgctaatgcgtttaatttttataaaattttgattttaattagaagtaaaattgtagatgtcttttctttaaaaaggtatagatgcctaaaaaaattatgcttatattatatatatatatatatatatatatatatatatatatatatatatattgcacctttatatcataataaactatgcatatttttttcttattcaaaaaaactaaacattgctaaatagaaaagatattattttctattttgccagcatcagatgataggattttgtataagtttgataatgacccgaaagatgtcttttcttatgtagtgggaatatagttgatgtaacactatgggaaaaatactccgtagctttatcatttactatctatttaccttgtgttctttgcttccattttgtagtcaatgtcaacccaaatatatgtaacaattggtgagaagtttaagacttagtaagtttgcattatgatttcacaatacagtgttagagtaacttattatttcacaatccgatttgattgtttttttgaccatgtttcttgaattgttgtcgtgaccttaacacttttcaagctcagagtcaaagcttcagttagaacttaagtcagagttcgacttcttctcaacgtacttcgtacaacgatttttccaaactgtctcaggttaggccaattgctgaatttataaacttagtcaatgtctgctttttttatgcaaaaacatgctttgagtttttttacgcacaaattaaaaatacatattgcattattctttatttaatgtgcataatttgtgttaggaaacatactgcatcactatttggaaaacaactaa

SEQ ID NO: 30499 - DNA, 407 bp, Medicago truncatula
  Intron number 4 from transcript Medtr5g021510.1 (locus Med tr5g021510) derived from phytozome v7.0 (chr-ID MtChr5; po s 8215559 to 8215965 reverse strand)
gaagatatcttctctttaggcaaagagttgaggtgtgtctatcctttataaaatgaattagtcttgaattgattatagtaattttaatccttgaatgtgtgaggcagtcactacagtccctcgatgtatcaaaattactataaaagtatacctgaatgtgtcttttattagtcagttcggtccgtgtatgcttcttttattagttagtttggtcctcaaatgtatcttttgttagtcattctcggggttgtttttgaaatttgatacgttcagggattatagtgacatcgtttcacacatttagggactaaaatgattgtttactctcttgaaattttcttcttcatgccttcaaatttatgtataatacctctttgtttcatagtttccaggtgataaacctagta

SEQ ID NO: 30500 - DNA, 328 bp, Medicago truncatula
  Intron number 1 from transcript Medtr5g066510.1 (locus Med tr5g066510) derived from phytozome v7.0 (chr-ID MtChr5; po s 23432494 to 23432821 reverse strand)
ctgtatgatttttgcgtatgttttcatgcttaaagatgttttgtaacactttttatttttactgtattgatgcaacaggtcctttggttaataatctagattcatataatggagtgtttgttgttccatctttttgctttattttcagttgttgaatcaaacatttgattcttcagtcttgctaaattctcttcataattttaatctaagcatccagattttagtctcttttcaatttggactttctttttttacggcatctgtctcttattttcttaatcttgattttacaatttttcagattctccattgttgcagttttactacg

SEQ ID NO: 30501 - DNA, 961 bp, Medicago truncatula
  Intron number 1 from transcript Medtr5g083310.1 (locus Med tr5g083310) derived from phytozome v7.0 (chr-ID MtChr5; po s 31585887 to 31586847 reverse strand)
gtgttgtgagagtgcttgaatgttggtgtcctacaatttgtgttgttagaaaatccaaaaaaacctaggaaggtcattctatgcttgccctctgccaaaggttggtttaactaatcaaaagaggttgaagatgattgagaaatgtaatctttctataataatattgccatcaaattagtccatgaactatttctctatctatcaaatagatccctgcgttatataaaaaaccatcaaataagtccatgaattgtttaatcagatatcaaattgatccttgaaacatatgtgtacaaaataaactaaaaaaggtagaacacacaaattgaaactgaaatattacatatgcataagtcataggtcataagtctgagaaattacataggcaaaagcaacccaactatggggcattaataagtcataagtcttaaacgacaatttaagcaaaaagaaactcaactatggggcataattcaaataagcctaaatattacaaatccaaaacatctattaaaccccaggaagcatcacttctttggaaatccggtagttggtctaaactccatgaattcagtaggttgagtcgaaccggatggaccataggttggatatggaaccctaattatgctagcaggagttggatgagcaggtgcaggacccttcattggtgtttgcttaggcctatcaactgaaagaactggtcctctaaggtcatacctccttggtgcagaaacctgaaattgaaaattcaatcaaattagtccctaaaatcataacataatcaatcatatgagtccttcaattaatattactaattgtcaaaatgatccttaaaaattaagagtcatacctgtccagcatttgcaacaacatttcttgcagtttctgcattcccagacacaacattattcttgtggctgactttcttttagacctttttaaagaaggttctgttactaac

SEQ ID NO: 30502 - DNA, 845 bp, Medicago truncatula
  Intron number 1 from transcript Medtr5g040840.1 (locus Med tr5g040840) derived from phytozome v7.0 (chr-ID MtChr5; po s 17456669 to 17457513 reverse strand)
ctgttaacaaggtaatcgctttattcccttttctctccttttgtcaaatccacaatcttcgtttatgctgtttttccaatgccttctattcaacctttgtttggctttattttctgcgtttatctcatcgattttttttttcataagtgcgtatcaactgtttgtgaaaatgcctatgaatttttgttaactttgtttaagttgaggtagcttattttttccaataagcttatcgtctccttctacgcatgtgaatcagagctcgtttgaattgacttatttttgaccttataaaaaataatttctgcaagtaaataagctttttatgttaattaagttctctcaaaattgtatcttcataagctgttttttcataaacaagtttatgaataataaataaaatcttatttatttggataagttgtttttaataagctaaaaaaataagccaattcaaatcagccttcaatgatttttatttaatactcaccatgtttgtttctttttcgatttaactgtcttcagattcatgttctttttatttattactttgatacaaatgagaagttcattagctatgaagtacggacactcctcggattaagcgtgtcccggtgtcggacacgtgctgacacaccaccaacatactacataattacactgaattacgtgattttctcaaattattagcggtttcaatggccgtgtccgtgtttgtatccgtgcttcatagttcatgagtgccttgtaaatgtttgggaaaatgtctaagaattattgtttggttgttttgtacttttttacaatagtgtgtcattattttttattttgaacaggctgctaca

SEQ ID NO: 30503 - DNA, 717 bp, Medicago truncatula
  Intron number 1 from transcript Medtr5g032750.1 (locus Med tr5g032750) derived from phytozome v7.0 (chr-ID MtChr5; po s 13288065 to 13288781 reverse strand)
tctggtgttctctccccattcaatttctctagaaggtttatttcttgatcacctcttcatttatttaatgcatatttctaacattatttgttgcatcatattcccctctactagttacaaggaaattaatatttttgccttttctttttccaccgataaaagattaaaaataggaattggatggaatgtgctaattgaatgaatatattttatctttactagggttgttctaaaaattaaaaccctaaaaatcactcaactaatatttcttgaatgtgtctagaccaaaataaacaagaatagatctgttcggtttagttttcggttcatataactctaatactaaactaaactgcaccattaaaaattagtgagctaccgctactaattaactttttgacacatatcaaaggaccttctaacatctcgatgtccgtaattaaaatctgttagttttgtaatatataattttttaaaactgtaatttagataaccgaaattacatctaaattaagcccacattatcatattcttttaaagagacatcgagaatgaaccaaactagaagtattttaatagtatttagattgaattattttttgtctcataattaaaccaaacttcaatgggaacacccttaaatgtttagatcttgtttctggatacaaattaattcaactttggtacaccaaaattttagggaaactggtgaaaaag

SEQ ID NO: 30504 - DNA, 687 bp, Medicago truncatula
  Intron number 2 from transcript Medtr5g076390.1 (locus Med tr5g076390) derived from phytozome v7.0 (chr-ID MtChr5; po s 27925120 to 27925806)
tttgcttcggagaaagagcagttgggctagcgtgtttctcgtttagatatttattttttgcaagattatgttgtggataaatgagtttggactcttaattctcttgatggttacttggtaaaggatggttataaaatcatcacacaaactgagcaacctcataatgatatttattcaaaattaatatggaacaaatttgtgtcttcgaaagtgttgttatttacttggaggcttttaaataaaaggattgacatcgatcattattcaaagttgaataaatatcataagggaggttgactttcatggaatagattagacttccacaacatactgagtcaatatctaaattctgacaaggaaatgtggtcgtatctgaaacgcgaaagtagaagagaaaaacgtgaaatctaaaaaaagttatatgaaggacaccaataatactatttaatttataaagttttgtcaattttattagaaattgtttgcacaacgtcagcatgtttgattttgaataacttaatttcaaattttacagaagtaatttttcgtcatataatgggttccattattggagatggagaaagcacgtgtttctgatgtgatcattagcaggatggagagtgtttacggtctgaatttagaaatctattatatttacgtgttaatagtagagttactgttgcagag

SEQ ID NO: 30505 - DNA, 794 bp, Medicago truncatula
  Intron number 3 from transcript Medtr5g024190.1 (locus Med tr5g024190) derived from phytozome v7.0 (chr-ID MtChr5; po s 9565140 to 9565933)
cgcacttgcccacttgcatcctccaatttttcaaggttctatttttcagtcccttgtttaagtacttaatgcttgtttgggaaaacttatagaaataacttatgaaaacaacttgtagcttatatgaaatgagtttgactttattttatctcttgttacagaaataacttatggataagtgcttattgataaacacataattaagctatttataaaaacagggtctagtaggaatgatattttgtttttcttggtgatgacggtgcttatggatatgcttttagcaagcacaaaaaaaacttgagatgtttttttaggtacttctaaaaatgttgttacataaccaaatttgagtaaatgcagttaaaatactctttaggctatgtttgggaaggaaagggaggggaagactgatttttcatttctaaatttcagaaattatgaaatgtttctaaaatcgactaaaagggtgattgaaatattatatgatcatctatcacatttttatttagtcactgcagttagaacttagtacatctagaccgcttcgttaagatttgacggttttaattcgaaatttatatctgtaatttggtttggtgaagtcaaaatatgaaaagtattgatccaaggaccgatatgtgctgactgctgttacttcatgtggcagcagagcatacaacctcggccctgcatgaattcggtttcatcggttagattgtttagttctaagatctttgtttatttgattaaactgtattatttaatgacattggcagccaagagtctcacag

SEQ ID NO: 30506 - DNA, 700 bp, Medicago truncatula
  Intron number 1 from transcript Medtr7g045570.1 (locus Med tr7g045570) derived from phytozome v7.0 (chr-ID MtChr7; po s 10926940 to 10927639 reverse strand)
attccgctaaactgtgagtttctattctcgctttttttcctttttttgttctagatctgaaaatgttgtagcatttattattttcttacattttttctgtatttgtttttcatttttattctactttttccattttgatctgttttcggataatatttttgtcgatagttgtgattttcgttttgtctctgtatgttccgtagttattttgttaccttttttgtttcatttttgttatattttatttttatattatattatatgaaaaataattttaaagtattttactgtatgaagaatatggttgataaatattttttttatattttatatttttcatgttattttggcattttctgtttattatatatgcttgatctgtttttggataaagttatttttctatttagttgagattttcatttttgtcattttcattctgctatagttttgtttttgttttgtgctagtttctgtaatcatttatttgtttttatttccttccttttactattgagtttgtcttttatttgaattttaaactattttctaatattttttttattttattgttttttaatggaagttagattttcggtttttgtctcttcgtagctttttgttctctgctgaaatagttactttgttttttttttttgtaacagagtgaagagtggtggaaacggtgtcgttttctgtc

SEQ ID NO: 30507 - DNA, 510 bp, Medicago truncatula
  Intron number 2 from transcript Medtr4g023880.1 (locus Med tr4g023880) derived from phytozome v7.0 (chr-ID MtChr4; po s 5348573 to 5349082 reverse strand)
gtcttttataaaatcatcgctcgatacacttgaaggtatttgttttgctaatccatttaagtgttggttataattttggataaactcgaaggtatttgttttttgtttttcatagtgttgtcaaatagcagctatagcattgcaaaatttgaaccaatgtctattgttctgtgatatgcgatttagcactaagtgttgtaaaatatcggtgctatagtgatgtagtgtagacgaatttgaacaaaccactattttctcattctgtggttggcaacactttttcatttgaatgagataattatttgctatgttacacttatctggtttgaattgtatgcaacattttttgtgttacaattcacatgggtccatttctgagacacattggttaaaacaattgggatttaattaattgaacaatccatatctttattgttcttccaatcaataattcctttttcctttgaaatttcaggcaccgatcattactggttaaacagatctgttaaa

SEQ ID NO: 30508 - DNA, 348 bp, Medicago truncatula
  Intron number 1 from transcript Medtr5g024860.1 (locus Med tr5g024860) derived from phytozome v7.0 (chr-ID MtChr5; po s 9946959 to 9947306 reverse strand)
cgaccactacgccggaaactgctgcaaccacgccggtgaccatcgcttaatttctgcaaaaactcacaacaatttatgaacccagaagcatacaatactccattcttcccttcttatattcttcacacaagtgtggacagccgcaataataacaacaacaacttgatattttgtattttattatttatggatttttatttataggttttcatcttttattttttgatttttagatggatgaatatggtgtgaatagactgattaatgaaatttttgatgttaagcttgttgtttttattgttgttgtcgtttgtaaaatttattgttgttgttgaaattgagattgga

SEQ ID NO: 30509 - DNA, 649 bp, Medicago truncatula
  Intron number 2 from transcript Medtr4g137240.1 (locus Med tr4g137240) derived from phytozome v7.0 (chr-ID MtChr4; po s 33769779 to 33770427 reverse strand)
gtaatcttactcgtttgcttgcacgtgtgcagaaggtgtgtgctgcttatcttttgttttgttatatgttatgattataatttataataactaacccctttgtgtttgtttgtgtttttcaactgttaaatctttgtattttctgagtttgcttgttaagttactgaaaataatttgtttgctagctatagatggatgtggaagtttggtattggatgactgaataattgattaattggattactatttgtattcttatatgcaatctattttgttggacctggttagagtgattctgttactataagtgtagacaaaaatgtttttgtagctattatacaacgacatggtttaactttttaggaagaagttacatgtaaatttttgaagttttgtgagttttcgacacgtatagtatacatccaattatacagtcctggaaaagggcaaaactatttccctcctttttgattgattaaatttctgttacattgttcaataggtttatgccctcaattaggaaactgtatggtagtagcttatgcccacagtttttatagaaagatgtttgccttgtattagtttatgtgttctgtttttttaagatatcatactttggaaattgatggtccacttctacaggtgcgag

SEQ ID NO: 30510 - DNA, 494 bp, Medicago truncatula
  Intron number 1 from transcript Medtr6g046960.1 (locus Med tr6g046960) derived from phytozome v7.0 (chr-ID MtChr6; po s 10174578 to 10175071 reverse strand)
aaattggatgtgattttgttttatgtctagagatgtaaatttttttttgtacatgaatcttttttagttccgatgctactgataaaaaagtctgttttttcaatgaatctttgatagaacagaacatataatatacatatcttatctaaacaaaacataatcttataaggttgaatccttgaaagtgaagaaaccaatgagcaagctaataatagaaaaatgaatcttgtttttgttcatgatgaaatgggtgtgtttgatttgatgtgtttacatagattaatcattgatttgttcttttagagatgagtttgagcaatgctttgaaattaatcaagtatcacattattaaaacaattggatcattctgaaaagtgaaaaaaaataaatcatttttctatgttttttctgtcatgatcaaatgggtgtgtttgatttgatgtgtctgcatagattaatcattaatttgttgtttttttctttttcttacagag

SEQ ID NO: 30511 - DNA, 718 bp, Medicago truncatula
  Intron number 1 from transcript Medtr6g069670.1 (locus Med tr6g069670) derived from phytozome v7.0 (chr-ID MtChr6; po s 12917632 to 12918349)
gcaacaatccagccttccggtgaggttcctctccttatcaaaatagagcaattgggttttcaggttttacagttttgaaccaattggtaaattggctcgattggtggttgttaatttatttattttttggaaaagttttagctttggttaaaaattgttgaagaactaaacatggctgtgagtttctgtgttatataatttctgacatgagatgaagtattttttgtgtctatttgttcatgatgtttaactctgtatttcacttttttttcccttacttatggtggttgttttggtttttgttctaatcatggcaaataattagtatttagtgtttcagcttgaatagaaagaggctacgagaacattgaattcacttgctttttgaatcttcttatagtttggtgttctaagttagaaaaaattaaaccactgccatatgatgaagcaagagttttagaatcaagtgttgttcgacaggaagatctctctgtaatagaagacgtcttacttgatgccactgtgtttattgttatgttatattactttatcatattctatgattaattattttccttatatatgtatagtaaaatctgcatctttatttgatgattccaaaacatcatatttgctcctatgcacaataagaatttccctaattgaatttgctagataattatcaattaactcatgtagttttgcatttaaaagagaa

SEQ ID NO: 30512 - DNA, 615 bp, Medicago truncatula
  Intron number 2 from transcript Medtr4g137160.1 (locus Med tr4g137160) derived from phytozome v7.0 (chr-ID MtChr4; po s 33708129 to 33708743 reverse strand)
ctcgtgatcgttggggtagtacggtaatttcacttaaacaattattgttctaactgtttctattattattcttattctcatcatcatacttatacttattttgaattagtcaattagctcgtgagtctttatcatacatattaatatttaattcaaattatttgttcttatttacctatgattctcacagttataattacgttgaatcagtcaaatagctcgtgatcatattataatttgaattcttttttcttttttcttttggtagtgaattcttttgtttttatttacccactttcattgtcattgttctaaattaagaagaagaaaaaaaaaatcatattcgcaattatttcaaaagaaaaattacagttgctgttgcaattacgctgcgaattttgatgttgccgtaaaatgttagcagcaaatgcagtcgatgcagctgcaattacggtttaaactttatttagcgattgcagttgctgaccacactttaaaactatattatactattcgataagataataagagagggaagaaaatcttcaagttggttttattttatggatgggtgatgtgtgaatttacaatttcgcactttgcaggcagcggctg

SEQ ID NO: 30513 - DNA, 549 bp, Medicago truncatula
  Intron number 1 from transcript Medtr5g041170.1 (locus Med tr5g041170) derived from phytozome v7.0 (chr-ID MtChr5; po s 17619019 to 17619567 reverse strand)
aggtatatactcttcattcaaatctgtatcagagcttctatgcaatgtgaaatggataacttttaatctatttggtattagagtcatataaaattaccttaaatgtttatctgacaattttttccgtgttattattatcattgttatgtaaaatcaacatataccctacagagaggcggtttcgtgcttcctaaatatcatatgtttgtagatatttctatttacttgcttataatattctgtcatgttctctgatgaattgagggaattttgttggagttatgtacaattttctgttgcttttgagctgcatagtaaattgttagtcatgctctgccatgtgtctcatttgttcatatgcaacaagttgcatttatctgaaaattgtttactgataagcactgcacatgcttttgaaaattatgagtgtcagagattttctaatttagcatatgaagaaccgaaaacaaatttcacagtccattatttggaatgaaaaatatgattcctgatgtgtttatgttaccgtctgtttataattatcgacag

SEQ ID NO: 30514 - DNA, 655 bp, Medicago truncatula
  Intron number 1 from transcript Medtr5g033380.1 (locus Med tr5g033380) derived from phytozome v7.0 (chr-ID MtChr5; po s 13600013 to 13600667)
tgcctagtgttttcctttgccctattcttcaggttggtctcttgatcttttaattttacttggagtaaatagtgattttgattcgtaaatgtgcggggaggtggcaatatagtcttgaatgaatcgaaacttcaaaaacatctataaacatgtcttttcttagtaatttcatagcctaaaccgacaaacagaagacatagtcgaagatcccaaactagagaaatacacacaagatgtttttgtaatttggatacattcaatgactacatcaccatcaccatctttatttagaaatttgacataaaacttggaatttggcaaacaaaatttaataattatatagtttgtaatttatttcgctatagaataacagttttatcaaaactagatgataatatatgatcgaacaactatataattcaagcgtttgataattatactataatagtacaaacaaaatgtatatagatacttaaccaataaccatatataactatcttatcactctaatattttgtaatacctttttctttaaagattgctttttaatacctacattgttataaatatagaatataactagacgtttatataaattttgtttatttgtttacactactaatgttttcttatgatgttgggtgaacaggaggta

SEQ ID NO: 30515 - DNA, 1027 bp, Medicago truncatula
  Intron number 1 from transcript Medtr5g013740.2 (locus Med tr5g013740) derived from phytozome v7.0 (chr-ID MtChr5; po s 4199551 to 4200577)
taaaacccttgctaaaagtccttaccctattcctggtaattattctcctaatttttgttcattattgtttactgtcaaccaaaccattgatagatataatgttattatcaggttacggtttttgtagtattagtaaagaaataggttgtattagggttgatgaatgttgattgaatatgaaagcatgaaataacccatgagcttgttaggttataagttttagtataggaagatgaaagactatgcttgcttgataataatcaaacatgtattttggagatggaatatcttgtgccataatggtccttcgttttgtctacaaggaaattttagtcctaatagaaaaggattactagtgtttccttacggttaagttaaccggtcagctattgggtgggttataataaaagaaccgcacaggcggggttgatattatcttgtgttaatttttaaatgataaactaacggctgaaggatgaaaaatgtgctctttttaattgggttacactttgatcggatcctaggttcatgctttggtgtttttctactgttgtagcagtatcaaacagcttgtaagcttggtaggttataagctttgagtataggaagatgaaatactatgtctggtaacaatcaaacaaaatgttttacagtggttgaatatcttgtgccgtaatggtacctcattttatctaggcaatttaggaccttataggaaacgcttactagtgtttcctttatggttaattggttaaccgtgggattataaaacaaaattgagggagggtggatataataaaaaacttagcatggttaaatagttaatatctaccattaattttttaaatgataaatcaacggtcgagagattcctagggtgctcttatagataggttattacaactttggaacaggagcttgtgtcctgcctcggtgtttgtcgattagtcaagcagttgagaattttaattagttaaagaaaattttattattgattttgttttcttgattcgttttttatggcaag

SEQ ID NO: 30516 - DNA, 561 bp, Medicago truncatula
  Intron number 1 from transcript Medtr6g067260.1 (locus Med tr6g067260) derived from phytozome v7.0 (chr-ID MtChr6; po s 12448019 to 12448579)
aaccctcaacaaataggaacaccttctgctctgccgtgagttaacttattttttcatattatttgtgtattttgctgttgctatgcgtgaataagtgtagtgtgatagatatgattttttttttcttcaagatttttagtattttgatgaagtgaaactataatgaaaaaaataaatgaacttttaggtatttaggtatttgaagttcaaagaaactttcaagttttgagcttttgtttgatgatgtcatgtttgaagtttcatgtttaggggtgacgtttttacttaaactttttagtatattgatgaagttttagaaatttgaaaaaagatataaactttttagtatatggatgaagttttagatatttgaaaaaagaaataaactttttggtatatggatgaagttttagatattgatgaagtgagatgttgttgtaatgatttttttacttcatgtttgttgatgattttttcactacaactttcaagtgttgttgatgatatagatatgatttgttttttaactttttaattgataacaactatttcatgaaagag

SEQ ID NO: 30517 - DNA, 912 bp, Medicago truncatula
  Intron number 1 from transcript Medtr7g010770.1 (locus Med tr7g010770) derived from phytozome v7.0 (chr-ID MtChr7; po s 2416799 to 2417710)
ggtatatatgcatttgttgtaaatttgttagctagcattaggcatagtctttaaaaaaagaaaatgaatagtgtttttttatttataaaaatacatttaccaagaccttcaatttaaaggatcttgcttgtcgtcactagagtcggcccaaggacaagactactcaagtcaatcgtattaggcctcacaaaatattacatttttttttctgacaaaaaaatatctaacaatcacttgataaaaagatccatattctactattgataataatttacttgataaaaatgtctcatattctactacaactagaataatgatgtatgtgtcaagcatgaggaattaaggtatttataaaattttaataaaaatagtttttttaaattaaattaaaatttaatttattcaactatacttcaccaccgctcactaccaccctcgcaaaacgatgagtaggtctggtaccacattcatataggtcttaggtctgagtccatatgcataaaaattgatgatgatttgtatttggtgaataagtgtaattgtgtgagacgatgaaggtgattatcttttttttttgaaagaatgatgaaggtgattatctattaatgttcttatgtagttgttggtcacaatatgtgttttgactattttggaatcgaattgtgacattgtgtttgtgaagattttggttcctatgttgtaatgatatttttttactaatgtggattgagttgatatagtttattcttcaaggttctaaatattatgtttggtatgtgatacaacattgacttaattgcttacgtgttcttctcatttattttatactattacatgttctcgaaacttactcttcgttgtttgtgtttgctggcttggctctacggttgcgaaatcataattctataggtt

SEQ ID NO: 30518 - DNA, 530 bp, Medicago truncatula
  Intron number 1 from transcript Medtr4g157630.1 (locus Med tr4g157630) derived from phytozome v7.0 (chr-ID MtChr4; po s 39331140 to 39331669 reverse strand)
tcattcagcttcttcgcggtggaaggttagtttgttttgtcgataaattgtccaattctggtcaagtaggagagtttaacaaaagataaaataaagttaatttgttttcatataagatatgagttgtttccggaagctatttgggagagtttatggaaataagttaaaaaacatgtcataaataagctgtttccataatcacttccaaacagtcttaaaagtgcttatgtaagataggcttaaataagcaaatccaagcggactctagatactaataacattgctcatttctattccatgatttttccacacagcatagttactttgacataaaatatttctaatggattttattttttattttttatatgtaattgagttaatttccttttatctcgtaataatagcaatgtctgtaacttctaaactgtgattttagggtttgagttacatctttctatcatggaaactacactgcacttggtcatctgtatcaattttaagttttcttccattcttttcttgcagat

SEQ ID NO: 30519 - DNA, 908 bp, Medicago truncatula
  Intron number 2 from transcript Medtr7g047200.1 (locus Med tr7g047200) derived from phytozome v7.0 (chr-ID MtChr7; po s 11808765 to 11809672 reverse strand)
actctttgttggaaaggtggtcaatcctcttggttgattgttgaattccatagtatcttaaatatgttttctaagcaacccatttttatattttaataaccaacctatttcttattcttatactatctgaaatatagtttgtttgacaatttttatattaattcattatctgcatagttttataattgttcatattagaaaatttactttaatttattgatgaaaaaattatttattctgaaaattcactagctagtaacatttgttatatggtcatttattatgtacatgatgtgaaacaaatcacccttgggaatctaaagaatacaagtttattcattgtattttaacaagaaaagaaggcatgcaagaactatattagttttgattctaaaagaaacaagaatacgaatatagtttttgtttatagaagaatacaaatatagttacttaataacaaaaacatcaaggttgagtttcaattgatttcaactttatgcatattgattagaatttaagacaagtacttttccgagttattaccgaatcttgcttagtattgcgttcttccttgaatgtgtaaagtgagcatacttgctttgcaggtatgatattgatatctttctcaaccttttgactaagatcaagtgtaatataatttaatatctcatatgtaggctattttgattgataactgatgtctagaaaatgactgggggacataatcgttaaaatctcccaatttcttaccaaaattcttgctgccaaatcaccccatatttgtatatataaataaataggatatgcccttggtgtaatacagacgttgaggatgattgacatgcttttgtgggttataaggtggcgcgtgagagttggtattgggcggggcttttgactgtgctgga

SEQ ID NO: 30520 - DNA, 958 bp, Medicago truncatula
  Intron number 1 from transcript Medtr7g077480.1 (locus Med tr7g077480) derived from phytozome v7.0 (chr-ID MtChr7; po s 16350073 to 16351030)
ccctctaacagatcttctctctttgttgcggagtggtacggctgaaaccttctttttgagcgattagctcttcttcttttttttttttttggttttttttctttcgttgttgtcttgttttttttcttagcattgtaaacaaaaaaaaatataaataagtttatagatatccacttcaaatataaattaattttacagttatccgaccaaaatttgatatcataccacgtcatattaaaataataaaatttaacaagcataaaaattgatgaaaaaaaagcataataattgaaaaaactctacaactccctatgtcatgtctttaaattttgagatcttactgagttgtaattgaatggcaatgaagaagagatttacactaataaaagtttattgataatccttcaaaaaaaaagtttgttaataactttctatagtgctaagtagaaactttagtacctaaattttgttgttattattaaactgcagtaaatattgatcactattcacatgactatgataggagtaaaaattgtcgcattatgtgtcgattattgatttctctttgcattatgttctaattgtttcccactaatttattaattaaactagtttaataattctttggctccattatttttcattgtgcttgcaagtgatatgccattaaaacatagccaattgcaccatacctacttccttgtccaatctcctattttggtaaacaccacattaagcactaaacatgatcatttgttaattaactatttcttttacaatgtgatgtcaagtgtagtttacaaaattgacgggactcgaataaaatacttgtaaatcttaaaagcccttccaaaatgctagcttcttttcatatattcctattgatttatacaatagtttatttggttaatattgtcttctactactcacatccttatcaatgtcttggtgaagtgga

SEQ ID NO: 30521 - DNA, 955 bp, Medicago truncatula
  Intron number 1 from transcript Medtr5g028000.1 (locus Med tr5g028000) derived from phytozome v7.0 (chr-ID MtChr5; po s 11481809 to 11482763 reverse strand)
tcgtgatttgattggaattgcggctactgggtcaggttagttttgatgtttactgcattaattaattgaatttgattatcattttggtggttattttataattgttatttgttactttgtaatattaatatttagtattagggtctgtttgaatggtttatttgagcttatttacttacataagtacttgttgtgagactgtttggaagaatttgagaaaacattgagaaaacaaggccctgtttggataaataacttcatctgcagcttaagtattagctacttccgtaacaaaagataaaataaagttaaattggtattgtataatttataacttttcataagctatattggagagcttatgaaaataagcaaacagctaatgaacgtgtcataagttgttttcatacacactctaaaacattttgacaagtgtttatgttagtagataagctcaaataagccaatccaaatagccccatgttcataagctgttttcagcttatttccataagctcataaggatatcttatgaaaacagcttatacgtaaacaatttgactttattttatcttttgttataaaaatagcttatatatgataattgttaatgctataagcggcaaactaagttatttagggcctcaatatagagatataaaactttttatattgtcaatctatggcaaaatcatcatttgcatgacttttgagttagatatgattaaagtcaaatatttttaatgatccaactgttatgagaatgtaaaaagtctttatgcattatgttcatgttattgctatttagtttgtaatatgttatttaacattatataaaaatgtaactatgcatttgtaaaaattgaatgaacttgtacaatccaaagtgtggatttgtaaatatcttttctttttgttactagggaagacacttgcttttggaataccagctatt

SEQ ID NO: 30522 - DNA, 592 bp, Medicago truncatula
  Intron number 1 from transcript Medtr4g136030.1 (locus Med tr4g136030) derived from phytozome v7.0 (chr-ID MtChr4; po s 33156554 to 33157145 reverse strand)
ttgattagtttagactgcacaacacacagcttgtggtaagatttcaactctcttgtttgttgcattaatttaatttcctatgtttataatatgcattttttatcttctagttaaaggtctggataatatagtctatacagttgccagtagttgtatgggcaacatacatggctgttaaatcattttttaagggtgagtttacttaaccacttaggttttggttatgatgttgttgtagttgttttattttcaaagtttaatttagaattttggatattgatctagagtgtaaggctatgttttaatatgataagtaattgtgtaaatggaaggcctttttgcacttaactgcttaggttttgtcattgctctgtagaaattccttggaatacaagttttataacatagtactcttttggctaatgtcatttgatcctatccaaaatctcttaaacagtatcattatgttttagatgatagaccctgtagcttgatgtttggctcatgtcaaatttctattttaagtggagacaggaaattttaacttttaattcctaatccaattgtggtgttgtaactcccattataggcc

SEQ ID NO: 30523 - DNA, 715 bp, Medicago truncatula
  Intron number 1 from transcript Medtr4g158390.1 (locus Med tr4g158390) derived from phytozome v7.0 (chr-ID MtChr4; po s 39774166 to 39774880)
ttctccgatctccgtcgtctccgctttctggaaaggtctgattcaattcaattccaatgccataattaatttctattatttaattgtttacatgatttattttctactgttatttttgcttcggtttagctcaaatacagaataatcaaagtgttcaatattcaattttactgtaattctagtacttagttctaagttttttttttttttttttttttttattatctttcacctcaaattgatgcattacttcaaaattgaatcctccaagcatcgtgatcaagcttacttaaataaaagttggatcggattggttcccctcaaaaccgatccaaaccgcaccacgaccgccccctacttacatgcacttacttgtgtgcaaaatgcattgtgatttgttattttggaagaaatctgcattatgcagatctttagtaaaaatttcaagtaatgaaaggacttcaactttagaaccaaagagaatttcattaaaatgaatggaattagtgatcctgtaaaaaaaatatatattatgaaatggcaggatttacttttttatgaaatattatgatttttgaagctgatttagtaaatggtctaaatatttgaattagtgtttctgtaccaacaaaagcagaagggaaagcatacacgtgcaataattttattctctttttcagattttgacttagagaaggagaaatccgtgttagat

SEQ ID NO: 30524 - DNA, 601 bp, Medicago truncatula
  Intron number 1 from transcript Medtr4g149590.1 (locus Med tr4g149590) derived from phytozome v7.0 (chr-ID MtChr4; po s 37221715 to 37222315)
gagaggagaggaggacagcatctccggccgaagcagtaagtttcgtgtctttcgtaggttctgatatattcttatcagttattgtacctatttgttttctttaactactttggccatacgagtttactctgtccaatttaagcttttttttgctttaagagaattttcagctttaattaagtgattataacttaagatgaaaataagttgttttcgaaaactatctgagaaaacgtatgaatataagctgaaattaatttatcaacttgtcctaagttgtttcaataataataagttatctcaatcaatcttacaagtgtgtaagtgttcatggctctccagatgtaaacttaaacaagtcaatcaaaataggctatgaattgtctatttatctacgagaaggggcactacactagtaattcgatgttcggctgagagacatttaaagaccgactaaaaaattgttctacacagaaatcaaactcgggaatagggagggagggagggagggaggttattatatttagttgataaataatgtaatgttataattctttcaaatatgtataaaaaggatggggcacattccaaaaagtgtctt

SEQ ID NO: 30525 - DNA, 570 bp, Medicago truncatula
  Intron number 4 from transcript Medtr4g149590.1 (locus Med tr4g149590) derived from phytozome v7.0 (chr-ID MtChr4; po s 37223025 to 37223594)
ggcgcatactgaggtacactgttgaatgttgaatcgttgattattgtttaatgtttttgactaaatgccccatcattgaactctttctgaggataatcatggggtggaatcattattttcttagcggtacaccaatctgatcatctagtgtgtaagtggagcttaaaactctttagacatagtttgggtaaacaacttaattaagcgcttacatgtaagtgcttatgtataagctatttctgtaaataaaaaaaataaagtcgaattgttttcatataagctatggacaagtgaaacaggttgaaaataattatggacaagtgataagctgttttcataaactcctaaacagtctcacaaatgctcgtgtcagtagatacgtgctattattgctgagatatatgatcatgatcttcaacatcatgtcacttttgtttattctacttcaaaaacatgacatataacatagatatatgctatatgtaatggtgatttgtaatccaatgctctttgacatgtttgtttgatcttgcagtggccagggtaccatatccttggagcttctggaac

SEQ ID NO: 30526 - DNA, 482 bp, Medicago truncatula
  Intron number 1 from transcript Medtr4g132800.1 (locus Med tr4g132800) derived from phytozome v7.0 (chr-ID MtChr4; po s 31660434 to 31660915)
gcgtcctcacaaaaatgatgttgctgggattatcatattcaacaaggtgaagctcaggatggtgttactcaacctggatcttgcaagaatttgaagcaggatgttcattctattcctgtttcgcctatgatggagatttcattgtttggtttgatttgggttgtaatgatatgggttgcaagaatttgaagcaggatgttcatttgttgttgatgaatgtgcagcttgtttgttatattttctgctcaaaatgagcggagatttccggtgaagcttcacgttttccggctaccactccagtgaaggtcatgggagctcattttttgagttttttcatggggttttttcttctctcttcttcctgagctcattcctcacatctaatttcattatttcactcttattgttttagatccatgttgatttagtttctgtagatgttcgtagtcgcgacttggggtttctcaccagtgctgtgtttc

SEQ ID NO: 30527 - DNA, 669 bp, Medicago truncatula
  Intron number 1 from transcript Medtr5g005180.1 (locus Med tr5g005180) derived from phytozome v7.0 (chr-ID MtChr5; po s 68268 to 68936 reverse strand)
gtcctggttctcgtacgtatgatatctatctcttttttcatttgaatcttcgatccgtatttctatatattttactgtgtttgtttgtgtgtaacctctcttgaaaatttgtgtggatttccgtatattactgtgatgtgattcatcatgatttggttcgaattttatgaattaaagatgaagatccaactcaagtcttgaaatgaatgcatgaatttttccatgtgcttgttgttttgtggaatattttgttctattcagcttcttttcattgtcttaatttcaacataaaattagtattcaattcagctgggtgagaatatttcagtggaattttttgttgatttggttctttacctagctgaaagaaatttctgaatattttatttttgtggaattggtctttctattaccacctgcataatatttacttctgctgaacttcttttcacttgacttaattgtcaaattaaaatctccctcataagcaatttttgttgtaaatttcaatattatgttatcttataactattgtcttaagatgagtatggtttagttattgctacatttcaacacttctttcttagttacttgtacatacttcatattggttgattataaatgtttactgttgtaccctgttttgcagccgtgtgtgtggaaactctc

SEQ ID NO: 30528 - DNA, 745 bp, Medicago truncatula
  Intron number 2 from transcript Medtr4g096840.1 (locus Med tr4g096840) derived from phytozome v7.0 (chr-ID MtChr4; po s 20514705 to 20515449 reverse strand)
catccaatataattgctactgcccttgctaaacaggttagtttcttctatctggtctaagagcaatattttccctcattttttcccacatacatgcaatgatatcttgtatgagatccttactagttaatatttttttatttttttttttaaaaaattggtaagttataagtgaaaggaacaatccgtaagagtttatttagacttattaagagtttataaaattagtttgtaatataattataagctcttttcagtcataagttttttaacacagctcatagaattatagaaaccagacttatgtgaagtttatttaatctcctcttagatggttgaatcaaattattcatgttaccaaatagttgattaatcagtcttttatctagatttcccaccaaagcaatgtgtgtttgatgaatgtgttcttagtgccataccctaaaatgctgcatgtagataaaacacagaataccttttttgctatcaagcacaatatgcgtttattaccgtctgaatgtttatagcttaaccttcaatatctctgtaatttaactgaacagtattgactgatactactatgctttatttgatttagctaaccttttctgcctgtttgactatatctaccatatcaaagaagtaaagttttcttttcggtattactgttttctatcgatggatatgtgcagtgcacgcagcacttaaagaagttaagtaaatatgttttgtataggatagagagg

SEQ ID NO: 30529 - DNA, 761 bp, Medicago truncatula
  Intron number 2 from transcript Medtr5g047760.1 (locus Med tr5g047760) derived from phytozome v7.0 (chr-ID MtChr5; po s 20166766 to 20167526 reverse strand)
gctgtagtttcggctgcggtaacatatgcttgatttttacttttgactaccaagcttatttacagttgaacttaagaagatcaaatgaaagttgtatcaactacaatatatccactattcccctcattcttttcaatatgcttggaaacacaaggagccatttttttcgaaattggtttttgacaggaagtggaaatatatagaagaaatcttgaaaatagacatcaaacctggtgtcataaaacctggtttatccatctactattctagaagagacattaaatggtttaaagttaaataaaggtgtcatgttttatatgatgtgcctaatttgaaaaattgaaattgacttatatggagatatttccttataagttggaatctgcttcgtatcaattttcattagtttttagacctgttatttatcattcaattttcacattttttaattttataaaccttttatttggctgatagtttgagaattattttctctcttttttcttgcaagacaaaacacaattatgttattgaagaatccaattatattgattgcagttcatggatacccttttatgtaaccaaaacatgacatatgacatattatactgtatcatctaatatgataaaagaatgacacctattcttttaattatttgagtgaaaatgatgacaccaacttatttcattcaaagcttgtaggtttttcccttgtaatcaaaagagaatgaactgcagaaattgtgtttttgttacagtga

SEQ ID NO: 30530 - DNA, 913 bp, Medicago truncatula
  Intron number 1 from transcript Medtr5g033740.1 (locus Med tr5g033740) derived from phytozome v7.0 (chr-ID MtChr5; po s 13755107 to 13756019 reverse strand)
gccattttctaaacgtgaagccattggcaaagcatgtaccccatttatgttcttactagacattcactcccttctgactttcaaaaccttaattggttttctctgtagtttcaactttcaagttgtataattattgtataattagcacagttacctttcattcagtatgattgtactctactaaaattataatgtctaaattatacccttatataaacttgggaaagatgatacataaacttgttaaacaggttaaattgttaaagccataagttcctctttttatgacattggtaccattcattctttctgacacttaatgtatgtacttctatttcagcttcaagatgctgtgactgatgagatggatattaagcttcttcaactatatgcatatgaaaatcaataaaacttgaaaagtttgtcgatatagtttaccacgaaaatgcttgtgttctacacgattagaacatatatcgtattgaatatgcaagttttcttttccttttttcatttgaagtttgactcttgcctatttaaatatgctcctggagttttaagtagtgttatatgttttgtaacatggtttatttcctcgcagtgtcctaaaccaaagacgctgtctattcaacttgtgttactgaacaaacatgttaacctattggtggaatagtcgtttagattgactatcattggattgcagaaagttaagatattggaagcagatggtctcatcctatcataaaaccagcttgtgttactaaatttatgatagtattgcgtttaatcactttagactttaatcaatattaatcggatagcttacgttttacgttttcccttcttacattcaacattttcttactttccatgcacagggaatccagaaactacattcacatacttctggata

SEQ ID NO: 30531 - DNA, 510 bp, Medicago truncatula
  Intron number 2 from transcript Medtr4g108000.1 (locus Med tr4g108000) derived from phytozome v7.0 (chr-ID MtChr4; po s 23747604 to 23748113)
cgaggagtgcaaatacttttgagaggttacataaagtaagttgcttctctgtctgctctatttgtgtatgcaatatgattagatttatataactcttacttttagaattggtatatggttaaatcagtgatgtacaagaaatttaaaacacaataatgttcctatggaaggaaagaaagggatcaatatataatgtttgatttgattatataaataaatatagatactaggtgacaagatttcatgtaaaattcatattgcagtttaaggtagggttaacttgattctttgtactgcaaaaatagaaaaaagagtgaatgccaattaggctgtactgtagcgtaactttgtcttgtttatttgagttaaacttcttatattggtgaagaaaagaggttgtattctttgacgttctttccaattgatgatagttgtctattgatttaaatgaataatttggtgttccgttatgcagattgggcaaggaacttatagtactgtttataaagc

SEQ ID NO: 30532 - DNA, 390 bp, Medicago truncatula
  Intron number 1 from transcript Medtr5g021490.2 (locus Med tr5g021490) derived from phytozome v7.0 (chr-ID MtChr5; po s 8207177 to 8207566)
tcaggtatgtggcctttttaattaatttttctgaagtttaaattttatatctggtttggaattatttattgaatttgatgatgagtttcctctattttggtgattgatgaatttttatttttctgtgaaaaaaaaatgattttgaagtgtctgtttgattatttgtggaaatttttttatgcgggtcagaattatttgttgaattgaataatgggtttcttctgttttagtgattggtgatttttttttgttatgaaaaattcagttgttttgatgattttggtgtttttatgaaaattttagttgattgatgattttgatttttgatttttgatttttttgttgaaaacttcagttgattgaccctgctgataggacagtagatagaga

SEQ ID NO: 30533 - DNA, 847 bp, Medicago truncatula
  Intron number 2 from transcript Medtr5g067880.1 (locus Med tr5g067880) derived from phytozome v7.0 (chr-ID MtChr5; po s 24195425 to 24196271 reverse strand)
tatccattggtgttgggcttgggcctttccatttcgtttttctgagttttcttgtttttttttgctacctgcaccttattttcctgctatatgaacctctatttgttctaaaagtttcctaaaaaaattctatatgtttcttgttgcatttttgacatttttttgtgatatttctacctgtttaaaatggtaaaaaaatatatgtgatattttcttgattaatttgttctttttggtctaagtttgtgaatttcttgtcatattttcttcataaaattttggcatatgatgtgaatgattgatgtgcaatttcatgatgaatatatccctgattatatgtgtgttttactgttggtctgatgtgtgttttcattcctttatttttgccaataatatgtgtttttttgtgaaagaaaaagtgtaaaatatccctatgaatgtgttataatgcttggcttgaatgtgtccttgttatcctcacattatagcttaaaatcaaacctctttaaaattgctatgatgagagaattataggtcatgtgcatgtctaagtgttataacaaattttaggtatattttgccattttatttcacttcattgctcttttcttttttgctatcctattcaatattgtttactttttcttaccattttatgccttatattactaaccatttcatttcatgtttcatccatctcatgagcatcttacctttttcatctcaatttctcatagtttaggcatttttaccttttaatttctatgttaaaatgtcatgtaatattttaggtagtttaaatttccttttaatttcttgcaaaaccatagaatgtaaattagggaaa

SEQ ID NO: 30534 - DNA, 972 bp, Medicago truncatula
  Intron number 1 from transcript Medtr5g067880.1 (locus Med tr5g067880) derived from phytozome v7.0 (chr-ID MtChr5; po s 24197398 to 24198369 reverse strand)
gatacgacatcttttgttagttccaactctcgtttgtcttgcattcataatccaaatgttgcatggcattcatgatatttgaaagtgtacaagcgtatttttacgtccaaaaatagtgcaaatgttgatatttaagtgtcttcgtcccgtcaagccaaagactccgtctcttgaccctccggacaaagaaactcaaataggggcagctgttataccctgattttggacctaaaaatactcattcaaatttcttttttcaacactgatatttgtcaatttactgttgttttactctgaacctttactctcttatcatctgcatattttactgtctttgcctcgcagtttttatcaatcatgtttttatcattattttttcttgcataaagtcatccaaagtgtctttcttgcattacaagtcatttaaaaagtctctctgaatcattgcattacttttcttgcattttatttcaaatatttgcaaaatcatacaaaagggtattttggtcatttctgcattggaacccatttcagtccctgcatttgtctctgagtcttttcaacttgcctgtataagtcattgttaaatctttgtttaaaatcatttcaaaaaagttgcatctgagtcagttttaagtcaatttagtccctagggggcattttggtctttttctgtcaaaatttcggcagagaggtattttaaaatacctcatttttgtatttggttcattttagtccttttgttgattttaattttaggcttcactttacgttttttccaaattaccaattttagtccaattttatttttaattgcattctggtccctcaaacagtttccagaattgcattttggtccaaaactttttaaatttgctttttattccttttttcttatttgctgtttagtccttcaagtttcttattttgcaaaaaggtcccaagttcattttttagcccaaggccgagcta

SEQ ID NO: 30535 - DNA, 596 bp, Medicago truncatula
  Intron number 2 from transcript Medtr5g076850.1 (locus Med tr5g076850) derived from phytozome v7.0 (chr-ID MtChr5; po s 28190559 to 28191154)
ttctcttggatacaaacataaggcttagtgttagtgtaagttaatatttggctgaacattttttggtgcatttttcatataagtaattttgattaccctcacttgtatgttcattaaggttattatcttcaaggtgtcatgtttgggatgacttatcatttacattaacacatagttcattagaaatggggagatattaaaatcttacataccattatgcttcattgacaatttgccgttgtgcctttaaatttgacgtaagtgttcttcctgaaaattgaaattcgccgttgtacttgtatctttatatattatacaatcaaggatctactatcacctcaatgtgatttgaaatttgccgttgtatcttcctgaaatttgtgtgtggctatgttcattttgtatgcatttacaggaagaagtagtttgattaaatgaaactaaccttcttactcgcagctttagttgttttttgtcatctctctgtccattgaaattgttgagcttcattatttactggcatatcatgacttagctatgtgtcccttaagcaaagcatataattatgctttggcagacatcggttgaggctagtg

SEQ ID NO: 30536 - DNA, 889 bp, Medicago truncatula
  Intron number 2 from transcript Medtr4g141900.1 (locus Med tr4g141900) derived from phytozome v7.0 (chr-ID MtChr4; po s 35126107 to 35126995)
ctggaaattaagggtccggaaaggtctatcaaaaggttggccccatattttttgttttgtttagtatggtaatttatttaatggaaaatgctaacaagttcccaaaggcatttgttaagaagttcaaaatgaaaaatttatcttgggaattgtgtattcaacatattgaaacattaaaaagaatttttttctacataaatttatcaactcttttttgaatccttaacttagcatgacccttatttaattgcatcttatagagattgaattttaacaaactactatgttctgcgatgcacgatttaatacaaaatattgaccgtgatatccctattagtttatttggtcgaaatgcgggaaagctccgtttggtggaatcgagttttgtgaattatccctggaagtggaagataattttgagatcttcaaatgatattcggggttcattgtgactactgtcacttcagccattacacaagacgagactttacaaccgtggagcagctttttgcaaaaagatgagggagaaactcagcaatagactatagcagcactttatcactgtagtgtagcagaatatgaacaaacttaatattttccgtgatctttgattggcaacactcgcatctatgaaccttgtttgcagaataggacatatataatttaattgtgctaccggcgattgtctttcaattaggaattctttttaattaccatgcgtgttacgatcatccagtttccttgctagtatacttgcctaatttcattctcttgttttgctagcatcgtgtagaggattcttttatttgaaattttgtttatatacgttcctctttttgacagtgtatgcttaaccatgtttacattatacagattggacaaccttata

SEQ ID NO: 30537 - DNA, 600 bp, Medicago truncatula
  Intron number 6 from transcript Medtr4g121710.3 (locus Med tr4g121710) derived from phytozome v7.0 (chr-ID MtChr4; po s 28626689 to 28627288)
cagcgtaaaaagtgcttctattggtctgaggtgaggtaatttgttttgatgaaatttttgttttgaagaagagtgggttttcaagaggttgacgttgtctgagttgtattattatcttgttagaagaagagtgggttttcaagaggttgacgttgtctgagacagtaataaaaattcaattcaaatttgactatataactcgagcaaccttttctcatgaaaaggttgctcatggtgattggagtagtcattcattacactaattttgtcttcagaagaacaaaaaacttgcaatcattcagtactaattgcttgtcagcatttgggcttgaaattcagtgacatacatatgtggaaacaattatatcgataaaaagcatttggatctcgattatggtttgttaattctaaatatttgttgattcttcctctgagtatcctcttttgtgaagaatcaaaatattttcctaacaacttataggcatgattgcatgccaactcttattgtggattttaatttggttaaagaattgtcaaattctataatgtgatcaactggccattttcatcaatgacaggcccataggagctgtgatattc

SEQ ID NO: 30538 - DNA, 947 bp, Medicago truncatula
  Intron number 5 from transcript Medtr4g133580.2 (locus Med tr4g133580) derived from phytozome v7.0 (chr-ID MtChr4; po s 32054855 to 32055801 reverse strand)
aaacctctatcaattcattaaggataagtcttaaggtaaaccttttttcttgttttttgtcatatgaaattatttctcatctgaaattcgtctctgcccttgttcatatcatgtatttattcattatagtctcactaaattggtctctgcaagtggcatgtggcatgtggcactagtccaaagatacccttaaggggtttcaacatggtacctttctttttagtattaggagttaggactactgatcttagaaatgtaattgggtaagacctatatacatgggatgcaactgttgaaatgggttttgtaatgttttgccagaaaagtgcgtctatattctatgtaacggttacattcagccccttttttcttcactagaattgttttttttaatagcaccatcattattactatgatatatttgataggaactgagtctgttggcagagatatatgtgtctagtacaatcagttttcagaggtcttcttagatggtgtgttgaaatctatcaagttatatcctttagttaaataaattcagatttgtgaatttagatgataacagcgctaatggttcattgatcataccggggttgaattatggtagaagagtttttaatataagttttagtgatttagtcaattatataatattttggatacattcatcctttcttgatgtttgttgcattctctcccgatacaagagcatctttaaggcgccaaagtagcaataaattggctacaaatcttgtgcttcaattaacttgtggtgataattcacaatttaattctattagcagataagcaaactatatcaaaattagaatatgttagcaaccttcagatttactcatgaagtgccactattcattgttagttgtccgtaattccttattcttattttattttatttttaattcatcttgtgcaggtgaagcaggctg

SEQ ID NO: 30539 - DNA, 807 bp, Medicago truncatula
  Intron number 1 from transcript Medtr4g107860.1 (locus Med tr4g107860) derived from phytozome v7.0 (chr-ID MtChr4; po s 23669628 to 23670434)
ttttaggtcttggacaagctgtaatttcacttttcatttctcattcaatgtgcttggaagttggcaatgatattcatgatgtttagattgactttttttttaatttatctactgttataagcattttttagaagcttatgaaaacaagttataggttatatgaagaaaaaaaaaaattgactttattttaccttttgagatataaatagcttatacttaagcacttacatgataaggacttaattaagttgtttatccaaacagggttttggaaatacttcagttcattcttacaaacgcttataccatactatataacttttatatgatatgtgcattgaagcaatgctgcatttagatttatatgcatgccctttacttgtaacttgtaagaatttagtcatgcttttctattttgtttgctttccttcatgcagtcaacatattataatcccttcaattattgtttatttgctgggaaatctcatgtataatttgatttcattgtgttgaaattaatatagatacatcatacaatctcttggatagagaaatgatatttgaacatccatttagtgacaacttttgcaacaactttctctctcatactcacattattttttactttatctctctattgctatagtttccgtgccaataccacttttttctttgtaaattatggttgtcaaataagttttcaccaaattggttgttcaaataacactcctcaattggataatagcaatgactttttaagtgtgttgtattgcaaattcttttaggtagacttctctggaacagttg

SEQ ID NO: 30540 - DNA, 999 bp, Medicago truncatula
  Intron number 1 from transcript Medtr5g100130.1 (locus Med tr5g100130) derived from phytozome v7.0 (chr-ID MtChr5; po s 40081070 to 40082068 reverse strand)
cttctagcttttctatctctatctgcagacttcaggtttgtctctatttctactttgtctgaaaatattgttgtttgaaaatttattatttactaattaaaacttaaatatactccaagtttgatatggtgattatatttctactttgtctgaatatattgttatactccaagtttttttcttttttggtgtctgaggttggaaccccggactttgcatatattatgcattgttccttaccaactgagctaagctcacaaggaaaaatatactccaaatttgatatggtgaatataatatcttaaaaaaaattatattatttttatttcatatatatggttaatcatggttttcgacaataggttgaaaacaagtttgagtttgtaaccttaaggaactgtgtctgaattccatatagaacaattgtagatataattattagtcaccgttattaataataatttacccttcttcataattttttcttaaatatttgctctaatgattaagaagtatatcttagataataaataaaaaatcatttttctttcaaaaaaagaaaaaaatcatttatttattatctgtctatgtatttgatcacaatctcatcaatagtttgtttttaatcaatttatcttctaacttgcacatcttattttactacatgaacataatccattaattctaataacctaaatccttgcaatcaggagaaatacacaatcgttagatgaaaatcaaacaacttatattctaacttcaccaaattagttttaaaatacaactaggaatatgagtggatcgatcttcatttaacaaccgagatttgaaatgagtggttagtttgacgtttgataaacatcatctttaaaactaaggagaatttttatttggttttaatctgattttaatatacatgtatccccatgcatgcatgtaccttaattttggtgttgttttgttgcagtttcttaagagctaatcacaaagaaagtgtac

SEQ ID NO: 30541 - DNA, 691 bp, Medicago truncatula
  Intron number 1 from transcript Medtr5g038610.1 (locus Med tr5g038610) derived from phytozome v7.0 (chr-ID MtChr5; po s 16315604 to 16316294)
ctcctagtgtttctagaagcttttctagacaacaggtatggtttgttctttgaaaagttttgatttttttatctgggttgttttggtttagtttggaatttgttatgtgtgatttattctttggaaagtatcaatttgatttatgtgggttgttttgatttagcttgaaattagatatgtactatgaagaacaaatgctcatcagattgggtgtgtgtgacatgattatattgaattatgttattttttcaaattattatcagagttgacgtgtcggggtcaaggtcggtgtctaagcacttcataggatatgttttttctataaaaaaaaaaaaaaattggttcattcaaaagtgtcaattttttttatctgggatgttattattttgcttgaaatcagatatgtgatttattgtttgagaagtatcaatatcttttatctgggttatcttggttaagcttggaattttgattcaatcaccaatttagttttatgaagtgctgttgatttagttactgaaattgatgaaattttaaaatgtttttttttttatagggggttgggtaactcaattggtttaaagtaaatgataatgagttaaagtcctcggttcgaacccgaaccaagtatattttatttggttttttgcttctttggttaattgtgattggttttatttgcagtcgaagg

SEQ ID NO: 30542 - DNA, 513 bp, Medicago truncatula
  Intron number 1 from transcript Medtr5g032800.1 (locus Med tr5g032800) derived from phytozome v7.0 (chr-ID MtChr5; po s 13321640 to 13322152 reverse strand)
tctggtgttctatcccctttccatttctttagaaggttcacttcacttatcacctcttcactaatttaatacatttttctaactcataatttttttttctacatcatttttttccatttaatttcaaagaaaggtataatcaatatacttttaaaatattttttatttttattttctaaaatttgtgttagttttatttggtaacaagaaaataataaactcttgaagtcaacaattgtgtttattttaactctatcacaatgcttttaaagtacatcttaggttctcttattaacaagttaaaataactcgtatttagaaaatgagaatagaaaaatatttcgcaaattaaatggtacttaatattttcttttcagttttgactgtgtcaactattaaaagaaggaattggatgagatgtcttaataattgaattaagatttgatgtttacatctatgttcttggctaactaattatggtgcattaaaacttcagggaaacgggtgagaaag

SEQ ID NO: 30543 - DNA, 680 bp, Medicago truncatula
  Intron number 1 from transcript Medtr4g128420.1 (locus Med tr4g128420) derived from phytozome v7.0 (chr-ID MtChr4; po s 30232679 to 30233358 reverse strand)
tttgcaactttggaagctctgtgacaactaacaaggtatcttatctatatgatcttaagtgtttgttaatatagtatcttttgaagatatagcttttaaggttgtgttatgtttttttaattattattatggttatgttatgaatcatgttgtgttggcatggacatgtctgaattattagtatgattcttatgaattttcatcaacttaattaacaataactgactttacctcgggatccttttaattcaattatatccaacctgtcagaagatttatgtatcataaagtattcttgttataactgaaaataattcaccttctctttcacatgttcataacttgctttttcttctcaattttccttagtttctagagcaaaaattcatctttcatttttcaagtcttctcaggtttgtttatatatttcttttgttagagaatttcactcttatcttaagttatagtctatagtctttatgtgatggatccttagattggttgtctaaacaagtgtcaaattcaattgattaaaattagtaacactttattgttctgcaaaaagaaggttcttttcttaagggtgaatgaagactttttcatttcatgttcatttttgagttatttatttatttattcaattaattttttaccttcaacagcttgaaaataaaatagag

SEQ ID NO: 30544 - DNA, 378 bp, Medicago truncatula
  Intron number 2 from transcript Medtr4g092560.1 (locus Med tr4g092560) derived from phytozome v7.0 (chr-ID MtChr4; po s 19378663 to 19379040 reverse strand)
gaaagctgataagttgaagcaatcacttcctccaggttagttgttgagaattatctttggtcatatgttatggatgtgcaagtacttttcaactctatgtgcggcgagtgaattgcataattgtttatttctgttggttgttataggttggaaccttaaatttgtaataattttttaaaatggaatctataaaagtaaataataggattgtgtaatggccaaatagatatgggagaatattgcatgctcttccatttcatagggtttctgttgtttttctcccactgctaggaataacttatgaattgatcatcaagatgtagaaatttgagtttaggtcatcctacttacgtatatgtttcacttttgcaggtttga

SEQ ID NO: 30545 - DNA, 706 bp, Medicago truncatula
  Intron number 1 from transcript Medtr7g010510.1 (locus Med tr7g010510) derived from phytozome v7.0 (chr-ID MtChr7; po s 2285656 to 2286361)
gggtaagaaagtattgactcttgtgtgagtttatttcatagtcatataattcacgatttgtgtcggtacatggtacgagtacgggtttgcagtatgcaacatgagaagaatttgacagtacttatggatgtatagagctttcatatgcgtcagttcgtagtatagtactacctaattaagtataataataagttattttaatattgcaaacaagtaaaaggattatagtaggaagatgtaacaaattagtggccactttttttttcttttctttaatattcatatttcttttgctttttttctttttatcaatgttattttgcaaaagacgttctctttctctaacctttaaagaggtttttctttctcttttatctcctattcaacattgtcttcctctttcttcgatcttcactcacttgcctcgatcagctggttttcacgaattagagggggaattcgtgggaaccaattcacaaaagtagtatagtactacatcaaaatccttgatatttaattcaattaattctataactatttctaatagatcaatttctccatcaactcagggtttaaagattatagagcaacttttgtgacttgcttctcaatgaatgttgatagcaataatgctttatgttctaaattttctgaaataataattgcaattgagcatgccaggattgaaggttggaccaagcaataa

SEQ ID NO: 30546 - DNA, 836 bp, Medicago truncatula
  Intron number 3 from transcript Medtr7g046330.5 (locus Med tr7g046330) derived from phytozome v7.0 (chr-ID MtChr7; po s 11398367 to 11399202)
ctaccaaagcagcaattaagtaagttattttttccacatctttagaatttgaaaagttaatatctaatttttattttctaaggtatatttattatgtagtgtgtctcttgcaaagatgtataatatattatttatcaactaatgtagagaataaaaaaattcaaaaattattaactagattttatcgattatttaaaatgaatacattcgagtgcattttaaccatcagtaaatatatccaagtggtacgtaaactcaaatcagaggggagaattcatcttgtgtgtcccataaattctttggcaaagaatattcattgcttaacggcggtggaaacttgatacatataacatggtaactggtaaaaaaatgaaattataacaagttaaattaaagtagagtttaatgacttcacacaaatagtataaaaatttatatgcattcatttaatcatcttttatatatatatatatatatatatatatatatatatatatatatatatatatagtttagaatgtgatataagaaactttagagcataaatttcaatctcttcctaatcatcattgtttttacaattgttcactttgaaggagttgcatcctttaagatttgtaatttttgttcaaaatatatgtaatatcaaaaggcgaaaaataaagaaacattagtatgataggaagtttctcaaaaaaaaaaaaaaaattagtacgataggaagattattgtgaaatgacatgcttttataactctgtttccacaagaaactgatctttaatgcaattatgtttttacattgatagtgacggcttaaacgttggtggatattttgc

SEQ ID NO: 30547 - DNA, 846 bp, Medicago truncatula
  Intron number 3 from transcript Medtr5g037750.1 (locus Med tr5g037750) derived from phytozome v7.0 (chr-ID MtChr5; po s 15915554 to 15916399 reverse strand)
ctgaatacttctagaggagaagcgtgagtttctttgcttttttgaatctctgaaatttcatctgttggttttttttcaatgattttgtgcttgatcaaacatctgaatcttaatcgactgttattaattgtctttgttgtaatgaaattttgtgctttattgtgttcttatgtgaaattgattgagtgtttttaaataattgtttggtttttgtaacatcttatctgggtaagagtttagtaaagtgtttaatttttttttgttaaaaattaattttttatggaatgtttgattttgagagatttgagagatgagatcagatgattcttatcagcaattatgtttcaatcgttttatttattggttgattttcaacttttaatggtgttgagttagggttttgattatttatgtttgtaatgtaatacatgtgatcaatttcagattgtgtgctgagttagggttttgactatttgtgtctgtaatgtaatactatgtgatcaatttcagattgtgcgttgagttagggttttgattatttgtctgtaatgtaatactttgtgggcaatttcagattgttctattcatggtttgattttcaacttttaatggtgtattgagttagggttttgattctttgtgtgttagcaattgtcatcaatttttgaattgttctattcatgggttgattttcaacttatagtggtgtattgagttcagggttttgattatttgtgtgttgttaatgtaacactttgttatcaatttgattaatggtttaaatttattctgacattttcttggtttcaaggtccgggcaaccgccgaatcgaggtagtcaaaaac

SEQ ID NO: 30548 - DNA, 916 bp, Medicago truncatula
  Intron number 1 from transcript Medtr5g081230.1 (locus Med tr5g081230) derived from phytozome v7.0 (chr-ID MtChr5; po s 30474073 to 30474988 reverse strand)
atctcagtgctgaacacatcaaacccttgatcgttaatgattttttatttttttttatttttgtttacttcactcttattaagccttaatcttgcttcaattttttcaaatcttttacttttgcatagcacttcatgatctcataatctaataacttgtgcaagatctctacttcagaaagtttaattattgactgaaatttaaggaagaaaatgaaattaatttatcttcaattttagcactttaatctaataatcagcgaaaaattcatttttataatgtttgttttcgtcgataattcaatttttttacattggtttttctttcttctatttgttagaattttgatttctatggcctgcatctctttccattaaaatctcatagttttaatctaacagcattagatcatgatcaacgttgctatttattactaggtaatataaaaatgatatcaacttgtctcttatgttgtttggttattttattcattacataatatcataatatggtactgtcttgtctcttctttggatctagccttgggcacatcttgtgcttggagttagtcactattatttatttatttttggaaactcggtatctggtcaatgactgactaatccgaggggtctaatcctaccgtccacttggaaatttctcttgttaatatttatacttggtatatttgctaatgaaacatattgttaagatagttaagttagttaatatcagttggttagttacattagttagatttagttactcaatgaattagcttagttgaactctataaatgagtattatgtagacaaatcaccatcttttgatcaatataagtttctatgaatttaactttcatttgagctataaagctcttttcttcttattctcaaaatcataaatattacagaat

SEQ ID NO: 30549 - DNA, 885 bp, Medicago truncatula
  Intron number 1 from transcript Medtr5g097570.1 (locus Med tr5g097570) derived from phytozome v7.0 (chr-ID MtChr5; po s 38896044 to 38896928)
caggcctctgcaagaccatcttgtccattggagacgttgccggattatatagttacaagcttaaacaaaagttgatgttttgtttgttccaataacaagaacaatgcttttcatttagtatgttctttcaatttgaaacttctgtttcagggtatatgtttatgtttattctaatagcaagaacaagttatgtgttttggtcgtgtttccccgaaccatgcctactgtcattatattcagcatttcaccccatcctgcatatctacttcctgtcttctatgtgttacaatagaaatcttacttatgtactaaaacagttaaccatctaatatgcattggtttgattttctatgctatgtaaattgtaaatttctgtttcataaatcttattacagtttttagtgtagtattatcttttatatggtgattcattcctattcttgattgacatatttggtggatctgttatattgtttgttataaataaatggttcactctatttctacttgagctttgattaatctcttgcgtattgtaagaagcaaaactagcaaaccatatttccaaccacatatataaatagttgaaagtattgtgtggctgcttctcacatgcctcctttctttcatttgctgaagcatggttccaactgctaatgttgtgtgaatcaaaccgacggattaaggtattgactttttttttctgtagtcaaagtcatgctcaaaagtagtttgtgtattttataaaggaactagttcctggctgcaaagaatctttttaagataaccaacttgtccatcaattgtacaacattttgaggtgttcaattctattattgtgattatgttataggacacctgaacttttggtaggtgctacagatt

SEQ ID NO: 30550 - DNA, 387 bp, Medicago truncatula
  Intron number 1 from transcript Medtr5g040470.1 (locus Med tr5g040470) derived from phytozome v7.0 (chr-ID MtChr5; po s 17276635 to 17277021 reverse strand)
ccaagagttgaatttcaaccacagcagtttcggaggtcataatcgaagtccatttttctcgtataattgaggcggagcctgtgcttaaaatgctatcttcttttgcttgcattttttatttttaatttagttgcatcttgttattattatagttgtagattattgtgtcttaactttaaaattctgttgttgaatgtaatgttcacatcgttgacttaatatatgttttcctatgtggtttgattttgaacattttggtttgactggactatttgtcccaccttagaagaaactgttaacttgcgctattgattgttatttgattatattagtttgctaataattttggtagagatttttctcgattctcttccacgcgaacgagtc

SEQ ID NO: 30551 - DNA, 418 bp, Medicago truncatula
  Intron number 2 from transcript Medtr4g125630.1 (locus Med tr4g125630) derived from phytozome v7.0 (chr-ID MtChr4; po s 29660742 to 29661159 reverse strand)
ggataccttggccttgactttgtttggaatcgaaggtaggagttgtcttatttcttatcacttgttggcagtttatgtctactaattagtgggccccttctagtcggggcttacgggtctttgatccctcgctatagagtcctggcacccattattattacgaatttttggtgtgtcacaaaatagtttgcgacgagattttcccctttttgcgacggattcttggtgtaactaaaagtgtgtttttagtagtgttcctaaggttgactattgaactttctatactgccaaataatggtcaaagaaaacgttaattattgtcacaaaataactgattgtgttgtcagatatccaaacatatggaggttttataaaattcatcatccttcgtatgacaatcatattgagccgccaggcg

SEQ ID NO: 30552 - DNA, 374 bp, Medicago truncatula
  Intron number 2 from transcript Medtr4g100830.1 (locus Med tr4g100830) derived from phytozome v7.0 (chr-ID MtChr4; po s 21672187 to 21672560 reverse strand)
gtgtcatctccaagtcagaagagctcggtaaaaggtcagtatctgcagtgttaaaaaactgttctattagttttaataacaatttctgaatgtgttactatttgggacttgaatcctttaaatcagaaattttaatcatcaagtagaaaatctagctgagattgtgatacaatatgtttacatgtatcacatactaagaagttgtttatatccactcttttgattttttttgtcaacagttataacacacgattttttcttctaaagcgaatctttccctcacgatgcctcattttataacagcattgttctacggttagatcctttaccttgtatatgaactgtgtacacttgctttttatctgcagaggtga

SEQ ID NO: 30553 - DNA, 994 bp, Medicago truncatula
  Intron number 1 from transcript Medtr4g079580.1 (locus Med tr4g079580) derived from phytozome v7.0 (chr-ID MtChr4; po s 16054614 to 16055607 reverse strand)
accttgttagcccaataacaggtaacccaacatatctaggatagattttgatatcatcgtagaatttgggttgggcctaactcataatcgtcattgtaagttagtgattttgcactattttctcttcgttgaaatctaataaatgaaaactccaatttaaattctaagcatgatcttgaatttaatataagtggctaatgggaaaatgcttagtagggagttgaaacaagcgaagttaagcctctaaacatagaattttccttatgcatagtttctcccaaaacaaatgctagagaaaattgttcgctacttagaatacttttccaacaccattcttattgttcgctacttagaatttaatataagtggctaatgggaaaatgcttagtagggagttgaaacaagcgaagttaagcctctaaacatagaattttccttatgcatagtttctcccaaaacaaatgctagagaaaattgttcgctacttagaatacttttccaacatcattcttattccacttgttccttttttgagaacattgttgtttgacttctttgtttgaattgccttgattctcgtcaaataaagtaaccaatttgtttatttagtgtttctttataattatgtttgtgtttctttgattggatttttttgtcaggtaaattttcttgagcattataatcaattttttacctgaattgtatctttagttatcaaccattatttttccaccaaaagattagttatcaatcataaatagatgaatgtgttactgtaagactactgtttccatcctttcattaagcatgttgaggtgccaatatagcaggaatgccaattatcataatgatgctttgacctacccttctgttaagccccattgccagaccacccatcttctagtctattcttgaaatatctaatctcaaatactatcactttgttccaatctatacaggttgcgaagagtattaaagttgtttactcttacac

SEQ ID NO: 30554 - DNA, 535 bp, Medicago truncatula
  Intron number 2 from transcript Medtr5g012140.1 (locus Med tr5g012140) derived from phytozome v7.0 (chr-ID MtChr5; po s 3417485 to 3418019)
gtgaagagaaagaacgccgtcgagcccttcgtgatgtaagttaactttattttgatacttaaatatgtgagacattcgtgaatgtgtgtttcgttggtaattttggtatttgattgtgttttctattagttagtttagtcgttgaatgtgttttctgttagtcaatttgatccattgaattactaatgtaatataagagacttgtgattatgtgtttataattttgatactttcaaagactatagtaacatcgtctcaaatatttagagaccaaagtgactattactctaatttactccatagatgtatgactgtaaagtatatataatccatcatgatattaagattgtagttctgttaagaactaaaatgacaaaatttcatataatttagagattaaattggagagagcgtgaaactttggagactaaattgactgcttattgatttcttgaatgctttttctctgtagcctttattattctatgaagattcaatgatttaatatcttatttttcatttgcttagtctcgtg

SEQ ID NO: 30555 - DNA, 931 bp, Medicago truncatula
  Intron number 2 from transcript Medtr4g025830.1 (locus Med tr4g025830) derived from phytozome v7.0 (chr-ID MtChr4; po s 6236297 to 6237227 reverse strand)
tggcagaagaagctcactcgcaagtgatagatcaggtacaacactcctatcttaaatgttaatatatccctgattgagcagacaatttatatccgaagatattttggtcacatactaatctaattgtgcgaacttcgagtctttgtatgaggtgaccttatgcatgttttgtcacacatctattcttgtcaccttatgcaagttatgtttatatatcctttttttttaatgaaaaatgttagcaattactacctccgttcctttataaccgtcacttttacagaatttttttgtttcttattaagtgtcactttcaaagttcaatgtaacattaaagggtgttcttcttataatgcccttagtaatttattgcagagagagaaatatatgaaatatgatattaaataattaaggatattataggcaaaacataagttattgtatcaaaagtagtgaaatacatttagtgtcttggtttgtgtagaaagtcaaaatgtgacaattaaaaaggaacggagggagtagttgttagattagcttttgtcctttgtccgggtttgaacccaggacatccaactccttatcccttagctcaaaccagttgagctacccaagcccccgttatgtttatatatctgtattccatgttcgtaagtattgcatataacttataagcacttcgatgctatccatcttactagtgcttgtctaagtttctgatccaattcctttaaacagaacctggtggcatactattgatttttgagttactttaggcgataatggttgttgagtgccactaggttctccaacagatttctaatatggcttcctataccgttttctatctcactttctcttcacccccctggttttattgagttattgacacgtgcatagtttttttacttttaattataggttgtgcaag

SEQ ID NO: 30556 - DNA, 443 bp, Medicago truncatula
  Intron number 1 from transcript Medtr5g071830.1 (locus Med tr5g071830) derived from phytozome v7.0 (chr-ID MtChr5; po s 25512816 to 25513258 reverse strand)
gtggtatatcatattttttattttattgtttccctaataacattgttttcctttcaatccatcatttatcccatttaaaatgtgaacaagttctattgtttttttgcatttgattattcgtttgctagacgtgttgataggacaatttgaatttaacatggaattttccttttacaatttggacccagatttattgttttcttttataagaatgcttagcttttagattttctatgattattttatgattctttaacatataaattgtcccttcttttgttaaaaaagaaaaatagttccttcttctttgtcacactattttcattatgtattcaccacaatatttgttttgtattttactttctgaaattctttacttttttgctatgattgtttgagttagatgtgagttgcatcaatttgtaagaagtacgacagctgcg

SEQ ID NO: 30557 - DNA, 608 bp, Medicago truncatula
  Intron number 2 from transcript Medtr4g073530.2 (locus Med tr4g073530) derived from phytozome v7.0 (chr-ID MtChr4; po s 14613790 to 14614397 reverse strand)
tcttttcgttgctgagcctgtcaccagtttgaaaggtgtgtgcgagctcgccactattcttctttttccctgattgatcaattttttctgcttcttatttgagtttatgcatttttttaggccgattgctcatgtgattttagggtttctgcttgtcgtttgttttttattgttcctgtacaaattttgtccaacttatagtttgattttaagttattattattttgttcgttatgatttataaggttgatgtacattgcattttcaaatgtctcagttgttgtataacctaaacaatgtcatttgaacttagcagtttgagtttctgagttaataaaatcattgtgcattctgactgtttttattacattttgcaagtttcccttctcgaaatcatgtctatagttacgattatgacagaaacttccattttgttggttgaaggaagcaacattgattgaacttattcccaggcaacctcaaccacattactacatttaacagtttcagtcatggcgttaatctctctgtttattattgctaatgaaatcttttcaatcatgtcataactttactccgctgttcggcttaggtcatcgcgtgctctg

SEQ ID NO: 30558 - DNA, 402 bp, Medicago truncatula
  Intron number 1 from transcript Medtr5g086060.1 (locus Med tr5g086060) derived from phytozome v7.0 (chr-ID MtChr5; po s 32977576 to 32977977)
ttaataagcctctttcacttcctccataccctgaggtaaattcacccccctaattcaatatacaccccttttcttagtttttcaagaaaattaacctttcatagtaaagttgcaattttttcactgatctgtttgatttcacaatttttactcacttgggtactcttttttttcctcacaaaattgtaatcttgagctgtttttgtaatcaaataaggaaaaaaaaattagggtttatgaagaatttaaccaaacagaaaaaagttcttttcattaatttcagctcaattaatcttggaattctttgttttttcactaacccattaacatgttgtatgattttctcaacatggtatctttatttctgaaatttttttgattttgttcatgttttttttgtag

SEQ ID NO: 30559 - DNA, 697 bp, Medicago truncatula
  Intron number 1 from transcript Medtr4g134790.1 (locus Med tr4g134790) derived from phytozome v7.0 (chr-ID MtChr4; po s 32578227 to 32578923 reverse strand)
gctgctgtggttggtaagtattcttacttgaacctgtttcaaaatttattgtgaagtgccaaagtttgccaacaaatatagtctttgccgattccgtccctctggttttgtatatttcattcatttttagtatatatgtatactgttgggatctatgtattgtctgtgatatgttgttttttcccttggaatatgtataatcttgttagcaataaactgaaataattcatcttagttcatgtttgtttatggttatttgctatttgaaaaatgctttgaagccaaaattgcttgaactcttcgatcaaaagttttttgacagaaaaacatactagttcaaataaataccattatgggtagggttgaatgagttgagccatccatcccaagcctagttcaaacagaagtgttccactgaataagaaatcattcttaacttcatggctcaatttggcttaatttatcctcccttgcttttggagttcaatgatccaatcttgtattaactgagtctttcagctttttttgtatgtgtttgtttcattagcgctcttgcaatttgtctctttgaactttgtctgatgctctttgattcatttcatttgcattccaagatttcttccttttacgagcgctaatttgcacctgaatatcctgttcaggtgcaatttttgtgtctggtgtttccgcagctgct

SEQ ID NO: 30560 - DNA, 932 bp, Medicago truncatula
  Intron number 1 from transcript Medtr7g006160.1 (locus Med tr7g006160) derived from phytozome v7.0 (chr-ID MtChr7; po s 876201 to 877132 reverse strand)
ccttcttttaagattttatgtaagcttttgacaaccttttctgctaattattttttttaatactcttgggtttcctacattacgttgtgattaacatacattggtttgttttcagttattgctagtagtttgctgcaacaaaataggaaaattatagctattatagctattttttatttattagggaacattctgcaacatgaatgaatttgtatggaatatgaactttgcttttttcatcaattacttcgttggaaagtgcacattatgtgaccaaatggtatatcttttatccgtgcttttaatttgaaagaaatcgtagatagtgtttggttcatattttattttttattatccttgcttcataacttcccaattaaatctaacaaacaactatcattttgattccaatacttaaaaaagagtatataactttcggggcaaagttcctttcttaactttgtaacattgctttaatatttactaaatatatgtttgttctaagttaaccttcaaagctattttagagatatggagtttgtagtcatacactcttgtgtatggcttttaatacaataatacttacataaagtggagtgaagcatgttgtgtttgttttcttcttgttgataggaaccatcttgtctaagattaagaaaagaaataattctatattaaattgagtaaatgatacacttcacgttgttatgagaaccttaactccattatccaaatttaaattactcgctcaatgactctttccctccctctatttctatttatagacagtcaaccaattacaattaagtaactcttgctaaaaggcatactaacataagagagtttatgtgttcttctctaacttgctttcaaattttgacatttttttatgcttgttcttttgtctgtttacgacaaagttccagaagagc

SEQ ID NO: 30561 - DNA, 880 bp, Medicago truncatula
  Intron number 1 from transcript Medtr4g024060.1 (locus Med tr4g024060) derived from phytozome v7.0 (chr-ID MtChr4; po s 5433441 to 5434320 reverse strand)
ttccaacttttccggtatgtccaaacataacatttgaagttttcaaggttggagttaataaactggttttataaaacggcagttcttaaaacaggtttttgaagcttggaattagtttttgactttttgtagtgtaggttcagcttttatttttatttttagtctgttcacgaaaatagcagttaatgaaactggttttgaaaaattagttcaaaactgagtttgcataatcagagattccccacctcctcgtttcatttgttccatttggtgtttctttgcttgcaaccatctccctttaacaaaatgagaaccttattttccaaaatgagaacaattagcaaattaatgtggatgtgtagagcatagaagatggaaacgtacatatttttttaacataatctgtttgtctgcaacatgtttgagtacaatttattatgctatgaatcacttgatttgatcaatcccccaactttgttcgaactagatgaaatgattctgaaagcagcatggttcaaaaatttgctaacttgttttatatctgtatatactacacacgatttctcgtttggaatagcttttgacaaatggaagaaattattataattcagagatgaacaaaatacacgaaggacaaaaaaaaaggcggtgaaattctagagttttttatattgattgtattccaagtgaatgtacaaggctcttaattagacctaatcaaagatatgttgcaaaactcagtgaagctgcaagaatgaaaatggagaagagcccctcgaagtcatttaaatgggtttcaaaaaccaaacttcacgcccagatatatgctcaaattggtggtatagaactttggttatagtccagcttcttcaggtgtttg

SEQ ID NO: 30562 - DNA, 1044 bp, Medicago truncatula
  Intron number 1 from transcript Medtr4g160420.1 (locus Med tr4g160420) derived from phytozome v7.0 (chr-ID MtChr4; po s 40656322 to 40657365 reverse strand)
gtgattttgttcaccttcgttcaagaaccaacacggtgcgtttctttttatctctctctctctctctctctctctctctctctctcaaattgtgtatagtaatgcatgagcgttttagatagaaggatagatttgtttatttatttattgggattttgagttttggtctctaaaggagtaattactatattgaaattacaaaatcatataggagttcatggactgaaataattaacctaaccgaaaacatattcaacttttgagtatgcgaaaactgaatgtcactattttccacgtaccctgaatgtcactctagcattgtaatctgaatatgctgatagaacaacggaattaagatgcatctctattggaaattaccaaatactgtagagttcatccataaacagatccagcgacatttttatttttattcctaacattattgggatgagtgaaccatcaatttcgtttttgaaaatgtagagttaaacaattccatccttaaattaacaaaattttgaaatgatctctaacttccctgtctcatatgttccttcaagacaatttcaaaaactaaattgatcaatccaaatagattaatgtgtttcaagatttttaattttatggatcattttagaatttcgttaattttagggaccacgtgtctactattttaaggattgaataggcaattcattcttacagggacacattaataaaacaatggaaatataacaagttaaattgggaacaaacctttgttgattacattatttcatgttcgatggcatgtacatcgtgtgaattgggaaccatatttatttgcaccagcatgaagtagtgcatatacaaataaacaaaaagttgttggttttttattcaaggtgactcttaattcaatactaaactagttacttttactttttcttttcatttctgttgatgcaaaggtgaaattgatttatgcttctgaagctagtgaattttatgcatgttactattgggtgatatgaatgcagatatctgctgttgctcggattcgga

SEQ ID NO: 30563 - DNA, 362 bp, Medicago truncatula
  Intron number 3 from transcript Medtr5g081340.1 (locus Med tr5g081340) derived from phytozome v7.0 (chr-ID MtChr5; po s 30537096 to 30537457)
ttaattgccgacttattctctcttttctaaggtatgtctatggatatccaaataagcttagttaagaagattatttatatttttatttgattttatatttgcaattaaattctacagaaaagtaaaaaaacaaataaacagaggttttgttcctcatgtcacttattgtatcttgtatattacgctcttctttacattattattttcacctatcatattaaatttaaagagaaatttgcaagataatttttagcaatattatatatataccttacgtatatttcattttgtgttatttgtgatgattaaatccagaaatttcactttctttctttgtagcattacatctgaaaagaaaccag

SEQ ID NO: 30564 - DNA, 686 bp, Medicago truncatula
  Intron number 1 from transcript Medtr5g084820.1 (locus Med tr5g084820) derived from phytozome v7.0 (chr-ID MtChr5; po s 32309570 to 32310255 reverse strand)
aagtcaccactcttcctcctcctccacccgctctcgtatgcacacaacacacccttttcctctttcttttatttttttcccaattttttctcatttaccatttcaagttctaatttttacatcatggggttttcatttaaacctcaaagttttcacctttttaattttgctgcattttttttttaatatttttccattattgattttcttgcttacattgtgtgtttgattcgtaaaaatgtatgctttgcacagaacataacagtatatgacaagacagaattgtaataaatagatagagatattaatatttttatgtttgaaaaaaaaagtattttggaatttttgatagtctatactcttggatcaaaaattgtctcatggttaagtgagggacaagaattcctgtttttattccgtcctttgctacctgttttgtccggtcccatgatcagtttcgaaattaaacaagttacaaaaaattgtctagtcaagtcccttgtttttttagcaaatcaaacgcacactgtatgtgatatgttattttttattggtgcgtatttgttgaatatggtgttgctttaacaggaagttattgtagttttttgaagtattacttttctttttttaagttgattgttgtttttaacattttgtttgtggttttttaggttttggctcctagg

SEQ ID NO: 30565 - DNA, 1028 bp, Medicago truncatula
  Intron number 1 from transcript Medtr6g005540.1 (locus Med tr6g005540) derived from phytozome v7.0 (chr-ID MtChr6; po s 372631 to 373658)
ttgagcgcagaggtgagataacaaattatatgtaataacaaatcaatattattgttgttctcttaagatggttatggatagcagttgcttgaacaccaagtaattttaaaactttggttgctgtttgtgttatttttctttgtcattggaacatgattttgttgtttctttttgaaaccagtgagattattactaactgttctggatgaatatggttgctgatttagtgctgttacaactgttgctttttgtttatggttcctgattcaaatgattgagtaaaagagcttatacccaagtttacatggttttctggctttcattccatttgtgaagaatgtttgaatctcttgagcaaaaacagaatatgagtgaactgatgtaatgaattattttttcttcaatttttgttttaaagccaattgttggagttagattctgcatgataaggattctgaatgttgtgtctaaggtgttaaaaattgatatagtttgttgatacaaaatttgggtgaaagatagtgtttgtctcagaatgaggttataatgatagtgtttgatacaaaatttgggtgaaagatagtgtttgggtgaatcattggcgtaaaatgacctgaaattctaatatcctgattctctggtattcatgttcagtataatttatgatgttgtgaggtcattctcaaaggtttggtttttctatgaagttggatgaatgttggtaaagtcatgattattttggctaattttgataataatgttaaaattatgagaaatttgctatcattagctggtttggattgaatacatcttgatatgtttttttttaataggtttggtttgtgaagtcataccatttatatatcatatatgtttgaattgataattaacccaaggcaaaactttgagacatatttcttaaacattgttgaatgatattacttttttaccactcatactgaaattttgtaattgaaatagctgtataaattgtctataacagatgacagttacctagacaagtggat

SEQ ID NO: 30566 - DNA, 873 bp, Medicago truncatula
  Intron number 1 from transcript Medtr7g010960.1 (locus Med tr7g010960) derived from phytozome v7.0 (chr-ID MtChr7; po s 2513101 to 2513973 reverse strand)
tctcttccttcaactcttctccaaatcctctctaggtaagtctaatatctaataattcattaaattcttgtgtgtgtatatatatatatatatatatatatggtggtgaatgttattctttggttcttttaattacataccataaataaattttctctattgacttttaagggatttgatctttttcttttaatattgcatgttagtttattttatagggacattattctctaaccacaaaaaaaattaacatttaaccacaaattagttatatgctaactaattttattataaactagagctaaaagccaattgagaacatcgtcataaaattattattttttgttacttaacttcaaccttactttatttccatctccttgcatatttatatatacatggctgtcttttgtttattcaaaagtgaaaaattaaccaacttaattatgagcttaccttacttaagaacttaatgactttggctctataactttcaccatatacttattttttttacttaaattcatccatacttcatttgccacaccttgcatgtgtataataaacatgtcttcttttatttttgtggaagagcaaaataaaccaattttggaacttaacttagttaggaactttagtgtttttggttcaaaaacttttagctttcgagatttcactatcactagcaggccatagttgtgatatgtgtacttgtctattgttttttaccttaacacaaactcaaaatgatataaaaagaaaaaaaaaatacttcacttccaaaaccaacaaaattaatgttatttttttaatatttttatattattattatatataggtgctgtgtccttagttgctaaagacaaacaagag

SEQ ID NO: 30567 - DNA, 872 bp, Medicago truncatula
  Intron number 2 from transcript Medtr5g046120.1 (locus Med tr5g046120) derived from phytozome v7.0 (chr-ID MtChr5; po s 19361286 to 19362157)
cgacagggacagacagttgaccccgacaaaaagaggttctcaacgaaaatgacgtttttgtgagcgtaagtgtactgtgaaaaggtgatatttaaaaattaaaaaaataagattttttttttgttgtttttgaaattaaaatcaaatataactgtgaggttttgggtttgaaactgagttacgatgttcagccttacaatttaaggtttaagtatttgtcagttgagttagaacttctataaaaaaatctgatattttaaagtgttcattaagataaattcaacattaagaaaaaattaagaattttcaaaaagtatttacctcataaagggaaaaattaagaaaaagaaattatgtgagattttatgcaaatgatgtggttgaaaaaaatgatatttgattatttagtttagaaaaataagatttagtttgggtttttcatccgatataaaaatttataatttatttagtaataattttaatattaatggtcgaagattgtggttgtttgtcggaggtgatgatagacctttgtcaaagtggtagacattacacataatggtggtcggagataataagaggtggcatgagtggagatcagcgttggtcgttggcggtatgccataaaaaactaataatttatagcactaaacaaaattaaaataaaaaataaaaatgcaggacatagaaccaaccatacaatcaaatttctggaaaataaactctatacaatttggcaaaaagatgcaccaaataaaatcatcaatttgataacataaatttatccacctttcaccacaaaatttccctagctaaagatgtgagagatacatacataaatgaaattgtttaatgatgtttagacgtttgga

SEQ ID NO: 30568 - DNA, 1011 bp, Medicago truncatula
  Intron number 1 from transcript Medtr7g080930.1 (locus Med tr7g080930) derived from phytozome v7.0 (chr-ID MtChr7; po s 17356658 to 17357668)
ccaagctgcttccaaccctcaaaacactatctttggtatattttactatccattgatcagttactttttatattaagtgttattaatgtattgttatgttagctatagacagatcaatgagtgataagaaatagggtaaagattcaaattggtcaacaaagaatgtgacctatggataattcttagttggtcacaaccctaaatattaatcacttaggcatgcacacacataaaatatatacatcatttaaatattttagcaaaaagaaaaaattgagtgttctttttctaccttttctatttatgtgagggtgtctaaatactttaaatttgcagttgtaaccctagaagtctttgctatgtgacctatttgatcttgagaaataaataacatcgatttggtcttcaaaaatctggttaagtgtcccatatttgattagatatgacatgaagacttgtttataaatgagagcaatccttgctttatacatgtcagttttgtagagttgagatatgttcaacccaaattttaatatggtattggtatcagagtccatgtatgattagttgagaaactcaggtcaagctccagatattcagtccagaacttgaggggttaagagtcccaaaatgaatgaagtatgacttgaacacccgtttacaagtggggcctcaccttacaagccgatttgttttttagggtcattggtaagtcggttttgtaaggttaagttaaacccattccaaattctaataaatctcaaatgtcatttaaattagttatttatttatttatttatttttggtacaaattagttatttatttttatgatgattcatatggacatatctgatcaaaaactattttgacaacatttgaaacttttgagataaattagtaattttcatttcgtagagaacaagtgagtctgtgttttttttttctttttctcaatgattactgctattagactttattctaatgaataattatcaatattaattttctag

SEQ ID NO: 30569 - DNA, 961 bp, Medicago truncatula
  Intron number 1 from transcript Medtr7g071030.1 (locus Med tr7g071030) derived from phytozome v7.0 (chr-ID MtChr7; po s 14533431 to 14534391 reverse strand)
ataaagtaattatctctctctctctctcattttgtttatgtaactctaatccaacttcacacacatatacacatattttttatgagtcttgttaaaagtctcagggtaatagttaaagattcaaaaatagaagtaatttataaattttaggtagaaaaaattactttttaaatttttaatgtattgaatacatcattcccaagataaaattttctctttaaacttcttaacaagtgcccttgttagcctttctattttttttttaattataagttgacacctttttttaccatccttgtacactcttatgtggcaccagggagaagagagaatgagagacaaagttggtaagtgtgtgggaaccacgtcgctacttgttatatttgtgtgtggaggtacaagtgtgtgtggaggtataagatgtgtacaccctccggtcactattataagtaaaattttgcattttagattcattcaattaatgatgtatctggtctttattatagactacatacatcatttaatgaatgaatctaaaatgcaaaattttgcttataatagtgaccgaagggtgtatgctacatgaggtggtcaacttatcgatgtttttttttttttttgttaaatatgtaaatagtttccctaaatatatcaacatttgattttagtccctctaaaatatttcttagatttttggtccctctaaaactttttatccattaaattggtctctgctctacattgagactaatttcacggatgaaattttttttaggaaccaaaaacctaaataatgttttaaggggactaaaatcaaatttttatgtatttaggaaccatttacttatttaaccctatttcttttagaggatatacatgcatacaaatacatatataaaatagttttaatatttatgattttaataattatgttaccttaatttgtgacactagtggttgg

SEQ ID NO: 30570 - DNA, 918 bp, Medicago truncatula
  Intron number 2 from transcript Medtr6g083840.2 (locus Med tr6g083840) derived from phytozome v7.0 (chr-ID MtChr6; po s 17196141 to 17197058)
acctttggtgtcgtcgcgagggacaaaattatgtaaggtcgttataaccttattattatgtctatattcttgcattatgtagattatttgatacaaacatagcttttaggtatataattatagtaaaccctcaatttagtcccgaatgtcagtatttgactattgtcccaggttttaaataaagtcctgtgcttaaaatttgaatgacgacatcaaggttgttgatgtctccagtctccacaatcaagtggctgtgattaaggctggattggccgaattttactgcaattcttcgcaatgtcaagtatcgtaacacagacaaggccaataccgcaatttaaaacctttcgtcacagtagtcttgttaacaccattagttccgcaaagattgaagtgtctttgttttagtcctctggagtattttcatcaaataagtctgttaatttgtttgatattatttcattaattccatgaacgtatttaggtctattttcttcatattttacaagttgaagggatagatagcttaggtcatgtttagataaacaacttaattaagcacttaagtattctttaacaaaagataaaacaaagactaattattttcatataagctataagctgatttcataagctatcatggagagcttatagaaataagatgatgaacatgtcataatctgttttcacaagctcccccaaacagtctcgaaagtgtttatgccaccggataagcttaaataactcaatccaaacaagcctttagtgcatgtctgtattgctatacatgatatcagaaaccagacttactgctttcctcgttcccataaactttgttgcaatactttttattctgataacgcttttgctgatttttctccaggctgattctcttgaaaagtttaacaagttgcttga

SEQ ID NO: 30571 - DNA, 536 bp, Medicago truncatula
  Intron number 2 from transcript Medtr4g115090.2 (locus Med tr4g115090) derived from phytozome v7.0 (chr-ID MtChr4; po s 26557376 to 26557911)
tttgcagcggaaaagccagcgtaaaaaacttttctttcccttctctattctaacatttgtaactttgagatgtgaaattagtttagaaatatataatcatttgaagggtaaaaaacctttttgtgattctgggttgtttggtttgttttgttacctgtttggtgtgattatttctatcatcataaactgtggtttggtatgttttttgcaattgcgaccctttttccatgagtttaacaatatatctatgattgtcagaaattcacaaatcttgattaatagtacatgataatgtgaattgaacttggagatggatccaattataggaaattactaaataaggaaacaagttaaaccagtgaaaagtgtaagttctaagtatagaaattaaagttactacttatttttcatattgtttccttctatgattactcatcttcctcactacatgaattaaatttcatctacaccgtctatcactaatttcacatttattttcagtgagtagcggtcgagttgctgtgggaaatcgagcc

SEQ ID NO: 30572 - DNA, 443 bp, Medicago truncatula
  Intron number 3 from transcript Medtr4g115090.2 (locus Med tr4g115090) derived from phytozome v7.0 (chr-ID MtChr4; po s 26558033 to 26558475)
gagtaatttcattcttgatttcacaaaaggaagaaaaaatatagtatcacactttgagcagaacaatactatcctttgctttgttgtctgcatcatagaaatcttgagcacattttagtatacaagacattttcatgtttgtggaggtttatatccctttctaattgttgtgcctatatattaaaggaatagtaacaattaattataaacaggataaggtaatcaaagagtaactaactatatctttatcctaatatcaaggaaaacagaaacataatctgttatagatgaaactaaattctgttatactctattatgaaactaaattttgttatactctattacatactatcagtaaatgaaggttttggaaaggtacattgcaaaatcaattaaatcttgtattgttgtattgttggcatataggggccgagcagcagcat

SEQ ID NO: 30573 - DNA, 732 bp, Medicago truncatula
  Intron number 2 from transcript Medtr7g011080.1 (locus Med tr7g011080) derived from phytozome v7.0 (chr-ID MtChr7; po s 2568407 to 2569138)
gaggtaatgaatttaactgtttgagcataaattctaaacttcaaaggattttgctttttaacatcatggtgtaacacttttgactactgatactactaaatgtattttgacattccaccattagggtctgtttggataagtaacttttttaagtgcttatatcgtaagtgcatatcatataagtgcttatatagaagctatttctataacaaaataaaaaataaagtcaaactgttttcataagatatccaaaagagcttatggtgtgtacagattttcagaacattttctacgcaagacaatgtttagaattatagatcatattatacgtgattatggtgatgaagggtttgcattgaatttctgaaatgttcttttggtatggtaaaagagttgtcaatttatgacttgctagtgctgtggaaatttagtttgtgaaataactgtgactttgtctatcggtaccgcattgtcaaataacggcactacagcgcgcagcataatataacttgaacaaatgttattattatgcgatatactatttagtacaaagtgttgtcaaacagtaggtgtatcagcgctataacgctgtagcataacagaatttgaacaatacccctattttccacgacctgagatcgacgatactgcattagtatcatcattttgcaccattctgattgttgtttctttctttgcagactgttttccattggtcggaagcacagttgg

SEQ ID NO: 30574 - DNA, 787 bp, Medicago truncatula
  Intron number 1 from transcript Medtr4g129250.1 (locus Med tr4g129250) derived from phytozome v7.0 (chr-ID MtChr4; po s 30702072 to 30702858 reverse strand)
cttttcttcataactgctttgctcatactggagaggtttatttctatctctttttaattgtaattgaatttgttagatttgttgttttaatttcaatattattatgcttcatttgcttaattaatagcatatcttgttaatttctgtttttatataaatgatcttgatttattgctggaacaagcttctttgcttaatttgctgatttgaatgttttttttttttttttgtctgttttggatttgagattgatttaattaatcaccgagtatttgttgaactttgattaaatgttttaacttttaagctatgatttcaagtttaatttaagttcattgatctttttgtgtatgattattggactctttaatgaattagggttgtgaattttgactcttgtgatttaagatggtttcctttttctatccttggcattgcccctataagataattatagttttggtaccctaagtggtcccctattgttttcaaggccgaaaatgtgaccttgttgaccaatgtttttaactagacttgctagtataacctagatctcttaattgaactttgaaaaatggggctaatcaaaatttatttttttgtccaataatgtattgtaggatactcacatgttaaatatcaatagccgacattgacgcttagacatttccgattatcacattcatgaccaaacttttttgcttgtcgtcttctgattggtttgtgttgatgttttgttggcttgtgtgcaggttgcatcggccaaggtcatacgtaataagcaaac

SEQ ID NO: 30575 - DNA, 1052 bp, Medicago truncatula
  Intron number 1 from transcript Medtr5g034880.1 (locus Med tr5g034880) derived from phytozome v7.0 (chr-ID MtChr5; po s 14314795 to 14315846 reverse strand)
gtttgcgattctgttttctttttttagtgaataaggtttgttatcacttggttacgtacacacacgtatgcgcagcttcactcttcattcaataataataaatatatatatttttttatcattataataattaaatcttattcatcaaaagtgtcaacgaaataattgtttattttttaaaatttttatcactcataattgagaacattcattattttttacgataatatgtaaaaaaagttattatgattcttataaacaattaaatgatgttttttcttatgaaatgttgttctataaaatataaatattgacaaatagctatttactacatataaaatgatcgttcatttataaaattaagaaacaggagtaccgatacacctcattttgtgagtgtacagtagaagttcccaataataattaataattacttttagatggtttatttatttattcatatatttatttattaaactaaaaaaaaagtgttcattcatttcttatttaagttcaagctaattttaaattgacactcttaattcaaccacttaatttgagtattaggtaacaaatattagatgaaattttagaggaaaaattgagattttgatgttaaaattttgaactttgattgtatatgttgttggtgattaaaagaaaaataaaatgatagaggagttagattagagtatttttaaagatatggtgactagtggtgtaatcaataagtttttattagactttttcaaatgtattagtagtttcttatgatgtgaactaaatgtagttaattgatatgaactttgtttaatttcttttcaatctgtcaaacattctatctttcctgaatgtagtctatttttattattatatttactttaaacatgttataattatggaaaaaagtattaatctaagttatttatacattatatgataatataaataattttaatacattttatgaaacattttgattaattcacaccgcgaagatcgtcatttgtattgcagcgtccgtccgaaatcgcgacaactttaacgcgacc

SEQ ID NO: 30576 - DNA, 803 bp, Medicago truncatula
  Intron number 4 from transcript Medtr4g161180.1 (locus Med tr4g161180) derived from phytozome v7.0 (chr-ID MtChr4; po s 41116133 to 41116935 reverse strand)
aggagtaacagcccttcaacaagtttgttctttttgtaagccatttccctattctttaatatcaatgtctttgcaatgtcaaatctctcttattaacagttttgtaacaaagatgtctagcattccacgatcatatgttatgtcttaacaatatggctcctatatacacatagaagaggggcaaggggcggagcgttgcaaagctcccttgggtttggcccaaacgtgtgttaggcccaattgtcgttgggggggagacgggggtgtgggggcgatagaaccgcggtcatggttcgtgggtattgtcctaatctggtccatattaatatatatatggctcgtaacactataaacccaatttcatcaaaagtactatacggaactatagcaactctatggctgtagaggtagacacaattggccgaactgtgtgaacaaagatgtatctcactgtcttgcgattttcgtttcttttattcttctgttactagttgctgttctaacaaataacaattatatttagtacatataacttaatttgatggtaaaattgttatggataaataaggattgaggttgagaaagagagaaaaaataaaggaaagtgaagaaaactgaaatctgaaaagagaattctctgagatgaaaatctgaatattgaaatatgactaatcaaccgacggaggtatagacgagtaggttctgtttttgcactctgtcggatttgattgaaccttccctccctaatctagggttcattatgaacagacacttggaagaaggatattaaaccaagagaaatt

SEQ ID NO: 30577 - DNA, 787 bp, Medicago truncatula
  Intron number 2 from transcript Medtr5g095470.3 (locus Med tr5g095470) derived from phytozome v7.0 (chr-ID MtChr5; po s 37844367 to 37845153 reverse strand)
gctgagcaggtggtttttggagattcccttagtccttttgcttcatttaattcttgaaaaacatacatttatatgacataattgtttgctgtatgagctgcacttgtctgctcttttctgtaatatcaatgattgtgatctaactgcaatggcaaccgcaatttaaaacttccttgctaagtaattttctgacaaagtctagcttttgttaaacatatcattaggaggttttagacatcagaactcagatgcatattattcttttgcataactatttgtagttgctttagactttgtttggtttcggaaagaaagtgtaaataatgattgtagacggaaagaataagagtagaatatgagatgattttttagttgtttggcaggttagaaattaagagtgaagaatgttaaaacttttcttttctcttggtttattgtatttgtgtatataaaatgagaagatatatgtgaaatgacataaatattaatgtttgatatgccaatcctgtaaactattaaaagaatacagggtacaactttttcattccttccgccttgggggggtggaaaccattttgagtgtggattccacatgtaaatgtaaatttattctttctgcgttattatgtacatcaaaacaaaggaacaaaattcagttttcatgcatgatcttttatttccatcaaattttgttcatttcaaacaaacacttagaccctcacaggatgaagtcaagtctcttatatgttttaatgtgttttttcagatcaagcgggaaattgctacc

SEQ ID NO: 30578 - DNA, 968 bp, Medicago truncatula
  Intron number 1 from transcript Medtr5g095470.3 (locus Med tr5g095470) derived from phytozome v7.0 (chr-ID MtChr5; po s 37845344 to 37846311 reverse strand)
attccttccactgccatatcatttatctcttcaaagtattctctctctctctctcatgttttgtatatatagcttattagcttattgtcttgtgcagcatgtttggttattgaatttgaaaaaaaaaaaaaaaaaagattggtttggtttgttatttctttttcagcaaccctttggatcatatattggttttctgagctgtttttatgttgatttttccaactttactataaagttcaattttatccttttaaaaattgaatttttaggattttttggaggtttccttttgtctttttgatttgaagagtctttttttttgtggggtgggtctcattagtaccctttttggtgattgatgtttgatgtttgtgagtaattcatgatgaatgatctttgaactaaggacctttttgaacattgatggttttcatacaaatctagtgtctaaagtttgtgattttttggtgtgtaatgttgaaattgactggatgtttcatattcaagctgaattctggtttattatttactagaagatagactttgaagttttttctcataccaaaaattgttcatttttctctcttcaacttaaatctagcatcaattagatctctctaactgcattgctggttgaaagttgttggatctctaagaattttctagtacttagagcatgtctgaattggcggcgagtttggtgaaatcacactagcacctgattacaccaaactagtgattatttcttttaaaggaaggaatagttttaaatagtttgcatcttggactcaaattattgttttgcttaaaatttgaaattactagctaatttgcttaatacatgaattaaactgttttcctaaacacacacattgctgttcagtgtttaagttttggattagtttaggaactgaattctgatatgcatttcaggtagagattcctaataagcgaggagaatttctgtt

SEQ ID NO: 30579 - DNA, 460 bp, Medicago truncatula
  Intron number 1 from transcript Medtr7g071420.1 (locus Med tr7g071420) derived from phytozome v7.0 (chr-ID MtChr7; po s 14725838 to 14726297 reverse strand)
acaaggtaacttcttcttttagtattttttttagtatatgtacttcctataacacgttgtcttcgtgttgcgatccttaatattgcgtagaatcgcggttagatataactgatgcaaccattatgtcacaagctagatagctgtcgcaagtctttatttaaaccgttgctccctattgttgtttctttttaattgtcgtgttcatagaaaattattcatttttatctatttttggttattacgtcgataagaaggtaagaatatatttaaaattttcttattaatcaaaaccatttcttagtttgtgaaaacttagctttaaaacatgtatataacattggggagtaagtgtttgtattttgtgatggttatttaagtttctagcataagtactaatcaaatgtttcaatttgtgaattgatcagattgtgtccgcatcatccaaatccgtttttacact

SEQ ID NO: 30580 - DNA, 815 bp, Medicago truncatula
  Intron number 1 from transcript Medtr5g007890.1 (locus Med tr5g007890) derived from phytozome v7.0 (chr-ID MtChr5; po s 1342744 to 1343558)
gcaccggatctaaagaacaggtttatctccattgcttgttcttctatttcactgttcaacttcattcttcattgatttggtttggtttagtttgagttgtgttttcgatttcatcactttttagtgctgttcagtgtttgaaagtgatgaaacgttaatgaaattttatgtgttagggtttagggtttagtactgttaaattctgtgttaattaacgactatgaggattaagctccaaggagattattttgatttgttattttaactgtgaatttgttttgatgtatttaattataatcttttttgggttgtattgtttcgaattcgaagaaattagtggtttttactgagaaagagttgcgaaattaagttagggaagtatgaattatgtataaaatttgatatttttatttaattttctgcttatatggtcttgtttgtgtttttaatttaatttatagtttaattatgattttagtcccgtcaattatagtgcgctttttttattttatttgccggtaagtttttttatttggtttcggtccatgcaaattaaaaaaatgttgtttttaatccccaatgtcagcttattcggccatgcgacatgattttattgtgccacgaatgatgtcaggatcaaaaacaacatttttttaatttgatgtactgaatctaataaaaaaacctattaattgcagagactaaaatcatgtttaaaccttaaatttaattacttgaatcttattggtgacggttttttatgttctaaacgtaatgcagagaactgctgctgaccagattttgcgggaattgca

SEQ ID NO: 30581 - DNA, 690 bp, Medicago truncatula
  Intron number 1 from transcript Medtr5g005300.1 (locus Med tr5g005300) derived from phytozome v7.0 (chr-ID MtChr5; po s 112811 to 113500 reverse strand)
gaagaaggtggtaagctcatctttgatctcgatgctacttctttgcttgatttcatctgatgtaaatatgggtatcaatccttttttggtaactctacaacaacaacactcttttttataattttggataatatgtaatcataattcacacatcattggttccttttggttccaattgttttcatcctaaatattatgtcaattcctaatctcataaactgattatatgatctcttaatcagctcatacatattttatgatgaatcacaatgttccgtcgttttaacatattttctttcgaataatttttttatcgaatacgttattgaacccgtgataatttatataaagttagcttgaaataaattagattactgaatataatctatcttttttagtacaacttttagaataccaatgttataaattacattccaatatgtttatgacaattttttttttttaagaatcaaccaaattatttatagttttttgttacaatatagatggttctctaaacaagctgtacgaggaaaaattcttgaaactattgtttggccataccaggtaacatccatattgaagtaataaaagtacaggattgcataaattatttaaattatgctgaacagtgtattttttatgtcaatgtaaggtagggtccgtattcgaaaccagtactacaacgaa

SEQ ID NO: 30582 - DNA, 809 bp, Medicago truncatula
  Intron number 1 from transcript Medtr4g036400.1 (locus Med tr4g036400) derived from phytozome v7.0 (chr-ID MtChr4; po s 8905033 to 8905841)
tagttttggcgttgaatgttcgtcaacaatctcctacttatgttggctataaaattggagattgtattagttttaatgttagtttttgttgtttattttttttgcctattaggcgtgaaaccaacaagcagttcattatttggctaaatatttttttcataatttagattgcatgtggatcgaagaaactcagccttgtatttatgcagtcttgacatttgatttattatcatattttcgttaatgaaattaattgtctttatcgtaaaaaaaaaaaaaaaggcaacaactaaatagaaggtttagcaaactaatatatattttttagattattaagtaatgttaaggattcattttggtggcatcacgctcttaaatattaaacaagaaataattagaccagatgccgtgatcggggttcaaactttgactccttcacttatatgtgtgaccttccaatgactatttttatttcatctatcacaaacatagggaaaaaacaattatcaataacttatccaatgactcaatgcaaagaaaaaaggcatcaaaatttcaaaattgggcacagtcaacaattgttggctcccataggcatttgaatgttatttggtgtaggctctcgaaaaagaaaataaagcagataatttgaacaatgtaaacggattaaagtatggaatacatgtttattgacgttaaatgagtgtagaaatattctagcaatccttctccaattatttgagatcaagattttgcactgaaaactcgtaatttagggttttgtatggaagagggattgaaagtggtga

SEQ ID NO: 30583 - DNA, 609 bp, Medicago truncatula
  Intron number 1 from transcript Medtr4g138030.1 (locus Med tr4g138030) derived from phytozome v7.0 (chr-ID MtChr4; po s 34133887 to 34134495)
ccgagtggttgaaggtgcagtactggaactgctatgtaggctttttgtttaccgagggttcgaactctctttccgcacccttatcaagttcatcaatgttactgacctcaatgtttgcaaatagatatcattattccaactttgatgtgaattctctattcctaatttatttctgttttctgtaataaaaaaaatagtggaataaagtgggcaaggaattgatccaggagagttttcttagtaatttagtagtattttattttagccaaatcttagtaactttttagaactttatattattattttgttttattttattttggctcccgagtttgttatttctttcgctatataaacagaacatatgtagcccaagaggtacacttttttattcattaataatattcgagatttttctcaatttctggtggatttcggaacccttattttgataggtttgtcgcttgcaaccctattttcacaagtttgtcgcttgcaaacttattcttttctatctagttttagagcttgctaaccctaagcttccgtactgcgtcaattggtatcagagcagatttcttctgttcttttcctaacgtgatcagccat

SEQ ID NO: 30584 - DNA, 508 bp, Medicago truncatula
  Intron number 1 from transcript Medtr7g037720.1 (locus Med tr7g037720) derived from phytozome v7.0 (chr-ID MtChr7; po s 9102303 to 9102810)
tgcagaaaaaagtctcatcatctcaaccatcaaaggtataaaaatcgaactcactcctgagaaattaggtaaaattttgtctcttcccattgatggaaactgtgtttatggtgatgattggtctcaaaaactgtctgtcaacttagatgacttttacaagaaaattttcattcctggcaccactgagcatgtctctgccaatctcttgcctattcctaaaatgtttcacaatatgtgtcaatacaatatttttcccaggaaaggcagttttgaaaatatttccaaaaatgattttatgatcatctatcatactgtttttaaggaaagaataaatcttccttttgttttgattcaacacatgattgccacttccaaaacaaaaaatcgaaccttttgtctcccttatgggatgttattatcacttatgtttataaattttaagattcctcttgatgatgaaccttccatttatgatattcagattttcaacactaaaaacatcaaacac

SEQ ID NO: 30585 - DNA, 727 bp, Medicago truncatula
  Intron number 1 from transcript Medtr4g095930.1 (locus Med tr4g095930) derived from phytozome v7.0 (chr-ID MtChr4; po s 20074465 to 20075191)
aaacatttaaaaacttgggcgtcaacctagttttggtataaagcattcttttattctattgtgttataagaaacaatattcgatattttttaactttcaaaacttaatcttgtatgataatcaaatatatagccgggacacaaaaatgatcggggtgcaaaccaaataagtttggtctagtttgtatgggtgtgcaagtttgcattactattgttgatgtgaaaacttcgttgatcgtaaatatttttgtaagaagcctattaatcgtaatatataattacttttgtgagcattttttcaagttttatcgagtattttcacatgcatgtttttcaacgttggtcactcacatttataaagaagaaaatgagtgtgattgtagattagtcattatagaattatccttgaacttttttgtttacgattattccatccctttggaagttagagaagcttatatatatacacaatagcttagggatgcatagttttagattttcctttgcttgaagaggttttggtttgctcctccttcaatttttgtctcaatttgttttggttaatctattttgggtgaggtagcacaatgctactcactgcaggtttaaaaatgaaggaaaaaaaatgcatgttctttatatttcctttttcttgatatgagtttaaatatttttagtgaatttgtttcatgatgatcacatcacattatacacatagggagatatac

SEQ ID NO: 30586 - DNA, 539 bp, Medicago truncatula
  Intron number 3 from transcript Medtr5g094540.2 (locus Med tr5g094540) derived from phytozome v7.0 (chr-ID MtChr5; po s 37413982 to 37414520)
cctctctgctgaattttcaaggttacctttcagatagaattttttttaacttgacttgaacctgttgtgctgtggtagtgttattattaaaaccacccgtttgttttattcatcgctgaatttgtgtaagaacaaaattcctggtctaacataaaatagaaaacccattttataatatcttttttaactaattcaaatgcatccacatatttccactaggttaggaagatttagcaatgtatatcctttggtttccatcgtcatttaatatgtttttcattgatgaagattttgctgagaatcatgaatggaatagggttattcatttccatgtctctattggatgatctgatttaccgccagagttaaagatcctaattttgtatcgctttgatcttatttaaattgattttattaaaacaaaaatccaatcatcagacaacatgcttcctttgtaatcttcatacatacaattgatatgtgttatctagtgtaagttcctctgagctgatggatttgacttgcagtattgagatcgt

SEQ ID NO: 30587 - DNA, 375 bp, Medicago truncatula
  Intron number 1 from transcript Medtr7g009850.1 (locus Med tr7g009850) derived from phytozome v7.0 (chr-ID MtChr7; po s 1929903 to 1930277 reverse strand)
taaacaaggtttgtcttcttataatcagtaccctaaaatttctattgctgaacaatgaaagaattaacaaacatgtagttatattattcatcactgaattaaaacacaagtaaaaaaacatttctacgaaaaatgaaactgaaaaggttttgcgatagcaaatagatttttttgatccaattgttgttattcatgtaatgatggaaacaaatatttagcagagattaatgatacaaccctgtaagcatgtttatactgttaatttgatttctttggctgtgaagagggtttcaaggttactcacatttatcaaatatttttgtttttaacaaaaatttaggtgagaataaaggaaacagtagcaaaggaaagggt

SEQ ID NO: 30588 - DNA, 691 bp, Medicago truncatula
  Intron number 1 from transcript Medtr5g016840.1 (locus Med tr5g016840) derived from phytozome v7.0 (chr-ID MtChr5; po s 5984603 to 5985293 reverse strand)
tcaattcttcatttcttgtcattgaaacgtttgttgtgactatataccctaggaaatcacttgattaaacttgcaaaacttgatatgtaagtttttcttttcatgattataataatataattatatgcccctttgtagtcattgattatatgatctttctttaaatatcaaagtcaaaagtttagtattgaatttatgaatttggagatggatgataaatattgagtgtatgaggaattgaatttaaaatttaatggcaactggtcaattacccctgcgagaagtttgataacatgtttgtttgtttagggagttggatgcttaactctatggacattctgctttgtttgaaactgcataacctttcatagtggcgagtatgttaggttgagtctcaactcaaaaacactacgttgatcatcattaattaatatagaatcttaaagcatcacctgacacgcggaactggacatctgagacatgatccgagtagtttgataactagtggcctaatagatctatgatatattctgatattattagatatgagccgttcatatttctattattggttttaacttataattgttatttacatagtacattaatataatgacataattctggtattacattacacaaatccatgacatatatgattgtttcttgttcttgttcagaccattgttct

SEQ ID NO: 30589 - DNA, 961 bp, Medicago truncatula
  Intron number 2 from transcript Medtr6g027810.1 (locus Med tr6g027810) derived from phytozome v7.0 (chr-ID MtChr6; po s 6096690 to 6097650)
gaatccaaaaccaggtcagcacattttatgtagtctctattttttgtttgtttcatcttcagttgatttgtctttttaagttttaaagtacagtgagataataatataatagtcttgggaactattaggaatcctttaacaagatgtaccaaaaaagaggcatggtgtatttagcgcagtttttgcccttcctttatgcaagataattgagtttatctaacgtagagttagggacgtttgcgatgtggtttggattgattgtaagacaaaaaattatttaatatttgtggtttggtttagatcacttctaaaagaatctgtcgccacgataatgagtatgttgacatgtgctggacacatgttgaagtgtgcaaaaatttgatgtgagctgaaaataaatttttttaaattttattctaagatttcgagtcatcaaaaagtaatacaccacataacccaaaccgagctggtcaatcgggcaacgtcggaagtgggtgtggtggtcatattgatgtgttttctctcatttacaaattgggtatcccttacaacacacatacacttgtgttccaacaaatattatgtcttgtaactagtaacacaacatatcaagagctctttcatgatatagttttagtcccttacaacttaactagagaatgtaattgcgttaaattttttaagagttacgccgtcaattgttgtcttacccgactcaaaaaattagtcacaatatattttgtttttattacattattcttttttactttgatgaaaaattataaatttatgaacgttttatataatttaaacacattgatcgacatcaatttttgatgtatttaaagatattattatagactagaaattatgtagatgttatgtaaagttaaattttctaaaatgtcatgttttataccagaacatgctttttttttcttttcttttttcgaacaggtag

SEQ ID NO: 30590 - DNA, 781 bp, Medicago truncatula
  Intron number 1 from transcript Medtr4g047370.1 (locus Med tr4g047370) derived from phytozome v7.0 (chr-ID MtChr4; po s 11028633 to 11029413)
aggaagaggtaattatctataaaactgattctttatataaagatcttgaaaataaaatagatagtctcttatatgactcaaacttcttaactaatagatgtcattctttaatcaaagaactctctaagataaaagaagaaaaagaaatacttcaaaacaagtatgatgagtctagaaagaccataaaatttttgcaagattctcattttgaaatgtcagaaaaacaaagagaactaaacagaaaacaaaaatgcattgtttctgtaccttctgaagtgcaaaaggaaaacacacttttgaaaaaggaagttgaaacattgaaaaaggatcttacagggtttataaaatctagagaaacttttcaaaacatagtaggatctcaaaatgaaagtgctaacaaatctggcttaggctttaaggatccaagcagaattattgaaagttttgtacctaaggctaagatgagaattagatgttatttctgtgataagtatggacatgatgaatcagtatgccatgttaagaaaaaacctatcaaacaaaataatttcaatcttagtttagaacgttctcatctcaatagatcagaaagttcacaaaaggctgaaaaggctaagaagacatgtttctactgtaacaaatctgatcataaaagacagaatgatacttttagaaaagatctcttagaagaactaatcttcaaggacccaacattacatgggtacctaaaatttttatcttgtcaaatgtaggtcctgcctcatagtgcaagaacaaaacc

SEQ ID NO: 30591 - DNA, 709 bp, Medicago truncatula
  Intron number 1 from transcript Medtr5g049800.1 (locus Med tr5g049800) derived from phytozome v7.0 (chr-ID MtChr5; po s 21402663 to 21403371)
aagattgacacattaacagtttcttctgttctctggtgagtttaagaatcattctaattcttcaaatgaagtttatttttattttttttctgtttatgttttttttttccttttcttttcgagtttgttaaggttttagtcaaagattttggtcttgttatcttgtcgtgtttttcttatgttcattttgatggttttttcttcatagtattgtattcattttgatggtttttttttttatgatattcttcatagtcttgtgttcattttgatggttttttttttaatgatattcttcatagtcttatgttcattttgattgatggattttatgatattcttcgtagtcttatgttcattttgatggtttttgggtgttaattttctcggtaaatttctgtgtagtgtttgtttggttggaaaatgatgaaaaggaaaaagtaaagtaggaaattgaggcctatttggtgcctaactcgactcacgtgtctggtgtctaatacgtgtgagtgtcacattaagatgtatctagtgtttgatacagatgtatttggtgtttgatacatgtttaatgactcacacgtgtttgatgtctgatgcgtgtcagtgtcacattgagatgtatttggtgtttgacacatgtttagtgactatcatgtgtctggtgtctgatgcgtatcattgtgtcgatgtttgacgcagacactaa

SEQ ID NO: 30592 - DNA, 722 bp, Medicago truncatula
  Intron number 1 from transcript Medtr5g028730.1 (locus Med tr5g028730) derived from phytozome v7.0 (chr-ID MtChr5; po s 11896545 to 11897266)
tgggagctttctccactatcgggtcttatagtagagtaggctctgatctagaattttgtttgatagctctagatctttgctggattattttacactttgagattttgtccacgtgtcggaattggagatttttatgcttatgcatttttgagatcatgtgacatgtatgcttgatgtatatgattttgtatccgctgcgactgatgagattttatatgcatgcatgttggttttcgatctttggattttcgattcgtgaaagtagcgtctatttcaagaatattttattattcgcatgttttattgctttaatagaaatagggcgttacaataaacacctgaagaaaaagacacacaataatatacataattatctcctaagtggtccctatctgactcagatatgataaggtaccactgtaattattctacaacataataactagatgataattatgatattgcagatagggaccacttaggagataattatgtacattattgtgtatctttttttttaggtgtttatctttattagctgtcgagaaagggacatgtgaacaatttgtgagccctttttcactataaataagagcctcgtttctcatttgtaatcaatgaatattgaagttcaataccactaagtattttgttcctataaaaacttgtttttttttatagaaatagatcttgagacaagactctggaggagctagatcctt

SEQ ID NO: 30593 - DNA, 346 bp, Medicago truncatula
  Intron number 2 from transcript Medtr5g040950.1 (locus Med tr5g040950) derived from phytozome v7.0 (chr-ID MtChr5; po s 17511690 to 17512035 reverse strand)
gattctggaagttaatcttgtgagtttttttgttaatttgtgcaaaaattgaattattattattattatcccattcctggtgtttaatcatcttccttttgttttttctctttattggggatctccaagttatcctatacataaattggcatgctttgctgcataatgagaaatagaatcaatcaaatagtatttgcaatgctctctctggatttatggtttaaaatgaaatataaaattaatcaatatgtttttttttttgttgatatggtttaagtttgaggtttagtttgatatccctgtttacagagcctttggattcttatacgcctcaagaatcattttg

SEQ ID NO: 30594 - DNA, 370 bp, Medicago truncatula
  Intron number 1 from transcript Medtr5g040950.1 (locus Med tr5g040950) derived from phytozome v7.0 (chr-ID MtChr5; po s 17512051 to 17512420 reverse strand)
aggctgattctccttccatttcactcaaccaacaggttttattctttctcaattaatttattttttcgctttaccaccattatagcttcttcttcatctttgcttattctgtaaatgcatgtatttgttatttcttctcaatcgattttgtctggtttgagggttaagtgctatcgtaacatatcaacttgattgttctccctctctcattttgattttgatttacaattccattgtttttttttgttgagagattgatgattccattgttagttatactatttcaatttgatttcggttgatgattccattgatatttctacttttgattcgtttctattttaggttgcagatcacatcgcgcattgca

SEQ ID NO: 30595 - DNA, 1009 bp, Medicago truncatula
  Intron number 2 from transcript Medtr6g062370.1 (locus Med tr6g062370) derived from phytozome v7.0 (chr-ID MtChr6; po s 11350696 to 11351704)
acttcttccctcgcgtttgccatctacatcacacggtaacaactgcctttctctccctttacctttcttgtgatattagagtttgtgagtattcgtgtgtgagtgatgggatcaagttattgttctacctattttacgcataccacatgtttgataaatttcctcaataaagttcattgtatagcttgtcttacatcacatagtaagtgtaaagattttcacttgtaagtgagtgacttaaaatgagtaaacaagtgtgtagctgcccccatagagttcgtacaaaatcatgtgctataattttcaattggatttatattattatagttcatgaaagcttgttagtgcaatcattgtttgtgtcacatttgcatatatcgcttcatctctcccactagcaactcacaatgacatgtcataaggtttcttgattgtttttttccttcttttctttgagtgattgaattttgtgctagctgatattcaacaaattcatggcatcatttgattgagaaacttttttatttttataatcaaagtctaactaaattttttaatgaattttttgatagttcatttgatgctataaaatgcactctgcatcttgtcagcatgatgcaatttagaggacaaaaaccatatagtaaatgtgagaattttggaatgaattcgttttcccattggtgtgtcactacattagcttaaccaaatttatccatttgacactgatgatgaaacatcatgatgtgtttcagaagggataagttttccacaaccatggtgtatcattgacagtgtcagcatgattttgacaaaagttacactttagatttcaaataaattgcggtgttattgtaattattccaaactcactttcaattcaaacgtgcatttgtcttcgaatttatgaaattaaggatcatgatgttggttgtgtatattttgacaaggggactatggttgtgtattccccaattttattcaattttcaggagtctcgttgatctta

SEQ ID NO: 30596 - DNA, 945 bp, Medicago truncatula
  Intron number 1 from transcript Medtr5g018670.1 (locus Med tr5g018670) derived from phytozome v7.0 (chr-ID MtChr5; po s 6823672 to 6824616)
gatttgctcttgcaacctctgctcttgttgtttctgtatgtttcactttgtctctcttctattgatcattcctttttttgatcgcactttgattaagtttctcggtttatttttttcagaggctaaaagttgcttttatttttgggatgaactaaattatgcccattcataaaacaaacctagtagctattgtaaaacaacgtataacaacctgtgtgatccggatagactataagaaaatacacacatttacatacattaattgatcttggtcatcgatttgaaatcccatctgctcatattatattttcaccaaatcatgtttaattaaataatatatatcattgatttgagatcgaatgatcaagcacagtcaatgcatgaaattcaaatcctaacatgcggtttatctgaaattgtgaattattttttatttgtgtgtttccgtatccctagggctagcccaagtataaggcttgagaaaatcctcgtttctcaagccttagcttcctaaatagtcctttaattttataatctccacaaatttgagttagttttaagtttcagattgtctcgggttagactctagatttttactagaaacaattttattcgagtaaatgtcaatcactttctttcttaacgaaaattcaaactctggctcgactcattttgagtttgcaagggactagtcagtagtcactactcactagtctcttttgctaaacttaatcacgagggtctttgaacctaggctctagagttattttcacaattatttagtcttgtatattttttcatttgatatgatcttaacttaaacatcacttatttacttatttatgtacctatttagttattttatgtatgttgattgactaatgattattgtggaattaataatattcagggagcaagtgcagaaggtgctccaaagcgactaac

SEQ ID NO: 30597 - DNA, 943 bp, Medicago truncatula
  Intron number 1 from transcript Medtr5g010340.1 (locus Med tr5g010340) derived from phytozome v7.0 (chr-ID MtChr5; po s 2511794 to 2512736)
tgctccaccagctttttgggtaattcatctttttttacattgcataatccaatatgtatcttcattttccaattagtcctaattaggataaaatgcactattccccctaattttcaaaaacttataattttggtcccctaagtacaaaaactacaattttttttttttttttggtcaagtcctgatcaaaaactacagttttaactcttatgatttagcccatttgcatctttggtccttttgatcaattttatccttttgatctaatatataccatggttcttatctcttctcgttacgtcgtgtaatgtaaatgatcatttaatttccacttttgtgattttacacataatagttattattacaactcccaaaaataccgcaagctgcaacccttccgaatttctgcaatatctttaagacacctgtgttttatctgcggatatcataactcattcgctctcctcttgcatcttacacctgggttttggttgagaagaagatgaagttgttgagaaaatgaatgagaagatgaagatttaattttttggaagatgaagtttttctagattttcacgtgcctctccttcttcttttcctttcctttttttctgattttttaatttatttgatttaaaaattattttttggtttttaaaatttttaaattaattaattacacacatggcctgatacgtaggcgttgaataagtcaaaattgatcaaaaggaccaaagatgcaatgaggctaaatcataggggaccaaaattatagtttttgtacttaagagatcaaaattgcaagtttttaaaagttagaggagggggaaagtgcactttaacctcctaattaatgtacacaataatgttaatattgttgtaattaatctaatgttagtttattgtggtaatctttcctatatattccaggtaggtctactat

SEQ ID NO: 30598 - DNA, 608 bp, Medicago truncatula
  Intron number 1 from transcript Medtr5g019620.1 (locus Med tr5g019620) derived from phytozome v7.0 (chr-ID MtChr5; po s 7340975 to 7341582)
gtttgatttttgcgtatgttttcatgcttaaagatgttttgtaacactttttatttttactgtattgatgcaacaggtcctttggttaataatccagattcatataatagagtgtttgctgctccatctttttgctttattttcagtcgttgaatcaaacatttgattctttagtttttgcttttcaatgtaatgaagtatcagtcttgctaaattctcttcgtaattttaatctaagcatccagattttattctcttttcaattttaactttctttttttatggcatctgtctcttattttcttaatcttgattttacaatttttcagattttccatagttgcagttttactacgatgtcgatattatgatctttttccgtgttcattttctttcaattaaatgtaagtatgcattcgcttttcttcattccttccttcgatagaatgtcgtattagctttgtttagtattcccctaaatgaaacaaataaacaatttattgagggatttaagtgtcttcttttattttgtttctttatttatgtgtgcacaactcaaattgtacctatcttaaagtaaaaatcatgtgcagttgcaggtcctcaca

SEQ ID NO: 30599 - DNA, 813 bp, Medicago truncatula
  Intron number 3 from transcript Medtr6g028160.2 (locus Med tr6g028160) derived from phytozome v7.0 (chr-ID MtChr6; po s 6314397 to 6315209)
aggtcccggctgcaactagccaacctcttactaatgtatgtctttcagagtacaagtgatatatttcttcagtcttgccttacctcatgccttttttgttattgggattagtggtcattttacactaaactgtaacatatggtacaaatagttaataacttgaaattctttgaagatgtttctgtcaatgttagttctttctgtacatatctattggtaaattatactcaaaatttcttctctgtgttagacttgatattttgttagtttccattaggcaaaactgcactagggtagttaaaatttcaaataggtcctttattttttttctaaataaaaaatatcctttatctttctaaacaacaacaacactagaccttcagttattttctatccaaaatcgttaaagtctcagggcctctccttcattaataggcccacaaattgttgtgaacgagaggctcagattgttgcgaggtgatggtgagcctattaatgaaagagaggctttgagtttttcacgctttcaacaaaaaatcactaaatgtctaatgttgttgacgtttaaaaagataaaggacttttttttattaatctaaaaataaacataaaggacctctttaaaacattaaattaatttaaaggacctctgatgcagttttgcctttgcatatttattgccatatcaaatagatataacatgttaagtacctgtcctaatgattatctatatttttatattatatatgcattctgtaggtttttttgtcgtttctttactaatactaacgaaccttgatgtttagaaggttg

SEQ ID NO: 30600 - DNA, 643 bp, Medicago truncatula
  Intron number 1 from transcript Medtr5g106360.1 (locus Med tr5g106360) derived from phytozome v7.0 (chr-ID MtChr5; po s 42773696 to 42774338 reverse strand)
tcacggcacgaagtacaatagtgttgagacataaggtaagtaagaaagcaaatgcaccagttctcttctcagtggataatcccataaacttgaaattaaatcaaatccaatttggattcgatcaattgttgcttattcatgatgttattgattgctgagtcgtgtggtattcttcaaagtgaagcaaaatcaaacaagagagtatatgtaaaattgaaaatgccattgatttgcgatatatccttatgtttgttaaacggttagattttcataagaaaaggctagactatattcttttgctaaaacatgcttagttttacgtaaaatagtaaatgttagaaactaactaatattatacatctggaagttaaaaggaatcaaaattaaactttacgtcgaggattagagagtattggacattgggttggatagctcttcatccttcatccttcataacctaacccggagagaatgatagagagtgataaacgtggattgcacgagcaaggaagaagaaggactttgccgatgtaggcgtcaatgtcgagaaatttactcctgcaacatttatccttcaaagaatggttccctggggagcattgaaatgaagaagaaaaaaagaggtttctttttttgaattaaa

SEQ ID NO: 30601 - DNA, 704 bp, Medicago truncatula
  Intron number 1 from transcript Medtr5g010440.1 (locus Med tr5g010440) derived from phytozome v7.0 (chr-ID MtChr5; po s 2572749 to 2573452)
gggaagtggaaggaagcaacagctagctgctctaggtatggtttctgtttttatatggatggatattatttgattgtatgtattgttttaggatttggaattggaatttgctttgttcatttggtttggtttgtttacaactgtttgtcaattaactagaaaaaatatactttggacctcaagaattggtccttgatgttcacttgctaacaagtttactctcttgaaattatcaacttgctaatagattgatccctttagatagacggtgacttttagggatgaaagcagcacacgtaggattttgaagaaattaaattctatctttatttttccatttctagatgctttatactttaatctgatgattttaatttccttcttttcttttgcttttatccagttgcaactatttttattccttgccattgttgtgttttatattggtggtccaagtgttattattcagtaatttggtttctcttgacttggttacatgtcggtcatattcttacgtcagaaatggctaaattgatggtaattggaattcacaaatctcccagacatgtataagactggtttaaccgaggcagttatacatagataactatctttcatggtttctgatgtttatcttctgtacagattgcaatgtgcaagtgatacttaatttctaacgtttttgtttatcccttctaaggtga

SEQ ID NO: 30602 - DNA, 410 bp, Medicago truncatula
  Intron number 2 from transcript Medtr5g106000.1 (locus Med tr5g106000) derived from phytozome v7.0 (chr-ID MtChr5; po s 42592200 to 42592609 reverse strand)
agcagcatcttcagactcctctatacagcctagaggtcattatcaaacttttgttctgcttgcataccatttatctcattcattcaaacccgtatattttgttcatttcatccatccaccaaaatcataaaagaaggaaaaaattgaaacgttgattttcactttaaaggatttatttatcaacattgttggtgtaaaggtttcttttacactttcaatcaattataatcttcacatcatagaaactgtttgactttaatcataagttcatgactacttctaaagtcatacctatgaatgattgcgattgttgacagtgtaaaacttttacattgactgcgtatcaaaattaaactctactcgcgggaggcttttcgttttagttcatcttctcagtttgttttgcacag

SEQ ID NO: 30603 - DNA, 562 bp, Medicago truncatula
  Intron number 1 from transcript Medtr5g106000.1 (locus Med tr5g106000) derived from phytozome v7.0 (chr-ID MtChr5; po s 42592656 to 42593217 reverse strand)
tttcctctttcagcaaccacccttaagatcttaaggtaagctctttcttcttatctctttccgatctatttaatcaatgtctgccatcataattacatttcatttcatgatgatttctgctagatcttttctttccgttgaaattctgaatagtttagtttaatatttattttattatcaaacttccaaggctttgatttcatatacttcaaattattattcatcattactagtagcgtgtttggtaccgcgtttcgatgatgttcaacacttccagcagcgtgtttggtatcatgccttaacaacatgatttttctctttttcaaacacacactaagaaattaagcacttcttcgtgtttctttataccattttattcgagaaattcggatgatgtaacgttatctggagtaagacaagaatatgtgaatgtatcctcatgtatttgagtgcgatcataactattgatgtttcatagaatcaatcgtatatgaagttaattcatgattatttatctgttgacttgacttgtgttagttaaatttatactcatccatttact

SEQ ID NO: 30604 - DNA, 283 bp, Medicago truncatula
  Intron number 3 from transcript Medtr4g079540.1 (locus Med tr4g079540) derived from phytozome v7.0 (chr-ID MtChr4; po s 16020304 to 16020586)
ttccccaaggagcacccataatcccaccaccaccggttcgattctttgatttttcttgctcttaagttaactcatagaagaattctttctcaagctttagtttcttggtttttatatttgaatgctttagttttgatatcgttcgtaaggttttctttcttcttgaaattatattgaattgtcgtagaaaccgtttttcatttagcgccattttttgttttaaaaaaaataattcttgtgttttgcaggaaaggaaaaggaaaaaattgaatccgaagtgaat

SEQ ID NO: 30605 - DNA, 358 bp, Medicago truncatula
  Intron number 1 from transcript Medtr5g065550.1 (locus Med tr5g065550) derived from phytozome v7.0 (chr-ID MtChr5; po s 22943544 to 22943901 reverse strand)
ctgtctgatttttgcgtatgttttcatgcttaaagatgttttgtaacactttttatttttactgtattaatgcaacatgtcctttggttaataatccagattcatataatggagtgtttgctgctccatctttttgctttattttcagttgttgaatcaaacatttgattcttcagtttttgcttttcaatgtaatgaagtatcagtcttgctaaattctcttcataattttaatctaagcatccagattttattctctttccaatttggactttctttttttacggcatccgtctcttattttcttaatcttgattttacaatttttcagattctccattgttgcagttttactacg

SEQ ID NO: 30606 - DNA, 454 bp, Medicago truncatula
  Intron number 1 from transcript Medtr5g100230.1 (locus Med tr5g100230) derived from phytozome v7.0 (chr-ID MtChr5; po s 40114322 to 40114775)
tttcatgtaaccccgacaaatatgctaaagaagttggactattcatcttatgtttcttaatttttacttgaaactaattattacacttgagactgaaaatatagtctattcactgagtatattttacctgaaactaattattacacttgagcctgaaaatgttgtatattcactgtgtgtagaatgagggtaaagtacaatatatacattaatctgacctaaccaatccctcaagataagggaaaagaatcaataacaaaggaaagattcttgtaaaatacaattgcgataatatctcgtctcaaggatataataatattctcagtttttaatatctcaaccattacaaaatgactaaatactcattggtgcatctttgatccttcgtatttcttttgtgtgctcatcttgtttataatgctggaagtctattcatttgcctatacatttttag

SEQ ID NO: 30607 - DNA, 477 bp, Medicago truncatula
  Intron number 2 from transcript Medtr4g073670.1 (locus Med tr4g073670) derived from phytozome v7.0 (chr-ID MtChr4; po s 14681124 to 14681600 reverse strand)
tccgttactctgaactcatcaattgagttcataaggtgcgtgcgacctcacctcttgtttctttttgtttttcaattcaactgataatgtgtattttttgggtttctggtagctgtttggttttttgttgttaatgtgattttcaattcaactttgatatcttgttctaaaccccatcttttgagggaatgatagagatttttcaaagaagacagaacaacattaaggttgttttagttttgcttttggtcttgttggcagaaagttgaggtttttcacatgtgtgcattctgactcttattattacatattgcaagtttcccttgtcgaaatcatgtctataattatgacagcttcagtaacatttttcatgtaacatttgtaaaacattgcccggtcatggcattaatctctctgcttattgttaatgaaatctcttcaatcatgtcataacttatctgctgttcagattaggtc

SEQ ID NO: 30608 - DNA, 465 bp, Medicago truncatula
  Intron number 2 from transcript Medtr5g094910.2 (locus Med tr5g094910) derived from phytozome v7.0 (chr-ID MtChr5; po s 37625697 to 37626161 reverse strand)
acctctgggccattcgagcatattccattgaataagtaggtcccaaatttcttgtatttctcatctgatttaactcagcatacaactttcttgttttccatgcatttcttcttgttggtcgttgctccgactctttttgtcttttctcttgcaccctgtttttaatgtcggttttttcctttatttctatacccttgtctgccgtatgctgttatatccattactctgctgcaattatggttgcttagtgtggtcatacatatttgctaggaatgcattttttgagtggtttgattctgatatgtttagaagcttgctttctggaatctaaccagaatatatttctgctagctgggtgttttttttcttccttctcattacttaaattacctgtaatattgaataacattgttttgtttcatcattgtagctttgagaataacccccgactggaaggtccagagt

SEQ ID NO: 30609 - DNA, 737 bp, Medicago truncatula
  Intron number 1 from transcript Medtr6g089480.1 (locus Med tr6g089480) derived from phytozome v7.0 (chr-ID MtChr6; po s 18386921 to 18387657)
tggtagtgaacaaagatttgggtttcgaaatttgatcctatctaaatagaatgaggcgtaaatttgtatgctagatgggaaagaaaggcctttagattcaaacatgggtacattcctgaatcctgacaacttatgttgttaccttttatttattttaatgttagtaaatgaacaaataaaggttcataaatagttctttatagaattacaaaatcaaaacacaatagtctctaagtaagggattgttttgagtgtttaaatattttggtagggattaatatgtcttgaattcgtattctaagagattgttttacagattcgttttcacttaggtttcctatttttctcaagactaatggtctgtttgtttgtgcgttggcgagagactagtagactagcgtttactaagaagccacaaatattagcttcacaatatcacgttcacattttccttgggacacgaaaatcatgcctccaccgcacatccaaacaatggctaaactgactatttactctttcttttattttattttggtaaaagaagaaatagttaatcctctgaatcagtactattattgttgacatttgaacagaatgcttgctttctgcttgaattgtattgtaggtcatatatactttaaaattgaatttcaataataagataagtatgaaaccgttgaaacttgaaataactacatttagtttgacctaacctctctggtttagcagggaaggga

SEQ ID NO: 30610 - DNA, 958 bp, Medicago truncatula
  Intron number 1 from transcript Medtr5g099650.1 (locus Med tr5g099650) derived from phytozome v7.0 (chr-ID MtChr5; po s 39861236 to 39862193 reverse strand)
gtatgtaccgtgtacctgctcaatatgttccaccgtagactaacttttttgaaccatcagattaaacacatcactaatgttatcgtgttgcctttcacactatatttattccctttctcctgtttgactttttcttacttctatttcaacaacatatttattccaatttatttatttatttatggcaaaattacactataaatcctgtcataaatcctttgtattaaaattttgtttaaattgaaaattcattattttaataaagtttaaattcattactattatttaataacgtttaaatttgtttttggtcattgcatatttttttcatagcaattttgatatatatcttaaatcattagtttcaaccatcaaaacaatcttattatatatctcaaattatgattagtttgtatcaaattataaattttcatatttgattatcaaaactataatgaattatttttcctattatctcttgatatagactatgtttttgtaacacataagtccttttttcattttttttattataaaaatgctgaaataatagtttttttttttttgttgaaaggatgctgaaataatagttttattaataaccttatttgttaaaatatttttaattaaaaagataaagaaattcataagtcatatgaatatcttcatcatcttcctccttgattaaaaaaaagtacacttaaatacacatctaaattaaacatctctactttgatcttcttataatctcaaaatccctaaaactcaattaaccacaaatagttcaagtaatttagatgctaacaatggtttgaagagaaacccataattttcaattatcataacagaatcttcagataaactcaattataaaactagatacagttagattaaatgaccaatcatcataattagggtttcggaacaagaacgattgaaattagataatatagaatct

SEQ ID NO: 30611 - DNA, 959 bp, Medicago truncatula
  Intron number 2 from transcript Medtr5g029310.1 (locus Med tr5g029310) derived from phytozome v7.0 (chr-ID MtChr5; po s 12184359 to 12185317)
ttgagaaacaattggcagaacagcagaagggcagggtaactacagtggctttagtttttcttctttctcctgtttcctttttccttttaatttttccttgttaacccaacaaaaaaaactgcaggatgcaagacttttttttttttgaaaactcggtatccgatctaagaattgactaatccgagggatcaatcccaccacccacttgcggggggcccgcttaaagtcagagcaagctctggacttaacccaccgaaattgacaccagatgaaatcaaacccgagacctcaagaggagcaaactccaagattccaagccaaccactaggccaaccccaaatgggttggctgcaagactagtagaagtcagggcaaaattacattgtagtttcttccataacatgaatcatgttccctaatataactggattgtttcgtcatatgttagtgtttgttgaaatgtttgttatgcatattttgcaccttcatattgaggaagacttgatgcattttaagtttattgccattggttttttttttttgagtggatgctatttttggatcttttacgtcttatatgttttaaaaaaaaagcatatgtcctaaatttgactcaagatagtttctaataaacttctttatcaaaccagtaattaaaaatgacttttaatatggcttttggcattcattaatagaaaataaaattggttcagtttcctgaggatttacctgccgcaacagctttgctgggggaattacctgaggaatttgcagcggaattacctgcggtatgtttgcaggaaacattcacgggcaggggaacttctcccacgcactctgaccaaactctttcctgcggatattgttcccgtttcctgaggaaatttccgcaggttagtttcctgcagatcataaaatcctcaggaaacaattacccacgaaggttatacctgggaacc

SEQ ID NO: 30612 - DNA, 717 bp, Medicago truncatula
  Intron number 2 from transcript Medtr6g083900.1 (locus Med tr6g083900) derived from phytozome v7.0 (chr-ID MtChr6; po s 17230058 to 17230774)
gaagtaaatgatactatggaaagggaaatatggattgataacaagtttacaggaaaataaggaactagagctgacttaatcccccaaccaccacacacacacctatcttctcaaacttccgttatatattccaatcattggcatattttctgttagcaattctctgaatggatcaattgacacatgtcccttttctctaatcaatttgttggctctactttggcgatgcaatttttcttctatttgtaccataacaagttgtttttttgggtttatcttacgacataaactgtgtttagtggaactttgatagttagtttatgagatgtctataagtattgttcagtttactctgataagctctccaagtagatcattgtaaccgcttatgtaggacatacctattgtcttgtcatcgattattatccatcggaagttctatttttacaaccaaataaatgttgaaaattcaattacatatttcaggatgcatatatccaaaagtaattagctcattgaattggagtacttgtgacattcgttctcaattgatgggtgtttattgaatatccgtgttattaagttgtttgtttaccagaatactttgtttgtctgtttttttaatctttcaaattatttttcttgcaatacgaacgatttttctgataacgtgccccgacagggatcttggcttcctgtatcggctggttgatacaa

SEQ ID NO: 30613 - DNA, 490 bp, Medicago truncatula
  Intron number 1 from transcript Medtr4g042330.1 (locus Med tr4g042330) derived from phytozome v7.0 (chr-ID MtChr4; po s 10108059 to 10108548 reverse strand)
atactacttcgaatacctcttgtttgttgacgaatttgatttttgatttgtttttcaacttcaattttcccataaccctaatcaacactgaaaacgtaattatgttattgtaattcagattttaaattgatgatgccatttgatttatgattcgatgaatttggatatgaacttttactaatgttgttgactaggataatatttgatggatttactctgttattttgttgaaacagaataaaaatgattttgtatgtagggacaatattgtgaataagttgattatgattataaattgtgcttgttaaagtattaaacaatttgatcacttcagtatcaaaatatatgttgtcatttgctacaataccattgttaattgtggatttgtttcattatgagtttaaattactattattatatcattttgataaatttgtttctttgcaacagaaaagtcaagacaagagtcgaaaaatagattcattaatat

SEQ ID NO: 30614 - DNA, 655 bp, Medicago truncatula
  Intron number 2 from transcript Medtr5g044350.1 (locus Med tr5g044350) derived from phytozome v7.0 (chr-ID MtChr5; po s 18414206 to 18414860 reverse strand)
aggtcattttcttccttttttcatggttctgagactatgcatgactagagttgactgatttttatggcttgaggggttcatttttcgacactgttttagtttttgcttcatcataggtaactttcttccttttttcacgattctacattttaaggttttttttttcttctttcaattgttagtggattatgttccataaattgttatgctgcatgactgtagaaaaatcttcatttgttatgtggagtatagtagaggtcatgatgattgaattttagctcatggtaatgttttgacacaattgttattttagcttctggtactgtagttgaaaaaaatttgatgcatgtgagttattttaatttttgtgagtaatcctaaagttgtaacaattttcatatttggtttattcttttctattatatcattgagccatacgaaagttgattgtgtaaatttgttttggtcatattattgaggtccagaaagttgatgatacagaaatttgtgcatttaagatcagattgatttgatgatacaaaaattgatcacatagaaatatgttagcttgtttcgatattagaatgaacaaaggaaataaaattaaatgatgtattattgtatttctatataggactttcaatgtcaagggatt

SEQ ID NO: 30615 - DNA, 982 bp, Medicago truncatula
  Intron number 1 from transcript Medtr7g008920.1 (locus Med tr7g008920) derived from phytozome v7.0 (chr-ID MtChr7; po s 1439059 to 1440040 reverse strand)
caacgcttcctgtgcttccagatctttagacttgggtttgggcctttctttgtctttttttgctattttttcttgctatctgcaccatatttctttgctgtttgaacctctgcatgcttaaattttctctaaaaaatctccaaaaattatcacatgtttcttgatgtattttcatgttttttttatacttctcaatggttttaaaatgataaaaaaaagcatgtgatatttcttggttaattagtgtatttagacataaatttgtgcattttttagtagtgtattcctcatgaaatgttgacatgtgatatgaatttttgggatgcaattttgtgataagtttgttgctgattacatgtttaacttgctgcttgtgtatctcaatttcatttcccttcttgtcttgcaattagtatgcatttttactagtaaataaagtgccaaaatattttgaaagtgtgccataaactttagcatcaaatatgtcccatttttttttccacattatggcacaaagcaagacttctaaaaatgccataatgaagggattatgggtcatacatatgctagagccttataaccattttcatgcacattttgtcactttattagtttcttttatgtctttcctcttaatattttttgtgcacttcttttattctatgctttattttactaatcatctcacttcttttgttccattcatttcatgagtatttctccatttcaccactatctccattagtttggtttcttcccacttttatttctatgtcaaatggcttgtaataattttagtttagctttcttttaattttcgcaagaccatagaatgtatactaggacaaaatgtaacggactatggattatctctaataatgtacaccgacacaagcaccgacactcgcacacacgttgcatgattatcgatttaggtgtatgtttaggaattcgacgcctagtgaaatttcttcttcgaaat

SEQ ID NO: 30616 - DNA, 821 bp, Medicago truncatula
  Intron number 1 from transcript Medtr5g015530.1 (locus Med tr5g015530) derived from phytozome v7.0 (chr-ID MtChr5; po s 5201265 to 5202085 reverse strand)
tcctgtgcagtctgagttttgagtgtgggctttgggtttgggcttagttttctttcacgtttttttgtttttttttgctatttgcaccgtatttctttgctacttgcacctgtttcttgctcactttttttataaaaaaaatcctaaaaatcctggttatttcttggtatatttttggcatttctatggtgtttcttgcataaaaaaagatgttaaagtggcatgaactaattccatgtgtttttacacttttggtatgcattttgctatgttttgttcttgacattttgatattatgacatggataaaggatgcctaatatgatgatgaatatgcctctggaaatgtgtttttgtttgctgtttttgaatatgattttatgaatttcttgttttgcaagcaataagtttagttttaaggaataaagtggcaaatttctctatgaacttggtgtgatattttgcatgcatatgcctccattaattgcatgtcatggcttgaaacaaaatttctttctaaattgccatgatgtgatgattatgggccactagcatctttaggtatcatatcaaatgtcttttaggtttattaccactttattactttttctttgccatctttatgcatttccttttaattacttcctactattgtgtgctttatgattactaaccatttcatctcatgtgccatacatttcatagcattccaccactctctccactttctttagcttagcatttatttttttcgcaagttttaattcatttggtaatgtaatttgttatcattggtttgtagcttggcaaagaggccataga

SEQ ID NO: 30617 - DNA, 830 bp, Medicago truncatula
  Intron number 1 from transcript Medtr4g069940.1 (locus Med tr4g069940) derived from phytozome v7.0 (chr-ID MtChr4; po s 13467804 to 13468633)
tatcttgcctgttaagtttcctcagttttttactggtgagttaaattctgaatggtaattgtgattcgtgattagttgaatttagtgtatgtttggaatcacagtgagattgattaggtcataggtggaatcttaattttgtggaaagtaatgtgttaaaataggcaattttcagatgcatttagtgtctgtttggaatcatggtgagtgtgacgaaatcacggtgacactgtgattttgttagaagcttcaaagtacatgtttaaatttattagtgatagaattagtgaatcacatagcgattttgacaaaagttacactttggagcttcaacaaaatgacagtgcaactgtgattctgcgcaccgtaaaactcaccgctaatcaaaacgtgcactaaatgttttgtttttaaaattacaatggcatggtgtgatttcgtcaatccaaacattcacttaatattcgggagcaattgaacatttgttacaataaaactagtagtaaagatgccatacttcaaccaaggttcgtggcccaatggttgtaagtgcaatagagttttggatactctgcgataatgatatgttttctgttgaaagttgggatgctccgaattttggattgaaaacaagatctcgtgcatagggaaatggtgttgaaaagagaagcgaaactctgccacatgtaattagaggaattttttttttatttgaatggatagatagaagatagatatttgaaacaagggacaattgatttagtgtttaatatggtttgccatggtctatttcaggtaaaagacgaccttggagagcatttttgttgtac

SEQ ID NO: 30618 - DNA, 966 bp, Medicago truncatula
  Intron number 1 from transcript Medtr5g082750.1 (locus Med tr5g082750) derived from phytozome v7.0 (chr-ID MtChr5; po s 31181817 to 31182782 reverse strand)
gctaccataccctcaggccatttcttttgtgggatgtaaatgtttgacactactttttcttcagctcctttcttttgtgctagaatcatacttccgtaaacctgacgaaacttggcacacaagtttattaagcctttgagtgatccaatagttgtgaatagtgtaacatcctttctttaaacatgttgcttttacatttttttcatgccacagattttggtaagcaatgctagctgtatctgaatttggggataatgaccaaggcttccacatgaaattagtctagaatatgctgaccgatccatgtgccttattgtacaagttttgtagagccagtatcagtatggttttgacttatatgctaatgtcagaaaaagaaataacgtttctaaattctaaggcatgaaggctcatatgtttgaaatgatcttgcatgatgtggaacaaataaggaatttatgaagtacatacatagaaactttatgaaggttaaacaaaaaaggaattttaagcacaaataaggaaaaacaaaaaaggttaaaggaatttatgaagtacatacatagaaactttttttaaatattttctctgaactttcatccttcaaagtctaaggattgccaagttatttatttccacttacctagagaaagtaacatgtctacaatttcttcactgtgtcattaatttggaatcacagtcttcacatacaaaccaaacaccaaaaatttcatcccttgccaatcaattccattgtaacctaggcaatgtaatgttaccaataataaactcatgatcttagccttcttttacagatcacgctcctttaatttttatttccatttaccacaaatcatgttaaatgtgatagaaagttaagtcttcatttactcgtgtgttctttgtcccgatttctcatttacatgcataggttatcctggtcaacaggaagctagaggcggagaa

SEQ ID NO: 30619 - DNA, 840 bp, Medicago truncatula
  Intron number 1 from transcript Medtr6g005340.1 (locus Med tr6g005340) derived from phytozome v7.0 (chr-ID MtChr6; po s 229449 to 230288)
aaattgattgttaagtgagtgctcaaaatgttctgttttgactgcttaaacatatgtaaatttattaagagttcttttacttgtaaggtaattgttgaatacttatctcatgtaatcttctataaactaaatgttaatttaaactgcaacatagatgcttctgctaataaaaattatcatttggaagttaacctttatgtgcttcaaattatcaaagattaatttctgcaaagaatataagattataaaattctgaaaccgttcatcgatctcaacgacaacatcctatactgttaaattttttttctccattttatcctttttatatatatatttttccagatcattttttttaatgcattgctatgtatactttatggaatatgcatttttgtttcattatttaccttttttattaggttctggttgttaattccagagcactgtatgcttttgattcttgtttcattacatactgtatgcttttgattcttgtttatttccaattactcagtatgtagctggtccttatccaaataaatgcacaactagctggcatttatgcaggaagtagtatttaagtagccattttctttgagattttacaattaaaattacattttcacaaaattttgtcaattgttaagaaacaagaattgtggaaaagatgaacaatttgttgtatgacacaaaatatgttaattttcagttagttttgctgttatttttatgtattagtttttctgcatgtgaaataggaacaaaccaaagatcaaattctcagtttttcttcaaagtctctattaagcactcaaagtcaaaactcttgggttggtcctg

SEQ ID NO: 30620 - DNA, 451 bp, Medicago truncatula
  Intron number 1 from transcript Medtr4g107350.1 (locus Med tr4g107350) derived from phytozome v7.0 (chr-ID MtChr4; po s 23422854 to 23423304)
aacaacacagttgctcctgctctgatcttcatcaggtttgttctttctttctccattcaacttattttattttatttttttcgtttttgttttctgatttattttcaatctttttgttttttttcaacttctcttttgtttgtgaaatcttttcaaacttctttgtgaaaccttcattcttttctttcttttttttttttttttaaaaaactatattcaattatataagttataataatcaaattaaagtgtttttatttataagaagtaaaattaaaaagtgattaaaaatgaatctgttagagggagaaagtgattatgtgatagttactgaatttgttcgtaaagaaaattaattattcttcgtgacatttttgtgagtgagttgagttaatcagtctgaagctcccttccagtcgcagccgcctttagctcgcatttcactcccatc

SEQ ID NO: 30621 - DNA, 890 bp, Medicago truncatula
  Intron number 2 from transcript Medtr5g019580.1 (locus Med tr5g019580) derived from phytozome v7.0 (chr-ID MtChr5; po s 7323193 to 7324082)
ccaccattcttgagaagtgtctccttgaaaccaaggtatacctctttcttcctcttcttatttaatttattattgcaactagatacaattttattaaactatgttaatatgttttttaattaactattattaaaaattaaaatcagtggattgaattataatttgacatcaaaattttaatttccaatcatcatttctccaacaatattatattactatagtgttttgtttttatttgtatcaacacaacactagtaacgtcaatttagggcaagcatgctaccatgtttcttctctggtggtcttgattttttttttattcactatattgttgttattgtttaattaaaaaagttgtttgcttagtttaataccctaaatgttgaaagagagaataggcactagcatgcaacgagttctttaggacaaagcaaaaagaaaagaaaccccttaaatgaaaaatgataaagtagaaacttagacccaccacatatgaacgtgcatatgagctctaggctcgaagaaattaatccaagccgttccattattaaagttctcatttctcagccacatggatgatcattcatgtcatgtacattttctttaaaaaatgctaatgatacatagaattaaaagaaatatataaaaacaaaaacaaggaacagcaaaaatatcaccttaaagacaacaaacaacactgtttctttcaatttgtttcctaattccgtacaatattatcatgaagtagaaacgtgacataccctctaatcaatgtcctacatcacgtgcatgtctttttcattatcttaacctttcaataatctttgcttaaattagatcttatcatcttaactcttaattaccatatatgttcaattatttttttgtag

SEQ ID NO: 30622 - DNA, 444 bp, Medicago truncatula
  Intron number 1 from transcript Medtr6g092630.1 (locus Med tr6g092630) derived from phytozome v7.0 (chr-ID MtChr6; po s 19509675 to 19510118)
tggatttggcaaatttgaaaccaaatctaagtcctgtatctaaaatgattttggggaattctgcgtaaaactgaatcgaggatagaatcagtaaaatcaccctgttaatctgccatgtttcagtattgagcttgatttttgagtttgtatattgttttcactcagataacaccgaaatgatccttaaaatctcatgccacatattgattgtgacaaaaaatggggtgaaatttaatgaacaattttcctatgtcaagatagagaaatatctcattgtttgaatgtaataatccattcattattacacctaaaacttgacatttttgcatattgatgcaattatatttagttgagagtcgcattgccttgttatagtaaattgattacagtgtttgctcttcttattacatgttgaagcttttaactatctgtaggcaaaagcaa

SEQ ID NO: 30623 - DNA, 586 bp, Medicago truncatula
  Intron number 2 from transcript Medtr7g089210.2 (locus Med tr7g089210) derived from phytozome v7.0 (chr-ID MtChr7; po s 19533036 to 19533621)
ttcctctcaggaaaagggtttggctcaatcacttgcattcttcaaattttatgctattgctattttaaaaacctatttttttaatttattttagtaggaatgttgttgtgagggaagtaatatttatgcactactatataaaggcaatggaaaagatggtagaaatccggcttaggtagtttgggcaggtagagagaagacttgtagattctatagtacgaagagtagatcagatggagggtggtcaaatcactagagacaaaataagacctataaaaactattcgagaaactattaagaaagatctagagattaatgagttggatagggatatggtgtcatttgatccatgcagccaatcccacttagtgtgataaggcttggttgctgtttttgttgttgccttgatatagtgatataataaattgcttagcatgctgatattcattatacatgcattacattgcatctcttgatgttcctttaaatggatccagatactaatatagtaatttatgtctctgaaattttctatagttgcttgatttttaatgattaaaaattgtttgcaaatgttgcagctgag

SEQ ID NO: 30624 - DNA, 518 bp, Medicago truncatula
  Intron number 1 from transcript Medtr4g089620.1 (locus Med tr4g089620) derived from phytozome v7.0 (chr-ID MtChr4; po s 18715107 to 18715624 reverse strand)
agcgtcaacgcagtgagcgcgaggcttctccagtaagattttcggttagctttgttattagatactccatatgtcttctaatgaatgacgaatgcacaattttaatctttaattatttattatcaaaaattataaaaagttattgaaaatatttgtgaagacaaatctttcaaaatcttatatattatgatttgtttttatattttagtaagaaaatattattaaaacatgttatatgaataatgaacatagtcaaacttgatcagttattttagggtggagagattattatttaaaaccactaatttatggctcaataagatgagatggttaacattatttactacattagttattgttgatgaatgagcatttctctttctcttatgaatctttgctatggggaagtaatccaaatggattttactggtttcatgtgaattaaaatcattttcttagttcataaaatattgtatttttaattaatttttttctctttacagagaaggaagagcttc

SEQ ID NO: 30625 - DNA, 448 bp, Medicago truncatula
  Intron number 3 from transcript Medtr4g092500.1 (locus Med tr4g092500) derived from phytozome v7.0 (chr-ID MtChr4; po s 19342184 to 19342631 reverse strand)
ttgatagagataaaccgttggcgtatccgtggaaagtgagattttctttaagtttgtttcctttgtttctttaattattttataacagaatcaagagagattggatttgatgtattttatcctgagtaaattctcattttagtccttaaatgcatgaggtttgtcactacagtacctgaacgtgtatcaaaattccgaaaatatacttgaatgtgccttttgttagtcaattttgtcctcgtcaactgtcttttgttggttaattttggtcctcggatgtgtctttcattactcggtttggtctattaaattgctatttgaagacacataaaaaactatagtgggacaccacctcagacgtatagggatcaaaatgactatttacactctttcatttacaagtaattaagtgattttgaaagcgggatgtgaactgcaggttgataac

SEQ ID NO: 30626 - DNA, 674 bp, Medicago truncatula
  Intron number 1 from transcript Medtr6g070080.1 (locus Med tr6g070080) derived from phytozome v7.0 (chr-ID MtChr6; po s 13113633 to 13114306 reverse strand)
actctctcagatctcagtcactttcaggtttgtttgtttgttctatgttttttcagttcacttctttgttccctttaattttgattcttttacttcaggagttcaatttgtttgttttattgtttgtttattttctttaaaattatcatttggttcaattcaaagttggtatggaattattctatgttgcatgaaccctagaaataaaaaaaattgggggaaacttgaaccctttatttcctgagttgtttgattcaattgggggaagcttgaacccttgatttcctatgttgtttgattcaattctattatttcgtttgtcaaaagcaaaatggcttaatttcatgatgcccatggataaattttttactgtttctaatttaggcttaatttttccctttttaatttgctaatgtgagggttaatacgaggaatctgaatcttgtgactcggtgactaacatctctaattctatctctaattcttagcttgattctaattattatgcattgtttatttatttctctttgttttgtgttcttagacaatgtgcctttttcaattacttgcttgagtcattgttcttattctccctttcttgttttattttgttatttattatttatgtgtgaattgtgcattttgtaggagtaataatgcaatgattcaaccag

SEQ ID NO: 30627 - DNA, 340 bp, Medicago truncatula
  Intron number 1 from transcript Medtr4g069580.1 (locus Med tr4g069580) derived from phytozome v7.0 (chr-ID MtChr4; po s 13313383 to 13313722 reverse strand)
cgaacttgctcatcgaccgcccatcagaaacagagtgagtctacaattccatcgcgtcgcactctgcaattttccattttctattcatcttcaattaatttatcaactatgaaaaaactcactctcctcatgaatcaacttgttatgttaatttctgctgttattttttttttttagggttttacttttgatttcttttatgaatattttagtcattgattaaagtatataactgatatagatacacaagttatatagttttagtttagaaaacaaatttctaccctatgacagactgtttccacattacagggtagtgtgagtgagctgattcttgtta

SEQ ID NO: 30628 - DNA, 591 bp, Medicago truncatula
  Intron number 2 from transcript Medtr5g099800.1 (locus Med tr5g099800) derived from phytozome v7.0 (chr-ID MtChr5; po s 39946410 to 39947000)
gatttacgaaactgagtatgtactataatattctatactttcaaggttatgctcttttgaaaattagtcctgtgcttgaaaaactcgataaaaatttcaatagtgactgacatgttgccttttgaaagtagaagcttaaagttttcctcatccacatggctgagattgagaatttgactagcttgactgatgtcagttttgacttatgacaaattcaaggatagacaaatatatgtgcttcaaaactaaatttgtattcgctttttcatgattttaccaaacagacatcgatcatatcacagtcggtagtaaggcgagaggactctagacttgtaaacttttacttctaaggaccaactattagcagatccaccttgttttgttaggctttagaactcttatattgtttatgtttgctaatatgcttgaatacaagaatagtccatggtgtatcatctcaatcataagagtttgactcttatattgtttattcctcgagagacggttgtaaaacgttaatcggtgtcactttaattaataataatttttctcttccccaatttttttaaaaggatttgttcattcacaggt

SEQ ID NO: 30629 - DNA, 962 bp, Medicago truncatula; identical to SEQ ID NO: 30272
  Intron number 2 from transcript Medtr4g103820.1 (locus Med tr4g103820) derived from phytozome v7.0 (chr-ID MtChr4; po s 22466817 to 22467778)

SEQ ID NO: 30630 - DNA, 763 bp, Medicago truncatula
  Intron number 1 from transcript Medtr5g036060.1 (locus Med tr5g036060) derived from phytozome v7.0 (chr-ID MtChr5; po s 15037555 to 15038317)
tgtcgtgttccaactattacaagtaagtagcaaatttatcttcccctactctctcaactatgtttttcccttctggttttactatatagtactccactccactcacttcattcccaatatactcatgagataacatttattaataataataaagagtgaaacttaagagtggtaactttttccaataggacatatgccccacatgtggtagtactatatagttcaatgggaagtgttgacatgtagttagttattaacagattattattgatttgattcaattttcctttggtggtatatacctatcaacctattggttgacaactttcacagctatatgtattgttgtaaccgtgaaagtgattgcaataattcatatctatatctttgattttccaaaattatttttggttaaagttttgtttgaatttactattgacaaaagttgaattagccatcgaaacttgatcattaaacgtgttcgaacactaaatataaacatctcttctacatagacaattatgttagaccaactgatgttcgttttttcattatgacattcagtgatgtatcaacatatagttaaatatgtttaaaatatttttaaattattgaactagtggtttaaaagttaacagtaattttagtcatatttcatagtgagaaaaatccattttgattaatacagtaataagttaataacaatcattttcatatattttgtgcagaaaaacctaagcatacacctgcttcaaacccactt

SEQ ID NO: 30631 - DNA, 808 bp, Medicago truncatula
  Intron number 2 from transcript Medtr5g084220.1 (locus Med tr5g084220) derived from phytozome v7.0 (chr-ID MtChr5; po s 32038664 to 32039471)
atcttctcaacgaaactcttttcaaataccaggttatttttttacttttcattactcttaacatatatgaaaaaccacaatagacctttaagatataatagtttagaattttttaatcactcaccatcaatttttaacaccttatcaactttattctccttttcatttaattatttcaaaaatatttttataagcttatttccttttgttctttatattgatatcatttttttctttccatttgaggaaaataaattaagaaattacctagcagaactatggtagtgtaatttatattgtttgaatgttgattagtttgccgtctcttcaaattctctgatgtaatttgaactgttggattaatctaagaggagtactagaaacactccattttcaaaggtcacttacgcgggtctcataattttatgtgggacccattttcaaagtgtgagacctacattaagaaaaaagtgagcgtcgtaatgaatgttggtctaagagtgttcttaacactcctggtccttaataggtcaaatttggttagaggtttgaaaaagatccaatttcaattataagtctcttttctttctctagtttttttatgtcatttcatctttctgttttgaaatggtaagcttatttctagtgatcaaatttcatcaaaacagaacaacgaagtattgaaccgtctataatcctagcttgaaggaagacaacaaaactttcaatgtctccgttaaggtagcttgaaatgtttctcaattttttggtaggtaccgaagattccgaagacattcttgtcaacaaa

SEQ ID NO: 30632 - DNA, 244 bp, Medicago truncatula
  Intron number 1 from transcript Medtr5g050020.1 (locus Med tr5g050020) derived from phytozome v7.0 (chr-ID MtChr5; po s 21496744 to 21496987)
aagtagatttgaagattgatataagcaaagcttgggttagttaacaaaggtgatgggatatagtggattatgatgtttatagaaacaactgattatcatgttctaatcaatttattagagttcgaatttgaattttcataagagatgatgacaacagtaacttggttctatccaaaacataatggttttctcttctttgtgctactgagcaagaggaagctagtggattgcttattgttttacg

SEQ ID NO: 30633 - DNA, 605 bp, Medicago truncatula
  Intron number 1 from transcript Medtr5g072890.1 (locus Med tr5g072890) derived from phytozome v7.0 (chr-ID MtChr5; po s 26037857 to 26038461 reverse strand)
gttcttacaatattgctattgttgctaccgactgtgtagagtccatatcttcacttaacatacttatttttcaattaaaaaccatataaaaaaacatgaattcttaatctgtcaattatatatacatcattaagaaaaagagcagtcaataggttcctaaccataatagatataagctttgcttagtgtttcatcaagctacttgttaaagtgttattataccttctatctgaaatttaactagctccctcctttttgtcctcaatttgaagtttattctatatcataatgaattgtcaatgtttttatttcattccactcttaatgtttttatacctctgttaggcacacaacaaaattcaataagctttgattcaatattaagatggtcccctaaagtctattgatccaacattcaattgaacttgattgcattgaactgttttattgagcatctactttaaagataaatgtaaaaagaatttgttttcaagtttttcaacaatatcaatcattttacagtatccttttgtatttgaatgctctcctaccattctacctctgcagcaggaaaaaaagaaaaagaaagaaactaaaatcgcggg

SEQ ID NO: 30634 - DNA, 869 bp, Medicago truncatula
  Intron number 1 from transcript Medtr6g062320.1 (locus Med tr6g062320) derived from phytozome v7.0 (chr-ID MtChr6; po s 11333010 to 11333878)
gtcgcagattaccctaaaaataagcgcgtgtattggtaggggcttactgagtatattttttgttttttttttcctgttaattattctaattctatattgttaacagaaatgatactcggacacaaaaccatagacaaatatacgacaccatatttacaaggatgggtaatttcaaaatttcaacattaaaccaaggacagttttggaaaatccattttatcttcttctttccctgctcattgtggtgcgttccctctccctacgaacctcttctctcttctctcacatcacctccaatcggcaagttctcctctgatttttcaccattgactgaagcaaattgatataggtaaatctccatctccttcatcatgtatgacaatctcatatccggttccttttacattcaattttaatttgatctgaaattgtggtgttcaatgtgttctttagtttttcttttgatggctatgggtattaaaaagaaaaaggtaaactatttaatttccctttgaaactatatttggtttgtcattaaacatgtttgaaagtttatttgggttttttttcttcatagctaaagttttatgtgtgaagctatgaacattgtgttgatttgtttcatgactgtgtttgccttttgcagtgaaaaaaatgtctagaaactcttctaatttcaattagacacaattgaaaagaaagggtggttagttgttttggttgtgatattgttgttagtgttgtgtggtattgtttagatagaatttttttcagcttttgagagttttatgagctgcatttgctgtgcttttgcagtggacattttatgcttagttttctgcccagcattgtgcgagttggctgctgca

SEQ ID NO: 30635 - DNA, 825 bp, Medicago truncatula
  Intron number 2 from transcript Medtr4g165460.3 (locus Med tr4g165460) derived from phytozome v7.0 (chr-ID MtChr4; po s 41674204 to 41675028 reverse strand)
tgagaagtttacagcttggttggactcgtcaaaaagtaagtgcattttccgagctactatgtttcagattgctactatgacttgatattttgtgaatggatgaacttgtttagtttttaaatgtaataataataagtgataagtgaaatgtgactggccactatttgccaatcgatgctctagtttcacactgcatatagttgtgctgttggaattatgtcttcactataccaattatcgaaatttgagagcctttccaactcaacattcattttgaattccggatagaaataaatggtcttgtgtgtttatagtaaaggctggtagagtatgcttttgttgctatttaagtaactagcaatttgttactttttagatggcaacatctgccacccttatcttttctcctcttgctacctatcctctctaatttttgctggtggtgtggggatgttacatgtttgtgtgtgtatcttacatgatcaatgaatgcatcaaattctagtctcaatgtagtgtccacatgtctataaaaagtaatttcaatgctggcattacaaaaaagaaaggatagacatgtgatggaatatcgtaatgtagttgcaatttgtatattggacataggtatacggtacttctattacttattctttgagcttttatgagtatataatttttctattggaatgtagctttattgtcactcaccactctaggtttttacttgctattagaccagcttctgttaaatatattagcttctcacgaaatttaaatatatggaatgcaggtgtttcatctattgattggctcttctaactgggg

SEQ ID NO: 30636 - DNA, 660 bp, Medicago truncatula
  Intron number 1 from transcript Medtr4g165460.3 (locus Med tr4g165460) derived from phytozome v7.0 (chr-ID MtChr4; po s 41675010 to 41675669 reverse strand)
ttcacgcgattcttgcttccattgcaactattcaggttattttttcagcattttcgtttatttttttagattatttgatcaatttaggttttgatttttagtatgatggtggatagttggataaggaatttgagataagaaaatgtgttgaattttactgaatggattgagattattagaactgcattttgtgaattttttattgttttgtgatgattgtgaaattcaattaggctatgtttatgtgatgtttcttcaatggcctaaagagtttgataaagtatacaattggaactatttttttagtaaaatgtaatttttgattaatatttgattgaagacttatataaactctatgggaagagtgtgttatgttgaattaatagtggtttgtgttggtatggggaaattgtgaagttaggtttggtttttagggttaattaacccaatcttgatttcacttatctacttgaacttgattatgattcagtttaagaatgaagtgattgggatggtatttcattaacattgacttcgagaaactgagatttgagctctttatgctgtagtgtactgtgagttcttattgtactcaatgttggttttttgtttttgggtaccccagtcgctgaggattcacttgagaagtttacagcttgg

SEQ ID NO: 30637 - DNA, 614 bp, Medicago truncatula
  Intron number 2 from transcript Medtr6g092920.1 (locus Med tr6g092920) derived from phytozome v7.0 (chr-ID MtChr6; po s 19712173 to 19712786)
gtgctgtttaggccgcttgtggtgttgacgcaggggtattcatgaggattgtcatatgtatatgcctgcgtcattactgttgtaggtagttccttctttaggggttggttttttaaggagtttttgttcgagtcggtgtttgtatgacaaccgatttcttcttctttgtatttttttcccacccgagcttattagtgctacttgcacgggcttgtcgtttaataatatttgccgtttcaaaaaaaaaaaaagatttgtacaaaaaaaaaatgtagtttagagattacttagtatttttatagtttatagataaaaatgattgtttaatttatttttttggttacaacctattgtttacgcaatgttcgaggaattaatctctacaattgtgcgcagaggatacctggtttacactaaaccgattgtttattcaataataaagagttattttatacctcaattaaataagttttttttttttaactaaatcaaaatgagattaaaaacaaccttcgatgtttccacctgtgcaaaaaggaggaacactgacaaacatagacatttaatactcgaaaagaatttcaatttttgtcgatgtttatggacaggcgggg

SEQ ID NO: 30638 - DNA, 598 bp, Medicago truncatula
  Intron number 2 from transcript Medtr4g096560.1 (locus Med tr4g096560) derived from phytozome v7.0 (chr-ID MtChr4; po s 20355989 to 20356586 reverse strand)
tcctccaccgcatccattaccttctttcaggcccggtatgccatattaattagtttcttaatctctagctagatcatgaaaattaattgagctaggaccttcttgggagtttgttgctaaatcatcagtagcataagagagacagtgttttgaatcaataatagaccgagagagcttaattattggtttgtttgaaataccaataacttgattatatattatacattaattgctgtctattttttatctttatagtttgtgtgtagcatgcatgccctacatataggtttggtagttttgtctgctagttttgctttttagactgttatagtgatcatagtgtttcttcttgcttcgagttccatttaaattactaatttttctccaagtatcacctacatgagaacttataatttctttcacaaaacttggttggctgttttgagtggagttttgtctcttatcatattttgttatattcaaaactcaaatcgaatgttagtaattagtttgtgacatgaagaaaacttgttagtatagtgatcaaactttgaacctacatgcataggtgtttagttggccggagatatctttggca

SEQ ID NO: 30639 - DNA, 977 bp, Medicago truncatula
  Intron number 1 from transcript Medtr4g159280.1 (locus Med tr4g159280) derived from phytozome v7.0 (chr-ID MtChr4; po s 40140854 to 40141830 reverse strand)
ccggccgcgaggttagggtttcaattgttcttcattcggttgatttttttaaagtatttaattaatctatattctgtgcatgagtgattgaatttatggaaataagctgattaatttgcttctaatagcataaatgcttatcattagtaataagttagtccaatcacacaagataaacacaatccaattgttttagtagaagctataagatgtttttataagctatcttggagaacttatggaaataagctgaaaacagcttataaacaagtcgtaagttgttttcatcagttctccgaaacagtcacacaagtgcttaagccagtagataagcttaaataagccaatcctaataggcccttagtctcggggatttctttgacttgtattgatacttttataaagacgatttacatatcaattgaaactattgcttttcatataattacattaacttgttgccacctttgaactaatagcaccaatgctagttcttagctctagtcgaaattcaccagatttgtcaattgctgattgccaatcagcaattgacaacaagtgatcacggaaaatagcggtttgttcaaagtatgctacacacacaacgatggtgctagtgctgctatagctgctattttacaacactgaaatacttaaatacgtactatagagctagtattggttcattgtttcacctggtttggattaacataattttgcaagtttcttcatatggaggagtaaattgaatctgttttttttagtaaaagtacaagctggtgctttataattcccattcatatatattgcaattttatttgtttttgtgaatttgaatacctaagcctggcattagttatcctattcattttgttgcatgaaggaatttatctgaagtatttgtctgacagatcgccatgtgttctttctgtcaatttgtagactttttccaaagttgttcagagctgggcatcaaa

SEQ ID NO: 30640 - DNA, 607 bp, Medicago truncatula
  Intron number 1 from transcript Medtr4g101340.1 (locus Med tr4g101340) derived from phytozome v7.0 (chr-ID MtChr4; po s 21988468 to 21989074)
ctctttcacttcaacttcaacatctcatcgcagttagttcctctccatctcttttccaaatcttttcgttaacgtcttcaaacatttctatgattttcactgattattctaatttcgaaattattccatgtcttttcatccattttctcattttcaattcacaattcgttttacggtaacccactccatcggttatgtccctttttatgtttcatgctcaaatatttaaacttgggtttgattttgattgttttgtttgtaatgatttgatttcggcttttgggtgttctgggtttccgaaaagtgcgtgtaaaatgtttgatgaaagtcctcaaagggatattgttgcttggacagctttgattaatgggtttgtttaaaacgatgttcctggtgaggcacaagtgatttgtggatatgagattgaagggtgttgtgattgatggttttctatggttctgtttattgtgctcttgtggatatgtatttcaagtgtattcattgcgaagatgcatgcaaagtttttttattttggtattgaaaagtacttatctgcatgtatatgtttcatttgaatcattttcaatttgttatttattgttacagg

SEQ ID NO: 30641 - DNA, 953 bp, Medicago truncatula
  Intron number 2 from transcript Medtr4g101340.1 (locus Med tr4g101340) derived from phytozome v7.0 (chr-ID MtChr4; po s 21989187 to 21990139)
ggatcctcttgtcatcacatctgcatcatcactcagtaattctacctctccttcaattattgtgcatattaatatgtgatgtgatataatggatttgcaataaatttttttatggggtactttagtttgtaaatataaccagtaaaatacatgtttcttttgcttacatcttgttcgactttctattatccgacatcatgattcattggcatgtccatctttttgggttttattattactagccgtttttgtcgtatgatgtctaaaaaatgcatagagtgaattagtgtatcctttaggcttctatgcttctatcgatgctttaaaacttcgacctcaacttcctttttccttgattcatgttggatgaaattgtttaaattaatttgctgttagatgagcatgcttaacctggaaacttagacatggacattggatacaatactgacacaaacatgtagacaccaataatactttgagaaaatagaagtgattgaatttgaatgtaaccacatgtgtcactctcggacacaagaaacaccttcaatttgaagtgtaggctgtgttgctgttatatagatgctaatggcttgtggtactgaattttaatgtttgaagtttatgggggtgggtgggtgagaaaacatgtgtcgattgacagggtgttggcagaagttggataggagctactttttcttttccaaatacgatttcccatattccgcatgtgtggcgctactccggtcttgagcataagcaaaaaaaaaagtaaaacaaagttgatttatttggttaaaaatttgaacttgatgcatctactttgtttgactctttttttgcttatattcaagatcgtaggaagtattttataatggccaaagatgccaatttttactgtctatttattgcaaacttcaggcaagtttccagtggaatcttcctctgtggatttg

SEQ ID NO: 30642 - DNA, 685 bp, Medicago truncatula
  Intron number 1 from transcript Medtr5g088390.1 (locus Med tr5g088390) derived from phytozome v7.0 (chr-ID MtChr5; po s 34243684 to 34244368)
ggagaccttttatcaaggtataatgagattttgaattggaatatgcatgcataacgagaccttattctgattttcacactttagatttagatatatatctcactattaccagtccacattcattgctaatactttttatgttactagatatgggcatttcctcatttgtcctcatttgtggttagggctggcaatgaaccgatgcattttcaaaaggaaggttgcaatactatatcaattaatgaacgatgcatttttttgtcggaaatgctcgacatgtgttgcaaccttcctttcttaattaatttactttttgtgttacttcctctcttaattttaacttggtccaaaataccaagtttactttcttttttgatacattttaatatactcttttggtacatccccacaaaaaaaaaattggtacatcccctcaaaaactctcttattagatgcatgtataaactaatgatttctattggtttaaacatttaaagttttagtattttttagcttagatggtaagcaatctcttcaaatttaactcgatgtcatatttaaatttagctttgaaagtgaagttaaatatatcgagggagtttttatcacatttgaagaaattatccgattagagaaattagtttttgtgattgaatgtaaataatatttggttaaaaaaattaga

SEQ ID NO: 30643 - DNA, 1008 bp, Medicago truncatula
  Intron number 2 from transcript Medtr5g088390.1 (locus Med tr5g088390) derived from phytozome v7.0 (chr-ID MtChr5; po s 34244486 to 34245493)
gtttcttggcttggtggccatcttttggcacctaggtgcttacgctattggaagattctctttctctttaattaattaaattatactaaaagacatagtcttcaagatattaatcttgtaatttttgcatgcataaataaacatgcttttttatgactcttatgggtgttgtttttgcaatgtacttttattttggaaaaaagaacatttaaaaaaaaaaattagagcaacatttaattatttgttatactatattactacctttcaaaaaaaaaaaattgatttataaaatttcaatattcttcacattggtagtgatactcgagattatgtgacatgaataattgtaagcactattacttgagaatcctttttaaaagcaactttaaagtttgagttcaatgcaaagaaactggaaaattgtgtgtactttccacaaggagagattaagaaagaaggaaacttctcacaaggagagattgaacaagaaaaccagcaatatcattatacttagaaacaactttgcatatataccggctcacaccgagtgtaaatctaataacttacactaaatttagaccattggattaaattgatctcgatcttttcttttcctcataataaatccaggtcatctttgacgttgaaacaactagaaacaagcaccatgatggtgatatacatccatacttgattgtttcaaaatacttttgtagcatccaaattatggaggattacataaaattaataatagttcttctgctaccttgcatgcttgacttttgtttttatcgcagtttagtatcatattgtatagctcaataattttattttttttctgatgataccatggacgagggttggctatgaaagaattcaagagccattaacgcttgcaacaaataggcattgaaattttcaggtgtgtcatgttgatatacttgccaagttatgcaattttattactactcaatgttgttatattcccattttaggctcataaggtag

SEQ ID NO: 30644 - DNA, 1016 bp, Medicago truncatula
  Intron number 1 from transcript Medtr4g158310.1 (locus Med tr4g158310) derived from phytozome v7.0 (chr-ID MtChr4; po s 39688208 to 39689223)
tctcaccgttgtagttgtctttgaattcagtataggtacgtagtcatatttttcatttattatgcaagagtaatatttacgtttttttcaacttacaaaatagaaataagttatttttcgtagatgagaaattacgaagtatgttgatcacttgatttgaaattagaactattggttttgatttgaaaccattttgatgaatgattatttataagcactatatatatacattgttgactaaggctttgtttggagggaggagatgatgtggctttaaggatttggaaattttagagaaaactttcttctttagggtaaatctcctacattttttgaaagattatttttttagagaatgattaattaatgcaattgatatatttttaatttaaaaaatattataataacatagatttagtttgaagaattggtataaaccctcaaaaaccctggttcaatgcaaattttgagttccttagacgagataaattttgtattttgaagaaaacaaaactcctaaaacactcccatcacaaagtcctatattttttttttacatgctcctcaaagttatcccctagtaagcctaagttggtcatatttgaattcagacctggattttgtcgatttaatctcaaaatatttaaagtcatatgtacggttccgattaagatcaaatgacctatgatgcctgacttccgcgatttgctgattgcaacaaatcgaagtccattcaaattcacttgaaataattttgtagatagttgttttgttaattacatattaattgcttaagcataagtaattttctgaggtggttttgaaatttgaaacatacatgacatggtaaatatatatatttttgaatgctttcaatttgttcttgtctatattggacacatgggatgtctttaatatgaaatgtcggatcttcaatgctttcaatttattttatgataaaaatgcaatggaattttgcaggggcaactctgagcaaggggtttaacagaggatta

SEQ ID NO: 30645 - DNA, 339 bp, Medicago truncatula
  Intron number 1 from transcript Medtr7g077880.1 (locus Med tr7g077880) derived from phytozome v7.0 (chr-ID MtChr7; po s 16545012 to 16545350)
ggagtttttatttctccttttcttttaaattcttgcatcattgatttggaagtgtaaaggattgaagagtaagagtgtaatttgatttcgcatgcaactcttgctaatttggaaggtgaggaatgataaccaaagttagcacaaaaatccaaaatttggggaggtagttgaccaaaatgtcttgaacaaaaaatcagcttggcactaaaaaaataaatgaaaaaaaaaaatcttaaaaaagaagtgatgaaaatgacaatataattaattaaaatgaattccgtagaaattattatctccaataattttgttcatgtatactgttttttatttttaggg

SEQ ID NO: 30646 - DNA, 855 bp, Medicago truncatula
  Intron number 3 from transcript Medtr4g138100.2 (locus Med tr4g138100) derived from phytozome v7.0 (chr-ID MtChr4; po s 34165466 to 34166320)
attgccggtcttggactgctctacagaagtatcatgtattacacttttatttacttcttcctgcttttctgtttttcaagtttctgctaattcttttcaatccaaattgataaaaagataacgtgaatcgataaaataaatattgtcctcaaacatgaggtattaccataaagcaatactattgtgggtgaaatactgaaatgcacatgacaattttggattttcaagtggtatcacaggtgaaaattattgaacatgaaggttgataattttgcaaatttcgaaccataaacttaaaagtacagcatttcctctggaatgctcttaataatcggtgtgaggctacacatgctatgatctatttattttgagttgtgactttctcatgaacattgacatgtaatccaaaatatctcgtattctggtggtgggacttttaagctaacctgaattgacttctaatgtatttgagtaaccataaagtcactattgttaccacagttagttaggcttagttcagttaggagttaaccaattttgttatagcttctgtagttacatatgtataaatacttacttgtacacatctcaatttacaatgacaaatacaaaactgattcagttacactttcttctctgaatctagaagcttctctgaagctagccaatcgttattacagaattataacaatataatggatctaagagtgatttctatcgagtgccatggcaaatataactgagctgatttcttgtggtaaatgcttgggaaatgtgtttaaagtatttgttataatgagtgaactgtgaagtatcttaagatttcttttcctcttatatgcagttggttttgaa

SEQ ID NO: 30647 - DNA, 232 bp, Medicago truncatula
  Intron number 1 from transcript Medtr5g045930.2 (locus Med tr5g045930) derived from phytozome v7.0 (chr-ID MtChr5; po s 19280643 to 19280874 reverse strand)
gtcacattgttataaaaaacagaccctgcaaggtttcttttcttatgtttttttttcttcatttttgatcatttttacttgcaccatgttgtgttgactttttgaaatatattgatattgtttcagttttttgtatgattgattaatcaaatcatgtatgatttatttgttatggtttttgtttgtgttggagataggtagttgaagtttcaacttctaaaactggaaagca

SEQ ID NO: 30648 - DNA, 647 bp, Medicago truncatula
  Intron number 1 from transcript Medtr5g048960.1 (locus Med tr5g048960) derived from phytozome v7.0 (chr-ID MtChr5; po s 20836922 to 20837568 reverse strand)
ccactcacaagttgccaccacaattcatctctcaggttactgttacttcaagataccactttttctttactttgattgcatggatcctgttttgttctcaagaaactgtgtagattgaaagatagaatcatggaatattgagatggctgcatagatttttcattttccatttgtgtttcaaatgttataagtgttgaatgaacttagaagatatcttgttattcaatctgggtttgatttggttttggttacccttttgaaatttttatttgatggttccttggtttgcctatagtgtcaaactttgaatgacccttttgaaaaagttgagatttttggatgttattttctttctttttcttctctatggtagatttatttatcacataggtgatggaacttgttttattttgatatggttatgttatttctatttgttttatgtttttctagtgttcattaattgtatcttatatatgtataatttgtagttgtatactttgtattgtatttatatatgcttgaattagttgtaattaaatgaatatttatcaatataaacttttgattatagcaaatgagtgataatgtatttcttttcaattgtggtaggtttcttcactatttcaatatttctgtcacttcaa

SEQ ID NO: 30649 - DNA, 992 bp, Medicago truncatula
  Intron number 1 from transcript Medtr7g008940.1 (locus Med tr7g008940) derived from phytozome v7.0 (chr-ID MtChr7; po s 1447464 to 1448455 reverse strand)
gtatagagattaccttggcgtttcagttataattttgcttaataagatttttaagagacataagtgagtgtttttttgggtccaaactcaataaacatcttagtcttccattttatgtaaaagcaattataattgtaattgcatattgtaagagttatcttctgttcttgtaattgcatattgtaagagttttcttgtaattgcatattgtaagagtttcctttgtatggttcttatttgttttagtttccttttaccacaacttatatgccttaagttatcaatttacagcctttcttgaagtagcaaaaatattttccagtaatgaaaaaaaattatgacattcatgaaggagcaaaagtattttccattgatgactgagagaggcaaagtagaacacaaagaatattgactataagcaatttaacctaacaaaaacaaaatagttctgcaattaaattgtgaaaatcggaacgaagaagtcctacttaatcctaatcagtttgatgaacatccctgaaaattattatcaataatatatgcctagtattttatctcaatgtttcagtttaaaagattaagatagaatggtgtttctgtggtctcttgtttttttagtccagtttcttttcctttactcattgttctctttcataattactacatgtttttcctttaattcaaccaaagtgtcgtatagatgaagccataccttgttgcaatttaaggaagactttatctttttgaatcaataaggaagacttcatcatctagataggctccaagagttttgcactacaattgcaattgatatttcaaggaaaaataatcatgcaagctttgctcaactagaaagctccatgagataccaaaagtcataggcgacttgaaaggtttcgttttgctcaacttctcaaacaactaaccttgaagcactagatctttctctcaacattcgttcagggtagaacggaaagcagttccgattgggt

SEQ ID NO: 30650 - DNA, 373 bp, Medicago truncatula
  Intron number 2 from transcript Medtr5g071640.1 (locus Med tr5g071640) derived from phytozome v7.0 (chr-ID MtChr5; po s 25380460 to 25380832 reverse strand)
ccaaagtaagttttcttgtctctatggtttagtctttggatgattaattctacggtgaacaaataagataagtcctcaaccccacgacccacaaaatcggtttgtgcatattagacaatgtcgtccttgaatttgtctgagttttgtttgttgtgttatgcagactacaaaacatgctttgttttatgtcgttgttgaatccttgaaaattgaatcataacttgcaaaagaacaattaatttaatttaaaaattcaaaaatgattctaatttttcttatattcctcaccttttaaattttttccattttaataatccaaatatgttctaataattcaggttactttgcaagatttagcggatacgtatcaacc

SEQ ID NO: 30651 - DNA, 862 bp, Medicago truncatula
  Intron number 2 from transcript Medtr5g011410.1 (locus Med tr5g011410) derived from phytozome v7.0 (chr-ID MtChr5; po s 3082289 to 3083150 reverse strand)
gaaaattcaaaactaaggttttatgtatagttacgtgctttaatttatttatgtgttttatccgattatagtgttcttatagatgtaaaaaaaaattaagaatcatcgggcttcttcatgagattgtcaaaacaacgtcaattgagactagaaagaaaacgtgtacccatattgtgttgaaagataaaatgtattattttctaatttgtcagcattagaagataaattttgtataagtttaataatgacctgaaatatgtatttccttatgtagtgggaatatggttgatgtaacactatgggaaaaatacttcgtagctttatcttttaccatatatttacattgagttctttgcttccattttgtagtcaatgacaatccaaatatatgtaacaattggtcaggttcgaggctgctcatcaacctacattatccagttattgagaagtttaagacttagtaagtttgcattatgattttacaatacagtgttagagtaacttattatttcacaatctgatatgattgttttttgaccatatttcttgaattgttgtcgtgaccttaacacttctcaagctcagagtcaaagcttcagtcagaacttaagtcatagttcggcttcttctcaacgtgcttcgcacaacgatttttccaatctgtctcaagttaggccaattgttgaatttataaacttaatcaaggtcagttttttttatgcacaaacatgctttgagtttttatacgcacaaattaaaaatacatattacatcattctttatttcatgtgcataatttttgttaggatacatactacatcactatttgaaaaacaactagattcaatcctaaccagtttgg

SEQ ID NO: 30652 - DNA, 475 bp, Medicago truncatula
  Intron number 2 from transcript Medtr4g083970.1 (locus Med tr4g083970) derived from phytozome v7.0 (chr-ID MtChr4; po s 17524768 to 17525242)
tttacagttgtttaccaatctcgtctcttaaaagggtatgtcacatgatgtatatctaacttctctaacccaatttaattcatatgcgtgttttaaaatggttttacaccgacaatcaatcacaacttgctaagaaaacaaacaaattgcattattgttacatctatggcagctcccattacagttacatatcagacatttattttgttttgattaataacactgatgttaacattctttatgtgcacacaaattgggtagacaactctttttctatttactcgttatgtataatttattccttgtacatatatatgtcagtctcgaccggtctcaagcatagttgtactctagacacattttcaatctaaagtgtatgcctatttcaaacctcaaaattcaatactctgatacttacttctgatttttctttcttgcagccaactctggaaaacggtgataaaagtaagcgcac

SEQ ID NO: 30653 - DNA, 379 bp, Medicago truncatula
  Intron number 1 from transcript Medtr7g084530.1 (locus Med tr7g084530) derived from phytozome v7.0 (chr-ID MtChr7; po s 18267503 to 18267881 reverse strand)
cactcactgcaagggaaatcttacggtatgcttctttataattttatattgtttgattcttgaatcattatgattgaatatttgaatttggcatcaatggtttgtctttcctattaacgaccccttgtcgaaacatgcaattatttagcaaattacatgcacatttgatataaagtgaaatatggttatgactattttggataaaccgggtatcctttatacacaagtcgggtaggaccatagtatggacaacaaagttctttctcaagagttttttttttaactctgccgcattcttaaggttggatttgcacatagaagaaaaaaagtatagtttaaacttgtgtctaagttgggtttcatcatatatgttggtcag

SEQ ID NO: 30654 - DNA, 1030 bp, Medicago truncatula
  Intron number 1 from transcript Medtr7g026300.1 (locus Med tr7g026300) derived from phytozome v7.0 (chr-ID MtChr7; po s 6694823 to 6695852)
agagaaatattggaaacaaatattggattgagttggtaaattaattttttcatgatttgacattttttttatatttttgcagcattatttgacattaatatatttatttaaagatattttacattatttataatcaaagtaaaatttaatataatcttctgctgggagttgttcatattttcaagcaattttctttacttgtcttaattttagtttgtatcttttatttttgttttgaatattgtaaaaacaatacaaatatttgattctatttttttagtcatattttttatttcaatttcttttgattctataaatttctaaaaatatttgttttcgttttatttagcttaattatatttttaagtcaaatattctaaactaccaaaaacatttgtttttattttatgatgttatctttggttcaaatattctataaattcctaaaaaaataaaaatatccttttaattctctttttattaattagctaggctacgatgttgccttcatatttctaataattcttaaatttttaattaaattaatatcagacattcctctaaccttatttttcacttaataattcacgtcagcctctctttcattcctaattaatcaaacaagttttgaataatttggatcttaattaatacttgaatttagagcagagatcaaacaagttgaaatactcttgaatcaagttacaaaagcatgtttgtgatgtgttctgtttttatcatttgagatatcaagtgagattaatatcttattattgtggagagttgagagaacatattaacccttagattgaagagtatttaatttaatttatggattaatatgttcttttctcacaataaaaattgttctcacttgacataccctctttaattgtttttatctcttttaacttatagaatgccccaaaacaaaattaacctgatataagttgaaattccacatttttgaaagtttattcgtaacctctttcaagtgtattctttcaactgtctcgaattgtagagttcc

SEQ ID NO: 30655 - DNA, 920 bp, Medicago truncatula
  Intron number 2 from transcript Medtr4g160130.2 (locus Med tr4g160130) derived from phytozome v7.0 (chr-ID MtChr4; po s 40522776 to 40523695 reverse strand)
cactattgtacgaacgagttttctttcgttttcaggttagaattccatgagatcattggtattagtgactaagaaagaggaatgtgatgtcaatgcttttgtaaagtgttgaattcattctaaagcttctattttttgaatccctatgtgcatgcctttggcggtgcgaattttttttatgtctagaacagatagatgatattttttgtattcattattagtcaaatactagaaacattgcatcgttttacttgctttcacgtccgaattgtttgtaacataactgtatctgcagttgccaaccagattattctatatttgtgtggttctttgtaattgcatatcaatatcacgtgcttctgcataaacaagttcttctgatgtcaccaattcattttatgctgtttacattttctcttctgatgtcagcaattcattttatgctgtttacatttgctttgtgcgtgtctgttaattgtttggggtccgtagaaatgctatgtgcttctttgtagtctgccactctgctgtagaaaatttatctctaatctttagcatctcctagctcctcactgctttgttaattaccaatttactgatagacactttgctatttatcatctgatacatatggagaaagaggtgaggtgtcagggatttagggttttcattagattgcaggaggttaatcctttggcagaacatagattgtaaatatggacatggaaaatgtattaatgtaaattgtatggggatatattttggttgataagtagtcaactgaagtttaacttgcggctgacaaccttgtgtgatgattttaatgttttttcgtttccattcaaactgtttaatacatcttatgcaacatcacaccatctgtaggtttggaggctattcacaaacttctttttcctcgg

SEQ ID NO: 30656 - DNA, 586 bp, Medicago truncatula
  Intron number 3 from transcript Medtr5g075060.3 (locus Med tr5g075060) derived from phytozome v7.0 (chr-ID MtChr5; po s 27262918 to 27263503 reverse strand)
catcagctgcagcatcattgccttcattcaagtaagtttgagtttgtttctaccacttcagtttgtgcctaaagtttgatgaaatatttagatttttcctttgctataatttttatgtcttattcatcaattactttttgaacggtgtgtactgtatggtgttcataacacttctctcttaactattgataaatggattcgtagttgatattatatgcacatgcataacaaatcgttagtataatgaaacattatttatatttggttttttcactttactcgatttactttagaggaggcaaatcaaaattttcctaaaaaaaataaattaacagtgtaaatgacttatttgctttaaggtaaataatatagtaaattttgcaagttgcatatggtattggtatatggtatgacatcaatccaaattatatcttcacttgaaaagtttcatgcatttgtttgctatttaaaaaaaatattttacaagtgataaagcactattaacctatttataactaatatttgatcacaattatatgatttgtcttctttaactgtagggagaaacagccagaggatattggta

SEQ ID NO: 30657 - DNA, 262 bp, Medicago truncatula
  Intron number 2 from transcript Medtr5g075060.3 (locus Med tr5g075060) derived from phytozome v7.0 (chr-ID MtChr5; po s 27263535 to 27263796 reverse strand)
cccaaaatttgtgagtttcttcattgtttatgtatatagtttttcctttaatctgttgttagttgctgtttattaagcattgctttcttcacaaaaaaagaagaagctactgtatacttttgatcctttacgctatattgatataacttaacaaaaaagggactatttctaaacaaaaaaaaaatataagagtctaaaagtataatttagctttgtatgtctcacaatccttggttttgatagtattttgttggatttgtag

SEQ ID NO: 30658 - DNA, 730 bp, Medicago truncatula
  Intron number 1 from transcript Medtr5g087760.1 (locus Med tr5g087760) derived from phytozome v7.0 (chr-ID MtChr5; po s 33949975 to 33950704 reverse strand)
ctacattgggtgctattcacatccagaagggagttgtttgttgatcctcattttgtggtaagataatataataaaatatttttgtaaatgcaatcttaattcatttactgcctaatagtcacataatcactaattcaacgataaaaaaatcatattccatgctgttatttttgtatatattatgatataaatgttggaaataaataattaaagagaattatgcacaatatttttataacgaaaaaaactatcatataataaaatgaactcaaagggatataaaattctcattattaattagaattttaattatttataaatattaaaatatatactcaatggatatctatttaacaaaaatattgtgttttagtttgtcgtgaggaatcaataacataatttcttctttactttttcaagattaaaaaagaataatatatctttaaataaaatataaaatatattatggtttttatttgacatggtgcccgttaattgataaggatgcaaaggtaaaaacaaatatttaaaaagatattaatagtttaatgtgataataaattagtgctcaacaaaaagatataatttttgttgacatgctttagagttatattacttacccaaaattgatgtgtttgatgtctttcatgtggttaaagaagctttgttaaaaacaataaaggaagtagcaggagacaaatggagctaagtactgcttggaaagttgctt

SEQ ID NO: 30659 - DNA, 773 bp, Medicago truncatula
  Intron number 1 from transcript Medtr5g096470.1 (locus Med tr5g096470) derived from phytozome v7.0 (chr-ID MtChr5; po s 38330547 to 38331319 reverse strand)
aggtgctgcattgtgggtcttatcaaccataactaaattttgagtacacaatgtttatggaattgtgttcctgttttaattttagttttaagaggcattgaaaacttgtttttttttttttttgaagaggctgaaaacttgttttattaaagcatcatattcatgtgtgcccttcgagagcaaagcatcacgtggccacctctttgtttatttacctaaatttttggttcaagagaaaaatgagtgcgttgcatgcacgttactattggtttacataattacattagttgtcaaagcaagcttttttgtttgccaaagttgtcaaagcaagcttagcatataaaaaactggatttgaatgattttggagtgaaatttttctcttatactatttttatagtgccttccctttctttctctgataaatctatcgaccatgtcaccatcctcccgaaaagctcatgtttctaaaggatgttcttttataggaaagcatgttttaaccatatttatcgaatgggactaaaaatagtgcctcagcctgcctgcatatattgttaaagcaggtgttgattattcttgaagggagccactatgataattttataggttaaatatatttttagtccttacgttttgcatagtccctacatttcattaaatgtttttaaaattcacacatttgatctctgttatcaaattagtctctgctgttaattctctaacggaatattgatgtgctagttagtggttataaagccgtaagaaagttca

SEQ ID NO: 30660 - DNA, 799 bp, Medicago truncatula
  Intron number 1 from transcript Medtr7g010400.1 (locus Med tr7g010400) derived from phytozome v7.0 (chr-ID MtChr7; po s 2244274 to 2245072 reverse strand)
acccttcacgtttcttattcttcttcttcaaggatgtatactagtctcttgattccttaattgagtttttatttctttctatttatatttttatgatttgtttctgtttttgttttctattttgtgtttgttgtttactcatattcttttttcatgtttgttctcagtagttcttgattttattttttttcaaatatcattgtggaaatcatgattttttttccacatatttatactttttttgatttttttttcttgatattttgttctcactaaccttaattgtggatatagagtatgatattttgtagagaattattcttcttcttatgtaatggctaaagtgtatgataatacttaatcatcgggcatgttcagactcgttgctcttattgctctcagacacctacaaaattaaacatttacatacaatgacaatcaactatcgttcacttcctacaatagttaattgtcgtttgttgtacggcaacgacaattaactatcattcctgtcaaactttttcaatacactatccattcaccaattttcttttctcttccatccaaaaacctaaagttcacttttttgttgttattgcaaaatctgtctcaaatcattgaagaaggaatgctagaaggtttctatattcatttgacgtcaagaaacatgtattgtatctttttaccggtttacattattgcatttctctgccatattttcgttcgttatgacatgaacttgtaacgatagttaacttatgtagctgccaacaggcccgttacttggcaagagcaagga

SEQ ID NO: 30661 - DNA, 383 bp, Medicago truncatula
  Intron number 1 from transcript Medtr5g018140.1 (locus Med tr5g018140) derived from phytozome v7.0 (chr-ID MtChr5; po s 6611133 to 6611515 reverse strand)
ccaagaagctctgtccaccaatccactaatcaaaggtactaactaactgattgcttcttctttttcttttcactaattactagttcggaatggattaacttatttgagattatatgcggacataagtacttgtgagactgttgctttgggagtctgggtttgttccatttatctaaactgactttgaattgagattggatagcgtagtacggaactctatgtagattgttactggtgaaatatccaaacaattttacttcatttcattgtattccatttaacttcatttcaatacaatacaattcaatccattatgcttgatttagaaagctattttgttttgactagacaagttcggcggtaacatcttctttgttaccttc

SEQ ID NO: 30662 - DNA, 390 bp, Medicago truncatula; identical to SEQ ID NO: 30532
  Intron number 2 from transcript Medtr5g021500.3 (locus Med tr5g021500) derived from phytozome v7.0 (chr-ID MtChr5; po s 8207177 to 8207566)

SEQ ID NO: 30663 - DNA, 920 bp, Medicago truncatula
  Intron number 4 from transcript Medtr5g021500.3 (locus Med tr5g021500) derived from phytozome v7.0 (chr-ID MtChr5; po s 8209534 to 8210453)
tagaaagggtctataaagaggtataatggattctttttcattttcaattgcaaaatatttttggcacttgacaattatataatatgatcattactttttgtgtttgtggttctgttttttatttgagacccattttaactgatgtgaaaaaaaaattgtcaggaatttatttgagacacaataagaatgttcaaataagatgaggatgttactttctgacagtattgtatgagcccaaactctagaaaaggataggtcaaataagatgaggagttactttcacaatccttaagattcataatattctctatgttttagcttcaatttttttctatttcatttatttataatatggcttcttccaagaaatctgaattggagctctttcaatctagctatgaacctattgtttccgttattgagaccaccagaatgatcacattaaggatttcagaaaaggtgattatatcatgcttgcaaaaataggatattaatttaaatcatgcacactttaactttccgtgaaagaaaagataatcaagcttgattccttaaattataaatactcttggaggaaattccagtgcaaatagcagagaatcatgtgcttaaatttttacatggaaactcatacatgaatgcatataaaatttgtagtcaaacaaactgttatatgaacaggttaattggttttctttttgtttttttatttttatttcattaagttatcaatctgccatcacaatgattgtgctatctattttgaatacagctatgtttcacaaaattgtttgcttcttgtctgtttttcatatccatttgttaagtatgcagtggattagcaagtgttaaacataaaccggcactaagcactgaaactaacatgtgatatgactcactgtcattaggaaaagaaaagg

SEQ ID NO: 30664 - DNA, 884 bp, Medicago truncatula
  Intron number 3 from transcript Medtr5g026170.1 (locus Med tr5g026170) derived from phytozome v7.0 (chr-ID MtChr5; po s 10544232 to 10545115 reverse strand)
aagaattttcgaatagactcaaatacacgaagcaggtcttttcattatatcttacattgtttgattatacgatgctataaaagttaacgggccaattgccgccaagatcagcaattccctgtatgtgttttcatatatcaataatttagagagattggtggcatcttgttgactacttcatagtttcgaatccacgactctagaatatatcaatgctccttgataatatatgtatctttgaaataggtcaaggcttattacttttgctagtttttgtaatcatatgatgtggtctgtagcaccagagaaagaaggagactccggcttaagtcttgaattactgattaggattattttatcttcttaaatttctattaattaggattttctgatttggattactctatctgttttaacttgataagattccgcataacataattcttatatatgaaagtgtgatcaagatatcttcattatttgtagcctttataaggatggacccaggattagaattatcataaattattcacgacaattgatacacttaaattttcattaagttgaaacttatgctagtgtagtgtgtcattgtttactttctgtgtctgagcataggtttaagatgatgttttctgtacctatatattctttttgttgcggttcaattgcagaatttgatgtgtattgtgtgtttgattagaaactctgctgctatgctctgaaaaagcatattgtttcttgaattatatgatttaatgttgaatgcaaaatgttttgtatttgtttataaagttgtctcaggggagtattatacaccgtagactgtacgtaacttatgaattcgctactatatttttattctgccagactctatcaactac

SEQ ID NO: 30665 - DNA, 496 bp, Medicago truncatula
  Intron number 4 from transcript Medtr4g142850.1 (locus Med tr4g142850) derived from phytozome v7.0 (chr-ID MtChr4; po s 35681590 to 35682085)
ggcaagtttctattcttccttttttttgcctctgaattcttccaatagtacatttatttattgtgttatgtgaaatgcctcagaatattgatgaccatgatatattcagtggatagaattgaatgccattgctgtgttcttgttaagatgacactacttaagatgtattctgtaatttgctttgaattatttgttttttgagtagtgctaaggccaaaactacttcatgtttaaagcttttttgttgcctcacaaaattttaagcacatggttaaatatttacctaaattaattcacattttacattttttaagtcatttttctgacctctgctgggaatgtttgctgacccgatgatgatattggccacttctatatccattcttatcaaattgaggctttaatgatttagatccttgtgagagttgatatcattcatattgattgggaatatcggccagtatatcgtggaaacaactggtttgttagcgaattg

SEQ ID NO: 30666 - DNA, 568 bp, Medicago truncatula
  Intron number 1 from transcript Medtr6g014910.1 (locus Med tr6g014910) derived from phytozome v7.0 (chr-ID MtChr6; po s 3637528 to 3638095 reverse strand)
taaaattaatgtaagtagatgaaataatttttttacttttcattcaactacaaccatcgattatttgaaataacaaaataatctaataacataagaattaaactaattttatttatgtttttctgaaaaaatcctcaaaacataattaattaattattaatatttaatttatatttggagaaatgtttcaaaaaaaacataaattatttttgacatcatcaaaaatttaactaaaagaaaactaaggtggaaattatcaccccggagagtgacgcagcaacattgaccaactggtactattccacaacatttgtgcacgattatttataatttagtttacctctatgagcttcaaaagcttccgatgtggaactaccgattgttctacatatgtttcacaaaacacatgttcatagagattgaagttaataattactactactactactgctaatattagcaattattctgaatgtcggaatgttgtgagttgatggaatgtgattcttcaaaaaaattatttactgatacacttcaacaccactgtggataggttaggcaaggaaaa

SEQ ID NO: 30667 - DNA, 1024 bp, Medicago truncatula
  Intron number 1 from transcript Medtr6g022710.1 (locus Med tr6g022710) derived from phytozome v7.0 (chr-ID MtChr6; po s 5109419 to 5110442 reverse strand)
gagagttcccaaccctagatttcgattcagctgaggtaacaacaatctccgattcttgtttcattgattcgatctatgtttctttgttgttcaattacatgaattaaatgaatctgtttcataattttgttcggttaatttgcatgttttgattttgtttattgtttgagaaatttaatcatgaatgaatcgatttatgattgtaatattggatattgaatttgtttgagctaaattttgtatgagaaattttaattttgaatttaatctgattctgtttattgtttgagaaattttaattatgaatcgatatgattttgtaatatttgattaattctagctaatttaaccgattgttaatctgaaattatagatctgtgtattttgttgttgaaatgatttaattttgtttgaaaagttatgagtttttgatgtttttattgtttaattatggatctgttaatacagtactgtgattttaatttggtttcgtttatttaattaaaatggtcttcaaatttgagctgtgtttgtttgttgatgtgaaaatgtaatttttttgtatctaataacatgagtctggtttatcatgtttcataattggatctagattatgtatgttgaaagtctgttctgaattttgattaacaagtacttttttgttattctgatttattgattacttttggggtatgactcttgtgttgttggatttggtttgatgagatcttgtgtggttaagttgattttaaatttcatgttaatattgataagctgagttggattattgcttgtctgtttcacttattatcatttagcttattacacaatgaattagttgtttggttaagcatgatttgtttattacaatgaaataatttacgaattagcatgataatgacttttgaaactgtcaaatgcggttcaattattttagtgaacatgattcagaagttttgaaactttgcatggattttcatttgttatggttttttactgttgatttctgacttttgtagttttt

SEQ ID NO: 30668 - DNA, 917 bp, Medicago truncatula
  Intron number 1 from transcript Medtr5g088520.1 (locus Med tr5g088520) derived from phytozome v7.0 (chr-ID MtChr5; po s 34314143 to 34315059 reverse strand)
gtatcttggtacgaagatatttgattgagattcaatagaaaatatatttttctcttacattactttctccccagccttattatttccttttcatctttctctctcacaaaattaccttaatcttaccgtaactttcccaccttaaagtcattgaatctcaatccgaggttattactataaaaaagaatagtgtcttttggatggtgtattttttttattctaaaaaacatcaaattaaaattacatgtgtgacatttcaagctaacgttaaaaatgtctagaaaacaattataaatgttaactttcttaatatttaagtggaaagaattcgtgcaagtgggcagaaaataagtcaagagaaaacaggtgatatgatatgaaaataaaatgactaaaaatattgtgtttttaatagaatattgaaagaaagaatcgtaaaattttctctttggttaaggtgaagcagcatgtaatagaacattcttcggtacgtatgtcttctcaatacaaatatgaagatgcaaaaagctttggaaaaaatcaagttacactctaatttttcatacactgtcggtataaaaagttttcgattgtcaataaatcacatccaatcatgtaattttaatgttcgtgtatagttagtatcatgtaacatacctagatggtgagagtgctaaagttggttaaactaaaatgcatctgataaatattgttagaaatgtttttataatgaaataaaaaaatagtattggatacttgcttggtatgtatcacaaagtatcacacccatgtcgatatcaaacatgtgtgtgatatcgatactttgccatgttcgaagtattctgtgcttcatagttgcagataagttattgcctttttatttgtcatagctactgcagaacagaacctttggttac

SEQ ID NO: 30669 - DNA, 912 bp, Medicago truncatula
  Intron number 1 from transcript Medtr5g036770.1 (locus Med tr5g036770) derived from phytozome v7.0 (chr-ID MtChr5; po s 15399485 to 15400396)
tactacgttataagaaggaagggaaagaatcaagggtatgtattatttaataatttatctatatcaaccaacttatagctttttttgctttttaacaatattagtattattggtttttaaataatttgaatattataggacaagattcatttgcaactcatttatttcccataaattccatttcatgctaattaaccctccttaatttttatcaatgaaagaattttatagcatttttctccaggaaattaaatttggggaatttgaaattagtgcttaaaagtaaaaaatataaaatttcttcattattctttcatgtaagcctagttgaaccacgatcatcgaaatattgtctcagcatatcattggagcacaacaccatgattgtttttactgtttatacaaaatcaattctaaggtttagtctaatggtaaaaaaacaggctttggacttggaggttccgagtttaaaccatgctagtgttttttgaggttggtaaatataaatacctttgtgagtactcattgaaccaggaaatattatgtgctttggactgtgatacattcccctaatcctaaatttaagcatctatttcataactttattgtttcattttacttgtgtgtttaacaattttaacatttttaatcctctttttaagtgcatgttttgattgtcgatgagtttggaaaaataaaggtgacatgtgattttgttaaaactctaaattatagtttttttcaaaattgtggtaacctatcatgactcaaccaatctcacacccaactcaaacatgcgctaaaactttaaggaaaatagattaataagtaatagcggttctttcaaaattaattgtgaattttgaattgatttcagccaagctagtacaagttcaaaggaagaggacaaga

SEQ ID NO: 30670 - DNA, 675 bp, Medicago truncatula
  Intron number 2 from transcript Medtr7g087270.1 (locus Med tr7g087270) derived from phytozome v7.0 (chr-ID MtChr7; po s 18663949 to 18664623)
gccagccccttgtttccaattcactcaagttagaggttgcaacctcacttccaattcactcattcaatactcaagttagagaaagcaagcttatgagagagttaaagggctgaagcagggtagaaacatcaaagccttgtagatcaagtcgactgatgcaacaacatctcgatatctcctatgtaattaatttctatttgtgttgggattaagtgttattggttagggatctaatgtaaatacttggtctagatgactataaataaattctatttcgttatatctgtgtctttgttactgctcttataatacttctctgacgtgcaatctgagattgatctttccactaagggcatgctagaacgtacataccaataatgaaagaagaagttaggaaggatgtagtaaaactcttagaaggtgttttgattactctatttcggacaacgctttagtaagcccaattcaggtagctccaaaaaaggagggatgccgatgataaaaattgataaaaatacatattaacgtggtcattggttggagaatgttcatagcttatctacgattaaatcaagcaaccagaaaaatatcaattttcattaccttatataatcaaatgttgtttagactagcagaccagaccttcattgtttttttcttgatagatactctagt

SEQ ID NO: 30671 - DNA, 562 bp, Medicago truncatula
  Intron number 1 from transcript Medtr5g021450.1 (locus Med tr5g021450) derived from phytozome v7.0 (chr-ID MtChr5; po s 8196169 to 8196730 reverse strand)
ggttcccccaaaccctcgatcactactctccctatgtactacttgtttcttttctcttctcaataaaatcaaatgcaattctccaatttgagtttatctactgatacaaactcttttgagacagaacttatgaaaatagcttatgacatatttcataaattgttttcagcttattttcataagtttttcaagattacttatcaaaacatcttatacgaaaataatttaaatttattttatcattttttattgaaatagtttatagataagcgcgtatcatgataagagctaatgacataagctgcaaattaagttgtttatcaactaaagcatacatgctggttgtaaatgaaactgttcaaaaagtatgacattatgcaatgatttgagaaaggaggatattttgataggagtcttgtttttaaaatattctgttaagtttttcacgagtgtagaatctgtttatccactttacgtaacacattttaatttggtctattcttcttatttgtatgctttataaattcactgcaggatcaccgcaaattccaacagcgttact

SEQ ID NO: 30672 - DNA, 770 bp, Medicago truncatula
  Intron number 2 from transcript Medtr4g132910.1 (locus Med tr4g132910) derived from phytozome v7.0 (chr-ID MtChr4; po s 31696935 to 31697704 reverse strand)
ctctacagctactcaaaattcctgaatccaggttagactatgatgtcattcataatgcctttgttagctggacttttgcttgtaaagaaataagaatctaaagacaacaaattggtgtttattctctctctaactgtagcatgtaatatggtgaaggattggttataaaatttattaatttgaatgtaatctctatcagtgaatcttagtcgttttaatagtcattttgatcattgaatctgttatcaggtagtcaatttagtatgtgtttttcgtcagtctatttagtgcataaaattactaacaaagagacactatgaatgtgtttgcaatttcgatacatttagtgactagggacaatgcctcatacatacaaggaccaaaatggcggtttgtccaaattagaaatttgccgaccttgcagttaattacgatattttagtaattagagggtagttgaattggcaaccattttttgttgggattcttgcggagttgcagttagacaaagagagtgtgtttctcttctctgatgagcttggctctggtatatcaggtcttagtcacttatggatgatcaatataataattttctggtttattttttcattcattatttatcatttctctgctctatcacaataatttatacgtaccctatgattcattactctcacattcctccctgtatacgatccccgaattatactatttttgttctgttaaattttgaaggtttgcttccattggagtcttagtgtccagtttgg

SEQ ID NO: 30673 - DNA, 858 bp, Medicago truncatula
  Intron number 1 from transcript Medtr5g024720.1 (locus Med tr5g024720) derived from phytozome v7.0 (chr-ID MtChr5; po s 9834356 to 9835213)
ggaggggaggggagggacacagtattgttaccgccgtttgtgctttcggagagttcttgtctgtcatgtcatgccactgtgtcaatcggccgatatatgtttttttatatatcaatatacatgtttgcgttcagagcttttctttggactgctatatgattttgattgttatgtaataagggaatcaatttaggggcattgttattttttcgtgaaggcatgtttatttgatggacgttatgtcgttatgtaatatatttacattgatttacatatgagcataaatgttggtgcattccttatcaatcaaaatttcacataaatggcacacatattttagtaattatagtcttccaaagaaataatttgtgtcatttatcttttggtgtctgtgataaaagacagtagttttcttgaaatacgggtcaaactggttcatcaggcctcatagctcgttcatgtttaggctgggttcaattttatatgtgctagcccactggagcgaggcaggctaggatgaacttagctcatttgactgctctactaactagtagtagtttgattttacattcaaatttatttgataagctcagactcgactgtaaaaaatgaaatctaagcattttgtggcctgcatttatgttacacacctaaaggattcacatgggaaatgttgtgctaaattaaactgaagtactacctccgacctttattataagagaaaaaaaaaatcaaaaccaatgtattgattaattaccaatgtaattaaactgaagtactccctccgaccctgattttatttaaatattttgaaatcttgcaggccaaccagtggtgaagttgcaaccgacttggaag

SEQ ID NO: 30674 - DNA, 475 bp, Medicago truncatula
  Intron number 2 from transcript Medtr5g068820.1 (locus Med tr5g068820) derived from phytozome v7.0 (chr-ID MtChr5; po s 24718369 to 24718843 reverse strand)
ttgttcaagtactcttgtaggtactacttgaaaaaattttacttacttgttttatggtgaaacagatagactactagaaaagaaaagaggtcttagatctcttaacaatagacaaatcaatagaaacttgtgtaaattgcatgataactattttttgtataagttgcgtgataactattttttgattcatttattttatttttgttgggattttatgctgaaaatttgagaatgttatgtttttcattgttagatattgatttgtgagaatgttagatttggtgcttttgatttcaatgaaaaattgggattaagaatagtgaaaacaattatgtacaacttagtgatgattctagtgttagatctatggctatatttgatatccacatacaaatcttgatcttcttcttctcttcttcctttatggtctcttcttcctctctcgcctcttttgaagttgccgaaaaacgtattt

SEQ ID NO: 30675 - DNA, 491 bp, Medicago truncatula
  Intron number 1 from transcript Medtr5g068820.1 (locus Med tr5g068820) derived from phytozome v7.0 (chr-ID MtChr5; po s 24718880 to 24719370 reverse strand)
aaggtaagtcttctttgattcaaaacccttttgctggctcggtgtgttatcgacaattgtactgattttcgacaattgttgtatttatgttctaaaacccccaaaaacaacaatatgtatacatcacatatgtaaaaaccacaaaatctctattatttcgttctaaaaaaactcatacttagttttttatttttgttaggttttggtttttctcctgttcattaaatcttaaatttattgtgactttgaggagattcttgaagaaatttcaggtattgggtattttttttatagtatgctttgtttttcttggtttaaaatttgcttgttgtgttagatatgatgagggatatatacatgtatggttattcttgtagagttacataatgatccaatttatttcatccaatttgtgttgtttcagttgatttactgttttagtttcataacttttgggggttttgattttacagagtgagatagctaagcag

SEQ ID NO: 30676 - DNA, 815 bp, Medicago truncatula
  Intron number 1 from transcript Medtr4g033020.1 (locus Med tr4g033020) derived from phytozome v7.0 (chr-ID MtChr4; po s 8079848 to 8080662)
caaaaacctctctctctctcactctcactttgcaggttagtaatctttcttcgcttctgaattccaatcattgatcatcatcgtcttcttcttcctcttagctacatcatcttttacacttcaattatgtatttttttcttactcaatttttcaatctctcataatcttcatcataacgcgtctttttctatctctatagcgattctgtttaactatatgaattcaatttgtcatctttacttctaacctgtttttacggtttatcgtctttgttcactgtaactaacaacaacatcttgattcaacaatttttttggtttaagtttgtttattattggtgtgagttgatttgattgactagttagtcaatgttaccgacacttctgatcaaaggcgtgttcgacacatgtgattactttcaattatataatattctcagcagtatcttcagtgtgtgtgtgttttgtgtccatgattcgtagctagttactagatctacatacttgaaattttcatattgttttctgtagcaccgacactcttgaaggtgtgtccaacacgtctcattaacgcatcaatcacactgaattatgttattttctcaaaaatttataggtgtcagtgttgtgtccatgtttgtgtccatgcttagtagtttttgattcatcatattttggttaaatttgttattttattggtttgatttgattgactagttactatttctgtacactgaatattgaaatttccttatagtttatggtcgtcacaataattagattattttatttgatattttttattttttttaatt

SEQ ID NO: 30677 - DNA, 878 bp, Medicago truncatula
  Intron number 2 from transcript Medtr4g033020.1 (locus Med tr4g033020) derived from phytozome v7.0 (chr-ID MtChr4; po s 8080931 to 8081808)
ttattgacactccaggtaaatacacgccaacttagtctatggagagttaataatagaaaccgttagtttttttttctaaaatatctcaattattactggtgtctgtttttggcatccgtgtttgtgttactgtttcttaggatgaaatgttagactagacatgatgattagttgagtttgaaccctggaattaaaacgttaaattttttgagggacagcttatcataagcaccctattttgtttttggtgtccatgtatgtgttctgtaggatgagatgttagagtagacatgatgattagtcgagtttaaaccgagggacaacttattataaacactccattcacattccttcaaaaccctttacacacaggagatgattttcatgtttcttacaagattggaattttttgcacagaattaactgaaacattccaatgatttttattctcgaaggagaggttgggttgttgggaattttgtgagatggttttgaacagatgtaacttaaacattccaatgatttttattctcgaaggagaggttgggaaagtagattttgttagatgggaatgaaatttgatgtgtgaatcttctttttgaaaaagttcaaaggaactctttacagatttggcaaacattttttttcaataatgccctagaataatattcttggcatgatgttttttggaatttcattcacaaggattgatttatatgacctgaaacaagttacacctatggctttgtttgagttatgaagtgcgtgttgattgtgattacttgattatttccttctacgtcttgaaaagtttgtgtcgctttaacctgaaaagttttgcaggattatttgaagtttctgctggatctgagtttatt

SEQ ID NO: 30678 - DNA, 483 bp, Medicago truncatula
  Intron number 1 from transcript Medtr5g043920.1 (locus Med tr5g043920) derived from phytozome v7.0 (chr-ID MtChr5; po s 18184317 to 18184799 reverse strand)
ttttgaaaaagatcacaaatacactgaagttacttagagagcagacatgtttttagagtaagaagggcattgtctctcgacaggtttgagtttgcaattaaaagaaaaggataatcaaagataaagggtaaaagtttaaacacataaatttaaaggaaatgtaaaatgcattgcattaaaagtaaaatgatctataaatcagtttacatacattctgtataactcgtttccctatgcgccgacaattatgtaaaacaatcacatttaactcgaccaatcaaattctacctcatgtcttagctattaagcaatagctttgtcggccaccagccgcggcggcatttttcctacgaatcagtattccattcctcttgtttctttcttttcatacccagcttttagggatttgtagattattctcttgtactttcattttgctggataatttttgtaatattttgcttaaggcgttgtgtaaaggga

SEQ ID NO: 30679 - DNA, 577 bp, Medicago truncatula
  Intron number 1 from transcript Medtr5g071610.1 (locus Med tr5g071610) derived from phytozome v7.0 (chr-ID MtChr5; po s 25368358 to 25368934)
cttttgattccaaactttggtaccggatcagtaaggttggtcactctctttttaaatttatgtttgaaattttatcaaatgtttggttgaaatactctgatgaaattcaactaatttaacccatgttggatatttttaacaaataaatttagaattaaatttctatcaactatctgatgtaaaagcttatatattgagtatattgaaatttattgttcttttccttttttttactcccttaattatttctatacgtaggaagaagaaaatcatcaaaattaagatatataattactaatttaatttgaaaaaattatacttgactatgaaaaataatatgacaaataaatgtgtttttgttaatatcaaagtaatttcaataattaatattctcttcgttctacgacgatcaatttgatcattttaaaaaaataaaataaaagtgtataatgaatgatacttttattagattaaatttatccaactatatattcatgtatttgcaattatagttttgtttcaagtgttaacgttgtgtgtgtgaaggtgattggaaccgaagcaagggcagtgtaca

SEQ ID NO: 30680 - DNA, 381 bp, Medicago truncatula
  Intron number 2 from transcript Medtr5g026420.1 (locus Med tr5g026420) derived from phytozome v7.0 (chr-ID MtChr5; po s 10660192 to 10660572 reverse strand)
taccaatcactttactcaagagcgcggtatcaaaaggagccggttaggagtttttttccttacttttctgtgtgtctgatcatataagtgcttatgtataagctatttctatgacaagattaaatcaagttaaactatttttcgcataacctgtttttataagctatcctgaagagctgatggaaataatctgaaaacagcctatgaacttgtcgtaagctgtttccataaaatctcacaagtgcatatactagtagataagctaaaataaatcaatccaaacaggactttgattgtgctattcaactcatgtgtactatttttattgatgtttatgataattgagaaattgaaaatttaaattttgtgcagtttgtttgg

SEQ ID NO: 30681 - DNA, 538 bp, Medicago truncatula
  Intron number 1 from transcript Medtr5g098240.1 (locus Med tr5g098240) derived from phytozome v7.0 (chr-ID MtChr5; po s 39162782 to 39163319)
aaagaatagagtacgaactttcccgcaggaatctagtgaccattagttttttgttctctttcttcgttttcatttccttttttttacgttgaagtataaataattcatcttgtttttattttgattctttttttcagggatttggataggagacagcgaaaatacttaaaaaaggatgttttcattgtttcttatacaaaactggggaaacaagaaataaattgaaaacagcatggcatttttgaaatttaaattttaaagtaaaaataggaattgaaaacaaaaaatggaaatggaaacgaaataggaggtatcttcaaatatggccctaattctaataaattttcagatcttgttaatattatggctgaacccctagtccatgtagctaacagtatatcatcattatttgtcatatttaagttacttaaaactctaccagtgtgaactgaattgattctttagtcttgttagctgcaaatgaaacttgaattttatctgatcccattttacatcatagtagtatcttctctgcagc

SEQ ID NO: 30682 - DNA, 910 bp, Medicago truncatula
  Intron number 1 from transcript Medtr7g076500.1 (locus Med tr7g076500) derived from phytozome v7.0 (chr-ID MtChr7; po s 15592903 to 15593812 reverse strand)
gggtcagatcctgccccccttggtcctcacatcaggtcccacatttttcttcctttgtttgatttccctcaaatctcttgcccttccaggttaggttcatattcaaatcttctttcaaaacaacccttgttcatttcattcatacagttgcgagtagcagatatctagttcaaacaaaaaaaaagattcaatcatgattgcattggtacatcttctacccacacccatttttttctcaatatcggcctgtttagctagagtttgagtgttctgatttttatacttggtgtaacggtagaggtgtagagctcgacaaagtaaaaattttatatagaaatatataggatgtggattggttgagttattggacttctattttttgtttaaagatcaagtgaagtattaagtgaagacgatgtgacatttgatttgtatgtttgatagcatggttaggatttttctttaaggtgttgtctgcacatgagaaaaataggttgcaatacacataaacacacaaatttcagtgtgggaaataatcacaagttatgttttagggggataactagaatttgcttgagtagctatagttgatgttagctcccacaagaaagatcaattgcatgattattatgagtgagctgtgattcaggaattgttttagatcaatgtttgagttgtatcactcaaggatgagaaatgtttaagcttgggggtgtgataaccaacaaattagttggttatcacattgcacttaactccttgaatgaacgagaaatttagtgattgcattgcctaagacatctaattggtgactattttaggatgttatagttttagttgtttttagtgttatttaatcattttgaattagtaatgcttgtcatggatgtttgatgatgtaggttaagga

SEQ ID NO: 30683 - DNA, 794 bp, Medicago truncatula
  Intron number 4 from transcript Medtr4g160540.1 (locus Med tr4g160540) derived from phytozome v7.0 (chr-ID MtChr4; po s 40710990 to 40711783 reverse strand)
ggactgcctttcacttttccaacagccatccataggtacatcagtgcattgcattcacaaacagaaggtgttggtgttaatataatttgtgtagttttgtaccttcaggaaaagatgtgaaaattttgttaggttctcaaatagactatttatgttttttggcgtagctctacttttggtctctagtttggtttttttgagccaatcaaatccatctatttttttaagttatgcaaattaaccttgccgtcaattttttatcaccaaccaaaacccttaaattctaattttatatcaacatatttatgggtttacaatgaatttgggatatggaataattttggtagttcagaagccagaagtttagtggaactttgactgagttttaaggattatacagaacattagagcaggggttaatgagattaaaaaattaggttttcagtgaaatctgttgttttggtgacggtagttttcaaatgatttaactgattcaatttatgaatatcttaagtaaaacaatacaaattttagagttctaagtaggagaaaagtgataaatggacttctttgtttatgtcagaaggaaaaaagaaatgaccatgctttaacatcatctcgaaaaggctgtatgcttttttctattgcatctttttgataatctggatgttacgagcatatttctatattatgaggcgtgtatggatactgaaaacacttttaaaagattcagtgaatgcatcttccaaataaacaatatattctttgattgtagagaagtggtccgaagtccc

SEQ ID NO: 30684 - DNA, 863 bp, Medicago truncatula
  Intron number 1 from transcript Medtr4g049520.1 (locus Med tr4g049520) derived from phytozome v7.0 (chr-ID MtChr4; po s 11371991 to 11372853 reverse strand)
aagattagggtttgagattgttcttggtgttcttggtagtttctgagttttgatcctaacagaaaggagagagaaatttctcttctgtttgtgatgtggcgtgaattatgtggctctctctgacactgtgcactatttataagctgccacttgtacttgagacccaatgaaatggtgacacctggatttggacatagttggctcgacattggacaattgtgacttaaggacctctctgcaaaaaagaaaaattgaaggactggactgtaaataagaaaaaggactaaaaatgtaatttataaaaagtttgggactgaaatgcaattttagaaactgttcagggactaaaatgcaataaaaaataaaattagactaaaattggtaatttggaaaaaacgtaaagtgaaaccaaaaataaaatcaacaaaaggactaaaatgaaccaattacaaaaatgaggtattttaaaatacctctctgtcgaaatttggacaggaaaagaccaaaatgcccccagggactaaaatgatttttgccaatgtttgaaataaaatgcaagaaagacactttggatagttttatatgcaagaaaatcaaagacaaagtcatgattgaaaatactttgaagcagagacagtaaaatatgcggatgaaacaaagtaaagattcagagtaaaacaaaagtaatttgaccaatattggtggtagaaaagaaatttgaatgagtatttttaggtccaaaattagggtatgacaattataactacttaaaacatcacattgtattctgatggtatatgcttaaaattttgatattacattatacaggttattaatttggttgtttcgcgacaaaactgggt

SEQ ID NO: 30685 - DNA, 983 bp, Medicago truncatula
  Intron number 1 from transcript Medtr4g107840.2 (locus Med tr4g107840) derived from phytozome v7.0 (chr-ID MtChr4; po s 23660086 to 23661068 reverse strand)
aagctttctttcttctcgcattcattgcctgcacggtatgtatcacaaatcttttgtttttaggaacattgtttgttgattaaatttcaaattatgaattcaacattcaaatttctaatgtcaatttgcttagtatactacatgtgatttaattaattcaataaactcctattttacctttattctttctttcttcattaaaatttatagatatagctaataaagtaacaacttggataataagcacttattcaattagcgcttaactaacctgtttgagcttatccaaacacaccctaattctaatactcttttttacttgggctctgtttggtacaaaatagtgaatagctgatgagctcatagtggataagctagctaattgaatttgtagtgtttggtaaaattagcggttataaatatgaatgaaatcacataaaaatgatatatttaattaatatttaattgtttttcaattaagatttcatggataaaattgagatcaataatgataagccataagctttcagctttaagctacttgaattagcttaaaaaaactgctataagctagtaaaaagctataagttcgtgagaacgtgacgttaccaaatagagtttttttttagtcaaatgagcttataagacatgagctataagctataagataaaaaacatgtcttaccaaacagagccttagtgtataggtggctatcattattgtaaatcttcttaaataagaaatcatcaatgtaagcatcacatgaaagactaaagtaacaactaattactactatttgctagtataaaaaaaactaattgaagagttatgtttaaaatcttagtgaattgctatcttttacaaaatttccttgaatttatctttctatttgaattgaatgaaatgtgtttgtagctaataagaaactttgattattgtctctgcagacttcagtggcattcactggcctggtttttgctgc

SEQ ID NO: 30686 - DNA, 498 bp, Medicago truncatula
  Intron number 1 from transcript Medtr5g101240.1 (locus Med tr5g101240) derived from phytozome v7.0 (chr-ID MtChr5; po s 40503182 to 40503679)
tgaaggtcactgaaacaaaggaatccaattccagagtatgtcttacttttttttttttttttactttatttcagttttattttatgctgcattgtttcaatttgatttttggattttacaagaacatgtaatggcggaaaaaaagagacaagaaatttcttcatgttatagaccaaaatgttatctatttatacatggaacatctatctagtgttgcttgtcctagagggaaattactttatttcctgattttcagtttgtgatttgaaaataatttgctatgttattttaattatttatgaaaatctatattaaaacaatcaatagtgtacacatataacatttctttatgttattcaatggcttccatgaaaatgtgttggtataagtttgtgctagtatcattaatcaactacaaatgaaactcttaaaataagacaatgctaaggtattcatattactgaatatatatttatgatatcttgcaggttacattgc

SEQ ID NO: 30687 - DNA, 841 bp, Medicago truncatula
  Intron number 1 from transcript Medtr5g079390.1 (locus Med tr5g079390) derived from phytozome v7.0 (chr-ID MtChr5; po s 29545951 to 29546791 reverse strand)
gggagaaaagactcccaagagtgactctatttttggttggtcttagtggtgatcctctctttgtcattgactgtacgcatttatttagtcagatgatcggtgatagtttgattgagatcggacaatttaaattttaaatttgataattttaatttgaataaaagttaaagttaacttattttatcgattgtttgattgagatcagatgttttagagatgttctactagttggtgaggatgagtagttagtgacagttggaaatccaatttggttttggatgcattttttcttcttttttatgatgatggtggtgatgtggcagattagattatgatgtgttttttgacatttgtattgtatttgtttgtgtgtgttttatttctggggttgatattatggtgggatagattagtttgagtggtgtgggaccattaactttggctattcataatcaaacagatggtgggtatagattctttcaatgtggaagggaaataagtgagttccctgttatgtttcctattccattgcctttctttagtacctttgtgactactacacatagcttttatgtacatccttttgcaggtatattttgtagaatatattgtgcatcattcttgagtgtgataatgaagtatgggtgacaagtttaccttggaacgatgatgtctctgcactctaattttttttcttatataaaggttttacataactttttatcctattcccctttgcattactcatattatgaatatgaattacaacccataaattttaggcatgagtaactcatttagttgagttaagagattaaaaaagataaaaagtaaatatctg

SEQ ID NO: 30688 - DNA, 725 bp, Medicago truncatula
  Intron number 1 from transcript Medtr5g020450.2 (locus Med tr5g020450) derived from phytozome v7.0 (chr-ID MtChr5; po s 7734733 to 7735457)
tatttggtggttcttcaatattaagctcaaaaaaggttacttactttcttctgaattattagcgtgtaattctaggcaattcattctccttattctaaagtttctattattttatccttaagctcaaagttcaaactgtgtttggtagcatgatgacacatatagtacaagaaaactctatactcctctccaatcaaattgttaactattggatttatcaacctttgatagcttacaatttgattggatagacttataagtgcatgtttggatagtgagtttgataaaattacggtgacaccatgattttgttgaagctataaaatgtaacttttgtcaaaattacagtggttcaccgtgattatgttaaactcaccgtcaatccaaacatgtactaagttatatggcaaattatcatataaatataatagtttttttttattttttattgtatgttgagtaataatataaaaatatattgcagaatatcatataatatttctactttcaatgatgtttgttgaaagttgacctcttctcacttctcaatttaggtgatgaaaattacttttgttttactctattgaccagagtattccaaaataaatttgtccttctctagtagattttgttctttcattacagttaaggattcatgaatctgttatgttgcttaatatatgttctttccatgtctgatatgtagctgtaggacactcctcttg

SEQ ID NO: 30689 - DNA, 905 bp, Medicago truncatula
  Intron number 1 from transcript Medtr7g047130.1 (locus Med tr7g047130) derived from phytozome v7.0 (chr-ID MtChr7; po s 11782767 to 11783671 reverse strand)
aagcgactcttgctgctgttgatttcatcaacaaggtactcatacataaaataactcacaaattagggtttgaagtttagtgttgtgatattctttttagcagacaaagtgataaaaaactgacacacaactctacaaacccatgcatgttaacttctggtgtcattgtttgttgttctgtgtccatgtttgtgtcggtctttcataggtattaaatcaattgtttttgaactgatcatgatagaatgatccattatgttaaatctaggcctcaacctaactatatcgtcattgtttattaagctaggcctcaacctcaaccttatattttgcgtgcgacataagttctgcatgatgtacaagttagttttcattgttggatcaataaatctcactattggataaaatgagataagagaagacttattgatccaattgtgaaaaacaaacttgtgcatagcatggctatcttgtgcacagtagacaaaaccaattaataatgtgacttttgaatgttttaccacttgtttgaaaactgtaattagcacacgaagaagtgactttagtattatgaatttattttttattttgatcatacaaactagctagcattattggagacagtaatttgtataaccattttctgtgacattaaactatttactaattttgaacacaacctcatcttcaaactttctagcactaaagattacctaatgtcttgccaattagcttagtttctcataactgtctccaaatgtggtgtatggaacagatttagcaactaaatctgtgccaataatatcaacaaaatgtttaactcttctcttataatgctcgtgaaaaaattcagatgatttattttaacatgtttaattttacaattgatactggtttgcaggctg

SEQ ID NO: 30690 - DNA, 818 bp, Medicago truncatula
  Intron number 2 from transcript Medtr4g155000.1 (locus Med tr4g155000) derived from phytozome v7.0 (chr-ID MtChr4; po s 38164042 to 38164859)
gtgttatgtgctttaatttatttatgtgttttctcctactataatgttcttatagatgtaattttttttaaaagaaatcattgggtttcttcatgagattgtcaagacaacgccaattgggactgaaaaaaaactgtgtacgaacattttattgaaagataaaaggtattattttctaatttatcagcatcagatgataggattttgtataagtttgataatgatctgaaagatgtcttttcttatgtagtgggaatatagttgatgtaacactatgggaaaaatattttgtagctttatcatttatcatctatttaccttgagttctttgcttccattttgtagtcaatgacaacccaaatatatgtaacaattgatcaggtttgaggttgatcatcaacctacattatccggttgttgagaagtttaagacttagtaagtttgcattatgatttcacaatacaatgttagagtaacttattatttcacaatctgatttgattgttttttgaccatgttccttgaattgttgtcgtgaccttaaaacttctcaagcttagagtcaaaacattagtcagaacttaagtcagagtttggtttcttctcaacatacttcgtacaacgatttttccaatctgtctcaggttaggccaattgctgaatttgtaaacttagtcaaggtcttctttttttatgcacaaacatgctttgagtttttttacgcacaaattaaaaatacatattgcattattctttatttcatgtgcataatttgtgttaagatacatattgcatcactatttggaaagcaattaaa

SEQ ID NO: 30691 - DNA, 985 bp, Medicago truncatula
  Intron number 1 from transcript Medtr4g073200.1 (locus Med tr4g073200) derived from phytozome v7.0 (chr-ID MtChr4; po s 14394833 to 14395817 reverse strand)
ttgataaggttatctttcatcctttatcatatttatatgaccataactgtttctaatcaaatgttataggataaacgtgaaatcgaagttgaattaatcatgcatctcctacttttgcagtggtggcaggaacttgacattagaatgaggataattttgtttttcttttgttacaataggacctatcctcaggttccattctgtctatgtttgaagctttttctaatcttatgttgttataatcgttacgtttatctaattttttattgattatatattggcagacacgcaaaggatatataagaagggaaaataccggtgatgataagaaggctatcaaattcacacttgtttagcatcacaactcggttttaatatgcaactaaagcagcgtcggaacaagacagtggagggtttaggaggttgtggatcaatggaggaaccaataaaccctctctgtctctgtctccgactccgtctcatcctcttcttcatcagttactatacatactatctttccccgcttattttttttttcttcatatttttaagcttggctacatgcaggatgattctttgttcaaacttatactgagacggggaactcactcggcatggaagaggaacgccttccatttattttcatatcaccacatgtcaactgtctcaagtaatccatattcctcttgaggtacttgtaatttaattttttttctctggaaagtcgttatctaagacattatatttttctccaaatgaaaaaaaaaaaaacataaaagaagagatttcttatgtatatattgttgaatcattctggtgcatctatatcgtggttgataagacgaaattaagcttttcatgatgctgaccaaaataattagtattgacctttgttttggtatgtacatagcattggtgatatttatgaattagaatgagctccgttgcaggcgttccttgctcagtcaagtaccgattagtggag

SEQ ID NO: 30692 - DNA, 947 bp, Medicago truncatula
  Intron number 1 from transcript Medtr6g074270.1 (locus Med tr6g074270) derived from phytozome v7.0 (chr-ID MtChr6; po s 14426870 to 14427816 reverse strand)
ttcgaatttgagtgaaggtgtcagctctgtaatatggctaggtatgtcaaattgtaactgtaagtagaaatcctacatagactgccttgtttagggacccaaaggcgggaaaaatttcccgtggggatagggacaggggagaaagctcccctgaagggagtttagagatggggatgagatcttatccctcgccccttcgggatcctgcccacaagcactttattaaaataacttttatgtgtggatattcaagtactttatatatttttttttcacacaaaatgtgtataaattttatttataagtgaaattttatttataagtgatgtttattgttgtcaccaggtttttttttttttttgataggatcacaaatctaacaataatgtcttagttttttatttgatttatgactaaactttaatttttttgtttaattctaaattgattaaaaataatgaaaatttgatatttttttaatcttgatggggttcctacaagaaaatgcttccaaaggagggaaatgtagactggaatgaaaatcattttagatgatgaggactgagagcacagaagtactctccgctctggctccgccccattgacatttataatattggcattatcaacccacttgggttggcctggtggtgttgacttgggacctttgagtgagctcctctcaaggtctcatgttcgattctccctgatgccaatttcgatgggctaaagtagcttcttcaaaaaaagaatataatatatcgacattatcaattgagttatgccttgctatagttttctatatttcttcattgtatttcgaactataataaataatgcattaacatttataaccatatacaactattaaatatatacagctaagtaattttccctttttcctattttatttagtatattaatatgctgtgaaatattggcagata

SEQ ID NO: 30693 - DNA, 333 bp, Medicago truncatula
  Intron number 1 from transcript Medtr5g018590.1 (locus Med tr5g018590) derived from phytozome v7.0 (chr-ID MtChr5; po s 6793485 to 6793817)
tattaatttcaaccttagcataacaacatttaaaggtatacttatatgcatatttatgcctacagtttttcaaatttttgttaccatcattaaagtcactgattattttttcttccagtatgaacaaacattaattaatatagatggctacccaactaaatatttcacaagctttaacttctcatttaatccatcacctgaaaaaataaacatcactttgattatatttttcttatagtatcttataaagatcaaatttttgagctattcaagctgaatcaaaaataccattgaattgaactaaactttattttttatattcttttcagggta

SEQ ID NO: 30694 - DNA, 506 bp, Medicago truncatula
  Intron number 3 from transcript Medtr6g017650.1 (locus Med tr6g017650) derived from phytozome v7.0 (chr-ID MtChr6; po s 4212203 to 4212708 reverse strand)
tgttcaggaaaccaagttttgtgttcattcaaattgtgttcattcaaattgttcaattcaaattcattcaacttcatattgcttgctattctaattgagtttctttgccggctgtagtggtcattgtcgcagctgctcttttatttattttttaagttgctatctgataacaggttcggttctttcgttatttattagctttctatttagtatgaactcagtagaagtaaatttagtgtttgatttaattatgtctgagtagtctaacttgagtccaaaatggaaggaccgtcgtactgacggaactcatgtaaattacgcgcgtcttttagtgtaacgagaatttaaataattgttttgaaaaattctgttctgtaattgttaaaaatctattacgaaagtacagacctgttgattatgagttatatgtctgctattttatatttgtttctgaaatttcttaggcatacaatgttctcaaaagactgaaatttcttaggcataca

SEQ ID NO: 30695 - DNA, 866 bp, Medicago truncatula
  Intron number 1 from transcript Medtr6g017650.1 (locus Med tr6g017650) derived from phytozome v7.0 (chr-ID MtChr6; po s 4213517 to 4214382 reverse strand)
actcactcaatcggaactcaaacggtactcaaaaggtgctcactcactctttgttctccaccaaatcttctcgataatttctgtttttattttttattttttaaagaatttttagtttttttttttgttgatttcagtgattgttgttgttaatatgctgagaaattctattgttgttttttatttcattcttctggctgtatttatttcaatgtgattttgtatgcacattgaatttgaatacaacaaaatcaaataatttgaatattttaataagctgagatatttttttatgatatgacgagacaattcttttagtgttatttgattaaatttttgcttgttccttgtgtggttatatggaaatttatgtggaaaaaaatatccataagttgaaatgatgtacattgagcgatctgtggatgaatgtttttgttctggtatctttaaagttctggttttctgctatctgcattgcactacctcatgaaacaatgatgtcctatttttcaatgactttgaacccatgaatcagtatcttaagtatcttaaaccaatcaaatatgaagtagacatgtttggatcaagttatgagatgaagaagtatcaatatttttagaggatatgaatgtatagttatttttacttattttttccttaaaatggttgtgacatatgagttgtgagtatagggaagacataaattatgtgtatggatgtgatgaagttcatcttccaatttaaagtgaacaactactttgaataacaacttaatttggttcgcaagtgattgtgtgtgtggctgatatctatatgatttgtgagttttttgctgcttattgttgagtgcagctgtttactgctga

SEQ ID NO: 30696 - DNA, 443 bp, Medicago truncatula
  Intron number 1 from transcript Medtr5g097930.1 (locus Med tr5g097930) derived from phytozome v7.0 (chr-ID MtChr5; po s 39029608 to 39030050 reverse strand)
ggtgtcaacaatttcaatcaaggtatcaatcttattactaatgtcttttttttaaacttcatatcttaaaaataaaaatttgttttagtgatagtaatccaccataaatttgtgtcttcatttaatttttgcacgtcatttgggtttgtttgtatatgaattttcaaacatcaaatgtacaatatatgtgaacacgtgagtgaagaacaatagatttaaacaccaaaagctcatattaaaaaaaatcatagatttgaatttcgaaagttcatagcaaatcgatcaaaacacgaaaaatgacatgaaaaagtaaaggtaaagaacgaaaccgctacatgaaagtagattaaagaacgttgaggctctctaatatattataactttaagttaatatttgtttcacatgtcaaatgcagagaggtaccagaggaataacactgctg

SEQ ID NO: 30697 - DNA, 428 bp, Medicago truncatula
  Intron number 1 from transcript Medtr4g136660.2 (locus Med tr4g136660) derived from phytozome v7.0 (chr-ID MtChr4; po s 33447192 to 33447619 reverse strand)
ctggtcgcaaccgttggtctcaagatacctggcaggtatcatcaatgttcatccacatcaaaattttgattttttttctctcttcatcttagaccagtttatgaatttctattatctgggttttggtttgtagcttgtacacattactttaccaacttaaagtttgctgctttatcttgtattgctacctgagtagctatattgcatcgtcactttatattgaaggcgtgtctaagtgtctgacatttactcgcactttgtgatttgtatgtaatcaaattattattttgtctatgtgtgttggtgttggtgtcgagtctggtgtttgtgtctgtaatcataggatgctaggtttgcttcattgatgttgtttttgtgtggtgattggttggtgctaatagctgttttttgtctgcagctaaagaaga

SEQ ID NO: 30698 - DNA, 720 bp, Medicago truncatula
  Intron number 3 from transcript Medtr6g041010.2 (locus Med tr6g041010) derived from phytozome v7.0 (chr-ID MtChr6; po s 8683619 to 8684338 reverse strand)
tcgggcacgagatatctgaagtaagatctctctttctgtttgcatttgtatttgttactagtggtttttttaatatgatcatgtcatggattcatttatattaacttaattatgtccagttctgtgaaaggaagaaactagtttagatccttattgatattgtaataagttctatatttatttctttatgatattaattgcaacagtttttgcacgctcgaatgtgggtatataaaacttagttggattgtattaacttcaaaagttgcttgttcttttcgttattaattgttatgtttttaaaagaaagctccaagatcatgtcggtagattaaattctgttgacaccgtttgaattgatccgatttttgagccagtgattgtgtacaatttattatatcttgtactgactcataaatgattttgaatcatgtgatgtgcatgaattggtgcaattccgtgtcattgatacgaatgaaggattcacatttctcatatcacaattattttttataatacatatcacaattattttttataatacatatcacaattcagcgtcattgatgtgcatgaatgtacgcctatagaatacatggggtgaacaacaaagatgttctcctttaagaacttttagtttcaaatttcttcaattatttaaatactgtatctcatcttgttgcagaacgatttgcttcagttatttcagccttttggagt

SEQ ID NO: 30699 - DNA, 484 bp, Medicago truncatula
  Intron number 1 from transcript Medtr6g041010.2 (locus Med tr6g041010) derived from phytozome v7.0 (chr-ID MtChr6; po s 8684698 to 8685181 reverse strand)
ttacacacgatctctctctctctctctctcctctgtcttttactctcttgaggcaagctctctctctctctacatgttttcagtgttatatcttctcattattatgtacgattttctcttacaagttttttgcgcctttttttaacaaatttgagatacccttttgctgtatatcaatatttttcacagctctttcttccacttcactcgttgattcatttgttgaaatgggtatctgagtttttcttgaattcaattcagtataacataaagtttgaatttttatgtgattagcacttttttgattgtttcatgattttatataattgaatattgatttattgttaattgggtaaaataaattgggttttttcttctgttattttgttttttggcgttagaattgtgttgttgagtttcattgtcagcatatttatgttattagtgaattgtagggtttgctcattattgctaccgtttgtgc

SEQ ID NO: 30700 - DNA, 639 bp, Medicago truncatula
  Intron number 1 from transcript Medtr6g077550.1 (locus Med tr6g077550) derived from phytozome v7.0 (chr-ID MtChr6; po s 15402724 to 15403362 reverse strand)
cagtataaaatataattgcaatttgtgtttttatttgattaaatttacaaccatgctcataattgctatggaggccatatccttgaataatgtatttgaatgtcgacgcgtttgtaaacttttgtttccttggataatggaaataataaaaaaatatcatgaagttgttgttgctagcttttgttgttaaaggataattgattctctgattatattaaatgatgttgaaacaatctttgggagtaaagaaccgtgtcccccctccgttaatagtttatacttttatatttgttgtattctttagttttattcatttttaaattgggtgccaacactaattatttatctttaaaattttatgaggaggaatttacaagaggtgaatcaaatttcaaatataaatatcaagttcttgtatagacttagaataagagcagaaaatgtcagttcaatagatgagattgtatttgtcttgacacacacaataactatcagaaagacttttgacttttgaggtctaaacaaaatatcacagctcgcaattcatagtttaatttttaaggcacgcattagtttacacaagtattactattcttccacctatccatatccttcattgatggaaacaggttaaggata

SEQ ID NO: 30701 - DNA, 771 bp, Medicago truncatula
  Intron number 1 from transcript Medtr4g028580.1 (locus Med tr4g028580) derived from phytozome v7.0 (chr-ID MtChr4; po s 6605718 to 6606488)
tcctggtacattatatatacacatttaattaacttttattttttatttttatatttatttaatgctacttataaacttatgaattcactaaatggtagtgtttattctctagctataaaatgcatctcttgtgtttttcacggtatttaattttctttgttattcctaattgtatttcctccatgtttatttatgaataaaatgtgttgagatcatttgaatcaaaaaaatctacagtaactaaaccaatctcagtgtgtaatgtcttatagcaagaaattttggagttgactacaaaaaccttaaaaatagtaaagtaacaagattaatttaaggatttggtttctacacaatacatgcatgacatatttattgattctgacagtccattttttaaatcaatggtgattaaagattgtttagtgaagatggcgtgtaagttgatcgatctcaaatcaattatcgagatttattttttaaaaaagattatcgaaattaattaatgcatgtaaatacagatccttagtttagtaacaatgtgctaaaattataagcacatttactattattttttgttgccattataagcacatttattattattttttgttgccatatttcagttttacttatcatatgtcattatatcttatatattgcatcataatattaattttttttaaaatatgtgtttgtaaaaggaagaatattaatgaatttgaaatctggatttcagtcagttataccattgtggaagcaattggagtacta

SEQ ID NO: 30702 - DNA, 667 bp, Medicago truncatula
  Intron number 1 from transcript Medtr5g009740.1 (locus Med tr5g009740) derived from phytozome v7.0 (chr-ID MtChr5; po s 2206893 to 2207559)
ccccccttctaaatctccaaaacccaggtcacagggtataagttcataatgtgtcatatttaggataattcttcacattctgctgatgtctgtctttaagcttagatgattattttttattttttttaacatggctaaaatatattgaacaagctaaactctgcccaagacgagcagataagaaaaactgattgctgtaaagacggcaaaaccaaaacagaaaaacgagccattaaaggccagaacagcagcaaaacgaaagctaaaaagccacaaactggcacaacacacacaaacagcaggtgtgaatgaacacatccacaccccactgtcaacacgaaccccgcctacacaaaacaaacacaaaaactggccaacagaaacaaagcctagcagcctgcctggcgaaccagccccactcaaaaccaaacatgaagaaagaaaaaaaaacaatcgccggggttccaacactgattaatccgttgctttgctttaacaccctctaagtgattaattgagtacttgagaaattatgatgctgcaacatccctttgaagtaatgaacttattcctgtgttggtatctttctgagattggctatattgttttaatcttaattatcgtatgagttgcagattcaacaacaacttggcttcacaaaaaatcc

SEQ ID NO: 30703 - DNA, 551 bp, Medicago truncatula
  Intron number 1 from transcript Medtr5g072220.1 (locus Med tr5g072220) derived from phytozome v7.0 (chr-ID MtChr5; po s 25727751 to 25728301)
gtaagttttagttttttaattttattgttataattgtacaatctaatcgatgttagctaattcaactaatttattttttttattttctttgagggaattcaacttattttttaaggaagttgaaaatcctatattcaaattcaaacaaaatagtaaatattaatttaacaattaactactaatatataaaaaaaattaagtgttaatatttatcattcaaaaattaaaataattgtacactttaattaatactatgtacgtcattctttagttaatataaggttaattttttaaaattttattatctttcattcacttgtaattttttcactaattagtgtgatgctttttttaatctcatttttatttaaaaaatatatttaatttaggtaaaataacttaatataataattattgtggaacggatagaggatttatttaaggttatgtttgtgttgagaggagagagaggtgttaaatattaagttaagaagatgaagatcctctagagtctagagtgcaaagtggggtaggcattggaatagaaagaa

SEQ ID NO: 30704 - DNA, 628 bp, Medicago truncatula
  Intron number 2 from transcript Medtr6g077590.1 (locus Med tr6g077590) derived from phytozome v7.0 (chr-ID MtChr6; po s 15424673 to 15425300 reverse strand)
ttgttacaagtaagatccttatactttgaaaccataaatacttttaattataatctttataaatatgcatgacttgtcatttcttagggtgtatgaagaccgttataaaaatgtgtatcttttgtccaacaggtcaatttagatacaaacttcatcttatatcacagttaaatagatagtttaagggattaaaaattgcaaaaaaaaaaaaaattaaaaaaatctgttcaggaaatatttaaatgtatgtacttcatggtataaagaagccttttttataattctaagttttggttttgtacttacaataggaaaaattaatttacttcgatctgctactccttaatgtatctcaagaattcatatttccttcatatgatttattaatattttaaactgaatttcattttattttctcattttgaccgtaacatgtcagaattttttgttttctgcataatggtttgtatgacaatttcaagagtggattctctcttgttgaaataaacataaagaaattatgtttgaaactcaggcaacttttctctaacgaaaactaagcatttacttgttctttgtctgtacattgtcaggaaaccatctgtagtcatctggctatttgcattgt

SEQ ID NO: 30705 - DNA, 354 bp, Medicago truncatula
  Intron number 1 from transcript Medtr4g087020.1 (locus Med tr4g087020) derived from phytozome v7.0 (chr-ID MtChr4; po s 18181911 to 18182264)
ccagaaactccctttacttctttccccaatttttcgtttgattttgcagattggttttaatccttttttttttttatgtttccattgcattaatttgggaaaaattgatgatgttgttgcgtaattgatttgtgaagaattgtgcaaatttatggtcgatggaatgattgttgattgttgttgttattgatgttgggtatgtttgcctctttctgaattctttaattcataaggaaaaaatctgattttttttcctttcttttatgagtttgaatgtgtttttgaagaagtttagtgatttggatgttgttgttgtttgagttttttttcttcttctgaatttgatgaagattg

SEQ ID NO: 30706 - DNA, 802 bp, Medicago truncatula
  Intron number 1 from transcript Medtr5g007480.1 (locus Med tr5g007480) derived from phytozome v7.0 (chr-ID MtChr5; po s 1144630 to 1145431 reverse strand)
ctcatcatcaatttacattcagttcttggaaataagtaagcttcatcattatttctttcgttcatggtttgtttgttataaattataaataaataaaaaattattttcgattgttcaataatttagagattatttttctcaattttttttttttttttttaaaagcagaagttgccttagctttgtttaccacaattaaaacttttttttttttttaaataatattcagttataaataagagtttttagattttcaagattagctactaaaaaaatctaccatttaaagaatttttttagattttattcctttttttttaaataataattacttttgaatattcttatctaaaagttacggattatgaaagaaatatgaagaaaaaatacttcaatcaagaaactgctttgagtagcttattttaaagttatttttaatataactttttttatttgaaaagtgattttcattattgtaaatatacactaaattacttcaattttttaaaaacttaatatgtaaattattgaatgtcaatttatttattttatagtatgcaataacaaatggatcctaaaactatattcgagcgcaagttcgaacctatagttttccatttcttcacacttaaaatgtatgattctcgccactaaattatttgacaaaaataaataaattaataggtcttatatatagtatttagttaattatgaaaatgaagttgtatgtattgtgattgtgaatatgaatatggttgatttattaggtgggcagctatagcaacacatcttccaggaagga

SEQ ID NO: 30707 - DNA, 774 bp, Medicago truncatula
  Intron number 1 from transcript Medtr5g084860.1 (locus Med tr5g084860) derived from phytozome v7.0 (chr-ID MtChr5; po s 32328161 to 32328934 reverse strand)
gagattttggtatgtatatcatgtaactacaagtttcttctatgttttcttttcatgtgtattattttgtattttattctatatacttgtgaggaacctgagattgaggttgttatttggtttttattttgtttgttaaggttgtttttgctctgatttgtgttggatatgttagattctattttgagaaaagagaaaaagaaatgataaatatattggttgtgatttggtttacatctttcacatgtcaaatatgcatagatttaattatttggttaatttaatttcaatatatgctcttgaaaaaaagttatttttgagtggttcttgttaatggtctcatcactagtagagtaaataagaatataactagccaaacagggccttaatttttttgttttgttttgaagaagctaggccttagccttgtaactaactttgttgagtcatcacagtctaattttggaatacttttaattataaaaaataaataaaatcatgtgggggtaatttgaatggatggatggtgtttttttttttgtatgatatttggtttatgtcttcttgtggtgtgtgaatggaatggttcaattattaagggatgaaaagtttaattaaaaaagggtattttggtaaaaaaaatcctttcttgttatgattttagtctacttaacttatctactatataagaaaattttcattttatttgtgattgttgcattagatttaattgtatatttgctatttggatttatgcagggtcaaaaagaagga

SEQ ID NO: 30708 - DNA, 903 bp, Medicago truncatula
  Intron number 1 from transcript Medtr7g076070.1 (locus Med tr7g076070) derived from phytozome v7.0 (chr-ID MtChr7; po s 15394180 to 15395082 reverse strand)
agcagattaagtaagcattttgtttattttcatatgaattagtattttgtgttgctaatatgagaagatcaagcatattattgttgtaatcacatttcgtttttctaaagtaaaactataacttttctaaccatgtggttgtactaagtgttaaatggttaattggttaatgaattttagttaaaatcgaatcgatcgagagaatcatagttatatcttggaacaattttaggctaattttacttactttgaggtcgaactttagattagcaatgattccttggaaattggaggattaaaaaagataaagaagaacaatatatgcacacacaaattcgatttcccctaatgtcatttttggtgggcaaatctatacagagcaaaactctaactttaagcgggaccccgtaaataggaggtgtgattggtcatatcggattagtcgggttcttagattagatactgagttttttaaaatatatatatatgcacatacacacaaaaaaaaaaaaaaaaaaacaacacaaattaaaattctcaaatgggaccaaattagtactactaatattattgtctcatgagaaactattgcatgtgagatttgaaatttattgggatcaagtcggtatttttaattttttagagattaaatagatatttttgttgatacaaatttagatttggataaatacactccatgcaaggtccagctagaatttacataaaaaattttactcataagaagttctaggatcttataatttgttaccttttgcatttataaacaaattttttgtatatttcatttttttttgcttttgcatgcattggatattcccattgttactatgctaagtgattttgtttttcatttgtgtgacagtgtggaatacaacgtttcct

SEQ ID NO: 30709 - DNA, 700 bp, Medicago truncatula
  Intron number 1 from transcript Medtr5g027370.1 (locus Med tr5g027370) derived from phytozome v7.0 (chr-ID MtChr5; po s 11135271 to 11135970 reverse strand)
gtagctgtctttgtggttgcccctgcaaaaaagctgttttaaagaaagttatttaaattggtgttctcgctaattggttgtgtttccttctgcgtgcccactggatatgttagttctggagaagcctagtactcactactgtattattacaatataaaaaaagtttcacttttaactttatgtgtgactgtaaatggtgcactctttgatgcttgtggcacaaggacagtgcaaggaggctaataattatgttgttcacctgaaactcttttatttggtgtcctcaaggaatattttgataagagaaaaaataatctaaacaattcaagctaattgctttgagaaataaactgaataagaaggccaggctagtctcatgaataggcatttgttgcgagatgtacacattcttcacgcttactccagaattcaattctcaaatatttgataatgctcattttattcaatatcttcaaatttatgcattgcaaggttgtatttcatttgtcacagtcctgcatctttaactaaatacacacacacacacacatttcttctctctttttcaattgtgcttgaatatgcattaacttgaatttaattgcaacttctctttcatgcatcttaatttgtcttgctgaccatactcctctccgttttttttcttgcatagatttcttccattgcaagaaggtgttct

SEQ ID NO: 30710 - DNA, 625 bp, Medicago truncatula
  Intron number 1 from transcript Medtr5g071560.1 (locus Med tr5g071560) derived from phytozome v7.0 (chr-ID MtChr5; po s 25333048 to 25333672)
cttttgattctaaactttggtaccaaatcagtaaggtcagtaactcttttaatccatgtttaaaattcatttttagtacttctcattttttttttggttgccggggttcaaactccaaccttatgtattattatgtattgtccatatcaattgagttaagctcacgaggacggtacttctcatttcttatcataataagaattttttgtatttttatctaatttaaagattttagttttttttggattattttaagatatattaattacttgatttcagtttttataataagaaaacatattatattagtgaatttttatcatcactggagatgacttggtctggtggtataggcttgagaccttcgagtatacaattctaatggtctcgggtttgaatagtctatacaaaattttgctataacttttaatagacccattgttagtgaggaaaatacttgggtgactttgagatttgggtgattttaattgtgaagggtggaattgatcctccacaatatttggtcattgagctgatgtttggttttcaaaaaaaaaaaattatgcttttttatcttaattaaattgtatgtaggtgattggaactgaggctagaggagtgtaca

SEQ ID NO: 30711 - DNA, 809 bp, Medicago truncatula
  Intron number 2 from transcript Medtr4g110920.1 (locus Med tr4g110920) derived from phytozome v7.0 (chr-ID MtChr4; po s 25271137 to 25271945 reverse strand)
gagatcttctctttctctgtccaccgcaaccaaaggtagttttctccttcatctctatctcttcatttttttcaatttcattcattctcattgctcaatttctcatttacctacgtcttgcttttccttttttttctttttttttaaataattgtttttgattatctgatcctgttgaacgttatgtgattctgagagaattatgtttaaatttatgtgattgcaccgaatttttatcaagtattattatttcatgttgcaattacgattctagtgatcatgaaccggaaattggagtgatcattgtgtttttctctgctaaacctttattttatgtttaacctgtttgaaagtcttttttttttttttttagttcaaaattgttgacccatgttgaatttgtttgtttgtgatatttcttcagtgttgtgggctttgtttggattcccaaatgaaatgtggtagccaactaattttaatttacttaacaaattttgaaatgaattgttctattgttattgtttttcaaaaggttaaatagttttattatctatttttgatctagatgactagtaatttggttttggtttagttgtattctgaattgaatgacctcggtagaagaacttgaaattgattgcatgatcttttatgttgtttttgaattttgttctgaatatgttggaattgattcttgtcaataattaatcgtagtttgtactaaaaaagttcatgtgtaactcatttcatattgttatgctattgttcccatttattgacattgtaaatgtgctttgtgtttgagcaga

SEQ ID NO: 30712 - DNA, 984 bp, Medicago truncatula
  Intron number 2 from transcript Medtr4g097470.1 (locus Med tr4g097470) derived from phytozome v7.0 (chr-ID MtChr4; po s 20871001 to 20871984 reverse strand)
ctggtgttaggtataattcttttccctttgtaattggtttgtctgattaaacttaaaactggttttcaggtgatttgttttttgtctgatttggtttgatactacagtctagaatttcatattgtcagttaggacctgtttggataaacaacttatttgtagcttatagcacaagccttcttgtataagcttgcataagctatttttatagtagaagattaagttattaagttgattttataagctatattgaaaataatttgaaaaaaggttatgcaaattgtcataagttgttttcataaatcctctcaaacaatctcattaaacttatgtaagtagataagcttaaataagccaattcaaacaggcccatcatgtgtgaaacttagatatgcattcttatcgggtaacttgtgggtcctcggttcttatttaaattgcttggctgttttcttagggtatgttttgattgatgtttaaatttttaaaccttgtcgatgttgtattgcattctattagtggacatatgggtcctgacttgtattcttatttacattgactattttctaagtccatggttggattggtggtacagcggtatagggtggaatgaagtcgaattaaatgaaataggataacatccatcttatgaaattttgactgaactatttaattccgttccaacctatactaccaatacaaatatacctttaggaggtgtacatccacatgtccttagccttttcaaaaatatagtagtactagtatggtaggatttaatacctttaggatgtacacatccacatgtccttagccttttcaaaaatatagtagtactagtatggtaggatttatgatgaaacacgtatttttcttgtactagcctgcaattgttatcaatagggtaggatactgggatatgtactgtttataaccattcctaataaatttcttcctttgaacaattattcttttgcagagcca

SEQ ID NO: 30713 - DNA, 649 bp, Medicago truncatula
  Intron number 1 from transcript Medtr5g039820.1 (locus Med tr5g039820) derived from phytozome v7.0 (chr-ID MtChr5; po s 16937046 to 16937694)
ggatattaaggatactcatactagtaagtaatttaggattgaaatcaatcaatcatatttgctattgattcaaactttccagataaaaatcgtttcccttataattatttatagcatgtttttaaataaaataaaagtcattttcttaattaaaattagttttagaaataatataaaggattttccaacctgtgcaactttgcacagcttaaagtgcagttaatacactctattattgtctctctcctattaactttttttgacttttctctatcatattaattatattaatcagccttaattttttttaccatcatcatcacaatcgatgatatagatagattttattttcttccgcaaaaataaaaagaagaaatgggttgaaagaaaccaagaagctggagaataagaatagttctttatgattctcaatcgaatccttcaaaaaaaaaactgtgttggtggtgatagttatgggtggtggcagactttaaacacatttcttcaatccttcttttcgattaagcctatgtagattgtgatgactctgattgagaacaccaccaataaaggactatatgatcctcaaagcggtgtctcccacacgttttcagccacctgttagaacttacatttccattagacgccg

SEQ ID NO: 30714 - DNA, 1001 bp, Medicago truncatula
  Intron number 2 from transcript Medtr5g021350.1 (locus Med tr5g021350) derived from phytozome v7.0 (chr-ID MtChr5; po s 8143081 to 8144081 reverse strand)
tgggaccggtatgtcattctacctgtcatgtggattttgatacattgtaagtgtaaaaagttttaaacagttaggaaatcacactcggacatatatgtagctttataagtagttatgattaaaatcaaatgcttttaatgatctgacaaggatgattgataggcagtgtaaaaaatctttatactgatgatgtatatgaattaaataatttactcggctatggcttcttatgttttgttgctttaagtatgctttttaaatcatggtaaatgtgttgacatttcatttatggcattcatcctttgttcatatagtgaggggattaaaatatcatacctatgtaacacttttgattgaaggtgtgtccaatgtctgacacatgttagtatctgacaccaacacaacaccaacacgatacctacaacacaacaccaacacgatacctacacatgtaattacattcaattaattcatttttcaaaattaaaatccatgtcgaagtgttagttttgttgcttcatagcatcataccttctttattcttgttcttctatgtatacgtgtaatttatttgcctcttagcacgtattaggacctttgaactctttttctgagcaagatggtggtgtcaaatgatatctcatgcatatttgaatcgtgtttttaaacccagctgcgatgtgtcgatagaaagaattgccaaaaaatactaaaattattagttttcaatttgtttgtgaggagcttaactgctcaaccaccaagctatgtttattactgttactcatgttaactgttccactgttcttattttttttccgtcttctttacttactattgcattggtgttggtgtatttttgtgtataaagtttggtgctgtgtggcataactttttgtttttagttgttttgtgttcatatgtttaatttttttattgataaatcgcttaaagataatgcatgtcaatgctgtagttcttgagactattgtcagaagaat

SEQ ID NO: 30715 - DNA, 952 bp, Medicago truncatula
  Intron number 1 from transcript Medtr6g078020.1 (locus Med tr6g078020) derived from phytozome v7.0 (chr-ID MtChr6; po s 15776097 to 15777048 reverse strand)
gttagaggtacgatctttacttaggaagcaatattatgttggcttccaatcttttctatatgttatctcatcagaacttcagtcaattatagatccccagggcttttactgtaatcagtaattaccattatctgattctatatgttaggcagtaaatttgctttattcataatctgttcctgttattcacaattagaataaggttttttattatttctattaaggtccacaacatattgtttggccgctaaaactaaaaccatggtctagctatagcagcacagtagaaaacacaaactagcttgaatcctttaaatttttagttacatgatagagatttggcaagtgaactaaaactatcgaagtaataaataagatcgaatccacgaggaccgttgttaattcctactcagcaatttctttctcgaaaggatgcattaaatttttggtcgccctaggcagttggattggtttttataacataaacgtagatgaaacaataaaagttggttttaagaaaattagagcgaagtatggttaagaccttcgaatcctccgaagttctcctatggtaatttgcacttctaattcaagcaataattttcacgcaccaaattgctcttctggtggctggaattcgggcccgaatgattggattcggggcccgaattggaacttgctggaaatcggaattcatcattttttttttgtgctttcagcttctacaattttgataaattaccctaaaaattacatgaaaatgtctactaaactagtaatgacatagtgtcataattacagatagtcaacaaaatttcctctaacaggcaagaagatttgttattttaatcgaaaaatattgaaagaaaaaaactacagaaaacattggtattcacttcatatataggtatagatagattctactactgtctcattagaaacttgtcttgat

SEQ ID NO: 30716 - DNA, 1015 bp, Medicago truncatula
  Intron number 4 from transcript Medtr4g118050.1 (locus Med tr4g118050) derived from phytozome v7.0 (chr-ID MtChr4; po s 27250314 to 27251328 reverse strand)
aagtgtggggggagccaaataaagtgtctttagtcgtagtgtttccaaactcccttgaactttattctttttgttttgttttattgtgaaaggcatgattaagtagcttgtttttattgaaaaaaatcatgacataaattttttattgtctcctcttattggtcgtttcttgtacatgaaagtaaactcttgtgttttaagttttccttatatacccacatcttgttttaaagtgaataaaaaaatgcacaagttccttcccttgagtaaatgtatgaatagatattttaaggaaatgcattctaattttagtggtacgttaacctttaaaaattctcaaaataaaaataatataagttagtataaaggagtttctaaaaagccaaacttaaaatttatttcaaggttgcattattgaatctagattggggaaggaggtaggccctccgacatcctacgtgaaggtaatgttatcctagaaaagaaactttaaaaggcatcattgaatctagattggggaaggaggtaggccctcaaacttcctacgtgaagatgatgtttttaaggggcaccattgaatctagattggggaagggggtaggccctccaacctcctacgtgaaggtgttgttccttaaataaagtatccaaaatgtaattggcaaaagatcaaaaagatcacaaaaactcccatctctcttatatgaattgaaagaagaatttttcaatgttaatttagtactaggattagaacatgttcctcattatatctatcttatacaggagcaagaaaagggttggactacacacacacacactcacttaagacttgattgttgggttgaaaaaggattataagaaatgcttgagtttgtgattaatgtactctttgaaataaaagcctttgaggggacatgtgccttaatgtaattgtcatatgataatgttattttatgctaccatgtttatgccttttgcttgaggacaagcaaagattcaagtgtgggggagtttg

SEQ ID NO: 30717 - DNA, 684 bp, Medicago truncatula
  Intron number 1 from transcript Medtr5g010620.1 (locus Med tr5g010620) derived from phytozome v7.0 (chr-ID MtChr5; po s 2683443 to 2684126 reverse strand)
aaatctgtatgtttttactaatttatctgttcacctttaattttatttttatgccttttacttcgcttttcttcattttctactaagtagcttgttcaccttttcaccctttggggtactcaacgtgatttttcatttagatgatacacatgctttttctgatgatattgaccttgaaattattagtactttgtccgattattaattacttggcatcatcatttttatgctgaaaccccttttcacccctttgaaaccactggaatcttatgtaaaaattaaatagaaaaaatttggacatctttttaatttatgtatcatctcctttatgagctagttgcatattatggtggtatgtaatatgtgttgtatcatcctggttttttttttcagttataatcatttgattaattaggttgaagttagttttagtttctcgtaattgttgttctctatttctttcgtttttgtaacaagtgattcttcaattgccttttacaacatttattccctatctacgttaatacgccgaatgatagtaatacaaacttccaaactgcttgttaattattatttgactccttaaatttgactatggagatgagcttgtacgttgatgaatgataatatctgtgttgaatgttatttatttttatctgttgttctcaataggctgatcagttg

SEQ ID NO: 30718 - DNA, 401 bp, Medicago truncatula
  Intron number 2 from transcript Medtr6g009490.1 (locus Med tr6g009490) derived from phytozome v7.0 (chr-ID MtChr6; po s 1587250 to 1587650 reverse strand)
aggtaatctgatgttgataatatattacaactcttatctcattttacggcaataactgttgcatgtgtgtgtgtgtattctataactccagatgtagcttcattcttgttgaagtgatggaattatcttaacaattatttggagaagtttggttcttgaatgcattttatcctcattatgttacattctttttgaactttaagcagcttctagtttcttctcctgttaatgaaatgcatgctcaagaaacatgtctgtgcctcatgaataattattattttctaaccatgaacctcatcaaagctttactattaataaaactgattagtgccaaagtccccaatatatgtatggaaatttgactcttgttttctccttgatgcaggccaattcccattatt

SEQ ID NO: 30719 - DNA, 564 bp, Medicago truncatula
  Intron number 1 from transcript Medtr4g156630.1 (locus Med tr4g156630) derived from phytozome v7.0 (chr-ID MtChr4; po s 38856993 to 38857556)
caagtgtcaccattttggtttttcttgtagagttatattagtagccatgttcgtattttctttcactattgtttgaaccccggttcttttaattccatcaactccctgacccttaactcaaacaagttgaattacgatcaactgttttttaattgtctctgacctattcctggggttaaaataattatgcaggtcatatgtagtttaactgtgtctactgctatgcttttgaagagagtaatacttcaatcttcattttataaattcaaacacagtaaattcactccaactaatatggaaccttattgaaagatattgtgtttagtaacttcttcaggttagtttttataggttgaagactaatgcttcttttttttttaattatgtgacaggccagaacacacttattgaagacattgtgaaagatattttaattaaattaaaattgaattgttctttcttaaatgattatcaaggaatgattggaattgataatcatattgaacaaataccattgttgcacattgagtctcggagtgttagaattgtgtaggaatctggggt

SEQ ID NO: 30720 - DNA, 635 bp, Medicago truncatula
  Intron number 1 from transcript Medtr5g033680.1 (locus Med tr5g033680) derived from phytozome v7.0 (chr-ID MtChr5; po s 13741218 to 13741852)
aagttattagcaggtaaataatctgttattcatttttgtgcttattgattagccttcatgtgcatgcattgcagattataaattcaaattgtttacacatcgtcaatattatattatatgatatatatgtatcaataagcagcagtttctgcatgaaaggaactgatatagaagttcctgtaatagtaagttttgtccaaatttcaaccatcactcctttcttattatatctctttaataagtcatatatctcgattttgatttctatttctttaattagtaatttaacaaataaaattaaaaaaaaacgatatcggaaatgagtgaatgtaagaagggcattataaataaaagcataactgtcctcgttctcatttttttcttctccatacatccgtttcccaaaaagaaaagaaaaataaaatggtgggcaccgtcgtcgaccgtcagcccaacgtggatcatatcatttacatcgtcaacctgtggggcaccaatatcatcgtcacagttacttccgttgcctcctcgtccaaacctggatcgaaaaggcgctccaactccgtagcgatgtctatcccaagtttaccttcatcttaggcttcgccattgatccggacataaacacgttgcag

SEQ ID NO: 30721 - DNA, 442 bp, Medicago truncatula
  Intron number 1 from transcript Medtr7g026880.1 (locus Med tr7g026880) derived from phytozome v7.0 (chr-ID MtChr7; po s 6968089 to 6968530 reverse strand)
tcaggctgcttctaaccctaccaacactgtctttggtaaatttctattcttttgtatatactttagttaattaatgttattatcatggttttaaaagcggttgcagttatgccgcaaatttttatgatggatgtttttgtagtatcaagtttgtgtatattgtgattaaaacggcatcaaaagtatgatgtcgttacggtctaggtccaaattgtaatccattaataattctttttttccagatgctaagaggttaatcggtaggaagttttttgattctgttgttcagaatgataagaagttgtggccattcaaggtcattggggtgaatgacaaacccatgattattgttaaatacaagggtgaagagaagcgttattgtgctgaggaaatatcatcgatgatcctcacaaagatgcgagaggttgcagagaaatattta

SEQ ID NO: 30722 - DNA, 868 bp, Medicago truncatula
  Intron number 1 from transcript Medtr5g093340.1 (locus Med tr5g093340) derived from phytozome v7.0 (chr-ID MtChr5; po s 36719284 to 36720151)
tcaagggagtggtttggtttatattcctgggaaaggtactttcttatttttgcttctatatatgttttggtcttttgatatcaattcatgatgtttttgtacatactgtgagattgattttcttatagtatgtattaaattggttaaagggtaataggtatttgctattttacttttgatttttgtgaatttatatagaatcatggttttttttgtaccaaaaaaaaaaaaaaagaatcatggtttttgaaaaggacaaaacttaagtgtatttttataggtgcttttcgtagtattcttcacttagcatacaatttctgtggttataacaaacttagagaaagttatagattggaggaaatcattggcagttacgaacattttaagtgaagaacacgaaaagcacctaacctaagttttgaaatgtccagaatcacaatttgagccattacatcacagtttttttatgtctttccgactgaaatatggccatcattgaggtcacatttgatcgtgattctctagaaaatcaatgataaccttgaataggaataaaaagtagactatcccagataaatgagaaatcttgatttttgtttatttctcttaaacttaagcttcctaattgcttgttttggctataaatcttagtatggagaaatgctaatgatttctaataatctgattagtactgcattcaaagtgtttacatgataagaaatgcattgaaggtgtgtgtaactttttagcattatgctgcttatagttgtgtgcctgtatcttcaacttcattatggagatctataagctttgaaacattatcctcacatttgattttctattcaatttccagaccaaaatcgtaact

SEQ ID NO: 30723 - DNA, 948 bp, Medicago truncatula
  Intron number 2 from transcript Medtr5g041030.1 (locus Med tr5g041030) derived from phytozome v7.0 (chr-ID MtChr5; po s 17543960 to 17544907)
gccaacgtttgtcacggttcaaaggggttcgcttctttaacttctaactttctctaattcttattccctgttgagttcttacatatatatctatgtagcattaaacagagcgaatacgtttcccttttatagagccttgcccatcacgaagtccggaatagcaatccacaacaactcatttttgactcaaaaaataggctcacgtggaagaggaaaaaaactaacacaatagtctctcaatgtatcaaaattctaaaatagttcttgattgtgcactctgttagtcaaagtagtccttgacgttataatgatccattagtattgtcaagttagtccctcagtatacttatctaatgtcatattggtccctataagtatctgcttattgccattagtccctataagaaaagagtcagtgtcaacatagaaggattgttttaacgtcaaggactattttgactaacatagtgcacaatcagagactattttgatatttcgattaattgagggattgttgtgactactcgttacacattcaaggaccaaaatgacttttttttttttgaaagaaggaccaaaatgactaataccctcacttttggccaaccaacaaacaaaaagacccatattttaaaatttgttttatgcgtcattgactattgaaaagtattgtgttgctctcataataaagaccttgtaattcagagcctgttccaagtgtatttcttggtttcactcttgtaaataaagagagtctgagaaaatgaataagcttagtgattgaaatcaaagtaaagggaagccatgtacaaataacacataatccaaattattgagtgttggggagtccgggtcgcaatgggattttacattatatgttttcatttttattggttgatgatgctttttgcagtcacttctcctttatcagtggctggaagacagctt

SEQ ID NO: 30724 - DNA, 680 bp, Medicago truncatula
  Intron number 3 from transcript Medtr5g029210.1 (locus Med tr5g029210) derived from phytozome v7.0 (chr-ID MtChr5; po s 12138189 to 12138868)
aaggtacacgatcaagagtttaaactttaattaaaacgtttattcttcttttttctacttctattataacctttgacgaaatgaatgtgagaaaattaaataaaaaccctaaactgatgtacaaggtctttattaatttgagctacattaaatatttaacgttgcacgtttcccaagtaaaaaacgcgttttcttttgggtttttgcattaaaaatctttcagctatgaacaaacatctattactactaggaagtgataagaaaagagttttcaattttgatttcatatagttatggttattggtgttgtccatcatatacagtctgtattccattaatgtaacgcatttaaccttacctgtcacatgtggtctccaaacgctactcatatttattgctatatatcatcattactagggttacacttcaaacgggtattaatttttcaaaaccattaaaaataaataaattggggtgctaaaaccatcaagtatttattcctacaatagaaacgtatcattctttagtactatacggttgattaattattggttgagtatattgataataaatcaatgcatattttaattgtttactaattttgggaaatactgttgttgttttttaagacaatatattgttgttgttattattataggcacaacaagatcgttctgata

SEQ ID NO: 30725 - DNA, 714 bp, Medicago truncatula
  Intron number 1 from transcript Medtr6g033400.1 (locus Med tr6g033400) derived from phytozome v7.0 (chr-ID MtChr6; po s 7387713 to 7388426 reverse strand)
gtaaaacacagacttacgaggttagtcgtcctacaattttatggtttgtttactttcgtaaaaacatatatttacttaacttaaaaattggatactcttaagaatggataactatataaacatttttcaaaaacaatgaaaatgcaaaatgatttctctttaagccaaaaatcttctctatcagcaagtaggtttttaataattttgttagcgtaaattttgtcccaaaaaaaaatgttttgtgtaaataattcattctcatgtaatgttatgttgtttatcagtgtattattatacttgtgaaaaatacattaacatgtttgtgtggatatatgatcacaagtgaaatagactctaattttttactttttattttgttttgccacggaaaatttgaaattataacaattggtgggtctttctttccagttaaaaaagaaagccaatgtgaggtatttgagggtttaaatgtgagtttaatatcagatggtaatgcatttggtggtaaacttattgatattttgattgctgcttctcctgttcaggtacatttttaaataaaaattttcaattgcatttgatccaaaatttagaaatacatctgagtttttagattttttttccgatttttttcttatactgaggaacctattttctctcaaaatttggtgctgattttgcaggtagtattaggaagttatcctgcagggagta

SEQ ID NO: 30726 - DNA, 812 bp, Medicago truncatula
  Intron number 1 from transcript Medtr6g010130.1 (locus Med tr6g010130) derived from phytozome v7.0 (chr-ID MtChr6; po s 1929334 to 1930145 reverse strand)
ttgcccctctcctcctcctaggaaggttacaaatccataaaattataaggctttttttgttactttttcaataatatatgtgaatttgaaaaagatatattatgtttttaataatataataataggaaattggaaaattataatttaatattctctgtcttggttttcacattttattgtacttttagtataaatgttatttctattataacgtatgtgttatgtgtgggaggaaaaaatgaagacgaaaaggaataataacgaaacacaaaaagaagaaatataggttgatttgacgcatcagttgtagctaagtttgttgaattgaaggatttagtttgtgtttggttcaacctttgatcaagcaatcaaatttgattttgaagaaataaaattgatttgatataattgattttgcacttttgaattgatcttaatttaaagtcaaggtttgtgcatcacataaggtattctgtattcaaattggagtagttgtgccaagggatattaaaggaatgtaaccaaaaaaaggatattaaaggaaggcatgaaattgatgaagacctaacactaccctattgttaaccagtatgggaggcattataggatagcaaagaagaaaatgcctcaacttgacaatgccacgtaaccatttcgaatcctaaaggacaatcgatatttctttcacattttcaatcgctctcttcctatcataattatgatatgttgttcatcatcgtttactttctaaaattgcttcatttatttctattttttcattaagttaatgaaactcacttcttttcagatta

SEQ ID NO: 30727 - DNA, 409 bp, Medicago truncatula
  Intron number 2 from transcript Medtr5g079100.2 (locus Med tr5g079100) derived from phytozome v7.0 (chr-ID MtChr5; po s 29356034 to 29356442 reverse strand)
acatttggggacaagtttgctttcagatctgtcaagtttctaagagtgctctctgatttgtatttcaaggtatgtggaatatctactgctacataaaatataattctatccatcaactatatatataaaatataaatgaaacataaaaattacttagggtgcttcatgaagaccaaaaaatccgttgtccgactttggattactaccaggtaaggactttttccgtgaaaaaatcggattgtcaagaccaaaaaacaatgtaatgtgttgtagtaaatcggattggtttacatgagaagaagagacttggttattccaagttcagcctctacgaaacttttttacagcgacacaatgtatcaaaattaaattattgattaatttgaattataattattgcaggaacgat

SEQ ID NO: 30728 - DNA, 551 bp, Medicago truncatula
  Intron number 1 from transcript Medtr5g080770.1 (locus Med tr5g080770) derived from phytozome v7.0 (chr-ID MtChr5; po s 30250348 to 30250898 reverse strand)
accattcgtaatcattacaattctcttcctctcaggtaccttttttctctagtgattatagaaaggaaccaaattgaatactagattgtatgttctattattgttattgctattggtcttgaatgtgtcaatagttatcactatagctctttctcttttttgctctaaaatgtatctttctttagttagtttgcttattgaatgtttcttctgttagttagtacagtctatgaaattactatactaaggacatgctcaaagatgtttttgtaatttcaatatattgtggggttatagtggcactgtctcacacatttagagaacaaaaagtacaatttactgaatcaaatatgataaaattgggtcatattgtatctcattctcactttttcttccaataaattttaaaggttgatttttttaagcatgtgttgtttgttagtaaatgctatacataacaaaaaaaaactaaggtcatgatgattttctttgtttgtttaaaaaaataattttttttttttttttatgtttgtgtttttttgtttatagtt

SEQ ID NO: 30729 - DNA, 729 bp, Medicago truncatula; identical to SEQ ID NO: 30294
  Intron number 2 from transcript Medtr4g081060.1 (locus Med tr4g081060) derived from phytozome v7.0 (chr-ID MtChr4; po s 16818648 to 16819376 reverse strand)

SEQ ID NO: 30730 - DNA, 656 bp, Medicago truncatula
  Intron number 2 from transcript Medtr4g137450.1 (locus Med tr4g137450) derived from phytozome v7.0 (chr-ID MtChr4; po s 33852980 to 33853635)
cagcgagcttttcgaagtggtatgttgccatttatcttcttttggaagcttgttggtaattggtataatgccatttacagaaagttgaatccgaaaatactgtaaaatagatcgtgcttctatttgcttgactttagaagaatacaatatgggcatatatatatacaactcagcaatagttaatttggtaatgtaaatctcctataataaagctgaaatctcctatagctaatctatcatcaaaagatatcactataatttctcttaacaaatactctgctttgtttcaatacttcaaattgcatccatacctgagtcataagagagaaatgaaaatttgaactgaaattcaataagagggaaatgaaaattgtaactcaaattcaaagttgctctatgtcagttgcaagttgcaactttcgcatagactttacctttatttttcttccttctgtaaatagattatgtgtttcttttactgtttatcatgtcaattgagctccaatccttgttctacacactgcgtgttaatgttgaattgttgattgtcaattttgagtgatgattcttgtgttaattattgtgatagtgaacaagaaataactaaacttttatgtttgggttgttgtagtttcgtaagtattccaactcgtttg

SEQ ID NO: 30731 - DNA, 704 bp, Medicago truncatula
  Intron number 1 from transcript Medtr4g087030.1 (locus Med tr4g087030) derived from phytozome v7.0 (chr-ID MtChr4; po s 18190198 to 18190901)
cttgtaagtgtttgataacactctatttttctacttagcttttgaaagtaatatttacctgtgggttatattgagtgatcatcatttctcaattgtaattgaaatggatatctgccagatctcgataatgtacatgagtaattagtatcttggttttaaaattatcactgcatataatataagattttcattaccatatgactctgttttgatcttccttttgttgatatatccctatcatttggtgaatatgatgaactaattccataagtttacttaaaagattgtgtcacagtttttagaaaactatagaatataaccaatcaagttaatatgatatatccctatcatttggtgaatatgatgaactaatattagcaacacagataatgcattatcaaaacttggtaaaatttttcaatgagagttagatggtcaaacatgctaattgccaactatgtggaaaagaggtagggggttaatgctaaggtggctctcaatgagtttgtctttctgagttattaatgtgtaggaagtctttattaatgtgtaggaagtcttatgagtgagtgttgttattgttgaacaagagcttaacacgatccttgttgtcttgttcatctctacatagccttttctatatttgatcacgatttgagtagcttgtaattgtgaatctatattctgtttattgtgcttaggat

SEQ ID NO: 30732 - DNA, 778 bp, Medicago truncatula
  Intron number 1 from transcript Medtr4g095550.2 (locus Med tr4g095550) derived from phytozome v7.0 (chr-ID MtChr4; po s 19911887 to 19912664 reverse strand)
taacaaaattcaattttggcacaagatattttgtggtgagtgcttataaataatgtattttcatttcatgttgttgagttgaattttgcatttgttaatgttagtgacggtttttgtcgtgttgttaatcacgttgtttgcatgtgtcgcgtttcgccggctagtttttttgtctaaatctatagattagaaagcagattcattttctttgtgaatttcaatttttttctttgatgtgaatttctcttcaatgaaaattaattgtatttatcagatttagccaccgaatagttgatgttatgttggaagagtttctagattcatcttatcctctttttgtctctttttcagctctggtaattgtttcattttctactcataactttattatccattttttttctttaattcttacatttgcaaattcatcttgaatttcattttggattattgaagattcaatcctatttcttgtttgtattttttttttttttttttaatttgattgagtaaggttagtttctttctcctcagaaagtagaacttatcttgttttattgtatctgtgagctttacttagtttcttaatttttacttatttatctgttattcttttactttttttcattcatagatctatttgtgctcttatgttggtgaaattattttcttttgttagatttaatttaatctccttcaacctttttgattttcttctgtaaattgagctgaattagttaactttgttgttgcagtggattagtgttggtacaagtca

SEQ ID NO: 30733 - DNA, 950 bp, Medicago truncatula
  Intron number 1 from transcript Medtr5g075580.1 (locus Med tr5g075580) derived from phytozome v7.0 (chr-ID MtChr5; po s 27562153 to 27563102 reverse strand)
ttgtttttgtgtattgcagttgcgttcacattcatgtaagtgttcaattccagctatgattttagtattgtttttttgtgattaaatcaagtattagttgattgaattggaatttatatgtttgttttagtttttaggttgaaatcaatttgaaatttgaattataaatgtgttattggattgttgagtgagtgtgagtgaagagtagtagatcgaaggcgtgtctagtatccgacaagcattagtgtctgacatgtgattacattgaaatatgttattttcttaaattactattggtattgatgtgtaggtggtgtccgtgtttgagtatgtgctttatagtatggtatgctatcatcattttaagtgtgaacaaaaaaaaaaaaaagcgacacgaatcatcagtgggatgtaattcgacaacaaattttgaaagtggaaaatttggacactaactccctataaggacgctaactccaattagtttaactttcagtttctgtcaaatcatattgcaatagtggacaagtttacttgacagcgaaaaaagaatgattttccaaatgttaaatatgtgcataattgtacttagatggtttgcattttataggctactgctattaataaaaacgtaactgacaagctctatagcactgacacttctgatcgaagacgtgtctggtgtctgacatgtgtcagtgtccgtgtcgtgtttctctgtttcatagatactatgctttatgatttaatgttatgttatgttgcctttactttgtttttattcaaattagtgttttgtgctttgaagacttgtggtgtttgaacaatgttgattctttgtgtagatcctcggtatctagaaatcatattggacccggactaatcctgttacttgactctgattgtacattacagattttttcacgcattgctgtcttggattttgagtc

SEQ ID NO: 30734 - DNA, 573 bp, Medicago truncatula
  Intron number 2 from transcript Medtr4g079000.4 (locus Med tr4g079000) derived from phytozome v7.0 (chr-ID MtChr4; po s 15615207 to 15615779)
gggaaataggtttgagactgaataatattatgcagactcactattttccttttcttttcctactacttcatatatccaaatacatctcatgtcaatcataattggattggattctcgacggctgcaatatggtgctcaaacagtaaggacggttagatttacagagaagttttttttctctcaaaatctaatagtccttacattgcagcaccgtaataactatagaagatccttgtcaaatatacgaaatagaatcttctacaattgcagtaaagtgctgcagctgtaaggactattaaatttatagagaaattttatctctctaaatctaatagtctccactaccgctgccatagaggattcaagtccttgctcagataggctgatgcagtgatgaacaagattgcgttgtggcctcagagtcgcagtgacataaaaattgcggtgtctggtcttagtttggcgtcgcatacttttccttatgtatttttatgaaaattattgaatagatttggttttgaatttctatggttactcaagtttcatagacgtagctatgtgtgatgattgcag

SEQ ID NO: 30735 - DNA, 1011 bp, Medicago truncatula
  Intron number 2 from transcript Medtr4g137230.1 (locus Med tr4g137230) derived from phytozome v7.0 (chr-ID MtChr4; po s 33758343 to 33759353 reverse strand)
cacattgcatcattttttggattctattcagattagtgagtaattttccccctttttgttaatccaatttttctgaacgcttttgtggttgtgcatgctttgggtagattatggcatattaaagtttctatctttgggtttttcctcatctgggtcctgcaaaaaaaatatttttaaatttttgtttaattttttttcttatgtgaattggatttgcttataattcagatagtggtttatttctgtcaagctttagatttttttttcttctgcagtttgttttttgaaattgtgttgttgagttttctgttacattggttgcaaactgttgttttcttgataggtttagtagacacagttatttcagtttgattttttaacctcaatgaatttatgatctcaatttgtttgtaatatagttgttttaggttttaacttaaaaacaattgaaaatgtcgaagattcttatgtgtgaggataggtaatgtgtttcgtactatttcataccggatttgcattcttgtaatgaaaatgcgtggactgattgatatatgatgccgccgtactgtttacacatgggcaattttcttaacgaagtattgaattatacccatttaggattcttgagattactgcgatgttttattgtttcaaaaactatgtttttcaagagcatagggttatggtcgcattagcatttttttattgtgagagcagtgcatttttatgtacatcaaacttcaattatttggaacaattaatggcatacttttagccttataagatctttgtacgagtgtttaagtatcgtgagtttgtggttatttttttgtaataacataaacttatcagctgagaattgttgcaatttggatgacattgttaaactttcatttgaagatcctttgaaaattgtttattgcatctattctttattttatcttttatctttaatgcacttactacttggccaaagtgtttggtgatttaaacaatcttattggacaggta

SEQ ID NO: 30736 - DNA, 635 bp, Medicago truncatula
  Intron number 1 from transcript Medtr5g022230.1 (locus Med tr5g022230) derived from phytozome v7.0 (chr-ID MtChr5; po s 8647107 to 8647741)
gatctgtacctattgctgtggttgccactaaaacttatcattgttttattttattttttatattttctattttactataaattctaaaaatgaataattcataaaatgaccactaaaattagtttaatcaatataataaaatattataatcaatatcattagaattttaaattgattactataatcaatttttagaatacattcttgaagtgacttaactaaaataattttttctaactatgaactattatatcattcacaaaaaccaatattcaatactcacagaaatcaaaatctatatatacttcattgctcatttaattttggtaaatttttttgagtgctattctttttttgagtcctattcataatagcttattagacaaaatgacataatatcaaattacaccttacaatcaccttatacttaaaaaaacttacaatcacttctacagcatgtcataataaatcagatttaaacttctaatttgtggatcttcaacaatagcgggtgcaccaaagctattaccaacatcaacaaaagttggaagtccactagttatcaaaccccgttaataagctagtaaaataatcttataagcaatgagaaagaattgttaccaacaagatcaacg

SEQ ID NO: 30737 - DNA, 600 bp, Medicago truncatula
  Intron number 1 from transcript Medtr4g041260.1 (locus Med tr4g041260) derived from phytozome v7.0 (chr-ID MtChr4; po s 9699583 to 9700182 reverse strand)
tcgtgttgttggtgagttgaatcgttgagtcagtatctcggttctttggagttttattttctatttttttggggaggattttaatttatttattataattttaattattttaatgtacacacttagctccactgtatatatgttttttaccctataataatacagtttttttttttttttttgcttactgcataggtacatttgttattgttgttgttgttataattatattttatgttgttttttcaatttaaatttgaaaaaaagtaatgttgaaataatagattgtcagttttcaattttgctataatttaggcgtaaattcaggtttaaaaaactggatttttaagtgtaattttgtggagaaaagtggtaaactttggagttttctgaagatgcatgattattatccttattattattataattataattattgtaaagtgtagagatatttttttttattatttatgaactttgttactagtattatgataatgatgtgggtgtgggatcatgtgatgtggttggtggatatggaattatggataaagttgatttctgatactttgactgtttgttgatggaaaaaaacaaagg

SEQ ID NO: 30738 - DNA, 834 bp, Medicago truncatula
  Intron number 2 from transcript Medtr5g087140.1 (locus Med tr5g087140) derived from phytozome v7.0 (chr-ID MtChr5; po s 33590212 to 33591045 reverse strand)
ccctccttggtaataggtacccaactctccattacaagcttttatttacctatattggtcttttaaaaatgttaactagtgtctaaaagcacgtttcaatgaatcaaaataaatagtgaatcatcatttctcttagtcatgaattatatagattttgatagtttacttttgaaagttcaaatataactattaatgttaaaaaattccaacacattaatcctttaggtgagtctttttggagtaaaccccaggaactggggaagaactctgatagtccgaaactttgcctaagagttaagtaaagtctaattaaattttataattgttctatataaaaatctaactctgattttctcaaagaattcgtcatttaaataagtctatataatctttcaagttgtctttaaaagactaataacattccttaaaaaaaaaagactaataacatcaagattttttattttcaaatattattgtacagttagttaattttagggatgaaattgtctatttttcacaattttatatactaagttaattagtgatcatacaaatgaaaaatatatattaatttctacatgttatagatacaatgaagttatgtatatatttaaatgaaaaaaaaaattgtactagtatttaaatagtatatgctcgggtcctccttgataagtacatatgtttgtctttgttacaattttagtagtatcatcttttggtaatgaatttaacttgcaaagctgtactcttgatccaaaaatcttatatagttctacatccatgtatgtatctatattaggtgggcactcatagctggaaggttgcctggacgta

SEQ ID NO: 30739 - DNA, 1012 bp, Medicago truncatula
  Intron number 2 from transcript Medtr4g096860.1 (locus Med tr4g096860) derived from phytozome v7.0 (chr-ID MtChr4; po s 20537823 to 20538834)
gttgctactgcacttgctaaacaggttagttctttactctccttttcttatgggatacaaaatattgatgtatatgcatttgtgaacttatgattgcgtgagtggttagttttacattggttgtgaatgaggtaaatcaatgatatacaagagatatgattcatatgctaaatattggttttgatggagaatggagatgttcaagtttgagtcttttgttgatcttgattattaagattatatttggtaaaaaaaattaggatagcggataatggatataaccgataacagataagttaatggattgaaattgtagtgtttttattttctttttcttacgggatgacggttttttttattcctcttttcttattggatagaaaatattgatgaatatctatttgtaaactgatagttggcattcaactttgagtgtttagtcccacattggctgataatgagctaaattaatgatatagaagagaggcgactcatatgtctaatgttctaaggtgtggaaatgtggtgttttagtcttttgctgttgctccctattctttacggactctccaacaagtggtatttcggccgtgttaacttgatgggagaatgagatgggttcttgcatcaaaagtctttctggtagtggagtaaggtggcgtgctttgttggatggtattgatgatgcaagtataatgatgtgcaagactcatagataactagtaaatgaagattatataagagatataagagatgtgatctatgtacactcaacaatgacaaaagcggaggataatatataagagaaatgtatgatcaggtgcatctgcatgcattcatacaataaaataagacggaaaaccatcaaacttttggatattattgttattgttatgtatcacattcatgtctttatatgcacacagaacttttaggatttacttccctgcttttcatgagtaaatatgtttgtgtaggatagggaggaagtgcagcatcacatatctgtctt

SEQ ID NO: 30740 - DNA, 984 bp, Medicago truncatula
  Intron number 2 from transcript Medtr4g114210.1 (locus Med tr4g114210) derived from phytozome v7.0 (chr-ID MtChr4; po s 26054557 to 26055540 reverse strand)
tggacagtattagtgaaattggtcttcaagtgcctgtaatcacttactctctcttttgcatatttttattcaaaatctatttataccatgaatttaaagagaagcccttaaggcttaaggttctaatattcttttttttttaggatcttagctatgaatacttatgaagcaatgtcaagtcacatgcagttatggacacacctttactcgcaagtgtccgtgctacatagttggacacacacattcattttcctgtcattttctttgacattaatctttgtatttgagggttggctgatcacataactacgaatgaaatatttaaatttcaattcttacaatttttttgatgaattgaccttttatgttgatcagaagacctttaccattttccctaagtctttggttcgaatccaccatgtgtcaacacttcctatgttgggtcaatccatactctagattcaattcggcccctagctagtggacggtgggattgaatccccggactggttggtccttgggccaaatatcaagtttccaaaaaaaaaaaaatgaataataaatcaaaactgacctatttttttagttccattgttctgaaagtgggggaaatattgcgtgtatgcaatcaaaattggtcagtagttactggttagagatggcatacctctgctgattaaactgccgctatagctattctccgtgtatgttcttgttctacataattactctgtgatggatgccatacatctttgcactgttaaataccattgagattagggggcagaaacttatgactctgttaagggaatctatgttttatgtgttgctgaatttaacgttctgtatgtactctatgatttgcttgcattttgagttagtaaaacgtacaattcctactctttcttggtaaaataaattctcattcatcaaaattatcttgctcggctgctaattgaagttccttttaagtgatgcagattg

SEQ ID NO: 30741 - DNA, 629 bp, Medicago truncatula
  Intron number 2 from transcript Medtr5g036120.1 (locus Med tr5g036120) derived from phytozome v7.0 (chr-ID MtChr5; po s 15053034 to 15053662)
ttgaggagcaacaactttgtgaaagtgactgcaaggtgcacatatttcggatgtgttgaaaaatatagacattagagagcttgcatcttcgaaatctatatcaaatatattcgaatcattaggaagactactgttggaatctgaggcagagaatctattattcgatttgagatcacgcggtacgattattatgttattcgaagtttgttccttgtattgatattattattattaatgacatgttcttatgtaatgcagattataatgtggttgatatttaaaacttcattgctagttatgcagttagcattccaaatttagaggtgaggaacttatggtaaacagttatgcttatctacaactttcaatcaattttacaaaattcaaaaacaaaattgaccatatcccatcataaaacaagttttgcagtgtatgcatttaaaatacttcactgtcgattttgcatattttgcatattttgactgcgtcagcaagaaagcgatactaaaagcataattttttctcacaatagttgtatgttacaatctttttttccttagcaatcttcttatatggtttgttggtaatttcaaggttgagcatatcataaaaaagattgagaatttgca

SEQ ID NO: 30742 - DNA, 168 bp, Medicago truncatula
  Intron number 1 from transcript Medtr6g017830.1 (locus Med tr6g017830) derived from phytozome v7.0 (chr-ID MtChr6; po s 4374572 to 4374739 reverse strand)
gatctggtatgctttatatcataacctatgattattaatgttgtttttttcttttcaaaatagtattatgctgcatgctataagagtactatattttgataattttgtcaattacaatgttgtagatgtgcagccagcagagactgtaactaaatattgtctcaaaga

SEQ ID NO: 30743 - DNA, 514 bp, Medicago truncatula
  Intron number 1 from transcript Medtr4g157580.1 (locus Med tr4g157580) derived from phytozome v7.0 (chr-ID MtChr4; po s 39295431 to 39295944 reverse strand)
aagttagtgctactggttttattttattttcacgtaatgaaggagaagaagttgggtggtaatttcttaattaataaaattatatcaaaacaaataaaaacgtctgtttatttaatttaatgaattctggaaaacaccacatgacccaataattgtatgccgcgtgtcactctgttacccatccttcctttttttttaacagttgaataacggcagggactaaatgcaatatttttacaaagtgtaaggactaaagccaaacaaaaaaaagtgcagggaccaataccaaaatcttgcgaaagtgcagggaccaattacacatttaagcctaccctaaattactctgaagatttattaataatgttttcatatattctaacattattggtactgatatcccaacgatgttggtgagctttacagtgtttattttataatgaaagaattccaagcattaaatttttttgtgaaattggcaggcttggacagactactcaaagagcaacaaatcata

SEQ ID NO: 30744 - DNA, 877 bp, Medicago truncatula
  Intron number 3 from transcript Medtr4g125250.1 (locus Med tr4g125250) derived from phytozome v7.0 (chr-ID MtChr4; po s 29501170 to 29502046)
ttgaagtgggtagtagttttatttttctagattgaatatttctaatcgtttgttcttgataaacatttttgttgtctgaattatgtgttataaatatatttcatactgtgcctgagaaatttaaagggaaacaagtgtttttcgagcttttaagagatcatatactgattgttagttctaaggtacaacatcagagtaaacaagcaaagttaactcatgtctggtctcaaatatgattttgtattgttgtgtaccagtacttttactattatgacattattggaatttgatactagccataactgtgcaccaaagattctacttgttcagttgtttttacaatgatgagaagatatttgaaatttgccagcctaacaagtaacaaataagccttgtgatatttttcaaccttaggaaggaatatcagtcaaagtccaacaatgttacttgaaacaaatttgcttttcaatctaaggggagccttgatgcaagtgtttgaattgttgccgtgtgactgggaggtcacatgtttgagtcatggaatcagtctcttggaaatgcaatgcaagtttgcttattaattacaattaatctgcaacgggtccgatgaccttggaccccgcaataggaagaactccatagcactaggcgctgccagattttcttaggaagattagatagagtcttagactcttagaaacgtatttacctgatagaaaacatggaactgttccttttgaatgttgctttttcttttggtcaagtttgtggatagggtttatggttgatttttctttgatttcttgtgacatacctaattcctgatatttcttatatggcagaacgggaagttgttaagaagcttaaaatcacactg

SEQ ID NO: 30745 - DNA, 776 bp, Medicago truncatula
  Intron number 1 from transcript Medtr4g141470.1 (locus Med tr4g141470) derived from phytozome v7.0 (chr-ID MtChr4; po s 34931276 to 34932051 reverse strand)
tcagagtcaagaaagtaagcgtgacaatattattaattaaataaattttggtataaaatctgattatacttctaatgataagagtgaacatgcgaaaggttaaacaaggatgttaaaatcttgaccaaaataacttatcagattcctttataaagaactcatcaagccaccctcaaaactgctatgatcatcataaataataattaatttcaatttttggcaaaaataaacacatagtttacaaaaactaacttaatgctcagagttaagtgcaccacactataacacaaggcctcttacatactaaaactataaaagtttcacgctttcaaaatcccatcaataaacacaggcttaaaatctcacacataagtccaaactaaaacaaagctattggagtagcaccaaattgcccacaagctgattctctaaccgaccactcctcggcgactgattaaagctcccctgtacagatagatcacactctcaactagtttgatattgtctggtggttcattattagggtatgacgtcatgtgttgccattctacagccctcccccaagccagaatcaagattttcttagccctcccatagcagtcttccccttcctaattcaacggtgttttcccccttagagatagacattcacaatgatatgaatatgatgcacatctatatatacataacacacaattagcaccatccttgtctcactcaatctataaccctcaaaaataggacatccaccaagcaacgttcgggataggtcgctc

SEQ ID NO: 30746 - DNA, 821 bp, Medicago truncatula
  Intron number 1 from transcript Medtr4g104110.1 (locus Med tr4g104110) derived from phytozome v7.0 (chr-ID MtChr4; po s 22621963 to 22622783 reverse strand)
tatcttatccaccgacaacatgtatgtcatgcaaactactctcactttatgttccatccttttttttttatccattagtaaccaatttatatgtgtgctgcaacaccaccaatgcactgcacacagcatgatagtttttattttatttttggtacagtacatagaacataatattttttattccattgtttttttgctgttaaggtgtgtgttatgtgaattggaattaacttaaggaccctttggtatcgaaaaaatgtcatctgttttaatatttaattaattaatttgaccaaaatactagaggcttatttgaggttatctatttagataagtacctttctgtaagactatttagaagagtttatttattgaaaaaacttatgacatgtgtgtaagttgttttcttcttatttccacaaattctatatatagttaatgataacaatttgactttatcttaccttttgtaattgaaataagttattttgaacagttttttttctccatatcgacttataatttgggatggagggaataacatttaactgtcatttagatggcaaaggaaataatctcaatagttgataagaaaatatccattgatatttcaacacatctatattttgttatgtgtgtgcacgtaacatgtactcttgatttagattacctactttgaaaatggatttgcttactctaataatccaaagcttgagtcggtccttgggccggatatcaagtttcaaaaaatatttggttctgtgtcttaagtctaatagtctattcaaattgtgtatgttttgatttgttcagagaccaat

SEQ ID NO: 30747 - DNA, 393 bp, Medicago truncatula
  Intron number 1 from transcript Medtr6g084030.1 (locus Med tr6g084030) derived from phytozome v7.0 (chr-ID MtChr6; po s 17297375 to 17297767 reverse strand)
ggttaattactaaatcatatctatagttgagtcattcatatatcctactgacttgctacagatagttaacttcttcaagtcaaaaaatcaactttagttcacttatgcatctacttgcaaagtttcaatcaaacaaattctgccacgtcatttattttgcttaaaaaacatattaccaagcatgattttttttttagggatattaccaagcatgttgttagtcatgcctttacaatacatagtacacagaaaatgagcgtgtactactaaaacttaatagtactaaacaatgaaacatagacttgattttctctgtctttaatcagtttgaaacacaaattattgctagtatacctctttcctttaggcttccggaggattcttttttgtgta

SEQ ID NO: 30748 - DNA, 548 bp, Medicago truncatula
  Intron number 2 from transcript Medtr5g027520.1 (locus Med tr5g027520) derived from phytozome v7.0 (chr-ID MtChr5; po s 11228808 to 11229355)
gaagaggaatctatcgacaaatgtaatttctctcaattcaattttcgtgtttgtgattttcgttttgctatatcaacgttcaaaaaaactgatctctgaatttgatttttgtccgtatcatgtagcctagtagtagtttcagatcatagtagtactttctatattcgtttctctactcgtcattgagagtttccgtataatatagtcatatcctcagtggtatatgttttccgtcacgccggtttttcgaaaattttggctagttagcttactatgtttaatttgataatcatagcctaatttcagatctaactccactgatgatgatgattatacaattcgaagtcacttttctacttaataaatcaattagaattgtaaaatcattatcagtggtatgtaactatgtacatgctttcgttctctcggtttttcattttcaattttggctggttaaacttgtatgtttcattgaacaatcatgttttgtctactactaacaacactgtgcatcttcacagtgatttctcaagatattgacgccgacg

SEQ ID NO: 30749 - DNA, 990 bp, Medicago truncatula
  Intron number 2 from transcript Medtr5g011600.1 (locus Med tr5g011600) derived from phytozome v7.0 (chr-ID MtChr5; po s 3160647 to 3161636)
aagcttggaagggtctttcttggggggtaagtcttttaattttaattctttaaaaaaaaaattattattattattttgacacaaaataagataacaaattgagtgattaacgtagttgaggtagttcaaattgtttgttgttgcttgaaaacatacatgttggagaagtcccacatttcttataatttttaaggaagaaggagaccaagactatttatataacactttagactagtatctgacttttttcttttctcttgcgctcttttcttagagtgttgtgagatgtagttaggtattttctttggacggtgtgggtgtactagggccgatgggtgtttgagaggatgtgttgtaaaaatttgtgtggttgtcattcgacaagggtcgtgtttttttcttcggttttggaatttccatatgtttttgtgttgtgattctgttcctttacatgtttaattggatggttaatgaatataacaagttgctgcaactcattaatcataaatcaaacacaattttgaatgtcattaactacaattttttggtgtatatttgaacataaagcgtagttaacgaatatcatgtatatttgaacacaatttgaatgattaattgatatcatctatatttgaacacttgaaaatcatgattaataacatttagggacgattaatgagttgtgatagattgttatattcattttcttttttaaaagattgttatattcattaatcaccactgaatgtaaccacatattttgaatgtgttaatcatccatattgttgtcgaaatttgcttgaaaatgtgtacaaaaatgtcatttttgtattattatcatctctttgttccattgctatgcttctctatgcatgtcttttacttcatatctcatatttccatttgtaattgcaaatgtagtttgcataactcttaaccctatgttatctaattgttgtaggtacctctacttggtggagcattttgtgc

SEQ ID NO: 30750 - DNA, 860 bp, Medicago truncatula
  Intron number 2 from transcript Medtr4g109560.2 (locus Med tr4g109560) derived from phytozome v7.0 (chr-ID MtChr4; po s 24561271 to 24562130 reverse strand)
atatacgaggtatgctctaattgtcgtttcatgttaatctatcctatattgtatatacacaatggattctttagtttcaaatcagaaatgcggctcaaattgccctcgtgcatctaccattgcttgtgatacatgtcactgattgaataccctaaaattgtgttttgcaattcccactgccacatttagagctgcatctcctcttggtttatgtttacctagtattctgccttaattattgttgtaagcattgtaatcaaagccatgtggcaagcattcgaaggtctcagtgcctctagctggtttaaacagggttctttagggtggtattagacatgcatatctttttcaagtcagtaaaatagtcaaaatgtttaagggagttaaatattcagaatgctaagaaaagttacagcataggatattgtaaatttaacatatgtttaattttatttttttatgaatgaatacccatgcctaatctatatggacattaataatattagtcaaatattttactgcttaattttcttctttatgaatgaataccatgcctaatttatatggcactctcgtctcagttcactaaaacctgatagaactttatcagttttcctttgacttccttgagttttatttatagttgaatgcaactctgctatcatttttgtcttgttatctttgataatctttcctaatatttttgcatgagctcaagtttttaacaataacggattaaactgtttttgatattgttagttccctacactgccattgtttttcaatcttgccagctactctatttcttatatatgtttgttctttgggtacaggatacagttgaatatattgagaatcag

SEQ ID NO: 30751 - DNA, 684 bp, Medicago truncatula
  Intron number 1 from transcript Medtr4g109560.2 (locus Med tr4g109560) derived from phytozome v7.0 (chr-ID MtChr4; po s 24562250 to 24562933 reverse strand)
caactcttcttttcttccttcgtgcggttgaaagggtatttctccttcatgggttttttgttttttgatcagaagtttttatttttctttaaaatttccttatttatctatttcattttataattttctgtttatgcgtgtggttttattattgttgtgatcaaacaaaattgaacttgtttctctttctctctctctctctctgttgatgagagagaagattctgttgagggttgaagctgtttgagtgattaggacaaagaagttaaaccttgtaggttgtgtttggtaaattagttgaaggtattggtatggttttagaagataaagttattggattgttctgttattggtaggtacagagtgggacagtgggaaattatggttttaattttggtattattagttaattacctgattaaatggtttgttattattgcttcttgtttttggatacatgattgtttatgtctataatctatttgtgtcatgggttggaaatggagtttttctgtattcaatgttatgtcttttatgattaatggtgatatttcatgatcaatgtacttttagcctgattgataatgtgttgtacaatatcaatttagagactatgttgaatgatttcttctgttttgtttttttgcagataattgtgtaacatatcttataagttgagacagt

SEQ ID NO: 30752 - DNA, 847 bp, Medicago truncatula
  Intron number 1 from transcript Medtr5g012880.2 (locus Med tr5g012880) derived from phytozome v7.0 (chr-ID MtChr5; po s 3794490 to 3795336 reverse strand)
cctaacccgccatcatccaccgaatcttcccaaaggtatggtttcgttatttgagttgatctctttatttcttctctttttagtttttacaatttcagattctgttttctgtttattttcttcatcgtttgtatcttgcaaattaaaccggcaatttatcatatgttgttaatcacaaaattgcaaatgcttgttttttaattggttttagggtctgtttggataaacgcagcatatagcacaaacacttatcatgataatcaccacttatgtataagaattacataagctatttttatagcaaaagataaaatgaagtttaattgtttttgtatatatgttataagctctttttataagctataagctagactggagaacttacgaaaataagctgtaaaaagcttatgaaaattatcataagctgtttttgcaagttttctcaaacagtctcacaaagcttatgttgttagataagctcaaattagtcaatccaaacagtccctaactctataactagtatctctatagatattgctggcaaaggtatacgcagacagtattgtatgcctctgaattcctacgaagcctatcagacactagatatgacgctcacttgtcaacaccatactgtagaaaataaattgatcaaatgtaatcacatgtgctggtgtcgatgctacagaggtctgaattctgtgtaattttcaaatactggcgtacaaaattttcataaacagatatctttatatgaggtatcattctactaagcagaattttattttgttagaaaaatgtttttattttctcatgctgttacagggagggagattttggagtgatgaag

SEQ ID NO: 30753 - DNA, 425 bp, Medicago truncatula
  Intron number 2 from transcript Medtr4g032170.1 (locus Med tr4g032170) derived from phytozome v7.0 (chr-ID MtChr4; po s 7619490 to 7619914 reverse strand)
ctgtagcactggtttgtatttctctctatccttcaattcttttacttttatgattaatgaacatgatttttttcttcttcttaatgaatttgactctttttttattgttttttttatttactcgatttgatttaaaaataaatatatatgactcttctagaaaatcaattttttaatctcaaccgtctgatctcgaattaaaagacgggttcttttaaattttattttgttattgtgtaatctgagccatccgatctcaaattaatgactcagattgtttactgtgcgatccagatccttattgaggctgcatattcaaatttactcttttttttttttattttttttttattttttttttattttttttttttatcactttcattacagacaggaggacctgattgggaagtgaggttaggaag

SEQ ID NO: 30754 - DNA, 571 bp, Medicago truncatula
  Intron number 1 from transcript Medtr5g019510.1 (locus Med tr5g019510) derived from phytozome v7.0 (chr-ID MtChr5; po s 7273949 to 7274519 reverse strand)
aaaaattcggtaagcaaaaattatgatactcatcatactgatagctagtattgtaacagcaacatttgattcctagctcaaagccacttaattatctttggtctatattaccacttaagatggaattggacatagcaaatagtcggaatgttattcatgtgacaccttaagattagtggccactaggacatcctccactgaatctatgacagccaccaagttccttcaaatgtgttctcagtgccatatatactcttctatcactgtacatatgtttgaattgatatatgatttgaattttaagattatctctattagagttaaactcctatcatgttcagatacaaacgctcatgtaatttggggagtttattctaattgagttttgtctccactatctatgaagtctctgttgaatgcaaattcccgtgctgttgttgttgtttattctaattgaattgtgaattctaagattatctctgttagctattacacttgtttttcttagtgtccttgttgagcatggtatcaacgttgtagcttggttcagttttgccacattcagttgata

SEQ ID NO: 30755 - DNA, 713 bp, Medicago truncatula
  Intron number 2 from transcript Medtr4g033850.1 (locus Med tr4g033850) derived from phytozome v7.0 (chr-ID MtChr4; po s 8469229 to 8469941)
tcaggtaaaagaaagggaaagggaaatcgaaggaggtgatactgttgttatggaatttactttgtatttattgtgttttttttcttgtgcgtttgttgtaattttcattaataaaaagattcaattaatttaagaattatttttctggttgtgtttgatttcgagagatgtactttctgagtttgaaaatgaagaaattggaaatgatttttcacatttatgagttttaaaatggaggtgaaaagattaattttctgggttgatgaatttctaaaatttttgctgagattgtttgtgaaaatgatgattttgttgttgattgttgttgatgaatttctggatttgttgttgttgttattgatgaatttctagatttaaggattgttgttgttgatgaagatgaagaagaacaaaaaaaattggtgttggtggttcaccattacatataatggtcctgcaatctaatggctgaaatcatatctgagatattagacattaaaaaaaaatgctaaattacatttttggtcccttaactatttaggtagtatcactttggtcccttgattaaaattcgatttattttggtcccttaatttctttccgttatatattttggttatttccttttaattcaaaaacgttaggttttcttcatcttgaatttcttgacttgtcaagaaaccgtttcattgatcgaattcctcatctaggtc

SEQ ID NO: 30756 - DNA, 941 bp, Medicago truncatula
  Intron number 2 from transcript Medtr5g088440.1 (locus Med tr5g088440) derived from phytozome v7.0 (chr-ID MtChr5; po s 34263029 to 34263969)
aacctatatcattccatcggttaccaaatgtgagaggtgtcctctttgaggtatgcttctcacttaggttaccttcacctgatgtttggacggatatcagaattcttctgtacttgttcacatgtttctgaggaatctattcttactgttttaatagtatcgatcagcataatcctaaacgaagaaaattttggttagaaattataatatagttgctcatgataaaagccaatggataaatgaaattgtcaacataggataggaaagatctagagttccttcaaagaaagaaaaaccatatattatcaattggatggtggattttgtcaaaactgtattctattgacactaactacatggatataaaactctagaagaaccaattcagcaatagtatgtttttcagccactgctacaacaactctatctgtatgttaaggtaggcatgtgattttcatagctagcatctttcatgttcttgagttgtttaaatactgctatcataagaaaaacttgctcatcaatatcttgtcaatttgacaacaaattgtggagagtctcgtgatttcaatacttgtgtagtggtgtctttcttaggcatgacctgtaaatgtaattgtccagtgcaggcttgcaactttgtcaaagacacatgaccacttcaataacaaattatgctttgtctgtatagcttatccatttcaaatatgattagatttctggttttggaattagttcttgtgttttgctctctaacattgacagcaaacactgttgtttacctttgtcaatttataacattacttgatttgatgttgcatttcacattaaaagggatcatgtaatagtgaatctcttgtagactagaatgcctatggttgaattcatctgttatcttatatgcagcaacgtttccattggatcttgttagacggaggaag

SEQ ID NO: 30757 - DNA, 1043 bp, Medicago truncatula
  Intron number 1 from transcript Medtr5g040050.1 (locus Med tr5g040050) derived from phytozome v7.0 (chr-ID MtChr5; po s 17070733 to 17071775)
aggaggggcagggtttgttacctaacctaccaacacctatcgtgcgattaggacgaaggcctttcgcatcaaccattatccttttgcttgcatcaatttcctgcccaattaacccttatcaaatggctatatatgcatgagaattgtttgtgatgatggatggtggctgaaaacgcaacctatgtcctgttcttgctaccctaccattcctttgtccttttcccaaccatatatatgttcatttctacgtgtgccacacattctcactagtcactactactttctcaccttaactcttccatagttacatgcatttatacgttataaatcttcttccaactatccatcttatttccaatacaatcacatagtataaaagaattgtgtttgtataatggtgtacaagtaagacaaatcttgcatcatgttagctcgataaatcacatcttataattaaataaaatatgatgtgatttaatttattgatgcaatgatggaaaaaaaacatttatacatgatattattacaagactattttacgtgtacatatcagacaaaaccgtctaaagttattagaagttctagaaactttgtaaattgtataaactacactattatattatctcttacaacaaaaatcaagcatctttgtgtgcatttttaatttgcaaattctttaggtatgtgtgaattgtgattaatcaattaacgttttactattcaagtcatccattattctatttgatattctctcacacacacatctaacaacttagaaactgtgttattgagagactcctatgcaacttaaatactcatcctcaaacctagtgtgggtcatgaggcaaattctcacattatcatccttatccagtttgatataatgttaacaatgaagagaaagaaggatagggttcaatagtgtgaataacaaaagtgaatagtaggagacatacaaagagtatatataatagatgctaaaaggaccaaactactcttaatatatagggatcaaataccattgtgccggaatttggtcacca

SEQ ID NO: 30758 - DNA, 687 bp, Medicago truncatula
  Intron number 1 from transcript Medtr4g029280.1 (locus Med tr4g029280) derived from phytozome v7.0 (chr-ID MtChr4; po s 6949473 to 6950159 reverse strand)
ttacacaacaatacactttaaggtgcttgctcaacttgtacctgtttttttaattttaattttattttatgtttttttgttaatatatgtttttagttttgtttttcaataaatatcaaaatcattaccctaataccccaataaaaaaaaatcatctttttttcataagggttttcattaagcatctaaatttgcttaatttctaagctttgttagaaaaaatcaagattcaagacccatttggctaaaagaaaaaaaaaatcaattttttgttttgttttgtttgaaatcaaatttgttttctggggtagtggattttgtggggaagagggtaagaagagaacaaaggtgtaaactttatggtcttttaagacttttgggtcatatgggttattggttttgtggtcactattttttgttctttgttcttgttcaaattggtaactttttctttgtttttgtttttagatgaaggctttgcacttaacttttgaggaatttcaagtgaagggagtgttggataatttctcttcaacttcaaattcagtttcagattcattttcattgcttttgaatcaacctcagcaacaaaattggtcattagataaagaagattattgctatgtggagcccacttctgttcttgattcaagaagaagccctagtcctccattttcatcttcaaca

SEQ ID NO: 30759 - DNA, 663 bp, Medicago truncatula
  Intron number 1 from transcript Medtr7g076710.1 (locus Med tr7g076710) derived from phytozome v7.0 (chr-ID MtChr7; po s 15724730 to 15725392)
aagctggtctaactgtatttatttttcatagcctaaaatcacaatgccaaacttatagctaagactacccttaattatccatatccatagcccatatacaattccaccttggttagtagcattaccaatgaatgaaggtattccaaagtcagccagtattactaaatagaaaccatgcttcaattttcaattctactataacctacaaaagcatcagagttttcccacgacacacccagcatcagagttcaattctcaccttagcaccgatacttttgattaaagacgtgtttggtgtcagacacagtgtgatcagttatgttattttttcaattgctaccgttgacgatgtgtcattgtcgtgtttgatgtccgtatttgtgtcattgtttcatagattagcgtacattttttgtcattatgcaattttattaatagttttctcataagttatgagtcataacacaccctatatcagagctcaatatttacaatttttttgacataattcaatcttatgcgcaacgcacgggtcttaatttagttttttttttctcttcaaaaaattagatgaaaacctgtgcgttgcgtgcacggaagaatatttttagcttattatatttaaaagtcgtatactgaggtttctggacttgaaaaaaaaaa

SEQ ID NO: 30760 - DNA, 898 bp, Medicago truncatula
  Intron number 3 from transcript Medtr5g075490.1 (locus Med tr5g075490) derived from phytozome v7.0 (chr-ID MtChr5; po s 27513802 to 27514699)
agttggattttagggtacgctagatacatccttgtgtgtattattttcctacaatagttcacttgtcaatccgaagatgacgaagacaatggtatgcagtgcaattgtgacttcaacaactgcatatgtcttcaatcttattgcgaatatcttgaacatgactatgatgatgaggattttgcatttcaagtctagactaaatacatccttgtgtgtattatttttctagaatggttgttgtcatcttagattttttattctgccatttatttattttcaatgttcacttgttatggataactccaactctgtttaattaattagaattattctccttgattaattactagtacctcttttagttttttttttcctttcttttaatttaaaatggccgattcagttgagattggataataaagcattcgaattaaattacattgaaattcatgaaaataagaagatcctactatactcctagttcaattttgagtatatacctagttactttctagagctgaatgaagaagagtatttagatgggttgtttctgttctgagaaagggcccttaagagtgtggtcgttagtgtttagatggcttggtattggttttattactccatcaaacttttttctacatttggaatgttttatagaggaggctcagttgtagaagcttagaaggagttattggttaattcggcactggtttgggttcttcggaaggcatgaaacgatcatatattcaggaataggttgtgtgtactagacagataccttagttgttgccggggggttgtcgtagctgcttttgttttttaactcagtttgtcagtatttagctcttctgtggtgtatattcagagcaggtgaaggttttttctgtgttctgttttc

SEQ ID NO: 30761 - DNA, 612 bp, Medicago truncatula
  Intron number 1 from transcript Medtr5g084350.1 (locus Med tr5g084350) derived from phytozome v7.0 (chr-ID MtChr5; po s 32113398 to 32114009 reverse strand)
ttctcaaccaaaatatctatagaaacaaggttcttttctcatagccctttcaactctaacaatgaaaatttgcaattgtcacttgaaaaagatttggttttggacaaacatgaatctgcactaataatatagttttagaattaaaattcatttttattttatgtaacctttaatggttgaacaaacatgaattttcttttatttaagaattcaaattaatgttttaaaaattgaaccgaattgtacacttcaaccgattgaaccttggacctgcactatctatggttcagctatatgagcggtttgattgaggttttaccgtcttattttgaactgcttaaagcagttgaacacgacagtagttcaaacacttatattgttttcgtagaaaggctacaaagaacactcttggtttagtttgaactacatttactagtcaattctatccatgttttatatttttggtgaaaaattaatttatgtctataaaagtatgtatgaaaagaacatttatataaagaattacttaattgaagttaatcaagttatttagtagttatggatttttttctctcaggtgaagaaaattcctgagacctttaattcaccaac

SEQ ID NO: 30762 - DNA, 797 bp, Medicago truncatula
  Intron number 3 from transcript Medtr4g141310.1 (locus Med tr4g141310) derived from phytozome v7.0 (chr-ID MtChr4; po s 34877752 to 34878548 reverse strand)
cagtctggcgtcttgtcagtttaggtacttgatgcctctatttttggtattgaattagagtcctgtcaaactttgatggagaaaagctttatatgctatatgtaaaattagttattcttaatccattaaagggttggttgaagaaagatgaaatttgataggtctacttatttgctagatctatgttaatagaaataaacccactgtttcttttcaagagtctgtttgttacagctttaaaaaaaaaaatcactttttaaacaaaataatcacttgtagaaacttccatccgtttcttacagattttaaaaataaaaatctaaactgcttcaatgagaagttggtagcttctcggaaatcattttctgataattgattttttttataaaaaaaactgattttcattctgctaaacaaacacaaagctgcttctgctttttttaaaaatctctaaaaattaatctctaaattattgagtatcaaaatcacttttttcataatccataacaaacagactctaaatttttcttttttcatcaactttcatgcattttatttgcttctatatatttgtaacgaagcacatattttttcagtttgccataactaattacatgtgctaaattgatgtcactttagaagacacttgacaatagacaataccttctttttagcactctatatagtaaatacattccctattcagttttttatttatcttattctgattaatattaatattacatcaaattggttcatttattactgcagaaagaaattaacccggttatctgtaa

SEQ ID NO: 30763 - DNA, 431 bp, Medicago truncatula
  Intron number 1 from transcript Medtr5g027600.1 (locus Med tr5g027600) derived from phytozome v7.0 (chr-ID MtChr5; po s 11265824 to 11266254 reverse strand)
tctgagtctgagctagtaacaaatacataattagcagccgaaaaagagagagagagttagtcacttctccatgttgttatgattttttgaatttgttgatttcaaactttattcattgttttgttctgtttttgtttgcatttttctagtataatttcaacttcataactatttgactgattgttatcatttctctcattctcgtgttgagatagtcacatctaaattttttgagttcaaactataatttcaactttgaattgttttgttgtttttttcaaattttgttcatagttatactttctcttgttctagtatctgagatagtcacatgaatagaataacttcaatttcattataatttcacttttttggttgattgttcttcacgatttcttcatgacatgttctaaatttctttttcagatcgg

SEQ ID NO: 30764 - DNA, 850 bp, Medicago truncatula
  Intron number 1 from transcript Medtr6g030710.1 (locus Med tr6g030710) derived from phytozome v7.0 (chr-ID MtChr6; po s 6801530 to 6802379 reverse strand)
caattcttcaacattcttcattcctaaccataaaggtataatcttttttaatttcattattttatacaatagggtttcgtattctttttattttatataatttctattattattaacaaaaaaaatacatttttttttttctatttttcgtttaatagagttagaattaattagggtttttaggtagtgaagtttttgattcagttttgagttttttgaactgacccattttcaaaattagtctttaattttgattttgttaaagaaagtttttaactttttgatttaaattagtttgcttattgtatttaattgtgaaatgtgaaattttgaactgacccatttgcaagattttttgtttttttttggtattttgttacgtaaagttttgatttttaggtcgaaatagctgaagaatgaaacggggttgtgaatttttgttttatagaatttctgatatgaaatgtgaaaaatttgaactgatccatttgcaatttgtgtggtttttttaattttgttttgaaaaaatttgatttttaggtgaaaatagctgaagaatgaaaaaggttgtgaatttctgttttatagaatcttttatttaaaatgtgaaattttgaactgacccttttgcaagattggtggttttgttgatttttgttttgaaaagttatgattttttggtgaaaatagctgaagaatgaaatgtggctgtaaatttatgactttatagaattttttatttgaaatgtggttgattttttgtgtttgtttgttcatgattctttgtatttatttgattttattgttttttgttttgaaaagatttgaactttgtgaaaatagctgaaga

SEQ ID NO: 30765 - DNA, 848 bp, Medicago truncatula
  Intron number 3 from transcript Medtr7g089540.1 (locus Med tr7g089540) derived from phytozome v7.0 (chr-ID MtChr7; po s 19727313 to 19728160)
atcctcgttagtgaggttagtttcacgaaacattgctcaattttaattacctaatttaatttatagcttgtgtcatagtaataataagttttgtcaagcattatcgcttgatctaaccttgattttaagaacaagacgtgtttgcatttgattttgttgcattatataagctagtgaagaaatttttagctgtaaactgtgataggagcgagaggaattccagagacgagtcttgttagaggaagctgaaattggttgaatgagtaaaagtgtgcgatatgaagtcaatgtgacacatatatggaaagtaatcgactagttgttatcgttgtttggtaaaatgtagtggagagctgataaagtagttgatagtagatcagcttatagcagataatttagcagcagattgaatttgtagtgtttggtaaaattatcggttattataagtttctagcttacctgattcatatctaactattagtaatcaaaccgaagttgattatagaatagcttctagcttacaaaagtttctccgttataaaaaaatttgtacgaaaaagttcttatgagcttataaatgttgaaatttaacgagatatgttctgaaaaaacagagatgcagatgctaatttctactcaatggttgtttaaaatactaattgttattgcaattggcaagattctttaaataccctctttctataaatacttattagaactttatgcgactaggctctagctatgatgtaacgagcagtcggattgttaagaatgattgttgtatcttttctattctatgtttgcgttatggcttttaactgaaaaccttttttcatgctagattgggg

SEQ ID NO: 30766 - DNA, 473 bp, Medicago truncatula
  Intron number 1 from transcript Medtr7g083930.2 (locus Med tr7g083930) derived from phytozome v7.0 (chr-ID MtChr7; po s 18054637 to 18055109)
gtatctgtgaggtatatatgatcttttctctttttggtttttcttgaattcattatgattttgtttatgtaatttttgttgtttacaatttcttcaatcagattatgcttcaatatagacaagatgtaaatgatggaatttttgtgttttttgtgtctttgtgtgtagaatgggttaggaattttgttttatttgattttgctaaatttcttaatcattattttgtcaattatgcttcaaattttcatttttttttctaatcttaatagtttttgtttcatatatatgaagttttttttattgatttaatactctagtttccgggaaaatgactctgataatctggagttcggttgggagataaaacccgggccaatgattgttctagccagaatttgaactcggattaatgtgaagttattaatctgatatttggtactaattgttttctcatttgtctggttttcaggaat

SEQ ID NO: 30767 - DNA, 612 bp, Medicago truncatula
  Intron number 3 from transcript Medtr7g083930.2 (locus Med tr7g083930) derived from phytozome v7.0 (chr-ID MtChr7; po s 18055436 to 18056047)
tttaaatccacaaaggtaactgaaaaaaagaaaagaaaacacctacttttactttacccatttttgaaggataatgttttggatagattttgtttgaaacacatggagtcactctgtctactttttgtgctcacatcaatttttggacaatgatgtcaatctcaaatcacagaaaatagttgtccgttcaaattccatcgcactacagcgcattagccacaatttgacacaatgttgttaaatagcagctaatacatagcagattttgaacaaattattaatattgtgaaatagtggctatggcactgttgcatagcggaatttgaacaaaccgctattttttgcaatctacaattgtcaacaccttgtactaaatcacatgagaacaatagcggtttctccaaatttcgctatgctacaaccgttatttggcagctatgattatgaagttatcagacttacaattcagtaactccaaattagctgacatgttttggacactatgtcatgttttttgctcttcaaactgtgtcattcatgttatatagctaagtgaacgctgaatattccaatataataaatccaaatttcatgttataggttctgccagtg

SEQ ID NO: 30768 - DNA, 748 bp, Medicago truncatula
  Intron number 1 from transcript Medtr7g011530.1 (locus Med tr7g011530) derived from phytozome v7.0 (chr-ID MtChr7; po s 2833957 to 2834704 reverse strand)
accatttttctcataccttcctcattttcatcaaggttatcattgtattcttatttgctttcgttgatatttgctttcaagacaagacctttcctctacttttcaccttttttactttcaagtcatcttgaaccatttcctatagcattctaaatatcacaatctactctctcgatgaaaaattttcattctcttttttcaataaccatacctttcgccgttgaaagataggggactgtttattgaaccgttgtttgaagtcatctttgctctcgagacgattagtccttaacaagaattcagggtatgataacacttgttcaacaagtgacttcaaacacgcaagggagatgtgtgtcaacataatcttccttttaattgagtatcaacacaaatatgccatttaaaatctttagtgtatgaaagttcagcctacaaataaagcactttgaagctattaggcataaaggttgaacacaaaacacatgtaaagctatatacataaaaaataaaaaaaaacatgttcaactattattcttagtaatgaaaccatatataataaaataattgatttgacccaattctaatcaaaatgctctcagttgtgtttcttatattggaccaagaaatttccaatttcgcgctgtaccatatcatgatatcattctgctaatacacactgcagtttagacaagaattcaagtacgtgtttaacctaagttctctggttatttgattcatgcaggaa

SEQ ID NO: 30769 - DNA, 709 bp, Medicago truncatula
  Intron number 2 from transcript Medtr4g081760.1 (locus Med tr4g081760) derived from phytozome v7.0 (chr-ID MtChr4; po s 17184989 to 17185697)
tggggtattaaaattttaataagttaatttaatttgatcaaaccatttatttgtttacttatttactcaatttacttaacttgtgttgtgttaaacaaaaggagttgattaggttgaaatgtgaagctaaacttaaaggtggattttatgttgaccctgaagctatattcttggtaattatcattgttatcaacccaaaatcaaggattattttgcaactattatgtttgagaccaataatgtacagattgatgtttatgtttttttataactgaatgaattggttttattttttatgggtgttgattagtaacttcattggctgattgagaaatttgtcaaggtctgtttgtgtttaatttttaatgttaaataaaattaaaatagtatgttgatttatagaagaacatatatatacttgtgactgtatgtacaagtgactgttgcacttgcatctctttgtttttgcatgagtttttgaggtgctgattttttgctacacaaaatatatgtataggatcgatgtgtgtttgtgtctacattttctttatgtctattgtatgaactgtaaattgtagctttgaaacctatgtatggaacaagaattttaaggtgattgacaacaatcatgattgaaacagttatcaagtttaaggtgattgaaacaatcatgatttggatcttacttatttgattttattttgtagat

SEQ ID NO: 30770 - DNA, 835 bp, Medicago truncatula
  Intron number 1 from transcript Medtr4g072500.1 (locus Med tr4g072500) derived from phytozome v7.0 (chr-ID MtChr4; po s 13924661 to 13925495 reverse strand)
caaactggccttggaaacctcttgggagcttcaaggttcttttagtttactaccataatttataataggtttttttagtttactaccatcatttataatccatctctctctaaaaataatattgtcttttcgtattctatatttttttcactaacgtcgaccctttccttaacttaatttccagtagatcaaaaaacagaaaacagagaataaagtttacctacggtatgataggtgttgtggataattaataggataagattaactgaaaacaattaatattgttatatcatttgcgaataatacctttccataacaatagataaagtataatgatatttagtgatgctaggtatccttgaagaattgcgaataatttatctaataatacatgtgaattaataagtaaattagcaaattgggtaagaattagtatgcatgtatcatttgtaaatttgtttatgtaattagaaaaaaccatgatattttttttaatggagatatttttttattttttggttttataaaaccattatattttagtttaaaaaaaaaacatactgcacccaatgttcttttttatacgcactttctaacctgcaaaaaagctcataaaaaatgattgagggagcaatcgttatataaaatattcttttttatcatcaatttttttagtaaggatcctaactccaactttttcgtcactaaacattatgttttttttattggtatatagttttttgcatttatattgtttagattatgactgacattattttctgtctttgtcttcaaaatgttccctgatgatgacatagttcgtgattctaagtcc

SEQ ID NO: 30771 - DNA, 794 bp, Medicago truncatula
  Intron number 2 from transcript Medtr4g121900.1 (locus Med tr4g121900) derived from phytozome v7.0 (chr-ID MtChr4; po s 28732421 to 28733214)
gtatctgcaagtctggaacaggaattcagtaagtttaactctaattaatgaacttttaaaaaaaactctaattaattaacactatatactatgttctttttatttaattattattattattattattgaataagtttaggttaatattttaaattgtcatggtttatgttttttgtttcacagaatttaaaacagaaaagcaacctgttaaatagaaaagcaatcttggcaatatttaattaagttactaatttaaaggaagaagggaattgagattgaaattttggtgataaatgcccccttttgggcatgtagagagaaaacctatagattcggtagtaaggagagtagatcaaatgaaggatagtaagatcatgaaatgcaaaggatgtcctagaaaaactattagcaaatacttgcagattagtgagttgaaccaatatatggtttatgattgaacaatatcgcataatttgatccatgtagacgaccccacttagtgggataaagcttaattgttgttgtatttaaagacatagatagatagttcaatttatggcttaatgtatgcttcgcaagaaaagaagcattaaagacatagatagataattcaatttattttctgcaagatagctattgtttttgcctgtatgagcttttccttgtgtttcataccatgatagtgtactgtaatatatgaagaactaaattttcagaactttgtagtagtatttcttgacaatattgttttgtacttccgtgtaggggggattttaacttgaccaattttcaag

SEQ ID NO: 30772 - DNA, 902 bp, Medicago truncatula
  Intron number 2 from transcript Medtr4g084430.1 (locus Med tr4g084430) derived from phytozome v7.0 (chr-ID MtChr4; po s 17746869 to 17747770)
caagagaaattttcttggtcttctgttattcttccgtatgtttctgtcactctttctctactgaggcattgaattagataactgttttgtgtgtaggataaatgtattaaagtatatgatgttttactacttgcttttgcttcatagacacttaataaagtgaatactaatgtgaaagataatggaagattaagatactagactgaatttcaattaagattataatcagttccataacatgtgcaaaactgaaaggatgcaagaataagattcttcaattattaaagagtgtgtttggattgacttatttgagcttatctcctggcataaacacttgtgagttgtgagactatttgggggagcaacgagagattatggaaacaacttataacttatatgaaaatagtttaactctgttttatattttgttgtaaaaataacttatacataagtacttatatgataagcgtttatgctataagtgctcaattaagttgtttatccaaacaatgagaggttactgtaattggtttatcaggatcatcaccttgaattgagactgtactgggcttaaattatctcaaagtctagctcaaactgtccaaatcattataagcagtaccttgcccattttctttgttggagtggtatcttaaaatatttaaccattgaccaaacacaaacacattctaattttggaactaatactttgcttctagagtgagggtatacagggaattatgacttaatgattgtgctaagtttatcttctttaataatcagaacatcatgattcctaatgatcgagctttgaaattttttaaatgtatgagctcctggtctatgtgtacctgtttcaaaatttaggtttgttttccctgcattgggtggcttgctgtttg

SEQ ID NO: 30773 - DNA, 528 bp, Medicago truncatula
  Intron number 1 from transcript Medtr4g158410.1 (locus Med tr4g158410) derived from phytozome v7.0 (chr-ID MtChr4; po s 39786609 to 39787136 reverse strand)
gaacccttgtaaagaattctttctttcatctctttttcattctttaatttggattgtttttctactgacacaaaatgtaagtaggtattgtttgttgttttgtctagactttaagattcagggtctaattaaatcagaagtcttctcaaatattaaaaattaaactcttaataaaaaatgcatttttttagaagagtcttcatctatttaaatcaaaaataacattaataacataaaaaaataaaaataggcatccttgtaaatttaaataaaagtaaatttttacgaaagtaattaacttttgttgagctccactagctaatcacttttttttaagaagtcaaactaactattagctgttctaatcttcttaaaaacggggttctaatcaaaaggaataccaaatactaaaaaaaacacatcacttatttaatgctaaatggatcttaagtatattcgtctttgttgcttaaaaaagagtttattggtcttgctaatataatttgccatgactgcagaaaattccag

SEQ ID NO: 30774 - DNA, 433 bp, Medicago truncatula
  Intron number 1 from transcript Medtr4g107590.1 (locus Med tr4g107590) derived from phytozome v7.0 (chr-ID MtChr4; po s 23534815 to 23535247)
aacaacacagttgctcctgctctgatcttcatcaggtttgttctttctttctccattcaacttattttattttatttttttcgtttttgttttctgatttattttcaatctttttgttttttttcaacttctcttttgtttgtgaaatcttttcaaacttctttgtgaaaccttcattcttttctttcttttttttttttttttaaaaaactatattcaattatataagttataataatcaaattaaagtgtttttatttataagaagtaaaattaaaaagtgattaaaaatgaatctgttagagggagaaagtgattatgtgatagttactgaatttgttcgtaaagaaaattaattattcttcgtgacatttttgtgagtgagttgagttaatcagtctgaagctcccttccagtcgcagccgcctttagc

SEQ ID NO: 30775 - DNA, 688 bp, Medicago truncatula
  Intron number 1 from transcript Medtr5g027970.1 (locus Med tr5g027970) derived from phytozome v7.0 (chr-ID MtChr5; po s 11471865 to 11472552 reverse strand)
aagtcaaaggcgttcatcaaggcttgatagtcaaggtaatgttggaatttattttgataataattaattgcattaggacataagtcaaataaaagtattagcatgcatataaacaattgtaggatgtacaccatgttgatttatcaaagatattaaaaaggtattgtttcattgattatagtctgtctgtctgttgtaatccttaaattcaaagagagggttgtggaattggttgttaaaactgcgagttaactcagttgtaaacccgaattttagtaaatttgaaaatgaaactgagtttactcaactggacatgtagtgaactcgacaaactcggatagatttgggtgaactcgcaatagatttcaatagaatttttaatctttcattccatctcaaagttcacattctggtctttttcttctttgttagtttgattttgttcgtgccgattttttactttataattgagttaaatttggacttattgatgcatttattgtattatataagtatgtacgtcatgtatatattatttttatttgaggtaaactcgtatgagtgagtttacaaaccgaatttatgagtcgatttcacattgtaaaaatgagtttgtttaaattctagattttgacaactttggttaaggtaattaaataaaatatttaatcaaatattccaacaggtg

SEQ ID NO: 30776 - DNA, 791 bp, Medicago truncatula
  Intron number 2 from transcript Medtr5g005130.1 (locus Med tr5g005130) derived from phytozome v7.0 (chr-ID MtChr5; po s 49402 to 50192 reverse strand)
ttcagttgtcattgaaaaggattaccgtctcaactgtaaaatatcaacttttgaccttgcattgtcttctatcatttctgacataatttaacttgcattaatttgtttttttattccattaattgtgtcttttacttcacgtgtttttaggtttaactttacaagatatacaacatacttactttgttttagagtattccagccaaatcatatcttctttattaagcatatcaattactatttgagtgtaatctgagaaattccctgaggctaatgcatattatgtttataccaagagtttgcgacattaagcccgttacgatacaggtcatagggtgcttctaagagcttctatataacaaaaatacattttaaagtttttgaagtggtgtttggtgtaatttaatgtttttagcttttgacttttagagaatcatgcagaagagcttaggtggaagtttattttaaaagcttctctattctcaacctatggaacagcttcccgaagagcttacgatcaagtatcatccaaacaaaattaacttatctagaagaccaaaactagcttttgcattagaacttccaggaaaaagatttctcatataagcttttctatctagataagcttatcaacgttataaaaatatacatataagtttaataaaacagatatttgccttgtctgttattatattgttaagtaatttcttttggaaaatttatggcttatgaagggtacatttgcatctataataggttggcatcattcattctatcaacaagcttcataa

SEQ ID NO: 30777 - DNA, 758 bp, Medicago truncatula
  Intron number 2 from transcript Medtr7g022150.1 (locus Med tr7g022150) derived from phytozome v7.0 (chr-ID MtChr7; po s 5471842 to 5472599 reverse strand)
ccatcaaggtttttgtttatttttgttttttcagtgttatttgcaaaaataaatgttactaaatactataagttattagcaaattattaattttaatacactttcacctgtcaaccaatcacaaattacactttgtataacttttaaagtagatgtatgattaaacttaactatttttagtgattcaactattgaaaatgtgaaaaatctttgtgttgtcgggacatattaatcgaatacataatctgttttgtaattttagagttgaggttcttatattggatcaaattcatttttacaaaaccagcttgtaaggtgagggttgccatttataaactcatttctaacttcatctttatcctatgtgggacttctggtttttctcaatatacccctcacacccaacattattggatttggtgcgtagatataaatgatggtggccccatttgataggcgctggtacatattatgatttttatattgggcctaacacatccttacaaaacgggcttataagatgaggggtgtcactcttataatattgtttgacttcaaaaattaactatagtaatttaagaatatctatacataacattgacaagttaaatgcactactatttttcttattatatgtgataaaatgagcttataataagggataacagaagaattttgtatgtggaactttaaggaactagttaaccctcttggttttttcaggttgtttctgcagactctgcgtcttctaaatttct

SEQ ID NO: 30778 - DNA, 936 bp, Medicago truncatula
  Intron number 1 from transcript Medtr5g096390.1 (locus Med tr5g096390) derived from phytozome v7.0 (chr-ID MtChr5; po s 38297502 to 38298437 reverse strand)
gatcaaaagcagggagtaagcctaaacctatgtaataaaatgtataaaaagacaaggagcaactttatcgaccccacgtctattaaaaaatcacacatggtttcgaaagtatgattatgacggcataatttgttccaaggtctactttcagacgacatataaattgtgtattttctggatgtgtgcatccgaaatgattttgggggcataaaatgttgctcctgaagaaaaatttggaagaacattacaaccttttgaaagattaaaaaaaaaaattgtaattgtcttataaaaaaaggcaaagaaatggaaatttataatgctacatgcttataagctagagttttaaattaattgttaccaagttttattattttaggttgacatttcagagattcatattaattattcaaagttgtacatttgagtgtttctcaagttactagaaacatcatatcattattgggtgaatcacattctaaataatgttttgctttttatattcttgatttctaaccaaaatttctcctgatgcagcaatcaatggttgtgtccaagctcatcttatgaccttgttgacaattgattgtcatttgatatattgtagtcaatatattatagatattgtagagaagtatataagagccttgagcttgtattggttgatgtgcgttaaagggggcatcaaccaatacaagatcaagaaactccgagattaacgtcttaagattttgtatttgaattggaagtttcgaacattgaacttgaaatggttaatgtgctttgatcaagggggtattaacccaatacaagttcatgacgaagcttccattttgaaacaaactttgttttttacttttcccaactgcatgtaaaagaatgagcaacaacaaaagtactaattacaatgtatgatcctatttatgcagaaaaagc

SEQ ID NO: 30779 - DNA, 753 bp, Medicago truncatula
  Intron number 2 from transcript Medtr5g011140.1 (locus Med tr5g011140) derived from phytozome v7.0 (chr-ID MtChr5; po s 2953813 to 2954565)
taaggtaacacaaaaataaactattctttcaagtaagtctactatggtcacaactccaaatctaaaagatttagacacactcacataaaatgaaaaaattaaaacaaaaataatttaatcatatcaattaatattattgaattttactctcttttagtttatccactataaaaaaaacttaggatttcaaccttgtaagattatttggttttagaccggcatgacctcaaatttcaaaatttaatgtacttccgtcctctgccatttaagcaaaatttggtttattgcatgtcatatcgtctattttatacaatcaaaagtcacgaatgttcaaaactaaagattaatcttcaaattacaaggttgaaatccaaagtattttttatagggggtgaaccaaaactcgatcaaatggcaaaggataattgtggggtgatatggacactaactttctaacactttcactaacaccactcactttcttattgactgaaattcacatggataccataacacactttagaagttggtcatgcataaaatggtgagctctacataaatatactcaatagaatagcgagtgttagataaaatgctagatagaaagtgtttttaacatttctctttatatttaccctattgaagagagcgcataataatagtttatgacatacatacatatatataatgtgtttatttaatcaattatatttttgtgtgcattggttaatgttgttagggaggctggttggg

SEQ ID NO: 30780 - DNA, 1046 bp, Medicago truncatula
  Intron number 2 from transcript Medtr6g077060.1 (locus Med tr6g077060) derived from phytozome v7.0 (chr-ID MtChr6; po s 15142384 to 15143429)
gtttcctccggttcgtggctccctcttccgattcggtttagttcttacttgcttttgtgattatgtttgagttttgtgagtttatacacgattcggatctgtttgttactgtttgtggccgtttgtgatgtttggatgatgatgatttatgtgttagtgtggagcgattcaaggtttggtgaaaggatacgaaaatgattgttaaaagaatgattcacatgattttcgaatttgaaatgttcatgaagttcatgatttttttctggttttttttgagagtttgatctgaaaatgtgaagagaggatatgaatttagtgtttgtgaactgttgtggctgttgattgatgtatcagtgtaataatttctgtgcagccccctttttccaatgattgacaggcttttatagtgacaaattagggttggctctggtacaaaacaaagaccaaaatgcccctgcagctgagacttggagaaaaagattttaacaaataaataaataaaataaaaacaagatgcataaaataaataaataaaaataaaaaagaaaagaaaagaaaaggaaggaagtcactcacgtgactttcacttctttgttttttttttctaaaaaaataaaataaaataaaataataataaacaaaccaacctaaaaaaaagaaaataaaaagtcccttcgaaatctgacatgaggtacttcaaagtatcctccctgccgaaatttcggttgaaatgattaaaaagacacgccttttaaaatgcgattagccattttaaaatgacttgtctgttatgactaaaaggattataaaatgcgtttataaaaatgcaaatggagtgattttaaatgttgtaaaaaatgcaagcgaggacttaaatgcaagatgaaagtttttaaatgattaatgacgaaaaacacgagttttaaaaggtaaaaaaacgaataaaagagaatctgaactattaaaaaatgtggacaaaaaagatttcaaatggtccaaatttggggtatgacaggttgccaatattgtacctgtgccaaagaagg

SEQ ID NO: 30781 - DNA, 341 bp, Medicago truncatula
  Intron number 3 from transcript Medtr5g012270.2 (locus Med tr5g012270) derived from phytozome v7.0 (chr-ID MtChr5; po s 3460348 to 3460688 reverse strand)
aaaatttcaggtaacctttaaattaggccttgtgtttttttaagtttttcttagaagatgagtgtattgtcaattaaaaacacataagtacagtaataaagtagccaatttaacccagttgggttagcatggtggtgttggatcgagaccttggagtgtgctcctccttaaggtctcaggtttgattaataacttagtaatattgtccacatgtatatatgtcagcaatttagcatagcaaattattttgaatatagttattatgtatagaagtttagggacctatattcatggctaatctaaattacttatacagaagagccaatttcacatctgctgat

SEQ ID NO: 30782 - DNA, 663 bp, Medicago truncatula
  Intron number 2 from transcript Medtr4g044890.1 (locus Med tr4g044890) derived from phytozome v7.0 (chr-ID MtChr4; po s 10492533 to 10493195 reverse strand)
aaaaaaaaaactaaaacaaaaccaactcttcagaggtaagatttctgctcctattttaaataattcaatgatgctaatatagttattgaatgactggtgcagcagctttatgttgttctgttatcaatatttatcctcataattacaatatatattgaaatgtttatgaatttcacaatggtttaatatgattaaaaatgtaaaaagaattggctttttcatttccattttggatctcatcttttagccccaaaaagttttttcaagtcctaatttaaagttgaagaaattattaaatgttataatgatctaattaaataattgatataacacaaaacaattagtttagtttatgttttccgtctttttttcctacttgacattttatcaatttcatgtttctatattttttttttttgctttttcttgtgaccttatgtcctcgacatgcattcaaattacagtgacaaatacaaaatgaaccacatgaatgagtttaatttttacggccccatctagtaggaaatgatttgatcttttggaaaccggagcggtgccaacatagaacttgttcatactccaacccttaactatacgttttcattctagcaaatgatatttggaacaggtttcccagtatttcggtttagcaaattatatttg

SEQ ID NO: 30783 - DNA, 355 bp, Medicago truncatula
  Intron number 1 from transcript Medtr5g090090.1 (locus Med tr5g090090) derived from phytozome v7.0 (chr-ID MtChr5; po s 35082297 to 35082651 reverse strand)
gttctgttgtttgttggggtggtaatggattgtttgatgttaatgttacaaaaaatgtttcttttgaggttattgtttctgcttccaattttacttgtggattgacaacaaacaatttttctgttgtttgttggggtcctagttggaatggttcaacttttcagcttcctttgccacctattctaccagggatttgtgttcaatcttcttgtagtgaatgtggtatgtatcctcaatctcagtatttatgttctggatttagtaacatttgtaaaccaaaaccttgttggcctcaaatggatgttccggtgccgtcgcagatagcaaccccgccgcagccggggctgccgtgttc

SEQ ID NO: 30784 - DNA, 885 bp, Medicago truncatula
  Intron number 2 from transcript Medtr7g021330.2 (locus Med tr7g021330) derived from phytozome v7.0 (chr-ID MtChr7; po s 5180549 to 5181433 reverse strand)
cttgtttgggaggttagttccattatattttagcatatattaaatcgatgttttgtaaaattaaagcgaaaaagttgtgtacttttgaattttatgtaagttgacttgtgttgtatcatgtgcttgttacaaatttttgcaactaaccatgttggtctatgagcaattttggataacaacaattatggaaaaataaatattaaaagaatcgtcaattactataaccattttccagtgtttttcccaagatgggttttgcactggtttgttggagctttgtggcttcttttttcccaaaatgggtttgtgaccgactttggttgtacttttgaggattaaatgaatttgtttagctttttagaaaaagaaaaaacagctttccatgtaagtcgaaataaacttttgtattgtatcttccatttttgtagttatctcgtttaacctgtccatgaatatgtgtacacttttattttatatggaatccaatctttgcctatttgtggtttatgttctagtatcactttattctttttgcttttcagcttaagataaagtttatgttctctttttgaaatgaaaaatgtcaactgtttttggctttggaatttagggcttttcacttaatgaaatactccctccagaatgatttataagcaaaagttgttcatctatcttggaatgaaatataagcttatttaatgctactatctttaagatatccctcatttaatttaactcttgttagttatctgcttaaaactaaggccattttgtgtatacagaacttttgttcaaaggagggtaccgttttttgtggtgtttttgatggtcatggaccttatggccatagggttgcgaagaaagttagggactctttccctctaa

SEQ ID NO: 30785 - DNA, 368 bp, Medicago truncatula
  Intron number 3 from transcript Medtr6g098770.1 (locus Med tr6g098770) derived from phytozome v7.0 (chr-ID MtChr6; po s 21472243 to 21472610 reverse strand)
tccttcctttgctgggagaggtccagctaactcaggtaattgtgatttgaatggacattatttctaattaatcaaatatacctgactcagaacttcaaagatctaagtcaaattgataaattgttggttaaaatgttttgtaaactgaaccaaatattctaaaattggttggaagacttgcatattgaattgggttggatctgatttatatatgaaaagttaacgattgttatagacatttgtttttctttttcatgcgcaagctctattgttgtagcttgatacttaccgagtttttattggaaattacattatgtcattattgtgtcgatgcagctgcgttacacctaaacaatatatccgaggcc

SEQ ID NO: 30786 - DNA, 807 bp, Medicago truncatula
  Intron number 1 from transcript Medtr6g014870.1 (locus Med tr6g014870) derived from phytozome v7.0 (chr-ID MtChr6; po s 3622075 to 3622881)
taaaggtgtccaacttagtaatatcggattatcaggtgagttagattttttgtttttgcagttaggctttacgaatattaatatgttaattaaatataaaaataaaaaatagaaaagtttcttttaaattcatattaacaatcaaacaattaaatgattggattcaaatggttaatgaactgtaccaaagaatagatcgtcggaagaatccgaattcttatttagaacttacttatctctggaagaaactccgaattttcaaagataatcaaacaattttttttattcttaatcaaattgtgtcaaacttaaagcttcaaattttgatttaggaaaataaagtaatgttttgcttttgattaaacttcattcactgatatttacttactcctaagcagccatgttaagcaaaattaaactacattcaatctacttataatcaaaaactcacttttttaggagtaagtagatagaatgaagtaaggagagaggactaatctctaacgagaggaagaaataaagaaattaataaaacacatagttttcactttgcaattaagtaaaaggttgttgtcacctttttctatgactaaagttgttctcacttcttcttagcatctatgctacaatcacataaccattttttttttcttagttactctgtctatgttagaacatgcattgtcttcttctttttttgggcatatatatagggagaaatttgttgaaataatcgacgttagttgcgattaataatttgtggattcaagagatattgtggagctactgctaaagcaatcagactat

SEQ ID NO: 30787 - DNA, 800 bp, Medicago truncatula
  Intron number 1 from transcript Medtr7g025840.1 (locus Med tr7g025840) derived from phytozome v7.0 (chr-ID MtChr7; po s 6448897 to 6449696 reverse strand)
aatccaaccaacaccgtttttggtaatttttacaaacactaattcttttcattgattaatttttgttctttgtgattatagatctggtttttgttattactgttgttattttttttttttgttaaatcatgattatccgttttatattgttactgtgactataattttgaatatgcgttttatataattactgtgtgtatgagtgtccagtacttttaattttgtaatcaatttttgttgaaatataattgatttcgttcgtttttgttattaaggttgtagtttgatgtaaacccttgattatgaattttgtagatttaaaggtgatttttttgttggtaatttttatagtttatcttggctaagatctattttaatcttatgttaattagtaatagttaacctatgttgaacataattgtatgtatgtgtaagttaacctaattttaatatgattatagcatgtgagaattctgtttaaactagtttatgaaaactaaatctatacttttgaattctttgttatattattttatacatttataatttaatattcaaattggttagttattgtttattgtttgatttgagaaaagaacaaataccctgttaataatctttagatgaaagacataaaaaaaaatcataggtttgatgttgtagtgatgtgggatgatttttgtttgtcatgtttagaagggtttatcttattttttatgtatgttaattgttgtttgtctgaattgttttaataaaattattgttgcaattgttgttaactggggtttgaaattttgcag

SEQ ID NO: 30788 - DNA, 413 bp, Medicago truncatula
  Intron number 1 from transcript Medtr6g070230.1 (locus Med tr6g070230) derived from phytozome v7.0 (chr-ID MtChr6; po s 13176167 to 13176579)
aaggaaagtgggggtaacctttttaaactacgtaatctttttcactgtcggcggtaacctcctcaacccctcccaccatgaacttgccggaaaaaccgcacgaatcaaaattaaagtccagatccattcaaaagcgctcgtcggagattggacggttaatggattacccataaagcaaaaggcgatacagaagaggaacgatagtagtgttggcaatatggctctgataataaagaggctattggcttgtggatctaagttatttcatttgtgttttgtgctttgggtttgtttgatgtgtaacaacttggtgtgatgcggtgttgttttgttgaagaaaacaaaattacttcattactttattaaagaattgagcagaatttttgtgacaatctcaaagaaggaggaatttt

SEQ ID NO: 30789 - DNA, 818 bp, Medicago truncatula
  Intron number 3 from transcript Medtr6g025690.1 (locus Med tr6g025690) derived from phytozome v7.0 (chr-ID MtChr6; po s 5829979 to 5830796 reverse strand)
cttctgtgggtgtgcgcgtgtgtgttgccgtgccggtctctgcttttctgttgttctttgttttttcttcgtgtttttctttgttgtgcaggtctctatttatagagtgagtttgaggctaggatttgttactgatgagcaacaaatcagtagcttgtggaggagaaaaaaggaaatgcgtctgttttttactggatttgtttcggatgaggcatgaactggatttggattgggatggaaaaggaacagaacgtgtataaggattgagatgaatttggactattttgttggacttattttggacaattttgggattttaattaaaaagaaaaaattaaaaataataaaaggataatgtctatatttttggttttaaaaaggataaaaaggaaaatttaaaatgggaataaaagaaatttaatctaaattggactaaaattaaaattagagttctaaattaaaagatggaaataaataattaaagactgagagaagagggcccgattcggaactttatgaggtatttcaaaatacctccctgccgaatttttcactgaaatgcgagtctggtccgagttcggagacgtgtgtcagtgggaccttaggtcaaaatttggggtatgacaatatgcaatttataacatatattagtattatttttgtttgggtattatccttgattttgattgcgattttgtgatttatgattttgatgattttacaaaagtccttgagtaaaatccttcgattttaattgcgattttgctattccctttcaaccagaagcaaaattccgattttgacagccttggtagcta

SEQ ID NO: 30790 - DNA, 644 bp, Medicago truncatula
  Intron number 3 from transcript Medtr6g015190.1 (locus Med tr6g015190) derived from phytozome v7.0 (chr-ID MtChr6; po s 3753056 to 3753699 reverse strand)
gtcgtgtcaatcttctgtctcctttttatcaggttagccaaaaaaaaaaaaaatttatactttttgtttacttcttgtgtgatttttcaagaacatagctattcgttttatatgatattttgggagttgggtagaaggggataagctatcttattttataacagcatttaaagctgtaaaagaacgggttggagattcatttctttttctgtccctctctttgtgtaatctgtaagctccaaaagtaacattgttctttagtagtacttattagttactttggaataggaatgtaaggattaaggaaccctgtaatttctagttagagaaaacaatagcagaccatgtcttggtactaaaaattgaactcaattcaatttgttattgttttttttcctttcactctttgatggtgggatttggacgtaaaaatatctaaaatctgattggtcgatttagatgcaaacttgctatgcgtaggaatataatcacttggtgggaggttctgttacattattaaaaggcatgctttttcgaaaggctgttcaacaaaaacattcgttgtcttttattttcttcattaaaactacattattatatcatgatttctaaaaacatagcgattttctgcttgatttgcagtc

SEQ ID NO: 30791 - DNA, 646 bp, Medicago truncatula
  Intron number 1 from transcript Medtr4g111380.1 (locus Med tr4g111380) derived from phytozome v7.0 (chr-ID MtChr4; po s 25520703 to 25521348)
cacaaactcatttcaaaaccaacaacttcctcaaggtatataatcaaatatgtgatttaggaattcatttaagaaccaacaccatcatcaagggtttaaaaccgccatctgaaccaccatattcaccaatgtttaaaattgatggagcgactcatgaatttaaagctgtaaccgaaacttcaatcgagtgatcatctctccctctatacgaactttcatgatgaaaaccatttttcatgcaattttgtgttctctcaacgatgttcaatacgcagtgattaatacagaagacatagagcgaatatgaatataaagtcaatacaattgctttattttccaaattaaataatccatctgatagaattatcaattttgataatgtgaggtagataaatgcttgtttttgtggtgacaaccaccaacatgaacgtttctaataagaagtcctacgctccaatattattgacatttctggcaaacgcgattattataattgtttacatttatggttgacattgtaattattgaaataataaaatttgatgtttattaattttttttgttgaaacattagtgttgctatgtttgttgtttgtatacaattttagtagtgaattcacggtttcggctttgggagtcttaggaa

SEQ ID NO: 30792 - DNA, 772 bp, Medicago truncatula
  Intron number 1 from transcript Medtr7g034820.1 (locus Med tr7g034820) derived from phytozome v7.0 (chr-ID MtChr7; po s 8384978 to 8385749)
tagggggtggcaaaaaaatccgtacccgcgggtatccacggataaaatctgtcatgggcacggagcgggtagctaaacgggtacccgcgggtataataaacgggtatttagctacctgttactttatggacacggacacagatttgatgatatctgtgcccgcgggtatccatacccgttaataatttaagtaaattactaaaatatccatgtgtatatataaaatggcttggaatgcatatgaatttttggatgtttattttgattttattcttttctagcttttatttgaaggttattatgctttttggaggtttatttagatgttggatgttttcatccttttattttacttcaagaatccgtatgggttatgtaagaattatatgcgtatgatgaatttgcttgggattatgtaagaatcatgatttttgttggattatggtatgaactatgaaatttgaatgagatatattatgtatggatctttaaaagttgaagtttgtagataattaaaaaagtattttgtcaattttttatttattaaaatagcctctaacattaaaataatcagttattattgacattaaatattcatgtagagaatgatatgataataactacatatttatagggactgataaaataagtattagcctataaaaaaataaataaaaagggaacgggggataagggtggggaagagagaatgatagctgcaaatgcaaattgcaatggcatgttcctcatgtttgattgcagcgacatcaac

SEQ ID NO: 30793 - DNA, 901 bp, Medicago truncatula
  Intron number 1 from transcript Medtr5g087920.1 (locus Med tr5g087920) derived from phytozome v7.0 (chr-ID MtChr5; po s 34036194 to 34037094)
gaagcaccgctttaaaggaagaggtataaatattgtgttacctttgccctgtttcttgcaatcatcttctatttttttgtgaccattccatcaattgctactttttagcgaggaacatgattatgaggaataatatggaccttattgtggggttacaattcaaatttatgctaaattttttgttacgatgatgtttttattcatttattgttggctgacaaatcataaatcattgaaacttacaatattttctcttcttacattattattaatcacttctttcaattttctaatttccattatttattatcggagaaaactcaggtgcatttctttaggtgctttttatgcttttcttaactactcatgatttcttcaaacccataattttctcaaagtttgttttaaccataattttcttcaaacttaagtgtgttttgagaaaagaaggaaaagctcctaagataaaggcacttttgtcctttattattcccctacaaatatggtgatatttttggatttaagtatatcatacaatgtttgatcagcttattaaaacctagcttctgactaagtttgtagtctggcctaaaatgaactaagacctgccttactgatttcccctcaaatgtaggaatgagtctaatgattgagttagtattgttttagatcaagaccttgaaatgttttaggtagattctctagattataccaggaaagaaggaaatattttgggagtaatattatttagacatgcttactgaacacatccaagagacggtgtcacaatgccttctttcttcagataatatagttttagttagaaatcaagagaaaaagtaaataggaagttaaagatatggggacaagcctgtgaaaacacgatttcaggtaaatcagt

SEQ ID NO: 30794 - DNA, 575 bp, Medicago truncatula
  Intron number 1 from transcript Medtr5g016150.1 (locus Med tr5g016150) derived from phytozome v7.0 (chr-ID MtChr5; po s 5604552 to 5605126)
ctcaggttctttcctttctctactcttgtttttagaattttagtagtttgtagttattgttttacgttggttgagaaaaacgtttgtttgattcataaatagataggaaaaaaaatcctaaacccaaataatttttgttttattcccacttattatctcatttcattacttcattcttccatttttatcatggggtaagatggtcccttcatcattttcgttttcccccaatttcaaatcacaaaccctaaattttttaattgactaaataatgaaattgcaggttttttataatgaatatgctcaatattaattttctcaacttaatttcatgattacaaacttagatattgctaatacttaaatttgataccccattatttgataccctcatttgtattacaatttttctcttatatttctccgttatgtttttctgctgtgttgtgatgtttctttctaatgacaaagtatgtgaggtacattatgtgtgcttatctcgatgaagtccacacttacattttgagttattttgtgcagatttggggtgtcaattgcccccacaattgaacatt

SEQ ID NO: 30795 - DNA, 781 bp, Medicago truncatula; identical to SEQ ID NO: 30590
  Intron number 2 from transcript Medtr4g047170.1 (locus Med tr4g047170) derived from phytozome v7.0 (chr-ID MtChr4; po s 10893615 to 10894395)

SEQ ID NO: 30796 - DNA, 944 bp, Medicago truncatula
  Intron number 1 from transcript Medtr4g090070.1 (locus Med tr4g090070) derived from phytozome v7.0 (chr-ID MtChr4; po s 18922020 to 18922963)
ggattggttgtggaagagttgaaataaggtacaaggtgagagatgattcaatcaaatgagtgtaaaatatgtgagatgaaacaaaaaaaaaacgtatttccctcaagttcaaccgtactcactatgaatagttgaaatccattgagtgataatggaattcatatgaaaaatctcaaagtgtaaagttaaaatatgaattacgacattaccaggtaccactcgtaattaatggtgggctctctctctctctcctggacccacggttttttatgttttgaaaaatattaaaatattgaaatacatagatataacgtttttgatagatgatataaagttgttagtagaatctatttaatttttcgtatgatgctggattagatagattaaatgtttattaaatattactattagttaattataaatttttgtaaggtttttttttaagggaacacaaaaaaaaatttggcccaagaaacacaataaaattaggatgatgataacttgtgtccttagaagcttaaaatggaaattaaaaataaattttatattaaaaatataacttttaagatattaaatgcataatttacaagaattatttcataaattggatatatatagaaaataattttatttcaataaatttccttaaacctcacatttcaaactcttttcctaaaacaaaagaaagaaagatttgaagctcttctatttttatattttgagtataattgaagcaaaatgaggaccaccttaaatgtggtatgacgtgtttgcatgcgtgtctgacgtggctcctcgttgtttagagcctatttaaagttaaacttacgcaactctaattaattagttcattgcatttgcattgcttcatttttctaacaatgggtgctgcaccatcaacttcaatagctgaagctaaaatttcagccattttcattttatcc

SEQ ID NO: 30797 - DNA, 869 bp, Medicago truncatula
  Intron number 1 from transcript Medtr5g082620.1 (locus Med tr5g082620) derived from phytozome v7.0 (chr-ID MtChr5; po s 31126831 to 31127699 reverse strand)
caacgtgatcaaaattcactctccagtatgttatgcttccctctcctttattctcacaactatggcgttgtgcctcgtgtccaacacgtgtcagtgtctgagctacattcaatgacttttatttttctaaattacttgatattagtgttgtgtccggtgtacgtgtgtttgtataagtgtctcgttggcagtgtttgctgcattatatttatatatatgggatcaagaagaaaaagcaaaaattgttgggagtgtttttggagtctataaggtgtttgttaaaatgcactaaaaaattatttgaaaaataaaatcagaattttcattgaaaatttactaaagtttgtagtaactttgccgagttgctcttgtttgctttttcaatgttgttaaaccttgtttttcgtccctgacaccccttgtgttagggggaagttttttcggtgttaatataagttctattttggcttgttcaaaaaaaaaaaaaacttcaaaacctttcgaaatgtcacaataacatgtgctttgagtcgaaactccaccttggagtgttgattgatcgcatggccggacatgtacaaaagcagaacctatatatatgagctatgatatgttaatattaaataacaaatttgacatatttacatgttcaagagctttttgtaaattagaatttaagcaatgttcttgttaagtagatcgtatgaatcatataattaaataaatagtgtttgttttgctggtgtaactgtaatgtagagtatacatgtggttcaatttggcttgttattttagatggactgtatctaaattattatgctttcaaaattttagctgttgagaaagaactagaaagtgcgatattcaaa

SEQ ID NO: 30798 - DNA, 538 bp, Medicago truncatula
  Intron number 2 from transcript Medtr4g073490.2 (locus Med tr4g073490) derived from phytozome v7.0 (chr-ID MtChr4; po s 14573375 to 14573912 reverse strand)
attctactgaccctgttgttaaggtattccaaaaattcatgtcaaaattttccagtttaattcttcaatcacccaataaggatctgcattttcttactccatactttaatacacagtgagtttgtcataatcatgatatgttacactgatttcgataaaaattacatttttaagcttttacaaaattaccgatgttcggtaatttttttcaagcttaatgtcatttttcaagctaattgtgtttattaatgtataaaattcatactttttctattcaaagttatagtcccaacaatagttttttttttctttcaatttgactcaattttttttgtgtttagtaaatgatgatcaagtctttgattataaaaatcatttccaatcccaaaactgataatttagattttttttaactaaaaagtagggtgttgaggaattaaatatcgcattaaatccttagtacgttttgttgttattaatgaaataagaaaaaaataattaagtttgatttcatgaatgaatgcagcaactagtggaa

SEQ ID NO: 30799 - DNA, 848 bp, Medicago truncatula
  Intron number 1 from transcript Medtr7g008720.1 (locus Med tr7g008720) derived from phytozome v7.0 (chr-ID MtChr7; po s 1362716 to 1363563 reverse strand)
ctatctgcacctccatcacaagacacaggtacaaataacaaacaaacaagcaattaaatcttatcttacaatgtataaggattttaattagtaaaaaggtattgcatccgctctacagctggatacgtaggcataattggccgaactctgcaatcaagtctcctgtgttttttgtttgcaattttcgtatgtgtttatcaaatactaattcaaaaacatgtatcattttcacttgttttttttttatcaatggcatttgagattagatatggtttgtattcatttttattaaatcatgtaagaaattataacatatgcttaaattaatcttgtttcatctaaataaagtaatctaaacaatcaatgtagggccagaacttacattttaactgtctcttgtttccatgtggtattttcttttttacttcatttagatacacattgcatctaaatttattgctcaaatgatttttttatgataacttatatcctcgttttttagtaacatacaagttatgaattactataaattaacaccttgatctatgttacatcacatttatgcttcatggtagtctatatggtaaaatatttggattttaatagtggtgcaaagggaaatggtatcatttctatcttcttaacatagttttaaattgtggtttgcaagtgcaattatactcgtaatataaaggttttagaggtctctgcaacggtattgtaactgcaaatgtggcttcattggctgcatttttctgcaaatgcaatttagaaccatgcttcttacattcagttcctgatgtttacttaaaggagaatcggaatcggcgagtgaaatacaatcaaaa

SEQ ID NO: 30800 - DNA, 434 bp, Medicago truncatula
  Intron number 2 from transcript Medtr5g046260.1 (locus Med tr5g046260) derived from phytozome v7.0 (chr-ID MtChr5; po s 19431550 to 19431983 reverse strand)
taaatccacaaccattcaagttgaggtaatctgttttgaaaagaattaaagttgatctattttaaaataagtagacacttagtttttaaaaacaaataaaataattttgttaaacaattgcttttgttagtataacttttaaatcataatacatgttttgatttgtatacatactacattcaaccaaatcactcaatatatgtatacataatacaaaatatatatttccttaaaattttatgatgtcctttgatatggaaaaataaagttaaaacatatatcttgttgacaggaatgtttggccatccataatggtggttgtttcatctattttgtcgaattttctgtatgatatgcagttttgtacattgttaaggatactgttttttggcttgacaggttaaaggaacaatcaccgctccgaaagacattga

SEQ ID NO: 30801 - DNA, 555 bp, Medicago truncatula
  Intron number 1 from transcript Medtr4g079790.1 (locus Med tr4g079790) derived from phytozome v7.0 (chr-ID MtChr4; po s 16154813 to 16155367 reverse strand)
ttgtctcttcactctctggtggttctcttttccaggtatcgtttcttcacgcgcttcgctaatttcattttcacccgctcttttcttttaatcttatcacgatcttgttctttattctttctaattactaattagcgacattattttgttcaaagtttctgattagcgataacgaaagttgaagattaatatgcaaattataagattatttaaattttaatgtcgctaactgttcttaggaattgaatataattagcaacattcctgtgttcataagtcgtattaccgttcttaatttaggatttgtgattataaagatagaaaacgaaagttgaagagtgtagttaaattcagagttttgataaaaaagattaagtgtagttttaataaaaaaagattaagtgtaattgaatcttaatgttactaggtgttctttgcaattgaatataattaacttcaatttgtgatattttttgttaaaatctttatgacgtaatgatcttttgattaacttcaatttgttgatgaaatcttgtgatattttgaaaacagtgg

SEQ ID NO: 30802 - DNA, 982 bp, Medicago truncatula
  Intron number 1 from transcript Medtr5g016490.1 (locus Med tr5g016490) derived from phytozome v7.0 (chr-ID MtChr5; po s 5813319 to 5814300)
cctttcgttcgccgcctccctgagttcaagttctggtaatacttcaatttgattatcaattatcgtttaattgagtgattttggtataggatttaattcatatacactgtcagtgtatagagttttgagtttttactcaatcataaagtctgttcatacactttgttctcgtgtggtcaaggttatagttgtgttatgatcattgatgatattgtgcataattagttgatacttgatgttgtctaaatcgtcgttaaaaccttgatattgcaagctagattgtggatgcggacattcatttaaaacgtatgtgactattatgagttccaaaaagcaattttgatgaccagaatgttttgctgttagtttcttatgatctttgtcaatgtatcgaaaacaataaccatgtagtgtacttcattgcatgaagctattgttgaattatgttgagttgaattagtttctgagtcctcaaccacattctatggttctcttcgttttcttcatagggcctgtttgggttggtttatttgagtttatctattagcattaacacacatgagactgtttcagagagcttatggaagcaacttatgatagggctataagttgttttcagcttatttccataagctattcagtataatttatgaaaacaacatatagctatatgtaaaaagttttattttcttttgttaatgaaacaacttatacataagcacatatatgatgagagtttactgggcttaattaagttctttatccaaggaggaccatagtttgggtcttccacattgatatgtggttttaggcataaaaaagcgcctacctagatgatgttgtcttctttggttttggtgctcttaagttgttgtagtttctttttcacttagtaaggtctgcagaaggttgcttttactaaagctgctcaattttcctgtgggcaggtactcgatcacagtggcattttgcattgcaattg

SEQ ID NO: 30803 - DNA, 855 bp, Medicago truncatula
  Intron number 2 from transcript Medtr7g037670.1 (locus Med tr7g037670) derived from phytozome v7.0 (chr-ID MtChr7; po s 9033654 to 9034508 reverse strand)
agacatttcctgcacttttccacctatataaacaggtcaaacactatatctttctttatcatgctcatcaatgtgtacttgtctcccgtatgaacctcggattaccaggccccttttcccttggaattgaagggttatgttatagaatttttgtaaaatagataaagatatgtataaaaaagggtagcccagtgcacaaagctcccgcatacgcagggtccaggaagtggtcccaccatttggtgtattgtacacagccttacccctgttttacaccagaggctatttccaggacttgaacccgttacctttcagtcacatgacaacaactttaccattgcgccaaggctccccctctcccttattggtttttaatgtttgattaactgaaggcccgtaacaggatgtatctcagaatgttgtgattctgatcaagaattgtttttttcatgctcatcaatgtgtaatgtaaaattgttgtaaccaattcgccgttggactcaagtggttaatgaacttcgattaaaaagtccaatcattcgggataactcaagtttgaatcctgactggaacaaaccttggcttggctttacttacctcctggatgaactttggattaccaggaccctttcgctttgaaccagagaatatatctcagaatgttgtgattctgataaagaattagctgattattttttaactctattcgtatataattgttgttgaagagtattgttttttataattaggtgtgttttcttgattcattttgtttgttgaagatgctacttgttgtttgtttcccttaatgaactaacattaagcgttttgatttgcaggaattgttgccacccg

SEQ ID NO: 30804 - DNA, 646 bp, Medicago truncatula
  Intron number 3 from transcript Medtr4g134220.1 (locus Med tr4g134220) derived from phytozome v7.0 (chr-ID MtChr4; po s 32326145 to 32326790)
gtcgtgtcaatcttctgtctcctttttatcaggttagccaaaaaaaaaaaaaaaatttatactttttgtttacttcttgtgtgatttttcaagaacatagctattcgttttatatgatattttgggagttgggtagaaggggataagctatcttattttataacagcatttaaagctgtaaaagaacgggttggagattcatttctttttctgtccctctctttgtgtaatctgtaagctccaaaagtaacattgttctttagtagtacttattagttactttggaataggaatgtaaggattaaggaaccctgtaatttctagttagagaaaacaatagcagaccatgtcttggtactaaaaattgaactcaattcaatttgttattgttttttttcctttcactctttgatggtgggatttggacgtaaaaatatctaaaatctgattggtcgatttagatgcaaacttgctatgcgtaggaatataatcacttggtgggaggttctgttacattattaaaaggcatgctttttcgaaaggctgttcaacaaaaacattcgttgtcttttattttcttcattaaaactacattattatatcatgatttctaaaaacatagcgattttctgcttgatttgcagtc

SEQ ID NO: 30805 - DNA, 831 bp, Medicago truncatula
  Intron number 2 from transcript Medtr5g013420.2 (locus Med tr5g013420) derived from phytozome v7.0 (chr-ID MtChr5; po s 4054956 to 4055786)
ggggtaagttatttcttccatgactctactgttaatgatttagttgaaatttgaggaataagtttctgaatcatattctctgtagtactaacacttctgatcaaaggtgtgtccaacacacttatgaaattacattcaattatgccattttctcaaattattaccagagctgacgcgtctggtgttcgtgtttgtgttggcgcttcttagatgatattcaattcaatgatacaaagtataagctctaatgttaatatatagattaatactagtaaatgttgattaggtatagaaatacaatatatgcttataattaaagatatcattctatccttatccttaataagatatatttaacagtcctccttaccgggatgaattgatacctattattgaagttgtttagatcgctttcaagaagtcctttgtaaaatgagagctcataccattttagaatttggacttttggccaaattcatccatacattataagcaatagaaaggccatattgatgaataaacccaacacattaaatgtattgtagcaccgaaatgatggcaaatgaaatggcctaaaggtggccgcaattaaggcagatcttccaacatatttcccttgtatcaaaattctatttgaaggttacatggcaagtgtgaatgtgtttattattgagttaggttttcacattctgtatcttcaactagactaagaaaataagtagaaactcaaaaggaaaagaaaaaatgagggagaaagtaaagatcaatgaactctgaaatgcatggtattgtttgtgcagatattgcataagagggcaattgcagcttcag

SEQ ID NO: 30806 - DNA, 681 bp, Medicago truncatula
  Intron number 1 from transcript Medtr7g083570.1 (locus Med tr7g083570) derived from phytozome v7.0 (chr-ID MtChr7; po s 17878344 to 17879024)
ttgtcgattgaggtaccaactgtatgattcaaatttttcgattgatagtggaagagctcgtctctcctagagatgcaggtcttcttttttggaccaaactctataatcaatttgtacatgaaattcctctcatatctttcctgttattttcatgttacatttttttttgacacaatttaactgttgctactacacaattattgttgtcgcattagaggaaagaaaatgtgcaaacataataaattaggttttcttcaaaagctataaaattcattttaacaaaaatgttagttgtatttatacatgtgacgcgaaattaaatcaacaagttgatatggccgagttggtctaaggcgccagattaaggttctggtccgaaagggcgtgggttcaaatcccactgtcaacaactctttttttgttttgtttgtttgttttgcaagcttgctttacggttatgttttcaactcatattgcattcgaaaagggtggaatgttaatagcaaattaatggctttaataggagttaattttatgcaaaaattacacgctgccatctcactttccatcgttgaggtattcctgattttagtgaacctaagtaatgtggcacatcttcaatgtttgcctatgcttaatttcttagacttttttttatcactaccaaagaacctgccgcct

SEQ ID NO: 30807 - DNA, 635 bp, Medicago truncatula
  Intron number 2 from transcript Medtr5g090280.1 (locus Med tr5g090280) derived from phytozome v7.0 (chr-ID MtChr5; po s 35188363 to 35188997 reverse strand)
gattgcgttcaacggttaatagcagtgggaacactgtgagttattaattgcttgttattattggctagtttttttcttaattggaaattttcatttccattgatacctaagtgaaatattgattttatagaaaatttctatttttaagtttgattaatagattgatacttgtgaagtataaatgagatctatgaagcactcacacatacacgaacacaataccgacactgatacgtcacaacgatgaatatgataatttaaaaatattacaaaatttaatgtaatcacatgtgtcgtgacgtgtcagtgtcttgtcaatgttggaaactgacatgtgttggacactggacacaccttctatcagaagtgtcggtgttccaaagaatgagattgatgcttttggaactagccactagtgtttctgttgttactgtaaggagttaatatttattttttcaatttgcaattgtattttcatttttgtagctccattaaatgtgtttcttttagaaggtttatcgttcctttgttgtgatgattgaggagtggcttagatatgagagaataatagattcattctgagattgttagtggctttaggaattgacttttgtattttcttcactcttgtagtg

SEQ ID NO: 30808 - DNA, 973 bp, Medicago truncatula
  Intron number 1 from transcript Medtr6g025580.1 (locus Med tr6g025580) derived from phytozome v7.0 (chr-ID MtChr6; po s 5773347 to 5774319)
gagtttttgtggtaagttaaaaacaattcatcgattatatatcttgttttagttagtatttacattatccaaaaaataaaaatcaaagttttgtatcaatagtatttttgcttataaaaaaaaaacttgaagaagaaaagatccactatcctttaatatccttttcgtttcattgactttctaaacttgattgttgttattaattagaagggttaaatatattcattagactagaccaaaaaataatatattcattaactataaattcttaaatttaagagtttctcaattttactctataacaacgttaaaaaaaaaaaaaaaaatggggataacgaactccgaattactaggttccttctctaaaatcggagggttaacaaaaagaatgggaaatggattatagcaacatcataacaataacttgatttaattttatatattcttgtttaaatttatttgattgtagactcttgattttttttttaagttagtctagttgctaaaatattttttaaggtgaataagtgaggtttatttaaaaatgaattttaaaagtggggtgtgtagagttcgaacctcaaccccctacaaagggaaagcacacataggaaaaaacaacgaaatatactaacagcaagttcttacattgatattgtttaagtatgagtttttaatttatattttagtataatagtattataagaaagaataaaaaatattataaaccaacgtaaagatacttttctaatttttagttcatataagcttttttttatttataaatttaattttaatctaatatgtcgttcaaattaataaaagaccataaaaaacttgtatattttatttcataatttatgttttttagttttctgttcaatttaaaaatcttatcatcaaatgaaggaatatgattatatatttgctactatgatattgttgaatattttgagtctttgttgtgtgcagg

SEQ ID NO: 30809 - DNA, 977 bp, Medicago truncatula
  Intron number 1 from transcript Medtr4g158980.1 (locus Med tr4g158980) derived from phytozome v7.0 (chr-ID MtChr4; po s 40031592 to 40032568 reverse strand)
ccggccgcgaggttagggtttcaattgttcttcattcggttgatttttttaaagtatttaattaatctatattctgtgcatgagtgattgaatttatggaaataagctgattaatttgcttctaatagcataaatgcttatcattagtaataagttagtccaatcacacaagataaacacaatccaattgttttagtagaagctataagatgtttttataagctatcttggagaacttatggaaataagctgaaaacagcttataaacaagtcgtaagttgttttcatcagttctccgaaacagtcacacaagtgcttaagccagtagataagcttaaataagccaatcctaataggcccttagtctcggggatttctttgacttgtattgatacttttataaagacgatttacatatcaattgaaactattgcttttcatataattacattaacttgttgccacctttgaactaatagcaccaatgctagttcttagctgtagtcgaaattcaccagatttgtcaattgctgattgccaatcagcaattgacaacaagtgatcacggaaaatagcggtttgttcaaagtatgctacacacacaacgatggtgctagtgctgctatagctgctattttacaacactgaaatacttaaatacgtactatagagctagtattggttcattgtttcacctggtttggattaacataattttgcaagtttcttcatatggaggagtaaattgaatctgttttttttagtaaaagtacaagctggtgctttataattcccattcatatatattgcaattttatttgtttttgtgaatttgaatacctaagcctggcattagttatcctattcattttgttgcatgaaggaatttatctgaagtatttgtctgacagatcgccatgtgttctttctgtcaatttgtagactttttccaaagttgttcagagctgggcatcaaa

SEQ ID NO: 30810 - DNA, 827 bp, Medicago truncatula
  Intron number 1 from transcript Medtr4g156910.2 (locus Med tr4g156910) derived from phytozome v7.0 (chr-ID MtChr4; po s 38972067 to 38972893 reverse strand)
tgttgttggaagagactttcttcctcgtggatctggtattcattttattattacattttatatttagatctcatcacttcaactgtgataatcacattgaagtaagtattagtcgtatacgatgtgattggtttctcagattagttgtagacttaggtcctctgtggattgacttatttttgacttatttgaacttagttgacatgttcataactctccaacatagcttatatgtatattatttgactttgttttatcttttgttatagaattagggtatacttattacatatacacacttatatgattaagtgtttgtgctataacctctcaatcaagatgttaattttttaagctacaagttcttatttaaaatgtttattcaaacctggcaatagttctagatctatgtatcatattcgataaatgaatctataatatgctgagtagcagttggtgtttattgaatgtaagagtttaataagccttttagtttactgtaagtagctgctcttagatttagaggtcaatgagttggatccaaatttggtttatgatagaacactatggcatcatttgatccatgtagccgaccccacttagtgggataaggcttggttgttgttgtagctgctcttagacgggcattttttttttgttttccctttcttttttttctatttccactccgtgaagggatgttgtgcattgtattgattggagtggaagattctattttttttgtacttccaaatgaatggctttttgatgttgtctttcattatttacaaggtattgttacgcggaggccgctggtactgcaactt

SEQ ID NO: 30811 - DNA, 753 bp, Medicago truncatula
  Intron number 1 from transcript Medtr5g011020.1 (locus Med tr5g011020) derived from phytozome v7.0 (chr-ID MtChr5; po s 2874630 to 2875382)
gaaggtgaagcttgtggccttctttccgctgtctggtaggtgcaccatttgcagttagatggagcaacttttgagcttgaccctgagcgaatggtagacaaccttcaatctattaaggaagatgtctcgagtttagtgctattatttcttattgtagacatttgtcctctttttacctctaactgtcgagtttaccacgagacaggcaaacggagtagttattttgtttttttgttacaaaagcggtcacatctttagcctcacgattttcatgtccagcttgcctcgggacgtgaaatttccagtgcaaaagctaatccaaacacatactacatcttaccgactactaatatctctaataattataaaaataaaaaataaaaaacattctgataattaagagttcatatgtgatataactaaagttttgtttaaacacatactattaccgattaaaagtataccagaaggctacacattccaaaatttatgtactaacatattatatattctctcaataacaatgagaacttgagggattcttagttctgccatttttactttttaaaatccattagactaataactctatctaaaatttttgtgatgtttctttcaaatctaaaattgtgtttatgtgtaaagatatgttgggatgcatagtatttaatttggtagcatttggatcacatttgattggtcaaataatattctgagatcacctacttctcatttgccacagttcatacatca

SEQ ID NO: 30812 - DNA, 1035 bp, Medicago truncatula
  Intron number 1 from transcript Medtr6g099740.1 (locus Med tr6g099740) derived from phytozome v7.0 (chr-ID MtChr6; po s 22151976 to 22153010)
gttctgttaacttgaggagacaattgttgattcaggttgaaagatcacaactttgatttgttagctttcatttccatattgtcgttattatcattatgattgaaaatttgaaattgtgttatttagacatgtgattactgattacattcaattacatcgttttctcatagatttccggcatcagtgtcatgtgtctgtgtcggtgcttcatagttatttagtttatgaggaattgcaccaatataagagataagaatagagtgaaaaagatataacgataaaatagagtgagaaagagataatgataaaagaaattattgaagaggttaaaatataagggttggtaaagtatgtgagttataagaggggtttgacgcatcattggagtgataaagttggttccttttttgatgggaataaacggcccgggaaatataagatttatttacaaatagataatgttaaagctaggaaatgtttttattgtagtaactagtactagtattgtctttgttattatttgtattattattttgtctctgtctagtttaattaggtgaaaactcggcttaggtggtttggccatgtagagaaaagagttgtagattatgtagcaaggagagtatattagatggagggtagtcaaatcactagaggtagagaaaggtctagaaaaactataaaaagaaactattaagaaagctttagagattaatgagataggtagagatataatctatgataggacattttggcgttgtctgatccatgtagccaatcccacttaattagttgtattgcgaatttattgactattgaaaactatgaaatttttgatatttttgtctttgatgagttgaatttggtttatgactttatttaatgtttttggtagcaacctgtcttatccttgttaatgttagcaatagtatttgtttctgttgagttgaatttggcatgtttgaatattgatcattgcaagtgtacatggtctgaggtgtttttttattgtatcagagatcacaagttacttcc

SEQ ID NO: 30813 - DNA, 793 bp, Medicago truncatula
  Intron number 3 from transcript Medtr4g098120.1 (locus Med tr4g098120) derived from phytozome v7.0 (chr-ID MtChr4; po s 21061579 to 21062371 reverse strand)
tgcttaattacgaagaatccgggggttacgggaaggtattgaatttgatcatagttgcatttgtaatcatagtttatgtgcagcaattttaacaactcaattatataggatctggactttcccttatcgacatatacatatctgaagtaaaaaaattatttgatcaactgtgtgatgtgcttccctccactgcatttttcctttggtttttaatttaccgaatctaggtaagaataaacactcttcttttcaagaattttgtgggcaatatgttagagttagaggttttatatcgaagggtaaaaatgctaaattttaagacaggaacatactgaagaatgaagatgacatattcaattatagtttcatgtgtagtgtagccacctttattcccgtgtttgaatgtttatagccataacactacctaaacttttggcctcattacaacttcatgtgtagtgtagccaccttttgttccacttaaatatgtaggatctgggggtttggctaagaagcataataaattgttgatgtgatcatagttgcacttgtaatcattgttttaaattgcgattgcagtcgcacttgtggtcacgatgtgaacctttacattgtggggaaatgcggccgatgtgactaaaattgtgtttgtgacgcccttgtagagacctcaaaatcctctaaaaagcggctgcaattgcgatgtagttttggcgacaacaagttaaaactataaacatgactttcagattaatagtttttatgctgaacagttcatttttgtttttgtagg

SEQ ID NO: 30814 - DNA, 792 bp, Medicago truncatula
  Intron number 2 from transcript Medtr4g128290.1 (locus Med tr4g128290) derived from phytozome v7.0 (chr-ID MtChr4; po s 30145922 to 30146713)
ttggtcataacttccaatattggatcattgaagaggtgattgcttatatattttattaactagtgtttaatttattttaattagaaataatttagttctcttaattatttctaattaacataactaaattatttctaattatctctaaaaacactaacgaattttaagttaagttcataagatttttaagttaacctgattcactcatttggattcagaatttgatcaatactttatttcgacaaccaaagtgctatcatatttatcgttttattttttgttttgaattttgtaacagtccgatttttagctagatttattttaattacttttattatatgttttatgtgtttgtgtgtgattattcttcatttggtgcattttcatgggttttcgtgttaaaagggtattttagtcattttggacttaggggtattttggtcattttgtgagaacgggtaaaattataattttggtgggaattacttttagtgagtagtgagaatagttattttactaagttactagagtaaaactaagattttaccgtttagtgaccattggtgacattttaccgttacttgaccgttattagttaattaccggttagagtatagaaacatttgagatgtgaatagaaatgggttaagtccattaagtggagggttaggcccaataaggagacttagtataaaaacctactcttatgagaatttactcacactttccttcataagatattcttgatagtgaatagagagagagaaagtgggagcaagaggagaaaaaggt

SEQ ID NO: 30815 - DNA, 461 bp, Medicago truncatula
  Intron number 3 from transcript Medtr5g081720.1 (locus Med tr5g081720) derived from phytozome v7.0 (chr-ID MtChr5; po s 30698328 to 30698788 reverse strand)
ctacattatccggttgttgagaagtttaagacttagtaagtttgcattatgatttcaaaatatagtattagagtaacttattatttcacaatctgatttgattgttttttgaccatgtttcttgaattgttgtcgtgaccttaacacttctcaagctcagagtcaaagtatcagtcataacttaagttagagttcggcttcttctcaacgtactttgtacaacgattttttcaatctgcctcaggttattccaattactgaatttataaacttagtcatggtctgctttttttatgcacgaacatgctttgagttttttgatgcacaagttaaaaatacatattgcattattctttatttcatgtgcataatttgggttaggatacatacttcatcactatttggaaaacaactaaattcaatcataaccagtttggatggtattataagagttgcaccaa

SEQ ID NO: 30816 - DNA, 114 bp, Medicago truncatula
  Intron number 1 from transcript Medtr5g066550.1 (locus Med tr5g066550) derived from phytozome v7.0 (chr-ID MtChr5; po s 23439211 to 23439324 reverse strand)
tccactttgggtatttatttctccattttattcttcattaaaattcaatttttcatgtcgatttctattttaataattttgttttttgtggattaaaacccagacacaacaaaa

SEQ ID NO: 30817 - DNA, 602 bp, Medicago truncatula
  Intron number 1 from transcript Medtr6g028330.1 (locus Med tr6g028330) derived from phytozome v7.0 (chr-ID MtChr6; po s 6413988 to 6414589 reverse strand)
ggttcaaggtgggctgggaggagaatctcttatttttagtttgatgatgatactttgataatatgagataagtcttgatccaacatttgatcgataaaaacttctatgctatatgatattgtatctagattaaatgtgaatttttataaaagcatgctagttggaattaatgtcaataattctcgctttgatgaagtagagtcctttttgagttgcaaagtggaaacaactccgtttgaatatttgagagtatcaattgtgacaaacctaaaagattatatttttggaatccgaataatgataaaaccagagctcgtttatctcaatggaaaaggcacaatatgtcttcaggagatcgtctagttctcttaaaatcttccttatctacattactcatttttttcctttcttttttcaaagctctcgtagatgctattttagagttggttttttttttatagggtgcaaattatcaagctcgtaaaattcattggtttaagtgggatataaaatatgtttacctaaagaaaaggatgagtaaggggttcgtaatttaaggacatttaatattgcttcgttcgagaagtggtgttagagagtgg

SEQ ID NO: 30818 - DNA, 590 bp, Medicago truncatula
  Intron number 3 from transcript Medtr4g067280.1 (locus Med tr4g067280) derived from phytozome v7.0 (chr-ID MtChr4; po s 13028126 to 13028715 reverse strand)
caccacttaatcttcatctttgttgcactgaaaaggtaacattcattactcacttgcattttgatggatcctctgagtttctgttactaaaactttgggtgccatttgttgttttcgtgtgcagatttccatttgtgttacttgagaatgagatagcatattagattattgtagaaaatccttgtctgctatttactcatgtagaaattgttaaataatgatggcagaggcatccatctataataacttcttcatgtgtccttcaatttctacatgagtaaatagcaattgaaggacacatgaagaagttattatataggaatgcagaggcagaggcagaggcatccatctattgttaattgttataatatacattacattgttattcataatgtttgattaatagcactttttaagtgaactaaattgatataggaaatgatttcctcgttgatactgtataataaacattacatcattaatttcttaatgataaaaagaactaaattgatataggatatgatttgctctattatcatggctgcctccgggttgtgtctcattacgtttgttgattgtttttatgatag

SEQ ID NO: 30819 - DNA, 603 bp, Medicago truncatula
  Intron number 2 from transcript Medtr4g067280.1 (locus Med tr4g067280) derived from phytozome v7.0 (chr-ID MtChr4; po s 13028757 to 13029359 reverse strand)
cacctctaaatcttcatctctgttgtgctgtaacggtaatattcattcttcacatgcgttgatggatcctcttcgagtttctgttcctaaaaatttgggtgcaatctgttgttttcatgtgaagatttccatttgtgttatttgagaatgagatagtatattggattatggtagaaacccttgtctgcattttactcaagtagaaattgttaaagaatgatgacagaggcatctataataaattcttcatgtgtccttcaactgcattctgcctcttctttcttgttgctttccattgttatttcttagctgggagttaagaattaaagtaccggaagttaagaatcaaagtaattgaagtttaagatacatgacattgaaacaataattgcttaagcaacagtatagaaacattgtatttattgaatatcacatattgctgaggaatgaaatgattgtatgcttgtactggaacattgtgctaatattgataggagtcaattgttatttgtttttttataataaacattgcatcatcaagagtttgtgattggttgttactaatcaggttgaagaatccatacagggtgtgaagaacaccag

SEQ ID NO: 30820 - DNA, 747 bp, Medicago truncatula
  Intron number 1 from transcript Medtr7g021150.1 (locus Med tr7g021150) derived from phytozome v7.0 (chr-ID MtChr7; po s 5107858 to 5108604 reverse strand)
ggtcgggtaattttgctttcccttaatctcttgattttttttgtttatttattagtttttgtttgtagtttgttaaagttttgtttttttgattctagaaacttagtttatttgaaatttaatgttttttgtttgttagtattgttagtaaatgttagtattattatatatgcagagagtgaggatcaaatgctcgacatacttaaccacgttacgaaacctaccttatatatatgtatcctctaaaccaaccatatatcccttatttgaagttcaatgtatcttattagccctatgagttggtttttgggtttatggtttatgattcaatgtctcttatagggtgtttggtactgcggcactttaagaaaaaatgcggcaaagaggcgcgttaacgtggaagccgcattctatagcttctcggttttcacgttaataatgcctcgggacacgaaaatggtgctgcagccgtgaatccaaacagttgcttagatggttagattatgtgaatgtgaaatgttgcctgtggttggtttctgaagaggaattgttgttttgtgattttttcggaatgtagtttttgtttagactgcagctgaattttgcttgaatgtgtagggatttgagagtttagttttgtgaataaggctgagtgatgttgttcatgtgttgtctatggtttctgtgtggtcgggagaaggaaattttacattaatgttatctgcacttattgcaggttgagttttg

SEQ ID NO: 30821 - DNA, 796 bp, Medicago truncatula
  Intron number 1 from transcript Medtr4g121310.1 (locus Med tr4g121310) derived from phytozome v7.0 (chr-ID MtChr4; po s 28413703 to 28414498)
gcacgccgtagctccggaggtaacgttcccatctcagatctgcttttattattttcattctttattcctattatagatacaatagttttccctttcatttttatgctgtattttcgcattcatttctatgttttttttttccggctttcgattaattattattttgaaaaattgtgggttttgttgtgttaacttgtatttattaaatgtttgatccatttttcatagttattttagctgattctcttccctgagtatgggaagttatgaatcttgttcatttttagcttgataaattgtttcgcctttaaataatttttgcttttcatctctgggaggtctgtttttgtttttagattgttgtattgggttgtttttggtggagcttgggatgaacgtacaaaccctaatttacgattagatttgatgttctaattgacagagatattttgacttgtgcattcaatacttgatatggctgttggttaatgcatgtgtttggacttaatgttatgataatagctctggagttatagtttagtaggttattgttaaaaatattattcttatcaataataatgatatattttaatgaagtgaagtgaaattttgattgctggttggtttgatcaatatggattattatatagtgaactttttgtttccgatatcaagtgaactgatgaatgggctagttttattctctgcctgatgcttttttttattctcatgtggccctgttgttttctttcttcgtgtaggaagatctgctcgtccagctccacgtgctgcacca

SEQ ID NO: 30822 - DNA, 645 bp, Medicago truncatula
  Intron number 1 from transcript Medtr5g075450.1 (locus Med tr5g075450) derived from phytozome v7.0 (chr-ID MtChr5; po s 27503672 to 27504316 reverse strand)
tgggttaagtgtgtccttgcccattgctcctcacggttagtggtgttataaacatagaacatgggttgagtactgcttcagtgtccaattttatgaagctttgactaagtctgacgtcttttcgagactcacatactcttaggtagactttaggaagaattatgactctttttcgactgcaaatttgaatagtaccctcttaaccctccatgactaaaataattaaaaataattttaaagtggatgtctcagtttctaacataatattaataattatttttcattgtcaaaaaaattaataattaattttcaattgtacttttttttttgaagaattatactttttagttaatgagcattttaatatgaacctccataaaaatattcaaagatggaatctcattgtaaaatagtggagtttagaataattaaaaaaaaaatataataattattacaatttactaaagtagtaagtttagttttagacaattttcttgaggtcaatattaaatggactatttaatttctattataatatatccatcatttttaagttgtttaattttgctctgtgtttataataatggtgaatgcacaaatatttgataaattaattttgtattttcctgatgtagcctgtttttt

SEQ ID NO: 30823 - DNA, 517 bp, Medicago truncatula
  Intron number 2 from transcript Medtr4g104180.1 (locus Med tr4g104180) derived from phytozome v7.0 (chr-ID MtChr4; po s 22658263 to 22658779)
aatcgcaaatcctccacagatatccatctctaagtgtaagctagtgtattcttgatttttccactgttcagtgtcttccatattggtttttacgccaaaccataattattttttattgggctggttcagttctgatcaaagcatttaatgcattcataatggatgtttgagttaataaacaaacattagtttgtataattgtcttgtcaccattaacagcatggataatggttgagtgtagagtaatatacaatgtcacacttgagagtcatactcgaggatactgggcactacctgtgttttaagagttagcctttttatatagctattgtgtatagcaatttcccatgccttctttctttatttttcttgcacattttttctttgtctagtgtcatttaattgttctttcattactttatttctgtcttttagctttatggaaaactgacagattcttattgatttttactcaacctataattataatctcaggtgcaagataatttccgtggaa

SEQ ID NO: 30824 - DNA, 430 bp, Medicago truncatula
  Intron number 1 from transcript Medtr5g013660.1 (locus Med tr5g013660) derived from phytozome v7.0 (chr-ID MtChr5; po s 4157993 to 4158422)
tttttgtagaaatttatttctttaaagcttgaaatttatctcggcgatcatgtgccctaatgccaatttatttttttaaagattgaaatttaatttttttctttaaatactttgtttttgtagaaattttaacatgtgccctaagaacacaagttaacataactcttaaattattattactaaaaataatcttcactgttaatttgtagtcagataattgaaatcaataatttctctgcacagaggaaatgcatgtaatcagaatccaagaaaattatccccttactttttgtttcgaaatagtttgagtcgtggcaaattgataaactttttttttcttattatgatttttgtgatccatatttttactgatatctttgtttatgtttctacagaattgctgctagggcaccatatcaaacaagtaacc

SEQ ID NO: 30825 - DNA, 1060 bp, Medicago truncatula
  Intron number 2 from transcript Medtr5g013660.1 (locus Med tr5g013660) derived from phytozome v7.0 (chr-ID MtChr5; po s 4158908 to 4159967)
aggtctaactcatccttaccaaactgacttgtaaggtgaggattgcctcctctttatatactcttctcaagagtctcttatctatccaaggtgagacttgggttttttccaatacaccccctcacacccagcactctttaggcttggtgcgtgaataggtttagacggcccttgaattcgacaagctctaatatggtgtcaattgatcgagattgagccatcatgaaggaagtagtataaattaatctgccaaaaaaaaaatgaaaaacgaaaaaagggggtaggatgacgtcaagtgagaggaaaccaccctgaaagatgatgatgccatctcaaatggtgccctgtaaaggaaaataggacattttagatatttattttcaatgtcgaagagtacattgaataatttttttcaaaagtaggtcaatcaaaaaaaaaaagttgttttacctctcacatttgctccactttttaatcttataaaacatataatttttctaccttgttatttgcgtgtggcaaacccttgtcactaccggtcactattataagcaaaaatctacaattagatttattcaattaatgatgtatatgttatttattatatatcaaatacatcatttaattaatgaatataaaatgttgatttttgtttataatagtgatcggaaaaaaaaaagacatttttcgaggggttcctaggaccttgctcctcacaaaagcaattaatttccgtggggtttgtgcccctgaaaaatatctttgtgaaaccagcttactttttgggtctctctattggtggtgatccgcgtcgattgattttttgggaacctcttttgcgtagtattaaatcgagattgtctgatttcaatagtcggtttttatcgtttggtggccggttagttctcctaaagtctatcttgacctctctacctgtctatgctctttccttcttcaagactccgtcaggtataatttcttcccttgattctattttttctaatttttttttggggggatgtgaggattctaggaagctctcgtgggttagttggaccac

SEQ ID NO: 30826 - DNA, 815 bp, Medicago truncatula
  Intron number 2 from transcript Medtr5g098610.1 (locus Med tr5g098610) derived from phytozome v7.0 (chr-ID MtChr5; po s 39344433 to 39345247 reverse strand)
gtgttcaaaagcaggcgtcgtttaacgttttcaaggtatcgtatcatcggttactctcttacattggaaatttgagaaagacttaatctttttaattgagaattgaagtacaaaccctaatgtgattatatagagcacgcctaataaatagtaaggattgaagtgcattaacttgtggtgccacctttttgttgagagtctcatattggatgggatatggcctaaaaatatgtttataagtaggaaacatcctccaccttataattcagttttataaagacgatttagaccgaatataaaaatctaagatggtatcatagtcaatccaagatctggtgagtcatttggtatctggcgacgtaggtcatgcctcaaaaatccagtcttgagtgcaagggtatgtgtagagtctcacattagatatagcttaaaaatatgttggtatgcatctctcaccttacaaactggttttgtagggttgaattaggcccaacacaagtgttacgaattttatatcgtcatacaagcatgcaagttgggaaagtttagtttgtgaaccgattaagagaaaaaatcattattttagatgcatcgtcataggaaacaattattttaaatacaatactaaaatataaaaatcacaatgctttagttggaagaagaacaacatacgtcacacgaatcttgtggtttttatgcatttgttttgtaatttatattataacttatgaattatgtgatgattattgcacccatctgttatttttgtaagttggatttttacgtttgattgattttatgtgatatgtaggaaa

SEQ ID NO: 30827 - DNA, 853 bp, Medicago truncatula
  Intron number 2 from transcript Medtr6g080900.1 (locus Med tr6g080900) derived from phytozome v7.0 (chr-ID MtChr6; po s 16342973 to 16343825 reverse strand)
ctgttacgccaaaacaaggttttaatttaaccctaattttcttgtctctgtttattactttgtaaaatgtagcaaaataatcattttattttagtttttgaaaaatatatattacacggtctttggattagcatattaagggtatgtttggttggatggtttagttggggaagggagggaaagacttacttttctaaaatgtttgtttaaatcaattaggtgtgattgaacgattatatgataattactattagctatgaagcacaaatacaaacacggacattgacaagccgtcacttctaataatttgataaaatcacataatttagtgtaatcatatgtgtcggtgtgttggacatcgatgtgtgtttgacaccgggacacgcctaatcggaggagtgtctgtgcttcatcgatctttagtcatgatctctgatgcacggacacttctgattgaaggtatgtcccgatgtccgacacgtgtcgtgtccgacaccgatacttgtatgttattttttcaaaattttatcgatgtcgacgtgttcgtgtttgtgtctacgctttagtaaaccattagatgttcttttaatttttttaaaaatatcaaaatataaacttagccctccaaaacctcaacccaaacaggacttaagagtttagtctctatcaaacattagtaaacaactattttaagcctccaaacctgtttcttagtatgccatgctatttttccacattggttaaagttttcaaggagagattaataagatatatgtgaaaatgaaggaatatgtagattagatatagattagaggttcaaaatgtcatgttattaacctttttttgctgtagc

SEQ ID NO: 30828 - DNA, 561 bp, Medicago truncatula
  Intron number 2 from transcript Medtr4g092740.1 (locus Med tr4g092740) derived from phytozome v7.0 (chr-ID MtChr4; po s 19459303 to 19459863)
ggatttcattgacgattccctcttattcctctcaggttcccttcatttcttattttaaatactaacaataatagcttatgtacacgtttgggtaaacaatttaattaaccatatgtatgtgtttctgtataggctatttctaaaacaaaaaagataaaactattttcatataagctttaagctgttttcacaagcttaaagctgaaaacaacttttggacatgtcataagttgtttgcataagcgctcccaaacagtctcacacatgtttatgtcagaagataaactcaaataaatcaatccgtaagtacatccaagactaaggtaaatagatatgggcgtaaaattgatctttgtttacactataatgtatatgttatagtttttaatgttgtttagttagggtaataagattagctaggcctgaattaaaatgaaattttgtttatccattagtactgcctcattatgacctacactatccttcatggcattggtttttgtcgggcggtaacgattctttaaattattttacaggaaagaagcattgcactgccagaat

SEQ ID NO: 30829 - DNA, 934 bp, Medicago truncatula
  Intron number 1 from transcript Medtr5g033630.1 (locus Med tr5g033630) derived from phytozome v7.0 (chr-ID MtChr5; po s 13729574 to 13730507)
cagctcatcggttggaaggtgagctcatctgttggaaaacaaaggaccaacttaagggaaaaaaagattaatccgaagtctcttactgcacactaaaaactgtagctccttactgtaatttcatgccttgttaatactgttaagtattttgttaaggatatatataatagggatcaaatcctctcactcttgtctctctttcttttggaagaaaagcttcattgaatggttaatgttctagttttgagatattgcagaaaactaaaatgattttaaacgcatgaaatcaaagagaaaaagattaaacatttcaaataaatgtgtcaaggaataggggaaatatgtgagaataggtgggtgtctgatagagtcccacatcaaccaattcataaactaaactatgcagttcacatataaaaagaaaggacctctacctcttacaagcacggagccgagtgatgatcacatagcgaactattctttcgccttttactaaagaataccgtgtgagcgttgctattagcggcatacactagtttttgggagagtcctcttcacagagggctttgcaattttagttcaatattttcctattctaatcttgctctttctaagcaggctttttatatttatgtttatgtttatagtaaccatcatgaacgtgataaatttcaactctttcattttaatttatttacttaacacactcatttgtatttgttgaaagtcaaataaatcctactaaaatacgtagataccacataaagttggtagaactctgtgaagtttaaccaatatataatagagtgtgttaggtagtgtgatattaacatttattcatttcattagttgtatcattttcttctcattgaattgatcaaatcattcaaattagttagcataaagaagcaagttcataaaattatagcagacg

SEQ ID NO: 30830 - DNA, 798 bp, Medicago truncatula
  Intron number 3 from transcript Medtr5g008510.1 (locus Med tr5g008510) derived from phytozome v7.0 (chr-ID MtChr5; po s 1608105 to 1608902)
gttgtattttgtttacacggtggtggttattctgggtatgctaatgcatttttacttgatggatttacatactatagtgtaaaagttttttttttacactgtcaatcaattataaccgtgatatcgttaaaaatgtaactattttaaagtaattcatttgattgattgtgatttgctgaaagtgtaaaaagacaatgtatttaaattaaactaatttttaatgtgtgtccatggagtgacatggaaatcggaacattgtcacttattaactgctatcataatgcaatgagaaaaagagcaaaaatttttagagtttgagagagttgtaaattctataagggttttcatatttaaagataagaatgaaggcatatacatattaaatacaagttattaatattaattgtcgataactagtaactaacacgtaaccgtataggtaaataattaatcagaaaactaacctaactacaaccatgaaactaactctgcgacaagatcgcgggtgttatcgatgggtttcaaccctaaccagcttgatttattcctgaaacatgaaagatatatgctaaactagtattagcagcaatttacgacaccaaatttccatttgattgttagttattacacttcgaacttgttttctgcaccttaaatgtgtacgcaccgtataaatacagatatatttatgcacgataaaaaatgctttcaacaattattgcaagttaaatttgataaaagcctccacattatttcattacaggctttcatttgctgtgtcaacgggtataattaagg

SEQ ID NO: 30831 - DNA, 623 bp, Medicago truncatula
  Intron number 2 from transcript Medtr4g110760.1 (locus Med tr4g110760) derived from phytozome v7.0 (chr-ID MtChr4; po s 25196259 to 25196881)
tctttcttcttcgacaattctacgattcattcaaggtatctatctatctcttcctcatccattcacaatattttttcggttttattagtattcgggtttcaatttgtgtggttttgattcatagatcaattcgattctattattacatgagggtttcattattgtgaatttttgaataattttcactgtgctagatcgattaaattttcactgattcgtgatttgttatagaagatagaaagctgttccccaataaattgtaaatttttctatgttctgtgtacacgcgggtttcattattgtgaatttttgaacaattttcaatgtggttttgatttatggatcaattcaattttctctgattcgtgatttgctatagataggaagcttttccccaataaattgttaaattttctatattctgtgtaccaatttgcccctatttcaatcaattagggtttgcgtttcggatttgtggcctgccataggttttgtgatgtttttcgtcaaattagttgcttagtttcatattttctattgtatcgatttgtccctattttagttgagtagggtttgaaatatgatttattgcgtactgtttatgatatgattgatttgaacag

SEQ ID NO: 30832 - DNA, 729 bp, Medicago truncatula
  Intron number 1 from transcript Medtr7g083800.1 (locus Med tr7g083800) derived from phytozome v7.0 (chr-ID MtChr7; po s 17978490 to 17979218)
gactcatagaaggttaaattttttcgatcttctcctcaatttctctataatctcgtatacccttttactctctgccttcaattttcattattcttcagaaatttcgcctctcaattcaattttccattctctttcccctctttcaattcactatttgttgttacgaatttaacctttttgtcttgattgtgatggttttgattacccaattaccttaatttcatgacccatttctcaattcctttgattttcacgttttttaattttgaatttgtttggttatgttttaggttgatcatgtttatgtgattaaagtaattggctttatctctcttgaaaattgcaatgtattctaccattatctgtttgtgccatgatttgattgttgacctaattggtggatattttttttttctttcaatttctgtaaccccattactttgaattttgaaattatgtatcttaggaataagaaaaaggaagttaaaaaaaccttatttttttgggcatgtattgttgttttaatattggttttaaatattcatgaataagaaggaaccactttgatcaattaaaaaatgttataaaatatggaccgaatttttgtatatatatttgattcttctgcctcacttttgaagttgacaatgccattgccaactgttgtagttgaccttttgattcaattttgtaggttggagaagataacctagtttggtttattcacca

SEQ ID NO: 30833 - DNA, 1022 bp, Medicago truncatula
  Intron number 3 from transcript Medtr5g077130.1 (locus Med tr5g077130) derived from phytozome v7.0 (chr-ID MtChr5; po s 28391938 to 28392959)
gcagatattaatattttagcccttcacacaccttggtatggtaactcaacttgacaattaagactcttgttggcaccctttcctttcccctccctgcccaaaagtcgagggtttgtaattggtgtattatataattatattatatttagaccgggacttaattgttttgtctatgtctttgcttcatttctaatctccataataaagaataacaaaagaaagaaatagtatagctcaagtttgtatatcaatgatagtgaaatggtggtagatactcgaagaggtaatcaactttctgagtgctgattgccacacataatatttgaatgtggatgttgttagtgagaatttgactcctctaaagtgagtaaagtgtaaagtgagatgagaatatcaagaattgttatgttagcaaactcatattaccaattgtttttaaaaaactcataattttttatgatgtaccactaacatccatcattactttattaatcaatggtttataatatgtactttacactctaaagtgagttgctctcgccataggtttattaatcaatgtaaataggtcaggtaaatattattcttttataatgggagcgaaaacttctgtattgtgtttctctcgccaattaagatttgtgctaaagaattaattatgtaatgcttgatgaacttgttgtaccatttgttctcggcttctgtttagaggtttagccttgcttttctggtgatattattttaaaaccaataaaactatatacttgtctgatagtttaccagacttagaacacattgttttgctttcactggcctcatctgttatggttgataattttgtttgatgttttattagttgttaataattatcactcctctggtattgtttagtattccatcttttatgtagtggttcaaactaagtttcagtttcaccttttatccagaccctttaacctctcttgttaacataaaccatttctctgattttcatagccacaccaaaggtcacataagttatt

SEQ ID NO: 30834 - DNA, 700 bp, Medicago truncatula
  Intron number 2 from transcript Medtr4g151950.1 (locus Med tr4g151950) derived from phytozome v7.0 (chr-ID MtChr4; po s 37534270 to 37534969)
tagctggccttggtgtcaaattctctctacctcaggttgttccactattttgttaagatgttatttgcacaatctattgttctgatttagatgtgtttcaccccatcattttgttgccttaggtatgtttggattagtttacttgagcttatttattgacattagcatttgtgagatggttatgaaaacaacttatgacatgtctataacatgtttttagcttgtttctaaaaactttccatgaaagcatatgaaaacagcatttatgaaaataattttactttattttatcttttgttatatcaagagcttatacataaatacttatatgataagcatttattatgctctaagggcttaattaagctgtttatccaaacaaggtctttactattttacattggttttgagttgatttgaggttcctgggcctcgttggatcacattcatgctagattctattcatatctagttttgattttgtatgatgatttcatattgtatttttacctcatgcacttactcttttcctttgttatattatatctcttcagaaaataagtttagtacttaattgtattccaactaatctatgggtgcattgcaaattattaagggtaaaaatttgtcaaatttgacacttggagatttttacatttggagttatatgtgtctcagtatattgtttatgacaggtcaa

SEQ ID NO: 30835 - DNA, 910 bp, Medicago truncatula
  Intron number 3 from transcript Medtr4g143310.1 (locus Med tr4g143310) derived from phytozome v7.0 (chr-ID MtChr4; po s 35860035 to 35860944)
gtcagctgtaagtttctgccctgaattctaaatctcaatttttctgtttattcgtattgctgcatctaatcttcatttaggactaataattctcaatgatatcttgaatggatttgatttatctaatgtgagtttacgttacggatcgtaaagaagcccatttgccgatcaattgttgatgtgacacacatgtgctaaaataccaactgttgtttagcgtgtttttctcatcaattattgagatgttttactttccaacctaaatcgtgttatttaattttgagccaattctctttgaataatgcttttaaaaagagtttaatggacatactccgtcactgggaaatagttttacactgacatcaatgagagaacacaatttttccattttttccatgtcataccatcaatttcaaaatgttcatacaaaaatgaggtgatgcgaaaattgatggattttcattgtatgttggtgtaaaacagagtgcatatcctttaaaaaattatgatctacagtttgttctgacaaagataacatcttttgctcttaatcatacatcatagtcacagggcactaattcttcatgcctaaactatgaagtatttgtatgggatcccaatatttcattgtttattatgggatggttaacaactatttgttccctacatatcactcatttttattttagtttttgtgatatggacagataaaagtcaaattaaaatcaattgttgtatggaaagttgaacttttttactattaaaagagtttctagtttccacatgcaatgacattctttttgaccttatgggaaaatacatatttcctttcctttttatatttttatttttacgtttgccgaatcttcttacccaaattcatgtcttccttctgtgttttagatccgcg

SEQ ID NO: 30836 - DNA, 655 bp, Medicago truncatula
  Intron number 1 from transcript Medtr5g041290.1 (locus Med tr5g041290) derived from phytozome v7.0 (chr-ID MtChr5; po s 17663263 to 17663917 reverse strand)
ggcataatcttcaaggacaccaagcaaagggaaaggtataaaattcttctctctaaacctttgcatccttgtcgatatccagatccttatactttgagtgtgctaggactaagggataatgtgtttaaattactaggaaatttaggaaatttaggatgggttgatatgcttagacctatgaaaggtttcgaaaatttcacttatgaattcttaagttctattgaatttacgaaggataaggtgaattttgacaaccccgatcatagagtctctttccgacttttgaatatggattatgagatgtctcttgaaaatttctgtttagagatggactttgcaaatgcggggttcatccatgactcttggaatccaaatttaaagtcggaaaactatgaccccgctctcttttggaaacgcattaccgggttaaggcaatataatccccgcaacaataaggctagtaacattcacaacccagtacttagatacctccagagagtcatggcttgtaccatctggggtagaaaagaggtaggaacaactaggacggatgaactttttatgctttgggcaatgcttagtaacaatcccgttaatatttgtttctacctacttgattacctttcctccataggagctagacctgataatagag

SEQ ID NO: 30837 - DNA, 426 bp, Medicago truncatula
  Intron number 1 from transcript Medtr7g012350.1 (locus Med tr7g012350) derived from phytozome v7.0 (chr-ID MtChr7; po s 3171201 to 3171626 reverse strand)
gtggtaaaaactgaagcacaaacgtttcttggacggtagtcaatgattttgattagattttacacgtttttcttaagtttttcacatgtttttggacctcattaaatgccatataccttataccacctataaaaaaccctcctttacttcctcttttcctcacattttctcctcccactctctccccctctttctcttcttcttctttgcttctttagtttctaggctttttttatacccctttaggtaaataccgatgattttttggggaaatattggtccgttaagttggggaaaaagacatcatcccttgagataaaattagatttgtttccttttactccgaaaatcttttcaccgtggataaaaagaatcaatatgggggtataaaatgaaccaaatttaaatttaactcaaggggtcttg

SEQ ID NO: 30838 - DNA, 640 bp, Medicago truncatula
  Intron number 1 from transcript Medtr4g089710.1 (locus Med tr4g089710) derived from phytozome v7.0 (chr-ID MtChr4; po s 18747740 to 18748379 reverse strand)
caataattaagatcctctttgttgtcaagaaaaaggtaactaacaccgattttagcgtgtggaacttgtgtgtttaaagttatttgcgttcagtttattgaaaaagtgtgacttatattgcccacattcagttatcaatggtggtataggcatgaagagatgatattctggaatctagttattaaagaaggtatggttgttcaacacctaagactgcacgtttatccaaccacttatcatccttttttttttcctggtgtgttgatgcattttttaatgagattaatttttacggaatcattgttttttttaatctcaataatttatttgagtttttgttgtacacaagttataagtattcaagcatatttgattgctcaattgaatttataaagctttttatttctattttgtaggcatgaatttataaagcttaaagggtgagtttgggacctaaaatgcttttacttttgtataagttataaagcttttatttttgagtagtgatatatgtacatctatgttgaacaactttcatgataactttgtttttatttcttcttattggtcaaaaacaatggagagagaagaagaagaagaagaagaagaagaagaagaaggaggaggaggaggaggagga

SEQ ID NO: 30839 - DNA, 669 bp, Medicago truncatula
  Intron number 1 from transcript Medtr4g157070.1 (locus Med tr4g157070) derived from phytozome v7.0 (chr-ID MtChr4; po s 39051995 to 39052663 reverse strand)
ggggatccaccaaaacccttggaaatttcgtcaaggttttgatccatttctcttatctatttataattactagttagttgttttctgattgtttgctaaattgaaagtttattgctgttggttaaatgaaatttctattgaattattgtgtgtttgataagactgtactgttgattccgtggtctatgaaacaatgttgacatgaatgcttatattgtgttgtgccattttctcatattaatatcatgtttgtgtccatgtttcatacagtgccatgaacacaagtcaatatcaatccaaatttgcatatttattcatgttatccctgttggttgtgtgaatgtgaattgatttttaaggacaaacttattgcattttgtatgtttcttcacataaatttaaatttttgtggtaacaaacgttggcaaaattgtggatttgagaaatctttgcaagttatgagtattttatttgaagaaccatacaatggacataagtttcgtctgttaagaaatgcagtttttttttttttttttgtaggctacatttgactcggtatattacaatgacatttcatttaccgtaaccgcatttggattgatctgtgttgtgatttatgatttatttgtgctgtgacatttcattttacaggccacttttgactgtttg

SEQ ID NO: 30840 - DNA, 676 bp, Medicago truncatula
  Intron number 1 from transcript Medtr5g046630.1 (locus Med tr5g046630) derived from phytozome v7.0 (chr-ID MtChr5; po s 19616319 to 19616994)
ggccttcttgatcacccattgaccccatccaggtaagtatgtaattcaatgtcataccattttattttataatctctttccctcactgtttcagcaaatctctccgatgtgggacttctagtatgaaacctatatactacatgcacaaagtctgcacaacaaaccatgtgctatgttttgtatggaatcagagaaggccaccatggaagaacaagtgaaattatttgcaacaatttaaactcctgaatcgcataaccgacaccattaaacatgttaaccttcaaatttccaacgaaaatcctatgagcatgttgcgagaacccaacatcactatcataaggatggaaagctctaacttgagtccccataccaacaatttcaccccttccctcctgtcacgcatgtgcctgttctcggcttttcacgccttgtggcttaaaactttgatgttagaaataaagataagaagcgaagagtctatgacgccctattgctcgtggcaggagaaatcaaaattagacaagatttcattttctcagagcatgaataagccttaaacacaattttatgtttggaccttaattatactcgtttaagtttagttagttatttagtggttaaatgttagtttagttagtatgaaattcctaacttaagtgcagtttcttggagtgtg

SEQ ID NO: 30841 - DNA, 798 bp, Medicago truncatula
  Intron number 1 from transcript Medtr5g106980.1 (locus Med tr5g106980) derived from phytozome v7.0 (chr-ID MtChr5; po s 43141712 to 43142509 reverse strand)
tggccaagttagtaggttagcctgcattatgagggtgtgaggcgttagatgagagcgcatgaatagtattgttagggtatgactgcatgtctgtgaggaaccttggtccttgtaggataaactggaatttatacagttatcttttgattcaatattactattagcatcaagctcctactattatgcactgtcaattgttctatagcagttttgaggttatagtagttttgcggtcaagatatttaatacttttcatcatgcaagagtactttgggtttgaagaagcaaaacatggaccatgcacaggctcaattttccttgcaccggaattcaactatattttcgtataatatggggttgatattgtcaagctctagaccttaccttatctctttcctggataatccaggaaagagataaatcagtttttttttttaatgttgtaaatctacatctacagattgtaattgtaccttaccaatactctaaacagtatttatgactattttttctctctgccaaatttccttcaacttttcttcttgttcaaaagttgttaagttttctgcttttcatgtggaatagaagattgacattagctcaagttcgagtagaaaacctaattataatttactgcattcaaattctatgaaagtctagtaatttaactagttcatgatgctactaaatttacacagttggtaatgtagggtgagtttgtcttgactactgcctggaagacctatggattgtatttatttttgcattgcctgaccttttacccactatcaggggcac

SEQ ID NO: 30842 - DNA, 1026 bp, Medicago truncatula
  Intron number 1 from transcript Medtr7g035290.1 (locus Med tr7g035290) derived from phytozome v7.0 (chr-ID MtChr7; po s 8626550 to 8627575)
tcaaactgctaccaacccacagaacactgtttttggtaatttcatttcatttctttacttatttaaatctatgaagcacatacactaacaaacagacacgaatacgacactcacatgtcgacatatgttgtgtcgtgttagcgttggacacaaacacatgtacattctcgattagaagtgtcggtgctgctataatgctttaaatatgtactattgagaagaccactaaaatagtctttgacattgttttacttttcaatttaattcttgacaatatgaatgttttaaatcaatccctaattcggtaaaacatttccttttttcatctttatgtgaatgtccgactaaatatgttgttacttgataatgtgtcttttaagtgactaagtatggtgttgatcgataatgtttctgtaagtgtactgttagaagtcctgattatggacatttaaaaaaaaaaaattacttgaatatgtataacatttaagttagtcactctgtaaaactccatgagttgacatcgtcccagatgtggacatggtcgttaaaccaagtcagcagttgggacttcgtcaacgcactcacatagtacaaggactaacttgagtaacattttatagatttgagtttttttatttggaatttctgtgatgtcaaatactaatttgagacttattcacaaagtcagggatcaatttagtggtacactcgttctacattcttcattatgtgactaggacttccgactgaaacttaacggacacatcatctaataaaacacgtttcgtcacaaacgttcacaaacaaatgaatatgagaaaccttttacatagtcggggattaatataaaatattcatattctctaatctctaggactaaattgatagtgtatctcaaagtcaagaactattttagtggtttactatttttttaactcaaacaaacaatatttactattattgccgcattgctatgtttgttgaacaaatgatagatcaaaaataattattaatatcctttttcag

SEQ ID NO: 30843 - DNA, 533 bp, Medicago truncatula
  Intron number 6 from transcript Medtr5g009210.2 (locus Med tr5g009210) derived from phytozome v7.0 (chr-ID MtChr5; po s 1956816 to 1957348 reverse strand)
gttagagcttttgagaaggcatctggaaaggtaataactttatctggtctcctatctgtcacctttatccttgttgtcaactttaattccagctttcaaaacaaaaatactgttgctcacatgcgtttatttctttgcggggtgagctgttctgaaaatttagccaagatattttgtgttcgaatatgaattgccctaactgtagttaaggatatgcagcttctctaagacagaccggttgctctgtaatctcatttgcctcccttttctttatggagtgatatagatagagacatgcgaagtggctaccaaatgttataggaatcaaataatttccctctaggattctttctatctaacttaatctttaattgacaatcacggttactttttatatatgatgaaaatctagaccacgttgaaccaaatcatgtataacattgagctaattttcagtgcatgtataataataattctcctgattacttatgttttcagaaaattccacttgtgaaggctggccgtagacctgg

SEQ ID NO: 30844 - DNA, 283 bp, Medicago truncatula
  Intron number 3 from transcript Medtr5g009210.2 (locus Med tr5g009210) derived from phytozome v7.0 (chr-ID MtChr5; po s 1958018 to 1958300 reverse strand)
gacgaaccaaggtatgattaggaaattatttagggcatttgttggaagctgaaactggttttgactttaaatttctgtctctgccatctatgtttggttatgtataaaatatcattttgaagttgatgaataatctaaggaggattccttcaaattcgttgtaattatcttctgtttgtttgaatgattttctgtttttattagaagaaaaaagatcttcattttaattagtttactgatgagatgtttctcattcagctcaccattgaagaaatctgtcgtg

SEQ ID NO: 30845 - DNA, 793 bp, Medicago truncatula
  Intron number 1 from transcript Medtr7g088820.1 (locus Med tr7g088820) derived from phytozome v7.0 (chr-ID MtChr7; po s 19343074 to 19343866)
cattgagactttgctgtcataccactgcctcactggtaatcattccttttacacctattctacactggtttaaactataaatcatgctttcgaattaacagtcaatagaacttatggttttatactattagttatttgtcacttttaatgaaactgtgtgtatgtatgtatagtcatttttggatatattcatcgacctaatataactgtgctctccttataatttgccttggtgctattccattggttaaagtattttgtcatatagaatctagaaacactagaggcatctttgctgtgataattgagcaagcttgaattttagaacaaaatcaaccaaaacacactttttcttgatgttgtattaatatatattcatctaaaagaatttccataaatgtattttaagttctgtaacatgactatattaatatatatgtaaactttaatttacaacgcatcaacaagtcttccgtagtagccctcatggaaaaattcacatacttgaattacaataatatttctttgtcaatttcaaatttcgtttgtcacagtaatgattatactatactatataaaaaaaaccatagcgttgtactaataaaatgttatagtaaagcgattcgtgacttttacggaatcggtcttggtgcttggattatcttggtttttgtgggtgacggacagtttgatatacggttgactgataggtttcacaagaatatcccctacccgacttttgatccccctatgcatttccttcttgacaagatgaatttgcaagcaactttcg

SEQ ID NO: 30846 - DNA, 760 bp, Medicago truncatula
  Intron number 1 from transcript Medtr5g085720.1 (locus Med tr5g085720) derived from phytozome v7.0 (chr-ID MtChr5; po s 32764260 to 32765019 reverse strand)
ccagaagccagagttgaggtgagtagctaacacaatgagctagccatgcatacaatcacttcaattttctcaaatttttaccgagtttctacgtgtcggtgttgtattgagtgtctgcattagtgcttcatagctgctgaaagctgaattgtgaatatatttccagcgacagattacagatcccttatgaaagaagatactttggctgttattctcaatgccagaagccagagttgaggtgagtagctaacacaatgagctagccaagatgatttagttgcatctaaattgatgccctaaactacgtgatatgagtacagagtgttcaagttaattcttaattaaagtaagttatgtgacgacttttgcgaaatttaggatggacatatacagatgaaacatgttttgtctatatgggtgttacttcaatagagcaatctgctcctttatcagagcttccaaattccaatctcttttccaaacatcaggtttctcacaggatttggtcgcgatactgccaaatccaattcacctgttctcactatacattggttgatcttgttttttgttagttacatagttagcatacataagcaaagtaaaggatcaacattcgtttcaacaatgaagagaaattattctgacagtacttttcttttgaattatgacattaaagtgattacaaattatttggggccatcactcatattatgtgcatgaaatctacactgcctgtagtgtctatttaaagataagatct

SEQ ID NO: 30847 - DNA, 583 bp, Medicago truncatula
  Intron number 1 from transcript Medtr5g084440.1 (locus Med tr5g084440) derived from phytozome v7.0 (chr-ID MtChr5; po s 32154052 to 32154634 reverse strand)
attgttgcgaacccttaacaattcccgtctcccaggtatgcattttattttattttttctttttttggtgcaaatttcatttgagaagtttttcttttgttgaacaatgttgcatgctgaaggatacttggttgttcctttgagaagtttttcttttgttgtttaaacggtgattatctatgataaatctatgaaatctttgttgttgtacttttttgatgtaaaaagttgtagctctatagtttgttggaattgaagaaaataaataaaaagggaacatatgcaagtgacccttaaacattttgaaagtttgagcaatattacattagttgctgttttgaaattttcctcttgattcaaaggcattttctttttcggcttccagccacagtctgtcattgagttcattgattttgagaagaataaattgagaatgattaactatatgttggttatacttttaattgcatggcttgctaacaagcctttacatagaaatgtcctattttattttattttattctagcaaatggttcattgtataatttgattgttttcttttttgttgcaatgcagtgtgaca

SEQ ID NO: 30848 - DNA, 285 bp, Medicago truncatula
  Intron number 1 from transcript Medtr5g029730.1 (locus Med tr5g029730) derived from phytozome v7.0 (chr-ID MtChr5; po s 12420267 to 12420551)
gttatcatcaaccttcattcagttcttggaaacaagtatatttcttatcttgttttttcttatgtagaaaatgatattgaaatcactctaaagatagcgacggaatttcagagacggaaaaaataatttcgtctctaattccatcactaagtgttagagacgtcaattttcgctgaccaatttttttttttttgcctttgatttttgtcaatatttcaactatttttagtagcttgattcattcgagagctataaataatgtgattttttttatttgtcttgtag

SEQ ID NO: 30849 - DNA, 218 bp, Medicago truncatula
  Intron number 1 from transcript Medtr7g021310.1 (locus Med tr7g021310) derived from phytozome v7.0 (chr-ID MtChr7; po s 5168936 to 5169153)
cctttaggcggcaccggccgccctgattccgtcgggtaactgttttgtttttcttagtccccaaacatcaattcagtctccgacaaaaaataatactcaaattagtctctgactcagtataacatagggaagatattattgttgatttagttttttttggttgaagaatttggtgattgattttgaaattgtgtcaatttgtgattgtaggctttatt

SEQ ID NO: 30850 - DNA, 603 bp, Medicago truncatula
  Intron number 3 from transcript Medtr5g105790.1 (locus Med tr5g105790) derived from phytozome v7.0 (chr-ID MtChr5; po s 42507475 to 42508077)
aaatcgactttgagtccttccttagggtgagcccttttttcgttctttgttgcccttttttcatttacgcgttttttatataatgtttcttgatttcgtagaagaaatagtacaataatggagaaattgcactcatctccttgatgtatgcttaaattacacatatagacaggtgaggggtgtgacaatttttccaacaagtaagagtggttagtgtttatttgaaaaatagaaggggtgtgggtgttattttggtattcctcgtagtagataagtgcaatttccatgcgaacatacaagaatgtcattgatgttcaatttgcttctagagtcttgacatatatatatatatatatatatatatatatatatatatatatatatatatatatatatatatatatatatatatatatatatatatatatatgcacctaatttgaaagtatacttttgttttttgattcaaatgtctgtgtgggaatgcgtattcagttcatttgtaagtaactttataggtattatctatactgaacctggtagcttatttattgacattgagtggtaggcacatttaaacttgcaaactcgagctgcagcaaa

SEQ ID NO: 30851 - DNA, 622 bp, Medicago truncatula; identical to SEQ ID NO: 30477
  Intron number 2 from transcript Medtr5g088960.2 (locus Med tr5g088960) derived from phytozome v7.0 (chr-ID MtChr5; po s 34530961 to 34531582)

SEQ ID NO: 30852 - DNA, 798 bp, Medicago truncatula; identical to SEQ ID NO: 30841
  Intron number 3 from transcript Medtr5g107070.1 (locus Med tr5g107070) derived from phytozome v7.0 (chr-ID MtChr5; po s 43194517 to 43195314 reverse strand)

SEQ ID NO: 30853 - DNA, 848 bp, Medicago truncatula
  Intron number 1 from transcript Medtr5g107070.1 (locus Med tr5g107070) derived from phytozome v7.0 (chr-ID MtChr5; po s 43196963 to 43197810 reverse strand)
ataaaagtagcttacccaggtatgtttgtttgcatgtctggttttgtattctcaacaaagccaatcctgtgttttgatatatgaaggcagatactaaacaaaaatggaaacatatatgcatggtatacatatgagatacttcacggatatttataagatacttacgggaatgggtctgcaatgctatggaagtggctggaatcgacatttcttcttgctgtgctccactttcatcatgccaagaatatgattccaaaaatgtgtcagaagaattcgtcattgtggtagaactgattcaaacatataggtacagtggttagatgtagaaattagtttagactgacgatttcttgtagcatcaattttgtatcctgcttatgctgcttaagtaaaaattagtgaaggttattaaaatagtcttcatcatacgcttctcaagagtaatttataatacattttagttcttattcatggtggcatttagtatacacactacaaagttttgtgtaccatgcacaaattaaattcttcttttaaagccaactgttggttttgtacctgctggaaaaaaaccaaaaaaaataaatacaagaacatattttaattgaaattaatgaatgactattttactaaatacacctacatattgaaattaatgagatatatatgtatgtatttagagatagtcattgtcatttgaatttgtaataataagttataacccttttcctttatggatctagtttatgctgctaatttttgtttatgaccatgtatctattttgatggatgataatttttttttttttttagaattgatagatataacgacaaagagttttctgaaa

SEQ ID NO: 30854 - DNA, 921 bp, Medicago truncatula
  Intron number 1 from transcript Medtr6g098940.1 (locus Med tr6g098940) derived from phytozome v7.0 (chr-ID MtChr6; po s 21594956 to 21595876)
gttcttacaagttccaaaggaaggataggttctatgaattcctacttgttattgagttatttaattatgaaattttggtaattagttcctggaaaactacattctaaaagaacaaactacaacaggggtcctttaacttaatttaaaggttcaaacaagtccttgatattgttttcgtgttaatttagtcatttcttcatgtcaagttggtagttttgtttacaatagcgtcattttttatgtatgttaccaaatgtctagctgaccattttaaaaggtacattacatcttcaattcatcaaggtttcatctaaggttacgacagttttttgtttttatctaaaactgtgaccttgttgtactgatcattgattgattgtgtactaaaaactgtaacagaagtcggctaagaataaagttggttcagtgttgtaaatatttttgaagactaatttgacaccaagaaaagataaaaggatctgtttaaaatttaaattaagttaaagaacatgttgtagtttttcccattataacatttccataattatgccaagctttatctggatgctaagcttctagaatattttcacccgaaccttccctccatgcttatatatatgttaaacattatctgaattgttcttggtatagacaaaacataacctaatcagtgaatgtgtatgacatgtgaccgttagtctatgaaagctcccacacaaacacggtcatttgacacgatactaacgctggcatgtcgacattggtaataattttagaaaatgcaacaactgaacgtagccacatgtgtaggttgtactcaagaaaagtttagaaaaaaatggatgtctttgatgcaaatattaaattgctcaatgttgttttgcaggaaatcaacggtagtggtctcagcctctttggtta

SEQ ID NO: 30855 - DNA, 675 bp, Medicago truncatula
  Intron number 1 from transcript Medtr5g083330.1 (locus Med tr5g083330) derived from phytozome v7.0 (chr-ID MtChr5; po s 31597983 to 31598657)
gtcggtacgatctctttcgctaaatatagcattttccaataatttatagtttatttacttgttgaccaacgatattttattttgtataatgtttatcttaagaaaagacatttttttctaacctcaaaaggttggtccaataatggtaaaaagatagtctcttaagagcatgttaagcgactcacacaatgtcatatcatacatacttatgcaactcaaacagatttcactccaatgatttatagctcacttttaatgattgttttatctgcaacattgaatttgagaaaataaaccaacttttgatcccataatatgatagcttatttaacatactaaaattgtttcttcctaatctacactacaacattatggttactccaatgatgaaaataaaaataaaaattgttcatcattatatgaaacttgtttagatatcccaattggagatatttttaatgatatctaccgtaccattcccttcagaaaaaacaaaacacatttttcaaatgatacataaagaactttagactttttatatttttattttttttctaattcataaaaaaaagtacgtatctttactaattattagagacatttactcatcagaacaagttctgtaatactagttgtattctataatatatattttcttgcagagtgacattgaag

SEQ ID NO: 30856 - DNA, 727 bp, Medicago truncatula
  Intron number 2 from transcript Medtr5g083330.1 (locus Med tr5g083330) derived from phytozome v7.0 (chr-ID MtChr5; po s 31598781 to 31599507)
tcttttttggtcaatattttgtttttgtagctcctgtaatacttcttatagtattaatcttcttctgtgttgtaattaagtaggtaaatatgtgttctagtgcttgcttttgtttttaagaaaattaaatttgcctaacattcaagaatatttattaaatcaagcacattaattattatagtcataatcaaagtttgttgattgtgtctataaattgtttaatgttgacattaaaaattgcttccatagctgtagtagtttctcttttctttcagcttatattgcaattatatagtcccatgatttggtggcttacattgaataataaacaaatagtgtaaagaaagattggtatatttacttcagactaaatacatcaaaacttaagatataagagtattgacgtgcgtgtatgtaaagactcttttgattatggaggctttacttttttaacaatggaataaaaagatacattaatagaggctatatataaacaaaaccaaaactagctacacctacataggagattattttcattataagaagccaaaatgcaatctgaacatgaaaaacgttgtttagacaagacatatatgagaccaacccaagcataacttctaccggaccgacggcttaaagaaagaaatgatcagaagtataagagaagagcttgaagagaaatgaccatccttgaaaaagggtgtcacagatttgtctttttggcaac

SEQ ID NO: 30857 - DNA, 781 bp, Medicago truncatula
  Intron number 1 from transcript Medtr5g046360.1 (locus Med tr5g046360) derived from phytozome v7.0 (chr-ID MtChr5; po s 19491934 to 19492714 reverse strand)
caggaagtccaagggtgagcacaaataggaaaagggtgcatgtgaatggaaaaaaggagtattttaatctcgaccatttatttacatccaagggttgagatttaaccctctcatcctctcatgataaagagtgctctcatttgatatgtcctatatatatatatatatatatatatatatatatatatatatatatatataaaccctagatctacggaaacaaaatatttaccgagagaaactcaacacaaagaaatcaaaacaaaagcaaaactggccacccatgcacactccaaaaagaaagaaccaccacccaagcaagcaaaaaatagaagtagagaccccacttgcataaacaacaccaagagttgggaataacttaaactcacaagcacacgtagagttcatctctgccaccaacactgaacactattgactatggcaaagaattactcagctacccactcataataagaacatccgtgatcatggtgcataaccatgtcaaagagagaaattagcttagctacccactcataataagatttggcactagttttctttggatagacttggttgttgaagatataaaaaatattcaaattattaataggtgtgatagggaacctgttctgtccattacatatcacatgtcttaattctagttatgagaaactttgactaagttcacttgctatagttatcaattatgactaattcatacttcttcccattgattaatttagtaccaaactggttcattcaaatcaaggtgaagagg

SEQ ID NO: 30858 - DNA, 1042 bp, Medicago truncatula
  Intron number 1 from transcript Medtr5g088430.1 (locus Med tr5g088430) derived from phytozome v7.0 (chr-ID MtChr5; po s 34259025 to 34260066)
ctgcgccacttgctagactcacaatcctttttcaggtgaaaaaattattctttttttgtttaatttcgtaaaaaaatatcttttttattcattttgttgttgggtattagtaattttgttgtattttggactatgctactaaatttcatatagggaatgattgatttagttttttaaattgtatgagttaattaatttggttttgaattgagataattttggggactgaattggttgttgctaatgattttgtggataaacaacttaatttgtatattatagcttaagatataagcacttatgtataagatattattgataagttataagctgttttcataagctaaattttgtgtattaaaagatgaaataaagttaaattgttttttgataagctataagctgttttcatataaactatcttagcgagcttatgaaaataaagtaaaaatggtatatgggtttgtcataagctgtttttataagttcttccaaatagggcatgtttggattgacttatttgagcttatctggtgacataagttttgtgagacagtttgggagaacttttgaacacagctaatgacatgtttataagctgtttacagctttgtttttataaattctccaagatagctaatgataacagtttatagcttatacaaaaataatttagctttatttctcttttgctatagaaatagcttatgcataagtgattatcatggtaagtgtttgtgctataagctgcagataagttgtttatccaaagagggtcatagtcgtacaagtgtttatgttgagtagataagctcaaaacagtcacttggttttggtctctcaaatttcgataattttggtcgctaaaatgcttgatacttataatttttgtcactgtgttggtgattcactcaataacaatgaatgactgagagagagatggtggggataccggttattgaggatgttaatgttgaaaatttagttttctagaattatttttaatatgttttttaatttataatttttgcagattcaaggg

SEQ ID NO: 30859 - DNA, 500 bp, Medicago truncatula
  Intron number 2 from transcript Medtr4g032100.1 (locus Med tr4g032100) derived from phytozome v7.0 (chr-ID MtChr4; po s 7580002 to 7580501)
gatcagttacacaggtatcttttcttcttttcttgtttttgttttgaattattatgtatgaaacataaacattgatatggacacacacagacatgtcgacaatgataataatttgagaaaatgacataattcaatgtaatcatacgcgatagtgcgacaccatgacatgcctaatctgattagtgtttgtgtttcattgattattatattcatgagataatcctatttgaggtacggtatgatacactttttttatagatagatggtagtggttgttttgtttggggaggaagagtttcttggttatgagagagatggagattatctaacactgataactttaggcataaatagattatctaacactgattgcgcctcccgttttagatagactcaaataggatcttgcttttgtaaaatgaaaacaatatttcttttactttggtgcagatgcatatctcatagtcttatattggtcagtttattatatttgtatgtag

SEQ ID NO: 30860 - DNA, 799 bp, Medicago truncatula
  Intron number 1 from transcript Medtr4g135440.1 (locus Med tr4g135440) derived from phytozome v7.0 (chr-ID MtChr4; po s 32943653 to 32944451)
gacaacggtgtaagtgtcgttcgacatcttttaaattattctaatcactttttaaatagatttaatcgatttaaaaagttttttaaatggtagttaattactgttggagtagtttcgtcagtttaatatgtctgggagcaaatagtggtggcctaaatagtaattttcctttttttttcaaccaaattagcctacatcttagaatggacatgattgcaaaaaagtaagtccaaaaatatttgggcctgggtcctcttacaactcgcactaggttttccaattccatgtaccccaattttctattatctctcccaaagaaattactttgtagccggctctccctaaatttcaaatatagtcggctgtcatgggtttgtgcttcaaggaaaagaaataaaagcacaacaaaaattatcgagataatatgttgctttagaatttctctttacaaaaaaaaaaaaaatgttgatttagaattttgatccattgagatatttaaccaaaaaaacaataactaatccatttaactattgattcaatctccagttctgctaaaacacattgattttgcaattctatagaaaaaaattgtctaacgggattgctagacttcaagtattatcactactatgtctattatgatctatttgcgtatgatgtatccctatttacgttttatttgttttgttcggcatttttagttcaattagatataatttttttatttgtttggataattgcatttgatgtctactgcttttaaggaaagaagcactttggcattgaaaagtggcttgga

SEQ ID NO: 30861 - DNA, 959 bp, Medicago truncatula
  Intron number 1 from transcript Medtr6g027790.1 (locus Med tr6g027790) derived from phytozome v7.0 (chr-ID MtChr6; po s 6087073 to 6088031 reverse strand)
acatttttttagaattgattcaaacggaaccacaggtatttaaatttttagaataaatgactttttgtctcatattcaatccaaaccgcaccacgaacgtccctaacgcgaacgtccctaactctacgctaaatgaattcatttatcttgcggaaaggaagaaaaaaaaactgtgaacacactaggcctaatctgaccttattcttttctcttttatttttgggtacaaatttgaccttattctaatcatgatgttaaaggattcctaataaaactcccagtgttcccaaaactattatattatctaactgttatttaaaacttaaaaagacaaatcaactaaacaagaaacaaacaaaaaatagagactacataaaatgtgttgacctggttttggattccattttctttgttccgtggccaccatatttttttatgaaataggaaagagagtagtaatttcacagttgaccagtctccttccttgactatggccatgacaataattgtcttatattttgggacccgaattccctatcgtaacacaaacacgcattgcacaatctcgtcccttaaattaagatcagattgctgaaattatacaataacaaaataaattttaaacgatctttgtcattgatatagatcgaacgacgggactaaaaactacatgacaaagttgctttagagaatttgtttccatcattttaatgtcaacataacccacaaacaataattgtttctcctcttcctcctattgctgagcagaaaacacttaggattttagcatgaaaaaaaaaaaaatcaaacatccttttgcatataacaattaatggataaacttattcacataatatgtttcttcttgttaaccactttgttacaaacattacactgtcaaccacagcaacctcaaacaaatctgaattattccctttgtagggaagaatcctacaact

SEQ ID NO: 30862 - DNA, 596 bp, Medicago truncatula
  Intron number 2 from transcript Medtr5g006410.3 (locus Med tr5g006410) derived from phytozome v7.0 (chr-ID MtChr5; po s 686866 to 687461)
ctcggtttcatcatcatttctcaacacaacacaaggtcattcttttcttcttagtttccaatacattactatctattaatcaattaatttcgagtttatttgccactaatattacatcaattatatcattagctgtttaagttcctcatttcacacacactgcttaaacggtgtgttatcatctaccacgacacgactaatcataattcatccctcacccacccagtattattatcataattcttcattaaattaatccttacatatttgttttaggcactcatatttcatataataagttatctactattttctcctttttctgatcatctatttgttttttcgttttgattaaggtgatgctaagaaaatattgatataaaccatttcttttttgctgaatttgattgaattttttgtgttttgataacctttgatttccatttgccaagaaaaaagagtagcttttttgtttttctatatatgttgagaaatgtttcgaattcctttggttgtgttgggagattttagcttttgattgttatgcttatagattttcttgtttctccgttttttgcagttagtgagctgataac

SEQ ID NO: 30863 - DNA, 511 bp, Medicago truncatula
  Intron number 5 from transcript Medtr5g006410.3 (locus Med tr5g006410) derived from phytozome v7.0 (chr-ID MtChr5; po s 687868 to 688378)
cagaagagaaggggcttatcacacctggacaggttggtgtaccttgataatcaaagaaaagtgaatctagtaaaagtgcattccttgaaatattgtggttttggagcaaagtggtgctgcttattactatgatcacttttgttatggcgtaaatagttatctttatttactcattgtgtgtgtgaaaatcatggcttcttcatttctatgttgaaggtttatatcatatgtgtggagtttggacctatatttaagtaaaatgtcaatctttgctaagaaatagttggagaatgaaatttatgctagtattgtagctgtcattttagatcttaatgatacatcatttagtcttgcaactgatatttataatgtttggaagtggtaaggaatataaaggaattttgggcagtaattttgtttatctcaaactgacaattaatgcttgttttgcatgtgtgtttcatatttaactgaagagtgtcctcattgaaccaacaagtggtaatactgg

SEQ ID NO: 30864 - DNA, 548 bp, Medicago truncatula
  Intron number 1 from transcript Medtr5g065160.1 (locus Med tr5g065160) derived from phytozome v7.0 (chr-ID MtChr5; po s 22744796 to 22745343)
actggagatcgaagcgttgcgaccttcaattcttggttcaatcagttcaaccgattcgaaattcgtttatataaataaataattttataaataaataacacatatagtgctaatttttataaataattcattttaagttgttactaataaagcataaatgcatacaaaattacacaaaagtccatgacaaatacattaaataagtccataacaaagacaagtcttcttaatacaaagctagcatccagaagggtattcccgtgcccatctgtttgatttttctattgcgctaacgtatatatcttccctgtattttttcgtataaaataaattaatatattgtttgtcattaacaaatataataactaaaaacctgatgaatgaagatttattggtgcccttttatcctccctttattgtttgggtattgcgataacataagtactcttctttgtataattaaatttccacatgattatgtatatggatcacatcaagcagtaaccaactcataactccacaggttcggcctttgagacaagaggaag

SEQ ID NO: 30865 - DNA, 290 bp, Medicago truncatula
  Intron number 1 from transcript Medtr6g074260.1 (locus Med tr6g074260) derived from phytozome v7.0 (chr-ID MtChr6; po s 14425276 to 14425565 reverse strand)
cagtcttttggggattccaggtatgcattttgttgttttatattttcttcgttcagttgtaatttatatacattttgtcctatttgagctgtggagattctaatgggcttaataacatgtcttctttatcaaacaacataccatactgaaagggagctatgaagataaacaaagtaatttgatacgaaaacttttgtgcaaaagttaatgtggatgtctcataactaatttttggttgatgatagagaaaaaaaaataataataataagtgttgtgttattttaacaaga

SEQ ID NO: 30866 - DNA, 892 bp, Medicago truncatula
  Intron number 1 from transcript Medtr5g045510.1 (locus Med tr5g045510) derived from phytozome v7.0 (chr-ID MtChr5; po s 19035238 to 19036129 reverse strand)
atcagttccttgcaagtctgttgacggtagctttggtaagaaaatccgttggaaaaatatccagttataatagcaggcagctgcagcaattatcagagaagctggatggaatttgtgcactgtgtactaaaagaaagtaagtatagagataatggtattattataatgtagttcagggaacacatcagcagaacaatgatggcataggtttagaggatggacgagaaagaaaataaagatattgacttatttatcaatatgaaaaggagccctaaaacagaatctcagatccttgataaaccaatctcaaaagataacctaagatactaaagataagaccaagatattataaaatatttttcatattattatatctaatagagcagaagctaagttaaattcattttagaacaaatgccaagtattacactctaacaaagacacaaatggattctgtgtaaaatcttagtagaccgtccgcctctttactatataatttttgtttttgttaatatcgcttagaatgaatgccgtgccttgtgttaacattgtcaaagagtttgtttaattggcaatgggatgttgaacaattattcagccatctcttaataatcataatttgaatctcatgtaaatgctttataaaaaaaagtttcctggaagaatttaaaaaacctgtcctatttgttgctatagacttatttgagggcattaatagctttttactagattttttgctaacagcattatttgctcgtctgtttccaacacaatgttaatgtgaactactatactgctgttttcacatcttatttggcgttttgaggtttttattgactctgaaaacaatcttgttatgcaggtgtatcccgactccacactggattgaata

SEQ ID NO: 30867 - DNA, 785 bp, Medicago truncatula
  Intron number 2 from transcript Medtr4g144470.2 (locus Med tr4g144470) derived from phytozome v7.0 (chr-ID MtChr4; po s 36386171 to 36386955)
tgttcatacttaggttgctgctgtagtaataagaagtaatacatgattatattgtcaatttttataattatatttatatggtggaagatgattacaataataggacaaattatttagttgtgtaatatcaacttcttttttgcatgttgtggatcaattacctttcactttccttatgtattaataataatttgtagcacagttgagagttccacattggatgaggtttggtctctgaaaaagtgtttataagacattagtcacctcacaaactagttttgtagagttcagtgaggttcagctcaaattttaaggtggtatcagagtccatccgatatttttcgggtcatttgctatcatgtcatgctctgaatgtgcagtcctgagcatgagagttgagttagatcaaatcgaaattctaaacaagtgagagtatattagcagtctccggcaggcatttttgatacatgtaggatgtagctgatttcacctagtgggaaaaagctttggttgttgtagacgtagtagtatatgttagccagttgtaactttgagagtgtattaacaaatgaaacgttgttgcttgctaatatactgcttctacatccaaacctttattttcctgtagctgcctctattctgtttctagttagcaaaagttgattagcagcctaattgaatttgtgtggatacttaactctctgttcaacatttgctttctcatctgaaatatatttcaacttttatattctatttgattcttaaatgtttatgtagaaataaag

SEQ ID NO: 30868 - DNA, 541 bp, Medicago truncatula
  Intron number 4 from transcript Medtr4g144470.2 (locus Med tr4g144470) derived from phytozome v7.0 (chr-ID MtChr4; po s 36387786 to 36388326)
ctgtcgtgagtacaatgaccttattatgtagtctattaaaaaacattcatgtgagttttctcaaggcctgtttgagttcactcatttgagcttatattctggaatatccacttgtgagacagttcggaggaatttattggaaacaacttatagcatgtccataagctgttttcagtttattttcataagctcttcaagatagcttatatgaaaacaatttatagtttttatgaaaacagttttgactttattttatcttttgttatagagatagcttgtgcataagcatttatataatggtgcttatgctataggtgcttaattaagttgtttatccaattccaaacaaagccgaaatcattttacttgtacccacaacgacttatgtgaatacagtttcatccgcatatttttcgttgtacttgaaaatgagaagattgaccacgagactttcttttcttgaattttttgccttgcttgcgttcttgcactggtgttctactaactaatatttcatctgttgattttgtagttgctggaa

SEQ ID NO: 30869 - DNA, 514 bp, Medicago truncatula
  Intron number 1 from transcript Medtr4g137580.1 (locus Med tr4g137580) derived from phytozome v7.0 (chr-ID MtChr4; po s 33915023 to 33915536)
ggtacttgatgaatcatgctgattgatcataattcttgttttttctatttctattgttctgatttgtttggtttctagggttatttttttgttgacattgttctcaattttgatcaattgatgggttgatttgttgaataatggattagtatgatatgatttactatttagttgacgtaattagtaatatggagtataaaactaaaattacttatcagatttagcattgattttgcatgattagttgatgatcataaaatggaagagatgatttgattttttttttggcctaattgcttattttaaatgatagaattggaatgtgttgtcctaatttcttttgttgatcaacaatttttttgtgatattttacatgaatgcattcttaattgtctgtggtgttatagtaatttgacctattttgttttgtttttgcatatattaatcgatgagcgaaattttcttttgttatatgtctatttctggagcctgagcagtgtaggtttgatcggtt

SEQ ID NO: 30870 - DNA, 432 bp, Medicago truncatula
  Intron number 1 from transcript Medtr5g022260.1 (locus Med tr5g022260) derived from phytozome v7.0 (chr-ID MtChr5; po s 8665108 to 8665539 reverse strand)
aaggtaaatgtccagaatgttatttttttgagttggatgaaaaattattgtgttgtagatgatttttattcttcctcatttaatttatttttcttttgaggttggccttattttagaatattatagagttatgtttagtctacaaactttcattttgacttatataggaggaaacagaacttgtctgaggccaaacaacacaagcaaaggttttaaacattaaaattttatgtaaaaagggacattttttttatctaattataaaatgtggatttttgtttatattagtgatcggagggtgtatataacacgaaaaataaattatagactgtaggcatttgcatgggttcaaatcttgaactctatgacctaaatttaggtatgtattgatcattcgtgatggagttggaggttttggctcaagtttggttt

SEQ ID NO: 30871 - DNA, 792 bp, Medicago truncatula
  Intron number 2 from transcript Medtr6g069730.2 (locus Med tr6g069730) derived from phytozome v7.0 (chr-ID MtChr6; po s 12965829 to 12966620)
cgtttgccagagagcttcttcggcgtgggagtcaggtttgtcaatatttatttctttattttacaactgaaaaattcattacgacgaagaaaataaattacaaaagatgggagggttaaaacacgagaacgaaacacaagacaacaaagtaagaagagaaaggtcctgtttagatgaacaacttaaataagcgcttataatcacttatcttttaagtgtttttgtataggctatttctacaacaaaagttaaatacatcaagctgtttttatataagctataagctgttttcccaagttattgtgtagaacttatgaaaataagttgaaaaatgaaaactacctatgtaataagatgttttcataagctctcccaaaaagtctcgcatatacttatgccagtaggtaagctcaaataagacaatccaaacatgccaaaagtcaatgaagcaaatctcctttatccctaattatatctattagggaaacctcatactcacgcttcccaccaaataaaagctaaatgtctaatttttttataccaaatcaagtgttgtcacatagctaattccactaaaccaaataaatacattaccagacatttttttcctctgtattactaccttagacatgaaagcaatttttttgtcattttaattctgatccaatcctctgatggatatcaaataagattatttttaccgtctcattgtaagtatttatttacggtttccatcttcgttaggtatattttaatttgattctgtttgaatgcaggttgtattggctgcaa

SEQ ID NO: 30872 - DNA, 1026 bp, Medicago truncatula
  Intron number 3 from transcript Medtr6g010410.1 (locus Med tr6g010410) derived from phytozome v7.0 (chr-ID MtChr6; po s 2059355 to 2060380 reverse strand)
ctgaggtaaaatgctcactgctcaaatcagagtttcttctttgctaaacatttaaatactatagctattctgcccatttgcttaaaaagatatttaaatggtacatgacatggatgaatcgtaacagaacaaatcttcaattactctttgtgaatacaaaaatttaacatcgataatcaagaaacctcttcagaagataatctcttgatagagagttcattttcatcgttactacaagaaattgcattcaaatctggaacatgatacaactccattgttctggaaactggttcatcatatacgagataaattgttgccttcttcacaatgcaatcattctcgataacaaaatggacctccactttgttaccaggttatagacttgatactaccctctgcccttcttcatccatcttcgaaggagactaatgcctcactcttatagagctgaatggtggcctttatataatttttcaatatcatgtttttaaggccactagatgttacattatctggggtttaagtatatagacaatgcacatcattgtcttcaagttacgcccttccacttgaggaacttcaaatttcacagaagaacattcagaattataggttaccaatctaaaactaaaatgcgctctttgaagactgttagtttataacagttttttcataaaatcaaaggatgtcgcaactcataatcattaattacgtgtaaatccaatatataactagcatggaagatggatactcatgttcttcttatgagtaagaagtctttgttgttaatttgaaaaacgattgatataaaagatattttatgaatgtttatttagactagtaaaactatttaattagccagtttcaattgataaatattttattatcttcaataagagtagagtatcttattagcattataactagcaaggaatgttttgatacttgtgatgtagaagtagtcatattgatacttgtgatgtaattgtagttggttccatctccttataatctatcgcatataag

SEQ ID NO: 30873 - DNA, 779 bp, Medicago truncatula
  Intron number 2 from transcript Medtr7g043430.1 (locus Med tr7g043430) derived from phytozome v7.0 (chr-ID MtChr7; po s 10734010 to 10734788 reverse strand)
gcaggacttttgctcgttgaactggatgtaacaaacaaggattctcaccaaatatatttccagtttccacttagttaagtagatcttggttatttcttaggcatgaggtttagcgtattcaaagtccaagcttgtgcataataggcatgttttcttattttcatgcatctgctttctaaggaagtctgcatgcaatgcattcacattttcttgatctagtattcttttgtgttgtattatctctaatccttattataagaaaatctttgaagattattttggccctattcattagaaaatctctaatcacaatttttatggtctatttagttcttaatagacttttctactcctcatttattatgtcactccgtattttgttccaaagtcaattctatacacatcaattctaacccttataaaatggaaccaaacatataaaagcttgataatgatttagataatattaatggataggtggattatagattaaataaagaccggccaaaattcacaactttaacaccttacaaggaaaccaaatattgtagggctttttaaattgcacaaccaatatttaacattactaccctattgtttgtccattttctcttatatccatccatctctctctctctctctctctactcattgtttttcacttttctatttttgtagaaatttgtcatattttcctttgtattcactttaaggattctatatgtaatgttaaattaggtaaaaaaaaaacaaactctagtaaattgtaggctttctag

SEQ ID NO: 30874 - DNA, 1006 bp, Medicago truncatula
  Intron number 1 from transcript Medtr5g024430.1 (locus Med tr5g024430) derived from phytozome v7.0 (chr-ID MtChr5; po s 9693273 to 9694278 reverse strand)
tattcgaattcaaaagctttatttgtatcgagaaggtaaataatagagttcaattgtttgattttttttcaataatctactcttatgtatatttattgagttttttcgtttgatttatccattgtcaacatttgcacttgaatgatatgtgttctaatatgtgatttattttcagcaatgaaactcaactatgcatgtcttttttgctcaatccaattatatagttatgtaaaacatgttagatcttttatccatgataaattagattgaaatttaaaatatgaaaatatattcaatgttcttttctagataaaggtaccatgtatttccaattcacattgatcaccaaatatcttttcttgatttaattataaagactaaaggttagtaagttgtgtatacctttgactttgctattttaaactcataaagtgggagaaaatatatatatccttgcctttattttaaaaaagaattgattataatgaatactcaaaaaagtatataatcttattttcattttccataaacagcaaacaatgagaatggttttggtttttatctacattctatattttcaaataacctagttaaatatacaaatgcttcaaatcatacgggagaacaaattaatgaagtatttatatttcataattttaattttatttctatttgctagaaatggcctcatgatttggtttggctgtaatattgttataaatcatttctaaaactatgacatattaaatctttaattaatagatgtgtgcaaatagataggtcaaggttgctaacatagtttgactatgtttcctttattaccatcaatatcataactctaatgaataaatatttatattaaataaatattctatgtaaaactagattttctacttaataaaacaaatcagatagacatgcactggaaagtttaactatattattgttttgtgttatactatatgtgaattcaggaaagcgataaaaagtgtggataagggtaaca

SEQ ID NO: 30875 - DNA, 964 bp, Medicago truncatula
  Intron number 1 from transcript Medtr5g026980.1 (locus Med tr5g026980) derived from phytozome v7.0 (chr-ID MtChr5; po s 10947014 to 10947977)
tacactgcaccaccgatcaaacaaacctcacccaagtgaaaataacctttggtaccggctttgaatgtttctttccaaaataatgttgcaatcacaataacgtttatggaccattttgaagagtttgttcttggtttagccagcaacaacattcatcatcttattatacaacaatggataaaaaataagacttacacaattatgtacttaatccattacactacttgtactctttttcctcctattgcgggctctgtgtgtcttgcgcttgcctagcttaataatattatgctgattcaaaaaaaaataaaaatccattacactactactagaaaaattgaaacatcaaacagaaaatttagagtcaggaaaagacaaaatatgtcaagttttagagatgtcaaatatggtgaccaattttatttgtttctttctattttttcgtccctgtccatcgggaaattgaacataataaggtgggttctttccaaccaattttttttcaaagataagagtaaatatcaaatatttgaccacttttttttttttttttttgaaggagtcaaatatttgaccacttaaacagctctctcttaccacttaaataaattcattcttggttaatttttttttttaagaatcattcttggttaaatgtaaacacctttattattttattaaaaaatgtaaaaaaaaaaaaactttataactacaattcaatgaagacttaaaaaaaaaactacgattaaaaattaatggaggagtaatttattttttataaggagattttctttagaaaagataacataaaacaaaaatactctacttgacactaacttttttttttaataattaaatattaaccttctttgggcctttaaaacacactttggacgttttagaacgtgcctatatattgaatttgttaggtttaaggtttgaggttcacgttagagtcacaaac

SEQ ID NO: 30876 - DNA, 809 bp, Medicago truncatula
  Intron number 4 from transcript Medtr5g041400.1 (locus Med tr5g041400) derived from phytozome v7.0 (chr-ID MtChr5; po s 17704772 to 17705580 reverse strand)
tcgcaaccaaatccaatctaaaaaaagggcttgtaacttttttctttctttcttttttcctcttttttttttttttttttttttttttttttttatagagtgtgctcttaaccattccttttagagctttaactatgatctcttaagtgttttcatttgaaagtgaaatttaaaaataaaaataaaggatgaaaagtgtaattaaatcttaaaactaagttgtttttgactttcttttatcttataataactgcaatgacttttgtgttgatcgctaaatattttaaattgtaaaacatgaccgtgattgatatatatatatggatccttgtttgtttatatttatttatttatttttggcaaattttttacttattcattcagaataaaaattacttattttttgattaccatgttgataaattacttttttcctcccatttcttgttattataattttctatgcatttcttctattgatttgtgtgcaaatttgacatatattcaatcaaatatgactataatgtcattttttaggttagttcataaaatatctctataaatatttattttatatgatttaaattgaatgtatgtgtaaagttatacactcgcaatgcatagtattaatttatttatttttcttcttcgaaaatgcaatttcttttgtatttttgtttagtattccattacaattttgtagactttagctattttctcatttttaatgtcatactattcagatatatgtgatgcgctctgatggaatcttttttgtaggaccggtgatccctgcaaaggcccacatt

SEQ ID NO: 30877 - DNA, 655 bp, Medicago truncatula; identical to SEQ ID NO: 30836
  Intron number 1 from transcript Medtr5g041400.1 (locus Med tr5g041400) derived from phytozome v7.0 (chr-ID MtChr5; po s 17719467 to 17720121 reverse strand)

SEQ ID NO: 30878 - DNA, 482 bp, Medicago truncatula
  Intron number 1 from transcript Medtr4g111260.1 (locus Med tr4g111260) derived from phytozome v7.0 (chr-ID MtChr4; po s 25412692 to 25413173)
ctggtaagtaatatttttttcattaaaaattcttctttggctttaggttatccaaatatttttctgaccacaaactttttggccatagtctttatcagatatgctatagatttttttatggtggtgtgacaaatcttataataaatccacactttttgaatttggaactgtaaagctgattttgctttttccattgccatttgagtttagaattgtttatattctccaacagattttattttcaaaatatctaggataaataaaagtactatctcccttttccaatctactttatcctagtattgtgaacattgaataatagtgtatcaaggaacaataatgatttgttcaagtttgttgttatttgtatattgtatattgttttgatatattttgagtttcataaattttgaattttaagagaaagttttgtttttcccttggcagttactgaacttgtggaaggagattcatcaaggaaa

SEQ ID NO: 30879 - DNA, 484 bp, Medicago truncatula
  Intron number 1 from transcript Medtr7g046530.1 (locus Med tr7g046530) derived from phytozome v7.0 (chr-ID MtChr7; po s 11494326 to 11494809)
ctgggtatgctattttgtttctctaaaaagattcttgcttttttatttatttattatggttttatattttgtttttttgttatagatgagatatagtcctaccgttttcaacgattgaagtttgtttggaacgactattgattctctctagcctcttcaatcaaatctcaaccgttatactaatctaattatgagatttgacaggagatgacttgaattgtcttgagtcggttggcgcttctctaagaaaaacttcattgttgtattaatctaatgggcgagatgtaatactctcaacctttagattgatttgtttgatctaaggtcccaattgtgcctacactcaatccttcaaaatattttttttttttgtggtggtcggagtttgaaccctggaccttgcatatattatgcattgtccctacatattaattcactaatcttggtttctgaaattgaaggtacgtgacattggataaaattc

SEQ ID NO: 30880 - DNA, 699 bp, Medicago truncatula
  Intron number 2 from transcript Medtr5g021260.1 (locus Med tr5g021260) derived from phytozome v7.0 (chr-ID MtChr5; po s 8088269 to 8088967)
gacaaattgtcgatttactttttccaacttttattgtaactcaagtgtccttattttttattttggtctccactacgattttgattctttatatatttctcatctgtaatgtagtagtttctctctgaatttcctatcaatttagcccaagtgacattatttgttgatgtgaattttctttgaaattaaaaactaaaaatccaaaaaattgaaactctaattatagatttcattggctctaaaatgtatatttgattttagggttttttatttttaattgtaaagaaaaatcatcttggttatgagatttatgtttcaggtgccatttaatttgagaaagaagaattttttccctccatggaaaagtaaattttaacctttagattaaatggagaacatactcttatcatgctccctcaatactatatttttctccctttctcttcaactacacaatcatccaatttctcactttctctctctacctcctcccccctcctatctcttaatagaaccatcataaccactaacatcaccatgtttaacgtctaaatctcgtttactttctccatattttgtgatgatttgattaatttgatcaagaattgatatggttttcgattttttttttaatttcttatttttattttatgggtttttcattcctaattttctgaatttgtaattaatttggtgaag

SEQ ID NO: 30881 - DNA, 668 bp, Medicago truncatula
  Intron number 1 from transcript Medtr5g105680.1 (locus Med tr5g105680) derived from phytozome v7.0 (chr-ID MtChr5; po s 42454679 to 42455346 reverse strand)
gccactgttgaggtaaccctatcaatttcaagtacttggtttttcttcataattttcttttatttgttttccatttgattttaaacattgatttaaccacggtcgcaatcacattgtgattcatattgcatagaatcgcagtcaaatgtagtacatatagttcaaatggcgtcacgatgtaaccaaagatattaaaatattatgacattttttaatgcattatatggctctaataaaattgatctgccttccactcaagaagatatgattataaaaaatttgaagctcttaaaagaaattttaattataattggttatcacattagagaaagctacatgaattaatcatgcacattttccatgtgtcatattagtcaaagtattgaaagaaacatcaattttgagtcttttatttttggtctcaaccctcccgttcataaggaaaaattatcttgtaatcaccaaaatttgattaggaggtaagtaaattctgaataaaaattgttttagataggattcgaacttaggttctactaaacaatgcgtttaacttaagttcattgttcacttttgttttactcagccttgtctaataaacaacaatcgaattttgatctgaatatgattctgcaggttgtatcagcacagactgctctctccgacgatac

SEQ ID NO: 30882 - DNA, 543 bp, Medicago truncatula
  Intron number 1 from transcript Medtr5g089180.1 (locus Med tr5g089180) derived from phytozome v7.0 (chr-ID MtChr5; po s 34605044 to 34605586)
gttcggtcggtggctggtttgtttcattcaagttggtcatttttacacatgtcattgattgtcgttatagttgatgctttgtaatgtggctataaaaaatcattcatcatttcaagttgatccttttaacacctcaaaaataccaaaatacttgcaaacgatagttaactaccgtttcaaatgcactttactaccattgaatctttctttctcgttggggacggaacaataatcaacaatttatatccaagtgagaaacacaaatatccccaaaatgagaaagaaaggtttaacggttgtcgacgggacgatagttaactgcctgctggggggtattttgatattttaagggtattaaaagagcaatttttgaagttagaagaaaggtataacaagcgggcccattatcccaaatccaattcaataaagacaaaaataaacatgatttatcaattaaaaccctaaatccctaaaaaattgcaattaaaaccatacgaataaaactcagtaacacaacaatttggaatcgaactcatcttgccg

SEQ ID NO: 30883 - DNA, 812 bp, Medicago truncatula
  Intron number 2 from transcript Medtr5g077110.1 (locus Med tr5g077110) derived from phytozome v7.0 (chr-ID MtChr5; po s 28370336 to 28371147 reverse strand)
atccaggtccagtctgttttgggttttggtttgggcctcagttttctttcacgttttttgctttttttctgctatttgcactgtttttctttgctatttgaaccaatgtcttgattaaaaatcttgataaatttcctagaaaatccatgcttacttcttgacaattttcttgatgttttacggtatttttgcacgctggaattggcaaaattcttgtatgattaatccatggcattttaatttttttcttggattatttcttatgattattttgtcaattctatcattgatttgtgaatatgtgatgaagaccatttgatatgttaatgcgaggtgctcatacctacaatcctattttgattttgctgttttaaatggattcatgaaatcttgattgtatgagcaacgcatgcatattctagaaagtaataagatgctaatcctatctcaaaattggtatgaaactaagcttgtttgtttctaatgatcctatgattatagcttgagataaaagaaactacttcaaacttgctatagcatgagaattagaagctacaaatgtcttagttctcatatcaaaattttgggtgccattatcattttattactatctttatggcattttatgcgtttttgcctcttgctactctttatgctttatttcactaacaagtttatttccatgtttcatgcatctcatttagcattctctccactttctttagcctagcatttattttttgcaagttttaattcattttggtaatgtaatttgttatcattggtttgtagcttggcaaaggggccataga

SEQ ID NO: 30884 - DNA, 595 bp, Medicago truncatula
  Intron number 1 from transcript Medtr5g048470.1 (locus Med tr5g048470) derived from phytozome v7.0 (chr-ID MtChr5; po s 20489602 to 20490196)
cccctgaggtttgttgaaattacccgttacctttgggacaagtgacacaaaggacaatcattagtaagttcttagcgatcgaaaacccttcagtatataattgcatctttggcgccccactctgacagattaggtgtgatgtcctcgagagtccacctcaagatgcggtatcataatagtaagggtgtcatggggactgtattagcatatctggaagtgaatccaaggctaacttatgatgtttgattttgcaaagttttgagcaattcaatcgagcttaattatattgtcaaatattgagttgactgacaattaatttaagagataataattcttccattttatatatttggaaaattaaattgtttaatcgctcaactttaaggataaaatggtaatttacttagatttaaaccttggttatgttcctatattttgctattaatagaattggtttattttttatctcgtcccattattttcttgacaaaaaaaagtttatgttgctatattttggttgggcttaacatctgatagtatctagtgtgtgttttggatagttggaaacaattgggctactgtactcgttttgtat

SEQ ID NO: 30885 - DNA, 858 bp, Medicago truncatula
  Intron number 2 from transcript Medtr5g048010.1 (locus Med tr5g048010) derived from phytozome v7.0 (chr-ID MtChr5; po s 20269117 to 20269974 reverse strand)
gcctctcatcgcttgcaaaacgaggtacaccttcaatcttcatttttttttttttttattataataaatatttaggaaatgagaatatgattatccaccagtttagggaaccttagaaaactagtgtggaaaaactataaaggtataagtatgatttttttttcttgttattagtaaataatttattaatgggagtacgtagaagggtattcaatatatgacagaatttgcaacaaaaaaaaaacgaaaagagtaaagatgtgaacacttgagaaaacatgagagagaaaaaatgattagtatgaaatatgtccttgtaaataaattatgtcataaggaattatgtctttattatattcaatatattgatattatggtttaaatttcttaaagcaacaattatgattatgtatcaagtcatggtttatttggtaaaattatcaaaattactagatcaaataccgtgatttgggttcgaattccgacttctcaacttgtgtatgagttttcaatgactattgtcgtttcgtttatctaacaaaaaaatatattataattatgtatcaacaaataacaagtgtttacaaatattactatttaaaataaaaaagatatcataatattaattaggtttaattgcaattttgattccctattttcatcattttgcgaaattgatccctctattttaaaatttgtcagtttacaacaaatctgtttttttttttttttccttttaataatgactagagagagtaacaatttattaaattgtatagctagatattttatgatgacttactacattacattgtttgaataggtctttgacacagatttatttcgagtgctacggga

SEQ ID NO: 30886 - DNA, 645 bp, Medicago truncatula
  Intron number 2 from transcript Medtr7g083310.1 (locus Med tr7g083310) derived from phytozome v7.0 (chr-ID MtChr7; po s 17749272 to 17749916)
attacaacattctgaaaaagaaacctggtgtggtttattgttgacaaatcaattgtaccatatactagtatgcttattgacctcatatctatacacattggattattagatgtgaatttgtatcaaacatgatggatattttgtagttatgaatcagaaattactgaatccttatgtaacagtaaaaagctactttcaaatatcttttgtaacgaattttgagttgagtaaataagtaagagcggaatgcaagttgagtttactgcagtgatttgggtataaaattttaattcttagttgctactaacattttcccctcttctaatatatagaaactagtatttgctaacatttagtttactctatcatttaaatttgtggtttgtaacaagttaccttaaatgtggagaagtaaaaaatcagaagatcatgttggaaatttagctcttgatataaacagatttcataaaacatgttcaacaattataaatcaatagcggaagcaaacaaaacattgaacatgattatgatcggatctacgacatgtttgatttatcaaggatattaagaattaggctattaggaatacctggataaagctttcaaggcagccctctcatcaacaacgataaccaaagagaggag

SEQ ID NO: 30887 - DNA, 540 bp, Medicago truncatula
  Intron number 1 from transcript Medtr4g140580.1 (locus Med tr4g140580) derived from phytozome v7.0 (chr-ID MtChr4; po s 34527330 to 34527869 reverse strand)
gtgaggtgggtgacatagattttttatgttggatcaataactctttagcatgtttgtttagtggttagttattgtatgtatatcggttactttagagtgtttgtactcgcattttaactcacattgatcattgaaagaaaaaaaaaaactgactttgtattgtggattggaaatgtctttgatgtgtttgctcaacttgttttataatgttctttgcattagcaatggaatgaagttgtttattgtaaaaaaaacatcatctttcatcccacgtttcagttttgggtacccattttaaaacaaaattagtatttttaaacaggaaggatcaagttcctcaaggagtaactatgagctaaatttttttaagtggatagaattggttttttagtaaaaagcaagtgggagtaggcagtggcggagccagaaattttatagagcttgggcaaaaaaattatcgcaaaatgttacttcattcctgcgaataatttcacatttcctgcggaatttgcaggaaatcctagacaaaatctgcaggaa

SEQ ID NO: 30888 - DNA, 784 bp, Medicago truncatula
  Intron number 1 from transcript Medtr4g134500.1 (locus Med tr4g134500) derived from phytozome v7.0 (chr-ID MtChr4; po s 32449532 to 32450315)
cctttaatcgtacttgtttttgaacgctataacaggtactactaattcctattcttatatggttttgatggagttaaaaatggtaaaatttcaggcaatacttcatatataagatatatacttttatgctcacttttcaaagaaaacatgcatttgttggttatatgcttgaagtcatgtgaacaagtcttgagtgcttctgtccaactatagactcagtttaatcggtatataatgtcttaagtcttaacgtgctttcatgaaattgattcttctctataaaaaatccaaattttcaaaatattgtgttgactatgatttacttaccttttgcttttaagatgtcagttgttcccaaaagatgattgtaatttattcgtaggtactgtaatttataaggcaaaaaaccaataggttgaatgtaggaataaataaaaaagtgtattagaaattaatttatgtaacaattgtgttagttatatgtattttttattttaaaatttgagtgtatgtaaatgctcacattaatataatgttatgttgatagatttaataattcctaggtacctatgttggaattaaaatgtgaatgattagtctcacattagttaggattggactaaataaatgatatataaaaaggtgactttgtatactcaatgctttttgagtgaatatgtcatgttctagtcagcttgctgttgctcctgatgcttctagactccccaacaacttatagcttaatccagcctttggtgtttgattttgctattccacagggcaa

SEQ ID NO: 30889 - DNA, 690 bp, Medicago truncatula; identical to SEQ ID NO: 30581
  Intron number 1 from transcript Medtr5g005070.1 (locus Med tr5g005070) derived from phytozome v7.0 (chr-ID MtChr5; po s 29257 to 29946)

SEQ ID NO: 30890 - DNA, 456 bp, Medicago truncatula
  Intron number 1 from transcript Medtr5g025800.1 (locus Med tr5g025800) derived from phytozome v7.0 (chr-ID MtChr5; po s 10364146 to 10364601 reverse strand)
ggaagttggaaggcatagaagaaggcattgagaaggtaagactagccttgtgtcgataaataacttatttgcagcttataacacgagttcttatcatgataagatacgcacttatgtaaaattttaagctgttttatagcaagttaaattttaagctgttttaaatagttaattagaacagcctatgtaaaatgtcaaaagctgttttcataagttctacaaaacttatgttagcagataaggtcaaataagccaatccaaactggttgtacgacttgtgttgagagtttgtggtttcttcttcgttgtaatcattggtttgatttggttattcaactattcaaaattatgcatgattaatgaatacaattaagcctttaattgtttgttattatctttgaatttggatatttagctgttgatttttttgtgatatattgtgtaggtgatttatag

SEQ ID NO: 30891 - DNA, 696 bp, Medicago truncatula
  Intron number 1 from transcript Medtr5g012290.1 (locus Med tr5g012290) derived from phytozome v7.0 (chr-ID MtChr5; po s 3468731 to 3469426 reverse strand)
acattattttcaaccaagacttcccaatattcctggttattttcacttctcttgtgtgtgtctttttcttatttatatttatatggtccactctagcacattcataaagttttgaatttcgagaaatattttcctcgtatattctgtttgctttctcaatttcattttctcctttttaacatgaagctatctatgtttttatttttttcaattggaatgacgtggccttgttagtttttaaactaatttcgtataataaatgaaagtggctgttatttttatgatggagaaattatcttacaaaaaaatttgattatttcaacaactgaaagagaaatagttttatctgcctataattaggatctagattgtgaccgaaccatttaatcaattcaccaaaaaaaataaaaatagaaccatttaatctttactatcaaaaaatttaaccgtgacaaactatatactgtaagtaagcaatacaaacaaccttgtatagaacaacatatgagttgtattctttttatttattcaagataaaattcttcattatctagttattcaaacaaaaagatacttcacaaaatataatattaatgtatactctctcttagctgaaataattttctaaaaaaaggttagatttgatagactcaaattataaacaaacttcggatcaccctttcttttcaggcatta

SEQ ID NO: 30892 - DNA, 766 bp, Medicago truncatula
  Intron number 1 from transcript Medtr6g070100.1 (locus Med tr6g070100) derived from phytozome v7.0 (chr-ID MtChr6; po s 13121830 to 13122595 reverse strand)
gagaatcttcaaggtatggtagttatgtttttggtgtaaagtttggatttttatgtgtttttgcatctgggttttgcttgaagattttaaagtttgtttttttactttgttgtgtatttatggtgttaatgaaagatttgatcttttcatgtgattgactttatcttaaattaaaaaataatttttaaataggttttctatgagatgagaaaggaaaggaaattattgcatacaatactttttgcatctatagttatgaacatttttagagaaatctgcttttaaagatactttacacaattaaaaatccaattttgaactacataatgtcttgtattttaattgcaaaaggtaggtatgaacgaattaattaaaagggtaactatacttttaggttttaataatttctttttcctttttttctaaactctatttaagtagttaatagttttttcttaaaatgatttacatttttttttctggataaatgaacattttcttacttatttcacaaaaaacctgattttatcaccatcacttataatttttttgttgttgaagaaatcacttataaattgatgtaatgatgttaaccttgtctttatttttgttcattaaaattaaagttgcaacttaaattaattttttttttgacatactcattaatttttttagattattgattcaaatttgggagtgtactaattttgaatctgtacttggttttgtagttttgcagctttgttataaccagttaacaggaagc

SEQ ID NO: 30893 - DNA, 952 bp, Medicago truncatula
  Intron number 2 from transcript Medtr4g149400.1 (locus Med tr4g149400) derived from phytozome v7.0 (chr-ID MtChr4; po s 37133671 to 37134622 reverse strand)
tggccattatcaaggtgaatttcttgtcaaatactatttacacatgcaacccattttttttatgctatcacacttgatttctgcttagatattatatgatgaatttactcatcatatgggtatgctgttatgcattggtgaatgaatgagtaataaattctaacagaattaaatgtgacacataccctttgttgatgatcaatacattaattactatacacttacggtgtaaagttattttacacatacatctaataataagttgtcacgttaattaatgaatatgacaattcatgtgattgtcatattcataaattgacgtgacaactcattattggatgcatatataaaataattgtacggtgtatactaatccaattctttcacaattttatgtgtttaagagattagttttgatatatgtaagtgtgaagagtttttttacactgtcattcaattataaattgtcacatcattaaaaacgttaccttcaatttgaactaccttaaaagtcacccaaaagattatttgtgattagtgtaaaagatctttacactgttattgacaatgcatgctaatttcattatttttttaccttttagattagcatccctgttttgttttgttctgttctgttcatggcaatccttggaatgtgcacatgctggatttagcacgttgtgttgtcctcatttttttaatttttgataacaaggtctctaaattttatcgtgttattatacaaagcaacatatgttgtgaagtagatcgatctgcattgatgttataaacttataatattgagtttggtaaattgtaacccccttttctcattcacgcgggggacagagagggtgctatttcttcctctttcatgaaacatagagttttatgcttttcaattttctgattccggagatgtttttctgtcaggacattacacaatccccca

SEQ ID NO: 30894 - DNA, 872 bp, Medicago truncatula
  Intron number 2 from transcript Medtr7g047660.1 (locus Med tr7g047660) derived from phytozome v7.0 (chr-ID MtChr7; po s 11995178 to 11996049 reverse strand)
tactgtaagttgaaatatcattcatatatttccatggataaatgtcaagtattctaaattttcaccatgttctttatagcttttcttgacacggtaatacaaaggatctgcatgttctgatacatcattgcaaacagatgaaagattattttcaatgtttatctcctcattattccactcagaaattccactttttttttttctaaacatgcaaatttctaagaagtattcctctaataattcaaaatctcagtaatgaagatgtttacctgagaggaataatgaaaatagtggaatttctgagaggtgttattgacaacaattttttttttgaatgaggaggaataacaaaatagtgaaattccacttttgttatcttctaaacagaagatctatatgaaaatactgaaatttctgagattgaaaatagtccttctgtttacctcctcattgaaaatagtccatttggaaaacattgaaaatgttcccgattctgtttacctcctcgttattcctcattattcggatgtttagaaggtaaaaaagtggaatttctgagaggaataataaggaggttaacattgaatatagttcttctgtttgcaatgatgaatcgggaacattcagatcattatagtttaataacctttgagaaaagggattattttgatccaatgaagagctgttcttcttccaaccggaatggagtatcaaagaaacttgaattgaatatgctgttcaatttattgctgatcaacctataggtttgaatcaaatgatcctatttgttagacttgaataaaaaggtttgaattcgtaatggttactttttattaggctggtcgtgaaaaggaggctgtcattagactcat

SEQ ID NO: 30895 - DNA, 733 bp, Medicago truncatula
  Intron number 1 from transcript Medtr5g040530.1 (locus Med tr5g040530) derived from phytozome v7.0 (chr-ID MtChr5; po s 17298157 to 17298889)
gtttgtcattattctcgcatcccgttataatagtaatcatggcaacttgttctaaaagctaaataaaaagttattataacgaaaaattagttcatcactctatcgaacgcatcttaatggttaaagtggcataatcaaactctttagtcttgttaaactatgaaataaataaagttaatataatagattctttattcctactgcatggtatcatgaaaccttgcatcaattattgaaaattgcactatagcttcatggatgtttcttcacaatttcccgtttaccagctacttgctaccaatattgcatttatattctcaatgttcttctgtttatttcattaccctttcaatataaaccagtttctcatttattgataaaaaaaacccactttctcatattcttgtctttacaaccctttcttttctgaaataatatggcagaagccttacttggagttgtgtttgagaatttgttatctctggttcaaaatgaaattgcaaccacttttggaattaagtcaaaggtcgaaaagctatcaaccaccttggatctgatcaaggctgttcttgaagatgctgagcataaacaagtcacagatcgctctaacaaggtatggcttcaacaactcaaagatgttgtttatgtgctagatgatattcttgatgagtgctcaatcgagtctggtcggcttagaggctcatcctatttcaaaccaaagaacatcatattt

SEQ ID NO: 30896 - DNA, 620 bp, Medicago truncatula
  Intron number 2 from transcript Medtr5g065880.1 (locus Med tr5g065880) derived from phytozome v7.0 (chr-ID MtChr5; po s 23091536 to 23092155 reverse strand)
aaattgaagttgtgtatgtatttcttttgaaatattaaatccttcaattggtttcatgttactattttttttagttagtgtgatacactaatcgaaagttttaaaaaaatataccatacactggattattttttttctttctgttttttggcattgaaagtctggaattatttttttttgttctgttttcccattaggtgactttcgtttactggaccttatatcaattctggttttcttttgaactaaagatatatgcttgtttaaggcatatggctccaacgattaaaagtgttctccaaattgattggctgtgattgaaattatataatctccttacgattctgctttctacaagttttttagggtcgtaaagtctttataacatcaaaatttgttttcttgtgggtaaagtaaattgctttcacgtatacattattcatgtatattcatggataaagtgccatttcacttttgaaaaacgaaataaaaatttaaattatattgcaaagaaataatgatgttccgctctagggttccgttcacaaagttccggccacggtggtggtccctttcttctcgttttcccctaatcctctcaccgttcagcttgcctagtc

SEQ ID NO: 30897 - DNA, 836 bp, Medicago truncatula
  Intron number 4 from transcript Medtr7g010640.1 (locus Med tr7g010640) derived from phytozome v7.0 (chr-ID MtChr7; po s 2360780 to 2361615 reverse strand)
gaaactatatttccactttataggtaagttagaaatgtccactttaattttaattatgatattacataattgtatctttgtgtttctgtatatttgcaggcatgtgtgattgagtctatgagcacctacacatacacggacaccaaacatgatacaggcaccgataataatttgagacggacactaggattgtccatggttcggttcagcatcaaaaccgaaccgaactaatccgtttcaacaattcggtaaaactgaactgaactgttaatggttcatccctaacagaactgaactggtataaatgttccatgtaatggttccagggtttcgaaccaaaagaaaactacctttagaaaaagctaaactatagtttttcaaagtaacgaaactgattttgtgaaccgaactgtaccaaatttttattattaacagataattatagtgttgaaaaactaaaagccgcctacctcgaagattatgactgttttaaaaaagcaaaagctgaatcctagaagtgaatgaactgtgacagatagttcacgagctgaactagtacatcttaattcgtgaactgtcaatccaagttcgatttttttggtgggggtttgtttgatttaacagttcagttttgttttttgcattttttttaacagtcctactcgacacatatataaagtatcggtgctacgcaaccaaaaaaaattattttaccgtaaaacttaagtattagatggaaatccatgagtttttagattgctttgaacacaatgatgtcatgaacatgattaatgaattaagtttattgcagtctcttcggatacatcgtcttgcat

SEQ ID NO: 30898 - DNA, 511 bp, Medicago truncatula
  Intron number 1 from transcript Medtr5g098140.1 (locus Med tr5g098140) derived from phytozome v7.0 (chr-ID MtChr5; po s 39115405 to 39115915)
gcagcagacttgaaaggccaccatatcaataccgggtatgtaactaaagttgtcttatatgtagaaatagtcttgtatgtcacaagatcaaatctataatgtttaggcacagtacatattcttctagttcaaaaggtccttgtctctgactctttttcaagtctatattttatgttgataatgttggattttagttcatggcatgatccgcttaggtacttgtaaattaaagtaaaatacttccaagaacaaaaatattgattaagcatgagtgaatttgaactatataaacatttatcatataaatacttgtaaatataagtagtttctttgattaaaaaatttacgaactgtgttatcctatactgatgttcaagtaagtgaatcgcatttttgtttaaaaatgagtggtaactattatgctagaatgaaacaagtcttgatttttgaaaaaattacgtgtcatattcttgcagatccgaaattgaccacattaaagagattgttgaaa

SEQ ID NO: 30899 - DNA, 810 bp, Medicago truncatula
  Intron number 1 from transcript Medtr5g048130.1 (locus Med tr5g048130) derived from phytozome v7.0 (chr-ID MtChr5; po s 20332044 to 20332853)
gcaggtacttacactacactttagattgaaagtggaagcatttctgttttcttaaattattagtgtcgtgtttgtgtttttatctttgctttaggtacacaatcaatttggtttgcttgttttctcgcttgctgattttgttatacctcgagtaggaaggttaacaagagagacaagggtttatgttaatccaacaaactctgatcaatgttgacatttggtgaaatattggtccctaaatcttttaatttgatactaattactcattaacatgtttataatttgtcttggtcttggttatattagggattgtggtaaataatacgtgtcttttaatacaaatatagttttcccattgtggcagatggagtttcttttgtttacctgttaatcatgtttgtctttggatttgttggacagtttgttatttagaatcctatgaacaactttcagcttacctaacttgtgttttactgttctggttttggcatccaaacacaacgttcattagctacttgttagttcaaacaacctcacaagtagctaataaacgttgtgtttggatgccaaaaccagaacattaaaacacaagttatgagtatttcctttctttgaagtcaatttaacaaaaaaattctggatcaagacatgtatttcctttctttgaagtcaatttaacaaaatttctttcgtttctccctattctgactgatattcttatattttttaaggaagttttttgcaccatagatttccacatattacaagagttaattattaatgtcttcctggttgtctttaggtataagg

SEQ ID NO: 30900 - DNA, 715 bp, Medicago truncatula
  Intron number 1 from transcript Medtr5g024740.1 (locus Med tr5g024740) derived from phytozome v7.0 (chr-ID MtChr5; po s 9857206 to 9857920 reverse strand)
acctactcttctcttctccgccttcctcctctcccgtaatcacctcttctttcccttttccctttcacaattttatcattttttcaaagctttttatatcgtttcttatcatattacttttttacttatattgtttgatttgagtaattggtatctttatgatcaaaatttgtataaccctactgaaattgaatttaaattttcagcattcaatttcaaaattatggttatctcatttgcgaatgttaattttataaaatgaattatttaaatgtaatcaccacgaccggataatcagacttgttagttagtccaacagaggtggctacattatatgttatcatgtgtcattacttgttctttttaatttgaaatgaatcaaggtggttttataggaagataagttgtctctgtttgttatgttttatgtgaatgttcaatatgccttgttttatttttgagtaaattttttatgttagagtttactaattaggtacttcacagttgtatttgaaaatttctgcacatgttaatgttcttactgaattattgttgtttttgttgtttccttgctttattgcttatcctctgtttgtattctagaactcacagtttatgtgtatgtggtttttaataaggaataaagatttgattcgacgaagacgcattacattctacaggaaggaaaagaatcttgccatcacagctcttgcag

SEQ ID NO: 30901 - DNA, 967 bp, Medicago truncatula
  Intron number 1 from transcript Medtr7g076400.1 (locus Med tr7g076400) derived from phytozome v7.0 (chr-ID MtChr7; po s 15535580 to 15536546)
ttagactcgccgcagttcgtgttgtaagatcacttttctggattcaatttttaacattttcatgtattctgtgtaggtgtagtgtagagaattttcgcgtatttaagtttgtgtttgattctgccgtgaaaataattgattttgactaaaagtgagttgtaggttaagtgacttatatttggatacatgatacattcattcggaagcgagttgaataataaattagagtgtaaaaatcaattctacttgagagcaaccaatataattgtcaaaatcaatttcacatctctagaattgattttagcgctttcaaaaatgaaaccaaacacacactcgggattcataataatttatggatgagtgcttgttaaagacctatttgaattgactaattttatacttatctattgactgtgaaaccctttgccaaacctcgtgaaaactcttttattcttcttctgttgaacgggagataataggcatagtatagctctattaaattctaataatagtttcgaggtttataaacattaaatgagaagagttataggtttgagaaaacagatgattttctctctgttgatgattgtttctccttaatgggtttcattgaaaatatgttttttttctttttatactaaatcttaattttggtattagaaaatatacttagcatcaaggtattaaactgtgattctaaattgcgatcaaggtttagaaagtctcatcgcatgtatttatttgtaatttttcacaatataagatatcaaaatttaaaaccttgcttaacaagtgagaaattacatatgtaggtgttattttcatttgaagttgtatacttgttacgtcaacgccaaatgattaatattctgattttgagctgcttgtgcaagcataacaatatttgaagagttgatggtagattagttgtttgaatgatgtgagttgttgtatttcaggtaacttc

SEQ ID NO: 30902 - DNA, 958 bp, Medicago truncatula
  Intron number 1 from transcript Medtr4g096590.1 (locus Med tr4g096590) derived from phytozome v7.0 (chr-ID MtChr4; po s 20368379 to 20369336 reverse strand)
ttttcacaattctcaacccctctttgtctctggaggtacatttttcgcgttgcaactttctaatttactttgatctgttactcttgcatcttttcttgttgttttgatttgtttttcggcatatacatatataaacgaagtcgcttattgttaatgtatatactacttttaaatttatactcattgtgaaatttgagttacattggatttatgtatgtattgatgtaaattatactgtgatccgcttaaacttttcgcggtttgtggatatttatgtttaggaattgcgtagctgtttagatcttgcatactaaactgatgaaatgttaatgtaataggtatagaagaactacatgtatgatccctcctattggcttgtcttaaaatgatttgatgcgtttttcaatataaggatttaatacttatctgctaattcttttatctcttcacttttgttcttcattaatgtataccacttttacatcttcacccgtggcaaaatttatgctgcattggatgtatgtatgtatcgttgtaaattctagtgggatccacttaaactttttcggaatgtgtagatttctgttttaccaactgcctctctgtttagatcttgcatactgagctgatgaaatgttaatattaccggttaagaggaattgtgatgtgatttctacctttttaggctttttctatcttgcaacctaaactgatgaaatgttgatattattataagtttacaggaactgtgatgtaatttctaccttttttaggaattttctatctcacgatctaaactgatgaaatgttataggttttgaggaattttgtgtgtgataacttggattggcttgtctgcattttctgatatataaggatgaggatttaatgcttatcttatatctgctaattcttgtatctcttcacctttgttccttattttgtcccagggcgctaa

SEQ ID NO: 30903 - DNA, 853 bp, Medicago truncatula
  Intron number 1 from transcript Medtr5g006010.1 (locus Med tr5g006010) derived from phytozome v7.0 (chr-ID MtChr5; po s 481757 to 482609)
tcaaatacaaacaaatatcacatttactcaaaactgtaagacctttatatataataatttgatattcattttttctttaccaaaatttgtgtcttccatatatattatgtgtgtgaaaatttgtacctcagcaaaggatatcattggagcctggtggacaaatttgttattttgatttcaaccaagtttttttctatggacttgtacaaatccagttcttacaattgtttctacttttttttataacagttgtagaaagtgaaatttattttacgttaattacaattagagtaatggtttaccatattcgttaccttgaaaatcattgcaatatttatgatatacatatattttaaagatttaaagcttgttcaatgataaacttgatgtagcatcatgtcaattgttgttcaatctcactcttctagaatggaatatattaaagagaggaggttccatttatcaaagacaaatcaattaataactaagaaaatgcccgtgatgagggaaaggaaaagaaatagatattcaagtatgaccagtgatggtctcttttttctggtggcattatcattcattatgtgatttaagtgatgatagtttatcttgggattcagatattcaagtagggccagtgatgaaagtttttctggtagctttggtttcctattcatttccatttattgtcatcccaaatgcctgattggtcggttctatcgtcgcctaaacttccttccgctttgatcgctctttctttgcccataaattgttttgcacagcactcaataggtatgttatcgacatcgtatcatttttagttttctgccaacactgagactcaccattttttggt

SEQ ID NO: 30904 - DNA, 447 bp, Medicago truncatula
  Intron number 2 from transcript Medtr6g076430.1 (locus Med tr6g076430) derived from phytozome v7.0 (chr-ID MtChr6; po s 14692125 to 14692571 reverse strand)
ctaaggtgagttcctttagcttagaacccacctttggggatcaattataattatgttagattattgagataacatgaataattagaccatttttatgattacttgccgattgtgcaagcatgactatcataccatatgaatggtacatttgaaacagaatagatatgagattgtagaatgattatttttgaattaggtattcttatttttttattctaaaatctcatttatgttaataaaatatgtttatgctagtataaatgttggatgggaattctatcaacgcaattgatgtaaataattatagtaatcatttgaaagaaaattgtaatgtgaaaaaaaaaattgaaatgagtaacatgctcatagaaagaaaaaaaattgagaaaaactccgtttgctacaacgaagagataatgtagcctgaggtacggctcatagtaacga

SEQ ID NO: 30905 - DNA, 669 bp, Medicago truncatula
  Intron number 4 from transcript Medtr6g096450.1 (locus Med tr6g096450) derived from phytozome v7.0 (chr-ID MtChr6; po s 21147206 to 21147874)
catcaagaagcaaccccaaaagcttagagatccaggtagttttgccatcccttgtgtgataggaaaagaaaccgttgacaaggccttgtgtgacttaggagctagtgtaagtttgctgcctttatccctcttcaaaaggatgggaataggagagcttaaaccgaccgagatgatcttaaaactagcagaccgttctactatccccctagctggctacatcgaggacatacccgttaagatagaagggatatatatcccaactgattttgtagtggtcgacatagaagaggaccttgatgtcccgataatcttaggacgacccttcctagctactgccggtgctataatagatgttcagagtggaaggatagtttttcaagcaagtgatgcaatgattgggttcgagctggaaaatgttatgaaaggtcccgctctttattattgtaacatgattgaagtacataatgtgaaagaacgctttctagcgtcaactacacaatatgacctctttgatcctttctaaggacactttcctaacgtcaagctaatgacaataaacgagcacttcgtgggaggcaacccacgcatttaactgcttttgtttttgtttttgtttcttttaattattttgtaggttattgtccggaaaaaaattcaagaaaacagaaa

SEQ ID NO: 30906 - DNA, 663 bp, Medicago truncatula
  Intron number 5 from transcript Medtr6g096450.1 (locus Med tr6g096450) derived from phytozome v7.0 (chr-ID MtChr6; po s 21150335 to 21150997)
ataaaagcattgttgaaactagattggggaaggaggtaggccctccgacttcctacgtgaagacgatgttttaaggaatatcattgaatctagattggggaagggggtaggccctccgacctcctacgtgaaaatgttgtcccttaaataaagaacttaaaatgtgcatatggcaaaagaacaaagattctcaaaaactcccatctcttttatatgaattgtagaaggaatttttcttggttagtttagtgctaagattagaccatgtttcctcattatacctattttatacaggagcaagaaaagggttggacttcacacacactctcacttgaaacttgattgttgggtagaataaagatttcaagaaatacttgagtttgtgattagtgtacattttgggatttaagcccttgaggagacatgtgctttaattaattgtcatttgatttaactgttgatgttactatgtttatgccttttgcttgaggacaagcaaagattcaagtatgggggagtttgatgaatcatttatatgttattttaatatgctttttagtttagttttaattagattttatataattttatattagtattatttcctttttaggatagtttactttaaaatgcaatttattatatttcagggaagaatattgg

SEQ ID NO: 30907 - DNA, 403 bp, Medicago truncatula
  Intron number 1 from transcript Medtr6g076920.1 (locus Med tr6g076920) derived from phytozome v7.0 (chr-ID MtChr6; po s 14991940 to 14992342 reverse strand)
cacccacacaggtataatgcaatttcttaatttctttgatttatttatctcattgattttattaatcccaaaatctgagctgtttttcaatttcttgtgatacggttttgttctccatttagttaatttcttttgttgtgttgttctacatcttgaatctaaattatcaatggaagtttattcatagacataaatattgtggtatttaaaagactattttgatacttgaattaaatcaaaaggttcttcaataaattaagaattagaattaacaaatctttaactattctacttatttattgcctataatattctctgccaatatagtttgtgtatgctaaaattgaaattgtttattgtagttgaagatctcgagaatctattgcgatttgtgaatcagagt

SEQ ID NO: 30908 - DNA, 956 bp, Medicago truncatula
  Intron number 4 from transcript Medtr4g149490.1 (locus Med tr4g149490) derived from phytozome v7.0 (chr-ID MtChr4; po s 37181006 to 37181961 reverse strand)
cccatcaatttctggtgagcatgcggaaacttatgtgttaaattcgtgtagatttgttatattgaatgtttgttaaaagtgtcagtcgtgcacttcctcttatgcttctgcattttaatgcacaatttatagtttgttcctctgtatttttgtcggttttaagggcctagttaattggtgttttgttgtgcacgtgagtctggtctgcagaggtcacgagaaatcctatgagagccaggggaaagactgaatcaatcattaatctgttgcatacacacatgtttgttgtttttgcacatctgtgattctttatctatgataagtaattatgcgacagttcaaatgtaagtgttcttccatgattgaaagcctcctaaatcacgcgtgtgtctttaatgacgtcgattttccgtgttttcattgctggctttcatgcatgcttctcaaaataatggcccaattcttgttggttttaccgtacttttgtcagtttacgcttttgcatttaaatgacagtgcaatctcttgtcgttttacttacttttgtcggtttttaacagctgaattaagttgtattttattttgtgcttgcaagtctgtatccgcagagaacaatatttttttgttttcattcaatcttttatactgacgcccaacattttcgcgtcaaagatattttacatgtaatttacaagatctatcaaaataattatggtgtggaattaatatctaggtctacttgccattgatagttggctttttaagctttttgaatttcctcttacatatggtggcagttgaaaacttaacatcattttgagaaactatccccccacatggttagtgatgaggttttctttcacttacacgtgcttttcattattagcatgacaaggaaccttctcccaccatttctttcaggaagaggccagagctgttggccagctaaggagcca

SEQ ID NO: 30909 - DNA, 264 bp, Medicago truncatula
  Intron number 1 from transcript Medtr4g149490.1 (locus Med tr4g149490) derived from phytozome v7.0 (chr-ID MtChr4; po s 37182815 to 37183078 reverse strand)
ctcttttgagttttgactgtttcgaatcccttaaggttgttaatgtttcttatccctttttgcttcttcttcaatttctctctctgatctttgatttttccataaaccatttttgcttcattacttgtttcttctattgattttatgttcttctaattctaatgcatttttttttcttcaatttttctgctgaattttttttgttgctgatttgattgttactttttagcaaattgaagaagcgccgttgaattaaattgactc

SEQ ID NO: 30910 - DNA, 541 bp, Medicago truncatula
  Intron number 1 from transcript Medtr6g044270.1 (locus Med tr6g044270) derived from phytozome v7.0 (chr-ID MtChr6; po s 9408139 to 9408679 reverse strand)
cttatcaaggggtgtagttgtgaattttaaagagatttgttatgtttttagttttccaacttctaggaaatgagtttcaataacgtgaacttgaaagaaagtttgtattcttactatcatgaactactttaacggaaattcttcgattggtaatttggtactaaaagatattggaaaaaccaagccccacttagattaaagataaggcttgactagagtttataaagagagacacccctcaccttacaagttggttattgcggatgagttagccccaatataaaaacttaatacactcataaaatcaaattaagtgatccttctagaagttaaataataactgccaacttggttgagtcgtcggctgttgaatgaacgattgataaatccaccaattagggatttaaatgagttcaataaggcatcaaaagcctattattaccaattgttagtgttggtgcaatatttgtgcagatttaaccgagttttgtatctcaggttctctttgacattggtgttgtatccaccaggagcccttcca

SEQ ID NO: 30911 - DNA, 800 bp, Medicago truncatula
  Intron number 2 from transcript Medtr5g086120.1 (locus Med tr5g086120) derived from phytozome v7.0 (chr-ID MtChr5; po s 33023654 to 33024453)
tccgtttcctctggttttgggctgggccttctgttgtacgtttttttgcttcttttgctgcttgcaccattttctttgctatttgcacctgtggcctgctcattcttgtttacaaaatttctaaaaaatcctagttgtttcttggtacatttttggcatttttatggtgttttcctgcatgtaaaaaatatcaaaatggcatgaacaaatttccatgtgtttttacacttttggtatactttttgctatgtttttgttcttgatactttgatatgtgttatgaataaatgataccatatcttatgatgaatatgcctctggacatgtgcttctttttgctgttttgaatatgattttatggatttcttgttttacaagcaacaaatgtttgttttagagaataaagtgtcaaatttctctatgaatttggtgtgataccttgcttgcatatgtttccattaatttcatgtcatggcttgaaaccaaatttcttgcaaaattgccatgatgtgatgattatgggttgcaagcacctttaggtatcacatcaaagtttttaggttcattgccactttattaccttttctttgccatttttatgcatttccttttgattacttcctactattgtgtgctttatgattactaaccatttcatctcatgtgccatacctttcatagcattccaccactctctccactttctttagcttagcatttattttttttttacaagttttaattcatttggtaatgtaatttgttatcattggtttgtagcttggcaaaggggccataga

SEQ ID NO: 30912 - DNA, 590 bp, Medicago truncatula
  Intron number 5 from transcript Medtr4g024710.2 (locus Med tr4g024710) derived from phytozome v7.0 (chr-ID MtChr4; po s 5696071 to 5696660)
acattagggaggtcagttgatctaaatttaatgtacgtttgttttctttttgtttgcacgcattctcatcgcgttttatatgctgttcttttctgtcgtagttagattatcatgcctcactatctgaaaaccattttgatgaaaatataaaaaataatgtcatattgttgatattagccagactccaatatgttgtttttatttgttacgaacatgtttgttgtgtgaggcatattcttaacttgaatcaagggaatggttaccaagggaacatttattccttttgtaatctgttttattttgtaaaactgttgtgttgattagaagcatcatagaagagattttctttcctaatttttgttgtactcctgtgtcttaacaggacctatagcttgtgtattaaaaatatgataaatacgaaatccagttttcttctttgatatttgtttgatctagttacacatatgaacacttttctgtaatgttcatttcattttcatatgaatttcctgaagaaaataatttaattctaaattatctaatggttattctcaggctgttcgaaaagataacaagcaacgtttcagcct

SEQ ID NO: 30913 - DNA, 1018 bp, Medicago truncatula
  Intron number 1 from transcript Medtr4g029350.1 (locus Med tr4g029350) derived from phytozome v7.0 (chr-ID MtChr4; po s 6995829 to 6996846 reverse strand)
tctgtatccgtaagtacaactaagataacagttgcatcagtatttgaaatacatgaatgtgtgtttgaacctcgttttcatcgtatctcaacacttactacctaagtttctctcatataaagtacgcccaaatttagcatctttttctcataatcatgtggggagacagagaataataaaacgacaaaaacttgtgtttataggtgttactaatgtccgtatccataagtacaactaagatagtagttgcataggtatttgaattacatgaatgcatgtttgtacctcattttcatcacatctcaacgtttagtccgtaagtttcgcttatataaagtacacccaaatttagtgtttattggatgcagtgctatataccaagaaagattttatcaagaaattgtctcgaaattaaagttaaccaataaaatttctacctggccgaaaatcatggggtgatgggttatatgtattttttttttttatggaaataagattgaaatctaaggaataatattgtgccatatcattctaaaaactctcagtgatttttcatttcactttacacattacccgtctataggtgttaccaatgtctctatcgttaaatacaactaagacaatagttgcatggatacatgttcgaacctcgtatacatcacatctcaatacatagtgtgtgtgaatttcgtctaatttcttatttataggcaattgaaagttcacgcgccacatttgaaatggtggaagtgtaacgcaattaagaaactgcaactctgccaaccagagggaaaactacgtatgcagacaagttacacaaaatatatattttaaaaatctcaaaaaaaaaaaaaacattataaaaaaagtagaaagagagagaacatagagagagagagaagaagtactttaccacttttatacgcagcacgcatccatcttaacaaaaacacaacacaagaagctacaaagtacaaacaaagagtgttgtgtttgtttgttgttcaaataccagcaa

SEQ ID NO: 30914 - DNA, 929 bp, Medicago truncatula
  Intron number 2 from transcript Medtr5g066080.1 (locus Med tr5g066080) derived from phytozome v7.0 (chr-ID MtChr5; po s 23205059 to 23205987)
gaagataagaagttgaaaagggctaataagaataggtattattgtatttgtaacttatgccctgtttggataaacagcttatttagagcttataacaaaaatgcttattatgataagcagggacttatgtataagctatttctatagcaaaagagaatataaagttaattattgtcctgtgttatataagctatctcattgaacttatgacaatagggcctgtttggtttgacttatttgagtttatttactggcataacttttactactgtttgggagaacttatgaaaacagcttatgggtctgtttggaatgacttatttttaagcttatacaaaacagcttatccaaataaataagcttttatgtattattcataagcttgtcaaagtagtttatgaaaaaacacttgcgaggatacaattttcgttagtgagaacttatgaattaacataaaagcttatttatttgcataagctatttttaataagctaaaaaaataagctaatccaaacaggccctatgaaaatttccaaaagcgttttttagcttattttcataagttatctaatatagcttataaaaacaacttataacatatccaaaaaataatttaactttattttatcggttgctatagcaatagcttatgtgagcttatacacgcgcacttatcatgataagtgcttgtgctataagctgcaaataagctgtttatccaaacaatctgaacatatgaacaatgtcattcattgtttttcccaaacaatctaacaaaacttatgcaagtatataagttcaattgttcaaataagtcaatcgaaacatgcccttagtaatatataattatttgtttgacagcgtggttttccttttattcttatccttgtgtgtgtaaataaaatgatttcccaattttaccaaggcca

SEQ ID NO: 30915 - DNA, 657 bp, Medicago truncatula
  Intron number 1 from transcript Medtr4g158580.1 (locus Med tr4g158580) derived from phytozome v7.0 (chr-ID MtChr4; po s 39858159 to 39858815)
tgcaaactttcttcttcttcttagttcttaggcaagttttcaattcttagatctgattatttgcattctccttcaatttgtatgctgatctgcaaaaaattgtttgcaaaattcaatgttcttcattttttttcattttttatttatttcatgttttggaaaattctagaatctaggtgcattgtatggatgatcatattttcggatgaaagcatgataaattttagttagtgtttggttctaagccgccaaaattgattttgattgtattgattttagttaaaagggactttaagataaaatgatttatgtatgaatgggatgaatatgtttatgtgaaagtgatttgaacgataaatttgagtgaacaaataatgtttcaaggccaaaactataagttctagagagtatcaggttagaatcaattttagcggtaaaatcaattaaaataaaaaacaagcaaacatatcgaaatcaaatttgagtcttcagaattgcttttttcaatccaaaaaatgaattcaaacgtagttagtttctctgtagctttggagcaatttgatagaagttttgataatcatttgtgaattgcttgattggattggattgtttttttgttgatatttgtgtgttgtgatgtgtttaacagaagcagag

SEQ ID NO: 30916 - DNA, 414 bp, Medicago truncatula
  Intron number 1 from transcript Medtr7g087430.1 (locus Med tr7g087430) derived from phytozome v7.0 (chr-ID MtChr7; po s 18753015 to 18753428 reverse strand)
agataaagttgtgttgtgtagggtttgccctaagggttgtgaaactttataacatttctttggtcgttcgttttattcttagttgcaaaattagttgtgctctattttgaatgttagaattgatttttcatccatttcttcagttttgtttatgttttttatttttagtaaaaattggagtactcatgtggaggatgaggtcctttacacaattatcaatattatttaggtaatttattttcgtggaattaattagcatttaataataggttgatcaccattcaacgatatattaaatgcaagaatttactattttaaagtacttttctattgaatgtcatgctccaaaggaccccaattactattcaatttaattgcatgaagacttttgtgattggattaagtgtaatatat

SEQ ID NO: 30917 - DNA, 822 bp, Medicago truncatula
  Intron number 3 from transcript Medtr5g021980.1 (locus Med tr5g021980) derived from phytozome v7.0 (chr-ID MtChr5; po s 8517129 to 8517950 reverse strand)
cctgtgcaatctgagttttgtgtattgggcctttggtttgggctttgatcttttacgtttttgtttgttttcctgctatttgcaccatatttctttgctgtttgaacccctgcatgcttaaaattttctccaaaaaatctccagaaattatcacatgtttcttgatattttcttagtgtttttatgacatttttgaacattaaggatctatgaaatttttgtataattaattcatagcattttaattctctttgaattatttgttatggattcttcttcacacatttgtccttgatgtgagaatatgtaataaaagctacttgacgtgttaatatgagagatttgtgccactaatttcatgttgatttgctgttttgatttggttcatgagtgcttgattttatgaacaatatatgcatattttgaaagatataaaatgccaagtttattctagaaaatatggcatgaaaccatgtttgcatgtttccaataattctatgctataacttgagataaagaaaactcttgcaaaatttgttaaagcatgagaattagaggccaagaatgctttaggtttcatacctaagtttttagggtttaatgtcattttgttaactttttgtgccatcttgcatgcttttatttcttagtgcttattatgttctttcttttgactaacaagtttatttccatgtttcatgcatctcatttagtattccctccaccttctttagcctagcatttatttttttttcaagttttaattcatttagagatgtaatttgtcatcattattttgtagcttggcaaaggggccataga

SEQ ID NO: 30918 - DNA, 924 bp, Medicago truncatula
  Intron number 3 from transcript Medtr4g158540.1 (locus Med tr4g158540) derived from phytozome v7.0 (chr-ID MtChr4; po s 39834848 to 39835771 reverse strand)
tacagaaggacaaaagcacacctttagtgcaaaaggtcttgatatatattatttgttaatacatgtttatccagttgcattttttacatgcttcattggatatatatagtttgattctttgtcgcttttgccatcatcatcatccttctttgctatgcaatttttcttatagtttctgttttgtcaagtaattttgtttatctattctcgatgaccgcttacttggtaaccgagatcttagtttatctgcaggcggtgatgtgaagcacatagcaatgaaaaacaacctatcagatgtgattgaggtctagttgtgtacttcgtaattttatgccatgaaattcttaacctttcattttataaaaaccatgccaattcaaaatgaataccttttatggagcaattattagcatttctaaactgacaaacttagctccattgtcaacatgatgtcttttgaaaacttcaatgttttaagataattggtaataaacagttattaaggaagtttcatgttccagtagatcaaacataaaatgtattaaatatgcaactcttgctcggtgttagtttggcctgggttaaaaggttcttccagttgaggttctgatgatgccttatcctttgaaatgcaccagcttctctcattacagggtcaccctttagttacatcttttttgtcctccaaagacactgaacttccttatggatgtttctgtgtgtgcctattagattacatttgtaatttggttgattttgttgattaatttacattttgtttgttactaattgctgtcagcactttaagtgattacacgtttttctgcatcatgcatttttgcacaagttgttaaagtggagcgtctaaataacatacctattatgctgcatattttaggtcttcacaaccgagtattctttgat

SEQ ID NO: 30919 - DNA, 975 bp, Medicago truncatula
  Intron number 1 from transcript Medtr4g158640.1 (locus Med tr4g158640) derived from phytozome v7.0 (chr-ID MtChr4; po s 39901504 to 39902478 reverse strand)
cattattgtctaggtcaagatatatttattgttattttttttttgtaatacacatgatagaaaataatttaaaacaccttcatactacatgcatgatgcatccaccacatgcatggttaaactaaaagcaaatacgcgaactgaaatattttcttcaattttagaagcatcccacggattaaactaaaagcaaatacaccaacataaatattttctttaatttaagaagcatcccacggatacatcaacatgtaacatgtaaagtaatgacatgatttatgagtaaagatatatttaaacaacgtttggaaccatgcttcttaataggtcattgactttttcaaccaaaactctcgtcctcttgacgaccgcacatgtattgttttttcccttcttttgttgtgggttggtggaggtagggttagcaagtgatgggtctcaactttcacgggatcataggaacttaaaaagtccaaggtggtgacatgagaattgaattctgcttattactcaaatggttccgtttatttctaaagtaaatgtctatattgcccgtacgcatgttaacatgcgctagtgtaatttgtacttatgttaagttacgcttcgtgacttaacatgcgctagtgtatttttttacctaagttaattcgcgtagcatgacttaacttgtgctagtgtgcgctagttggccggtgcagaactgaagaacaaacgttttttgatttgtggtcagtttttcaacattcaatccacacgtttttaacactatttcacactttttttgaccacattaatggtgtttacaacctatactaccattcccacctataaatacccctccatacttccctaattcctcacaccatatcactttctccccctcctcactctctccctctatttctcttctttctttctttttcaatattctctttaggggcaaaagtgatcaatcttcttaggggtaaaata

SEQ ID NO: 30920 - DNA, 674 bp, Medicago truncatula
  Intron number 2 from transcript Medtr4g137730.1 (locus Med tr4g137730) derived from phytozome v7.0 (chr-ID MtChr4; po s 33993954 to 33994627)
tcaagcgatctccgtctttgaaatcccctagtccggtaatcttcatatccatttgataccatcaaaatgtctatatcatgtttatgcatcagttgtgtttgttgtacttgtatctgtatacaccacatgtaattggtgttataatataattttcacatagaaatcagaattgaacttggaaaatgtatgtatagtttatagatcttgttatgcatctggaaacaatttttcttgactgcaataatctgtcagattttatccgttcatgttggatcatactcatagaagaggcatttattagacctttgagatttgagaggtcatttttttagcctactgctgcagatatactagtcctgtgtttctttggcatttctatcattactcattgacgggttatgcttatctataattcagttaaaaaattaactttgggtatgtttcgttgattttcactagagttattagagatatatgacaaatgaagagacaaggggggtgattaaatagaggattcattttcttttgagttataatttcctctcgaatttttgttatttatgtgctaaaatatattatactcttactctgttattatctaattattgtgtttcatttctgcatcttttcccttttcagtttgccttccacgaacctggggtcactcacgtttt

SEQ ID NO: 30921 - DNA, 690 bp, Medicago truncatula
  Intron number 2 from transcript Medtr4g023640.1 (locus Med tr4g023640) derived from phytozome v7.0 (chr-ID MtChr4; po s 5222725 to 5223414 reverse strand)
tggtcattgtagcgtaagttcttgattaatattgaaggcgtatctggtgtttgacacatgtcaacgtcactgtcacgagtttgattcagttatttaattttcacaagttactatcggtgtgtgttaaatgttagtgtcatgtgtggtgtttgtgtctgagtcaatgcttccgagatagacacacatgttgaaggtttgtatggtgtttgacacgtgtaggtgtcatgacacgacaccaacgcatgtagctaggttcacttattcagttttctaaaattattatcgttgtgaacatgttaaatgtctgtgtttttgttttgttttgtttggtgtttatgtttatgtcaatacttcacaaatagatcatttatattgaagatgtgtttggtgttcaacacatgtcggtttcactaacacgacgccgacacatgtagttagattcattcgactattccatatatattttctttgaattattactagttgtcgtgtttgtgtttggtgccagtgtgtgtgtgagtgctttatagacgtgagcctttttattttttatttttttggttacctgaacctattgtttttgtttactaatgttttcaaatttttagagttagtattaaatttctgactttaattttactgcaatgatgaccagtgcatatcgtacggctatttgcaaagcaaagcgcg

SEQ ID NO: 30922 - DNA, 450 bp, Medicago truncatula
  Intron number 1 from transcript Medtr4g147300.1 (locus Med tr4g147300) derived from phytozome v7.0 (chr-ID MtChr4; po s 36919596 to 36920045 reverse strand)
gcgtttctctttgagattatcttctatctctttctttacgtggcttgttacacaaaactccattaattttcattttgaattttatgggttaagatatggcatggttatccacttctgtgatgatatttttgaagccgtgaggactctttgcttgtagtatttttattgtgagtcattatagtcatcactcttcaaaattgttgcttaagtggcattatgcatgctaaccggctgccatggaaatgccttatgtgtttcaagaagcttctggaggtcaacgaaaaaacagatctggtgtctagagttccttggaactagttagtcagatttggtttgtcggataattgtggtggttcagcttttaatggattttaagagtggttcatggattggattgcggtgctttggggtgagcttttgggtggtagtttaggttgtgtggtggtggtg

SEQ ID NO: 30923 - DNA, 789 bp, Medicago truncatula
  Intron number 1 from transcript Medtr5g085800.1 (locus Med tr5g085800) derived from phytozome v7.0 (chr-ID MtChr5; po s 32825353 to 32826141)
atacttctaaggcccgtaaggcccgtcgtgggctcttcttcatgctacctttgttgcttctacttcttttttaatcaaaaggaatgaaatgaagagtaatggagattgggtggtgattatgtgatttaatttgaattgtaaatttgtttaagatcaacttcttttttcattggtaaactgtaataagcaaaatttcaagtatgctttcttctggtcatcaaaaggaaaaaaagtcatgttttcttttactttatgtttttttcagtatgattcttccatgcaaatttgtaaacattgatttggaggatgtggtagattcaactaaaataagtaaaataaatatatacccaatgttttatttatttcaacatgttccaaggagatttgtaagaaaaaaaggaacacgcatatttttcttctaatagtttatttacttgtgaaaatattagggtttgttctttattaaaaaataaaaacatattatgttttgttacgcatatattttatttgtacattttttactttaattgatattgctttgttttagttttataacattcatattatggaatgtatataaattttagtttcaatattctagtttgtatgtttttaaattcaattttctttttaaattatgttattaaaataaaatgtatagtacaaaaaaagaatcaaagttgatgttattccctttgaattttgataatatgtggtataaattgcctgacttattttgttggatggcttgcaggaaaatttggtatagaaggtgaaaagagatttgca

SEQ ID NO: 30924 - DNA, 984 bp, Medicago truncatula
  Intron number 1 from transcript Medtr5g095280.1 (locus Med tr5g095280) derived from phytozome v7.0 (chr-ID MtChr5; po s 37753580 to 37754563 reverse strand)
attgtattgtttgttgtgtctgatcagaaatgaaattagtatttttctatcatgagaaataatttggaaaagtagtacgatgttgaaagcgatggtgcttctatttgattaaattaaaataagtttatcattctatgaattttttaaattttgtttttattttttctaaaaaatttatgtaattttttatctctaatttttatgttgattgattgatatgtacccttcaattttttgattaaattttgtaggatatagataagttatttaaaacatggttcttgtttaaggatgttttgaacaagtaacacatcttaactactctttttatttgtgggatcagaaaccttttatattcaacgatatctagttagatcattcgagtttttatttttgagttggttcttcaaagttgaaattcttctaatcattcaaattggacaactttcactcttaaagaaataaatgatttaaaaggagtgctcaagagttggagtaaataggtgtttggtaatctatactttctgatatataaactcgtagatgagatgaatttgttatatggttaagtggaagcatgtgattaatcttttgtcgatagtgcaacatgttgtaaaactagtgtagacttgtgggagctattaagaatcaaggagacccaagtttttgaaagatctgatgtgaggttgaaggaagttgaggcaaattccaaattcttccattaagtgtgaagcagcatggtagaaagaattatattctcgctttgaatgtagacaagaggtgagtaaaaggaggtagtgggggttcgtgaggaagttgtgtgctattttgcgaggtttagtttgttattataactctgaaagagaagaaaacttttccggtcctttggtgctaaagagttggaaatttttgtgattttcaatgtatgtctcgatgatttcaatttctccttctttaaaagattgtagccttatctgaaaggtg

SEQ ID NO: 30925 - DNA, 824 bp, Medicago truncatula
  Intron number 3 from transcript Medtr4g143160.1 (locus Med tr4g143160) derived from phytozome v7.0 (chr-ID MtChr4; po s 35792709 to 35793532)
gcgcttggtggtgacatagggaaaattgctgataggtaacatggaagattcgtgcttctttacttctttttctctagcatcttgattccctgagattatattgatgcagttttgtatatgaccattagatcacaataactggcatgtttggaataatttgcatttgttcttttttgttttacacacatgtttatgtgttatacacgtctctctatcattgggagataggagtttcatgaagcattattttgtttttcttttctgttaggggtctcccttgaagtattataacatcttttagacaaaggttaattttagcaaaaaacagaaaagctttcacaataatattaacataatattatgtaagaatctatgacaagagcccaatttcccaataactcaaaattatactttcaagtaagttattcttaaggaatctaccctcattcattgtaagccgtggtaagattttatagaaatgatttaatgttaaggggaaaatggtctaatgagttcctgggcagttgcaaaatgatcgcacattcaaagctatacgaggatgagctatgatttacttttctttttccttttatgtttgaagatgaaaaaaaatgtgaaatatctcggtgtattcccgttcaagccaaactaaccaatttgtttttaattcgaataacttactacttttacatcatatatcattgctatcgtcattcggtacaatcttgattcatgttttcaaactacaattgtgatataatatattttgaagtgtggcttttgggggttttgttgctcatgtctgttattatgcttgtgttcag

SEQ ID NO: 30926 - DNA, 422 bp, Medicago truncatula
  Intron number 1 from transcript Medtr5g023560.1 (locus Med tr5g023560) derived from phytozome v7.0 (chr-ID MtChr5; po s 9273941 to 9274362)
acgaagttgatccaacccaggttttttttttcttttcatttgtgttagttctcgttgattctgtattttgacccttgaatttttccatgattttgttttcattatctttttaaaaattcaaacattgctgttgctgattattttgttttaaaaataattttattgttaactaattgtaaattcaagttaactaatttcatttacaactgctgttaattaattgacacacaataattcaatgttgctggttgttctgtttgtaaatttttttgtttgttgttaataacttgtagggattggaagacacagttataaaagattttttttttatgttcacttttgattgcaagatattttgtaaattggtttctaaattggttttgttgttattaacttatagggattggaagataagtcattag

SEQ ID NO: 30927 - DNA, 553 bp, Medicago truncatula
  Intron number 2 from transcript Medtr6g076640.1 (locus Med tr6g076640) derived from phytozome v7.0 (chr-ID MtChr6; po s 14798154 to 14798706 reverse strand)
gcaagtgttttggagtgaaagagatgttcataatattgtaatgattgggttggtggtgtctggtcaagaatgtgccaccgtttgttcgatccaagatgttaaattcttaacttgacagaaattgatgacgagagtttaaacttatcagaacaagaacaaaatcagcaatgcattcatcgtaccagaagtatgtgatcccaattttatgttcatatgctattgtcatgattgtatggtttaagtttgaacttcattggaataattttatgattccctttgcattttgttttgttcctatactaggggtgtttctagaagcttattttgtttgcaacctagtcattgctttctctggaatttcttcctgatgtccacacataacataacacattcgacattaagcagttgactttagccagttagttgtctatgtctgtcttgctgtcaaattgtgaatcaacagaatttttcgcaatattttttgcatcttacttcattattctcaatttgatttgcagacttgaagaatttacagactatctatccgctgtgg

SEQ ID NO: 30928 - DNA, 550 bp, Medicago truncatula
  Intron number 2 from transcript Medtr5g094320.1 (locus Med tr5g094320) derived from phytozome v7.0 (chr-ID MtChr5; po s 37241727 to 37242276 reverse strand)
tgtctgaatcaggaagcaatttattcaaagctgatgtagattatcactataaaatttattacttccggtcttattctaggttttcattataaaattggtgataatcttgattctggtgtagattttgttaatgttgatgttagaatttcgatttgatttgtgtctgatagagtgaccgtttacaaattttatagtggccatagagggatttcaaaattgtagtcagtagtagtcaaacctgtacggaatcagtcatagaatgggtttcaaaattatagaaattgaatttgatatttttagttgtttgaaatttagtatcaactatgagtcattcagtttgatgaaatctactttgcattataattgttcgataaaaagatcacaagaacttacttgaggcaagcctcattcttatttgttatttttttggtacaacattcttattttcttctatgtgcatttcttaatcaagtcatggaaaaggtaataactctcattatgattggaatttaaaattaacttagggttgttttttctccaatttcagaat

SEQ ID NO: 30929 - DNA, 739 bp, Medicago truncatula
  Intron number 1 from transcript Medtr5g101420.1 (locus Med tr5g101420) derived from phytozome v7.0 (chr-ID MtChr5; po s 40593205 to 40593943 reverse strand)
ttggaatttcagatagtggaactgccactgttaaggtattgtattaatctttaatactgttcactattatatatatgcatttttctttctaaagttgcatttgatttgatggcttataatatatcgttcctttgtgctttaattcactaggtttgaccttgaacagaataataggaataaatgttttccataagttggttattttgacaaaattggttctaaaattgcattctgtactttctgcaactcgaataagggtatgtttgggagagcttatagaaacaacctatgacatgttcataaactatttttaacttatttccataagctctccaaaataggttatgaaaacagtttaagtttatttgatcttttattattgaaaaagcttatacataagcacctgtctgataagcgtttatgctacaagcacttaattaaattgtttatccaaacaagactttagattagatcaacttgttagaagataggcaattgaatacacttgaaactgcagatattgaaaatttagatgtggtatcaagatgagcaataaagcacatgtgtttttagtatttgataggaaaaaacctgttagaatatgtacctttaatgcatgcagttttgttttcccactccttgatcatccaataatatccctcactcagttatgtacttgtgtcgcattgtgctgtatttggaaggttgaagatttgcaagtggggcttactgtaaattt

SEQ ID NO: 30930 - DNA, 763 bp, Medicago truncatula
  Intron number 2 from transcript Medtr4g121920.1 (locus Med tr4g121920) derived from phytozome v7.0 (chr-ID MtChr4; po s 28744275 to 28745037)
gatacagggtatgttttgttttccatttgcagtacattcttaatcgtgcttgcatgtctaattaatgttttggtggaggatttgattgttctgtgtaattagagacgttatcagtcaggcaggggttgggggttttatttgaatcatttgaaattcttgcattcaaacccaaacactaatttgaactagtgaccacttgtcaactgatactcctagcggtaaactgaagtcaaccacccatatccgaattcatttacctgaaatgcaactgtataccaattttatactctacctgatacccaaatatctgaatattaaagcttcacctgccttatcaatcaaatttataacaacttttcgaaacatgtatatgtatttaagttgttctagcttttggtttaatcaatagatgttcttgatcgcattcttatctgtaagtagttctatttctaattattttctattttaatttgcatagtagtctaatgattcacatagataaagttggtgagaaacacttcagtcttatttgggttgagatttgattttctcgcttttaattacaaaagggccatcttattttcgctttatatattatttttaaagatctgcgttggaaaaaataaaaacaaataggattttagatgttctgtctgattgcgcagacaaatacattgtaaatgttaaacagaatcaataaacgtaaatctatttgcatgtattctgctattttcataagttaaatggtttatgcaggcagttc

SEQ ID NO: 30931 - DNA, 645 bp, Medicago truncatula
  Intron number 1 from transcript Medtr5g091820.1 (locus Med tr5g091820) derived from phytozome v7.0 (chr-ID MtChr5; po s 35959221 to 35959865 reverse strand)
ggacttaactgaaacttccactgatactaaaaagggtgagctatatattatattatgtttctttatatatgttttcatgagcgttttagatatatgttttaattcttttctacttttttgaaggataattcttttatacttaattatataattttatacgttataattaattcttttctatgtaaacgttaatcttcatgcactcaattttatataaaatgatttcaaatttgcttcataacttacaaagatgatcaatatgatataattatattatatattcaattgtgagtctttttaaatttggtataattctatattcaataagtttgtgagaaatgtaaaattattcaaacattacgccggtgtgaatacataatcatatatatatatatatatatattaagtttaatggtggttggttgatggttcaaaaaatttttgcacacaaaaccattgaaaatatttagaatcaccacatcaattaatattttttaatttgcagggaaacttgaaatattttgattagtcttgtatacaaagttattttatatcgtcaacccactaccattaaattcatatatatttgaagtaatgatttaacaattcatatatatcgtgtttcagaagttgttgaaaagacta

SEQ ID NO: 30932 - DNA, 895 bp, Medicago truncatula
  Intron number 4 from transcript Medtr5g073180.1 (locus Med tr5g073180) derived from phytozome v7.0 (chr-ID MtChr5; po s 26209508 to 26210402 reverse strand)
gggtcttgcaagaccacaagtgtaatttctctcccctattgagtgtgaacaaagaatgattgcttaactttctgcatattattgattgaactatttcatttaactgtacggttgagagtttctggagttctacaaactatgagctacaagcgaatgtttaacctacttattgttgtgttgtaattggtacatggatgtaattagtcgacaaacatgaattgtgctatctttgggttctgtcatacatttcaaataagtgagtcttatgctccttgtgttggagccgtgggttatgtcatcattttaccttttttagctcatctatcgtcaaaagatgattggagcttttttccttcttcagggatttgtagtttgatatgttgcgttggatgagtggtaaaactagacgggataggattaggaataacaccattagaaagagagtgagggtagcacctatagcaggaaaagttggtagaaaataggcttaggcggtttggacatgtagagataagatttgtagatgttgtcgtaagaagagtagatcagatggaggagagtcgggtcaaaagaggtagaggatgagctaggaaaactaagaaaaactattaggaaagatttagaggttaatgggtcggatccaaaatatgatttatgatagaacactacgacgcaatttgatccatgtagccgaccccacttagtggaataaggcttgattgttgttgttgttgtatttcattttcatttttcttccgttttctcggaagaaattttttgcatttcgaattgttgtgtggctctttttgatattgatagctcatcccctactgctttataaacagtttcttttgttgtagtgtggtgagggtggcgcacttgtaaatctttcagg

SEQ ID NO: 30933 - DNA, 904 bp, Medicago truncatula
  Intron number 1 from transcript Medtr5g046410.1 (locus Med tr5g046410) derived from phytozome v7.0 (chr-ID MtChr5; po s 19521617 to 19522520 reverse strand)
actcttctttttcaatacccagatttcattttcaggtaattcttgcttttcacatcaaattaaccttttttcgttttcatcacatataaatttttcatttccaggttataacaagattcaaattttgtgtgttcttttccttcaattgattaatgcattttcttcctggcagaaaatgataattgaagaaatgggtcatacttggaatttattttggaatcttatatatcaagttattttttgaaaggctcttgttgttgatattgattatgacgtgccagagatatctagcatctctggcatgtgtgtagttaccttagtgtcgtgtctggtgcccgtgtctgtggcataattacatggtgtgtctggtgtccgtgtctatctgatattatgacacatgtgtagttaaactcaattacttttacttaattaaattatttgaggtttttatgtgtcagtgttgtgtcggtgtttaataggttagggtaatctgtttaactgatgtgtgaattttggattgtttgtgttgttacattacagtgattgtagaacttggaaggagatttcttattgttgagtttgattatggtctatgtatcatcgacgctttagataaatggcgtgttagatatctgacatgcgcatagttacattcggtgttgtgtctggtgtctctgtttgtcataggtctgtgtttgtcataggtctgacgcgtgcatacatagttacattcagtgttgtgtttggtgtccgtgtctatacttatggtgatttatttagctgatttgtgagttttggattgtttatgtgttgttacattacagcgattgtggaacttggaaggggtaatttgtaaccataagaaaaggcttggtattgctattgataggatagagtctcagaa

SEQ ID NO: 30934 - DNA, 842 bp, Medicago truncatula
  Intron number 1 from transcript Medtr7g010040.1 (locus Med tr7g010040) derived from phytozome v7.0 (chr-ID MtChr7; po s 2027887 to 2028728 reverse strand)
ctttatcaggtaaccttattaactttagttgttttgtgagtatgttttacaaaacatagatgtttttcaataaaatttaaattagatttttttgttgttattgttgttgttatatttaattggcaattattagatttgtttagcctaaaaccatagttttgtgatgctaattatgttggtccttaattagtaaaagatatataattaatgtgtggtgctatactcttgtatgtgctatcttgttgtcctatgaaacttcatgtccacacagatagagaaacaattgtttttattcttttgatttattcctttgattaaatcattgttcttatcatcacttccaacggttctttcatgtgaccaaaatgttttatcgttagtgaggatgggattttgaggacgagttttatctaatagtcaccaagtatacacctgttatattttctttggttcaagcattctcaatttcatccttgtctctttctagtttggattggaattaaggtttgttagcactaattttggacataacattttctgtttttatttaaaaattgactaaattatacaagagatattttaaattatttaattataataagtcggttcttttaagttttttcgtaccacatagactctttaagttatttaattgaatcctttaagtttttttgtaccatctaagttttatctatttgacaaaaattgaatttgaacaaattgattatataaaattgattccgattaaaagtgtctcgatatttaaaattgagttgaattataaatttggtgtaaaaattaaaaacaaaatattgcagcaagctggaatcgaacaaagaacc

SEQ ID NO: 30935 - DNA, 898 bp, Medicago truncatula
  Intron number 2 from transcript Medtr5g022550.1 (locus Med tr5g022550) derived from phytozome v7.0 (chr-ID MtChr5; po s 8801499 to 8802396)
attatcgcagttagttcaaaaccctgcaaaatacggtaatcaaaagcaagtattgtcatttttacctcattatacatattattggacagttatactatacatttgtgaacatttagatgcctatagacagtaaatgatattcaccacaaagtataagaagttggtgtataagaaacttttcacataaataaaaggaaaacatttactagttattagatcaattcaaattcatttgcatcttcatatatagagtaaagctaagtctattctgcacaaggaagttaagtcttgcaccatgcacaaagttgtttccaccattggatcaataagtttcaccgttaaattaattgaaatatgatgtgatttttggatccaacgatagaaagtaaacttgtgcattgtgcaagtaatttacttgtgcatgttagacaaaaccatagtaatattatgatgaccatcaggcaccgaattgacgaatttgattgagtaaagataatcggtatttttcaaatgaaaattttgagaatcagagaacaaaatttctttgatttcagagtatatgaaggcctaattatattactattgatagaaacgtctgctttatttataggtactggaaattatttagtaacaaaactctcaattttgtgagaaatatagagatctctactcatagattcggattccctgcagtggaataaataagtatttacacgtagtttttgatcttggccgttaatttaagattgaacagtttatcttacacaataacaaaatcaatttagaatgatattgacgttaatccctcgactgagttgattagtgtatttgtttttttggctaattcatttctcattgtatttggtgcatggttaggttttgaagtagcagataaagg

SEQ ID NO: 30936 - DNA, 476 bp, Medicago truncatula
  Intron number 2 from transcript Medtr6g005220.1 (locus Med tr6g005220) derived from phytozome v7.0 (chr-ID MtChr6; po s 194825 to 195300 reverse strand)
tgactttgattcaaagtcgattttctggagaagatgtgaatgagataatgcaagttgctagataggtacttctgaattttctaatcttcatataaaactacaagttgcttcattgatttaagagaacatggaatttatataattacctgtttatgaaaacaatgttggttttgtgtttgagttacacaattcgttgaatttcgcatgtggtggttcgaaccatttagcaatactcttgatttaatactaatctttatctgcaattttcaattttctgtgatataggttactgatgcttctagtgttcctaaccctttgaattcccctagtccaagcaataatgaaaattaatgaaaatggtatccaattaaatatcactaaagttgttaatattttctttgtttttttaggagtgatattctcaatgttgaattgtgttattattcatcttttctttttatttcttgtaggtgaag

SEQ ID NO: 30937 - DNA, 963 bp, Medicago truncatula
  Intron number 1 from transcript Medtr7g080880.1 (locus Med tr7g080880) derived from phytozome v7.0 (chr-ID MtChr7; po s 17333067 to 17334029)
tacatttaacctcgattgctgaaaggtaacattattaacttattcttgtgttttttttcatggttgtagttgaatcatttgttgtgcttgaaaaacctataactttattgttgtaagggttgaaataactcttactttttttagtatacactactaaaaaaacaaaaattagtgagggatatttagtgagggaaaacatgaaatccctctctaattccgtcactaaattttacgaccaaggaatttgtgaggaatttcattttttccgtcactaattttcctcgctaattttgctttttctagtagtgatatgttaattaattccaaaagacaaaatatttagccttctatacaataatagctataaatgtgctaatgaatataggattgaaattaattgtatgttttcttgaacttacccacactttgatagatttgcttcctttgcatgtatgttttatgctttaatagtctgttttttttttttttctagtctgaattagaagcctcatattagattgaaaagtgaacgtatatccattggattcataattattactctacgtagagtaataattaagtgagaggattcatatatccattggcctttaagattttaggtgaagatttggtgttcaatccatttgtgtaattgtccaaaatctaaaacgatgataccctgagtttccattatttccatctcgatttgtgcgtgtgtatatatattctttgatttaccaaagtatataatttttaatgtttcaaagtaaatctgtaaaatatactttttgtcaaaattacaataatacattgtgattttgacaaactcacactcaatctaaacttattctagaccttctaaaccacctctacatgtgcaaactactcattttatatgttaaaagtatatatcttctttaatgtgcaggactccaaatctcaaaaggttagtgtttcccatat

SEQ ID NO: 30938 - DNA, 318 bp, Medicago truncatula
  Intron number 2 from transcript Medtr6g076580.1 (locus Med tr6g076580) derived from phytozome v7.0 (chr-ID MtChr6; po s 14771536 to 14771853 reverse strand)
gagcggttgcagaaatggaagatagctcttaaccaagcttataacttatctggctatcatttcaagcacacttcttcatttcactcttatttttctttcttatggatattgtttgtcttcaatttcaattgacaattcattttacacttacatgttaaaaaggaaatatatgttttttgagttttctttcatgtttagaaagtttgttctttgcatgttgaaaaaatttgtatcataatatcatcatcatcgcaatacatggctgtgattgagattctgatgtatttacttaaacttgtctggttgggcgcagggaag

SEQ ID NO: 30939 - DNA, 372 bp, Medicago truncatula
  Intron number 3 from transcript Medtr7g009860.1 (locus Med tr7g009860) derived from phytozome v7.0 (chr-ID MtChr7; po s 1943455 to 1943826 reverse strand)
actaatagcaaaaacaagtcggggaagaacacaaggtttgtcttcttataatctgaactctaaaattcctattgctgaacaatgaaagaattaacaaacatgtagttatattaatcatcacttaattaaaacacaagtaaaaaaacatttatacgaaaatgaaactgaaaaagttgtgcaatagcaactagacttttttgatccaattatggaaacaaatatttagttgagattaatgatacaaccttgtaagcatctttatactgttaatttgatttatttgcctgttaagagggtttcaaggttactcacatttatcaaatattgttgtttttaacaaaaacttaggtgagaagaaaggaaacaatagca

SEQ ID NO: 30940 - DNA, 460 bp, Medicago truncatula
  Intron number 2 from transcript Medtr5g028110.1 (locus Med tr5g028110) derived from phytozome v7.0 (chr-ID MtChr5; po s 11553177 to 11553636 reverse strand)
gggaaaggtgatgatttatgctttatttactgagaaatttctgctttaattatattttcagttggcatagagttgactattccaattttatctccaaaatcataagtttgacttatgttatgtttacatttgtccttgcatctcatccatagtttttttcttcaaatcataaggctgacttatcaaattcagtgttgtcaaataactcctatagcgtaacagaatttgaagaaattattacttttctgcactacactatttggtacaaagtcttatcaaacagagactatagtagaactgtagcatagcaaatttaaacaaactgctttttctgcaatctgcgatagacaaagttgttcaaaatgctttatttttatttgtaatcagtgagcaggctttaacttctgtcgttattcatttgataggaaggggaaaaacctgacagaatcattagttcaaa

SEQ ID NO: 30941 - DNA, 779 bp, Medicago truncatula
  Intron number 1 from transcript Medtr5g028110.1 (locus Med tr5g028110) derived from phytozome v7.0 (chr-ID MtChr5; po s 11554607 to 11555385 reverse strand)
agatttaaagatcagattcactttcattctataaggtacactctcaaacactttctctcactacaaagttgaaagtctttttttttttttttttttttttctttcaaaaatgttatctttttctttggtctcttattcttagctgaaaattccaacattttggtatgtttctaaattaattttcttaggatggtattaattaaacaaagtagttggactcttgagtttttcaacaattaaaagaactattacttgcaatgactattcttgttttgttaatactataattcaaaaggttgaaaacattgattagtttgtttgttttcctttgtttttgtctgtttttgactgtagctatttcacatctttatcagtcttatgttgtttttttttgtctcaagttatgtttagattagataccttgatttgaactttgcttatttagttaatttttatatgattttggtcttgcttatttttctttatatttatttaatttttcaatatatatgaagctattcaactatgaaggctttcaaatttcaatgtttgattgcggctgcttcatgaatcatgactgtgacttgttcttcataggtgtaatagccaaaacctaaaaccactttatatagtaacacaattcacctctttttccttaaatatttttaacattgatttgtttttagtgtatatatctctattctttcatatgttgaaatttatttagttacaatttttttggatattttagagggaacaaggtgtagtagtagctattg

SEQ ID NO: 30942 - DNA, 999 bp, Medicago truncatula
  Intron number 1 from transcript Medtr4g125740.1 (locus Med tr4g125740) derived from phytozome v7.0 (chr-ID MtChr4; po s 29722118 to 29723116 reverse strand)
agacttctcacagccagaaactaaacaaggtaagcaagccctttagtttatttgaaaaacatgttacctcggttcttaaatatagcatcttattgatatattttcatatgcgttaattgtttattttaaactctaactattggtaactaatgtttatatattaaatattttcaacagatattagtgatcaaaggtttttttaatagaaaaattttaaactaatggagctgcctttagagaaaaatgataaattgtcacaagataattatatttaatgtttgacatgaataaataaaattacttttaattgagggaacttgtgaatttatttttcattttgtttgtttcttattctctctaaacagatttaaaagacctctatttaaattttgattggggcctagaaatatattaggctgctctaatgactatattaaattgtcaaaatggtctctatatttaaccactttgaagatgaacatattttaaagcgcaaatcaacaccaccatatcaattcaagtggagttattagttcataagaattagtttcctatattttaacaatttactatcaatttgggtcatatatttaatcactttctatcaattaaccattacattactactgaatttggtcctcaactctaatatgattaaaatttgacggaatttgacactatatattcataatcaaattaacctatttaaaaacattttataaagtaagaatcaattttgatagtttactctaaatactataataaaaaaataaataattctctcctaaagagtaaatttataaaataatatttctaccaaattttctaatttgcttaatttagtaaattatatcttatatttaggacaaaaaaatatatatgatttttagtataatttgtggtgtaaagtaaagtaaattgtgcgtaaattggcttgaaatattttgacctgtttttcttaataccaaatactagttgatactatcacaaacatcaaga

SEQ ID NO: 30943 - DNA, 898 bp, Medicago truncatula
  Intron number 1 from transcript Medtr5g025440.1 (locus Med tr5g025440) derived from phytozome v7.0 (chr-ID MtChr5; po s 10163006 to 10163903)
ctcattatttctcccattgctttcttcaaagaaaggtaagcaagctatcttccattacttactctttcttggacggtaaccattatttacttatttacttatttaactaatatggatattatcgtggtataatgactggttcggtatatcgacatgtgagtgtcgtgtatattgtctgtctaagaattgttaacaatatagagaatcaaatagaaaagagaacaaaggaggctaaggtttcaataaaatacaattagcatgacttattctagtaagagttacaagataatatagagtaatacatgatggattaaactttttttaataatgataaatgttagtatgttaattattatgttagatttttctccttgtcagaacttgaactttggacctccagctccctaccctttaactccaaccgattgagctacccaaccccccaccaaatggaccagactgagatataacctcaaaatatcctaacatagaaaatcatatatgcatgtattaaactatccggtggaaagacccgcttctttgtatgggtgtccatgtgtaattatttgctatttttctgatggtgccttctgtatattggcaccattgactttgtaactgtttttggtgttctctttcagcacgtcttatgcgggaagaattactgttgttagtaatgcatttcattttggcttgttaaaaaaaaaaactatctatgctacaactgttccataaaaaatcacatctaatatgagatcatttaacaccaaattcatcttaatggtttgaccccatgttttgtactgctgtacacttttattttgagatagaaagtttcttaattatatacaatgtgactatagacagacaagaccacccattactaagcagctattca

SEQ ID NO: 30944 - DNA, 1006 bp, Medicago truncatula
  Intron number 3 from transcript Medtr5g077940.1 (locus Med tr5g077940) derived from phytozome v7.0 (chr-ID MtChr5; po s 28820466 to 28821471 reverse strand)
accatctctcgtatcctctgtgcatatgcttcaatacacatcttaatactttctattttgttttgttttttgtgaatatataaggatcggcgtaaatgtaaaaggatattttgtgtggtcattactagacaatattgaatggggtgaaggggtacacagtgaggtttgggaatgaacttcgtagattacaacaataacttgaaaagatatcaaaagctctcagcacaatggttcaagaattttttgaagagactttagacgtcctaatatttgttatgacaaataaagtaacgaaacttgccagatatgattgttccttctcacaagaaattatgtgattctataaatcatggtttttttttttgtgtatatatggtcttttctcttattatgtttcaaccataaccttatcacacaccctttacaacctttaccatgaacaaactgacatttagatgttataagaatttttgcatgtgaaaaacaagtgatttcacttatctggatgggataaaaacaaaatctggatgggataaaaacaaaaaatcaaaacccctgtgaatagctttagtacaccacaattctcccaagaggactcgaacaacaaaatgctttcagctaggtaacctgattgtgttgaatctatatagtattaaaatatgatagaatagttaatatatgtgggtctcttataaatgaccagacctaaatatatgtgggagccctataaatgactttgcctaatgaattatttggcaagtgtaagtatgtgggtttcctaggtgtgttctctagccactcatgacctattctatcatcgttatttttttaaatcatatttttgttgttgatatatgcgctggtaaatatttgggtgcaattgttgatactgaatggtagttgacgtgcgtttgattttggcaaaggatgcatatgcggtttgttgaaaacgaataccaattgatatgtaggtacacgataaatcggttcgtgtgttcacgtgttg

SEQ ID NO: 30945 - DNA, 653 bp, Medicago truncatula
  Intron number 1 from transcript Medtr7g010420.1 (locus Med tr7g010420) derived from phytozome v7.0 (chr-ID MtChr7; po s 2251825 to 2252477)
ggatttaccaggtgaatttaatgtttttcattgggaaatattagttgttattatataatattatagggttaataatgctttatcccctggaatatagaccattttcgggtttcaaattacctccctaggtcatctaactgtacaaaatcaatgatatggcagggggtaaaccgaaatttgctaaaattacaagggaataaactgaaccaaagaagacgatgaacaacgtcgtactaagacgactaaatcataaaaacataccaaagaagacttaaatcatgtggaaatcacttatttaaccaaaaaaagaaagaaaaacaatttggagtggtgatttcggaacaaaattaaacctaaaccacccttcatttgtaaggagaaaagggagtgtttaaattagagctttgatatattgtcgttatctgactttgatggttatatgttttcacttaattactatgtaccagtgacacatcataatgtgccaggtatctgcacaaacatgacactaataaacgtggttaaatttaattattttatttttttaaaagtgattatgagtgtcaattttgtcaatgtcatgtctaacgtatgtatgtttttcaacgtttcataacataattatgctctcttattttttggtttattcagag

SEQ ID NO: 30946 - DNA, 690 bp, Medicago truncatula
  Intron number 1 from transcript Medtr7g084870.1 (locus Med tr7g084870) derived from phytozome v7.0 (chr-ID MtChr7; po s 18406144 to 18406833 reverse strand)
gggtggccttgacattacgtcagatgcttgaaattttttaggttaaaaattcatgtttgtgtttctatggtttaatttagtgatcatattctgtacttttatttttatcatatgtctatgtataatacttgttgttgccattctgttataaatttagaaaatacaacacatacttttattgattgagttcaaatcctaaatttaacatttgcttttatatcaatactgcaaatttctctttattgaaatatgtacttataaataatgattgataagtaacatatgttccatggccttagatgtcatatttgtatatcacgggctaatttgtctggttattcacaagaatataattttctaaatatttgacgccttactgatttcttaaaaagaacctatacaaaaatgtatgtttgttagttcattttgacactgcttggtggcttgttgcacaaacgagcaaaagtcggcagtttatggcctctctcatattcatagagatagagatggaaatagatgtgcagatttgttagtgtgtcatagacactccctccatggagtattttggtggagtttgctcccttctttttgagtagagattttcttgttgatagattttctcttcttattttttgcttttcttaatcttcgcaagtttcggtttggatccagggccgtccctgagaattc

SEQ ID NO: 30947 - DNA, 580 bp, Medicago truncatula
  Intron number 4 from transcript Medtr4g140460.1 (locus Med tr4g140460) derived from phytozome v7.0 (chr-ID MtChr4; po s 34436922 to 34437501)
gtcctgaacctgcaggctgtttctcaggtctcattcattattaattattactgtgttattatgtaatttgctactaaacatggataactactttaatcaaacctgaaactcaaaaatctagtagacacgtggatgaagaaatgaatcattaattgtgtatttggtcatatgcattgcgcgtatgtgccccggtatattttctaccactgtaaaaaaagtagctacagtgctatggaatttaaataaattgctattggttcgtgatacgctgtttagaacaaagtgatgtcaaatagtagctatgaaactctgtaacttaatagagtttgaacaaactgctatattccacgatctacacttgaaaacacttttttctacttacacagctgaatttgtttttgtgtgcttgtctgtgtgtttttctcaatggaaaggagtataagaccatggattttattaggctgggaagatattgaatgcaatcttattattatcagaagaagagaatcattatcattaaatatgttagattttgacagttttgtcgctgattcaataggtgactgcaatataccgggta

SEQ ID NO: 30948 - DNA, 770 bp, Medicago truncatula
  Intron number 1 from transcript Medtr5g010380.1 (locus Med tr5g010380) derived from phytozome v7.0 (chr-ID MtChr5; po s 2535484 to 2536253 reverse strand)
tattggagttctgcaatcgcaagaatttaagcaaggtttggctggtgtcctcgataatgattcttttttttcaaatgattaatgttgagggaggaaatttgtctctcgattgtaggtttcttaattgctcaagtagaatattaagcacggctactttgagttttttgacctactaaaccatgaaggtggattcccccccaccccacacacacacacacacctccactctatcgcatgaaagatctcactcttttcacgacaagcctcacatgttcatgttatttgcctttagatccgaattttacctttcatattattccaaatgcaaaatctatgaaagattcaatagaaacacccatgaagaaaggcagtggcaaacataatcacaagtccttgagaacatgcacaatgattcgcagaccttgataaaaaaaaattggatccaaatctcacattttttaagatttctaaaactttatcccaaaatcacaagacaataatcttaagagaaataaaaaaaggtaaatttatgtgattgctttaattgaatctaagatggatttatgtttggcaaagaaaatacaatcaaacttctaaactcttttgttagaagtcggaggtttaggagttgacatgctaaaggatttattagcacctgataccatataataaggtcgatatactcttgattttttctctgatagttttactttattgaaaaggatttactttgatgctttgttttttaggtttgttggaaaagtgataag

SEQ ID NO: 30949 - DNA, 338 bp, Medicago truncatula
  Intron number 1 from transcript Medtr4g159770.1 (locus Med tr4g159770) derived from phytozome v7.0 (chr-ID MtChr4; po s 40373597 to 40373934 reverse strand)
ccttctgcatccagttgcctgagagacctgttactgttagtttctttcattttccccctttcattttctctttaacattttaatttttattattatttgtattattgattctctggtgatttttagtgacattgtttgttttctaagatcaaatcaaccgattgaataacctaactgattttcttttagttaggttattcgaactattagatcttaattgaagagtattttggttaggttttctgaataattcgatgttaaaacttatttttgttttgttaaaataattattttttgaaattgaaaatgaagttgatttgttgttggtttcagacacc

SEQ ID NO: 30950 - DNA, 813 bp, Medicago truncatula; identical to SEQ ID NO: 30599
  Intron number 3 from transcript Medtr6g028160.1 (locus Med tr6g028160) derived from phytozome v7.0 (chr-ID MtChr6; po s 6314397 to 6315209)

SEQ ID NO: 30951 - DNA, 875 bp, Medicago truncatula
  Intron number 1 from transcript Medtr6g092890.1 (locus Med tr6g092890) derived from phytozome v7.0 (chr-ID MtChr6; po s 19704331 to 19705205)
actgtggacgctttgcgcgtaagtggtttctcaattaacgtgcatttcactgttatgatacgtttggcttcgatttttgtcagtttttagtgattttgattagaaacctttttgtcatattaattgtataatgaatttcttcctcgttcaagcatgctgttcttatggatactattatgatgctaaataatttggcttcgatttttgtcagtttttagtgattttgatcagaaacctttttgccatattaattgtatcatgaatttcttcctcgttcaagcatgctgttcttatggataatgttatgataccaaataatgtggcttcgatttttgtcagtttttagtgattttgattagaaacctttttgtcatattaatcgtatcatgaatttcttcctcgttcaagcatgctgttcttatgttttcgggttgtttgtagcggttagtaggagagtttacatccaggatttttctcttttttggggttgggttggttcagcgttgtgttgtgtttccagtcggcagtggcggtttctagcgtcctgttttgtgttttgggtctgtttatatatttatttgtctcaccaaatgatcttaactgtgttttaggatttcaagttttacaaaaaattgagatttacatttttttgtctagactatattgtggctgcttctcttttcagttgaattattacctaatcataaaccaattgcttacaactcaccagtcctggtaaattattgtcgtttatagcgagggctattaagttgtcgttcttttgcacttagaaaccttcttttatataatagtttgttattttatgtgttttctttacagtcaaagcataggagactagtcctacagggtgctgc

SEQ ID NO: 30952 - DNA, 1026 bp, Medicago truncatula
  Intron number 1 from transcript Medtr6g067160.1 (locus Med tr6g067160) derived from phytozome v7.0 (chr-ID MtChr6; po s 12381382 to 12382407)
agccattcaattcctttttcatcactaaacttggtaacattctcatcttttcttcttttttcgtttatgaccaatgtaaccaaaaactgttacacaaaagtttctatttcaggttcaaagcattcgttcatagaagaaaaagaaagaatatcgtcgtaaatttagcatatatattcataatgtagtttctgtgttcttcattttgtttgtgtttaggtttcttgttgtttatgttcatattctgcatgcatttggctacagttttttttttaattttctttttacattgttttgaaacgtgtgaaattttgatgatgcttagttatgaatgaatgaatttttgggtttaattttaattttctctgagtttggttatttttattagttttttcattggattaggaaaaatggtcttgcaccggttattaggtagcaccgacacttttagtggaaggcatgtccagacaccccaacgcgacacatgtgatcacgttcattgaaataattaattttttttaccggtgttagtatcatgtcaggtgtcgatgtctatgtcagtgcttcatagatcattacaaatttcaaatttcaacaaacaaaggttggtcttgttggaaaaggtttggttaatatctcacaaggatatgggttttaatctcaattccgttttgacttgtgaggactttgttgctgtgaaatatataaattcttttgtaagtgttctttgaatctcggagcttttctgtcaccctgatgcgctatcaggaccaactcaccttaactaggagttatgttgaattttgaatgaattgtttttgttggagttggtttttgcttgtgagtactgtgtctttgtttagtcgaatgctttaattctatcgattttttacttcaacaaaaaatggtcctttgattgagttattactatatatgagatgcatcaagttctattcactttctttgattgttttaacgaggaatgttctaaaagaattttatttttaagttgataaaggtgctccaaaa

SEQ ID NO: 30953 - DNA, 819 bp, Medicago truncatula
  Intron number 1 from transcript Medtr5g097950.1 (locus Med tr5g097950) derived from phytozome v7.0 (chr-ID MtChr5; po s 39039901 to 39040719 reverse strand)
gtgtgcttgctgctcaggtgaaaaaagatttattttattaacaaaacattttgttctcaagggaatattccaattggcaaagaattactataagcatgtattgttataataatcattatcagggccgtcccaataaaaatggaggctcggctctcaaataaaaataggcccctagtcaaaataaaaatacaatttttttaaaagagcaaaaaaaattataatgttttttattttatatttttaaaaaataattataatgtttgttgttagagcttattgtaataagaggagatagtatttaggatatataaacctcaaacccatcaaaattaggcaaaaaaagaccctataatgctggaaaaataaataaatgataaaaacacaaaaatcaacacccacaggaattgaatcggagtacataagttcaatatctccaaaatttatcactggggcgcgccttcaattttgttaagattacaatgttatctgtatatatattataatttcagtgcattatatatatatatataaaaaaaattgggccccaaaatttggggaggcccagctcagtagagctgtttgcacctccccagggatggccctgatcattatcataattagtaccagcgtttagacggacattcattacccgtcagtcttatctttttattgcaccgatgtggataaattacaaacaatagattttattaaattttaatttttaacgacttggttggtctagtggtgtaggtttgggaccgctttgtatatagtatagattataagtgttttaatcgtcattgttactatgcagacaac

SEQ ID NO: 30954 - DNA, 490 bp, Medicago truncatula
  Intron number 2 from transcript Medtr5g077570.1 (locus Med tr5g077570) derived from phytozome v7.0 (chr-ID MtChr5; po s 28596112 to 28596601)
aggacaaagacatgtgtttttttgaccctcccatacactttcgtaatgtgaactccaacgatacctaatatgttgaagatgagtttgtacactctatgtcccgaaaccaatcttatgttgttccacaccctgacaacttacaagaggggatgtaatttcctacgaaagaaacggcaatgcggtgcataaaggaatatcatatgagtcaagccccagacttgcgattatgggtcacaccccaacccgacttgggtttgatttcagatagacacgagtcaatcaaaagtgttgttaggcgtctagacagtaattggcaccatgtcttctgcattcgacacataactcaactttttgaggactttcaagaacacagagatgaagaaaaaagtaagaaatatgggttagtatttttttttatatacaataatgcatatatattttacctttttaagtcctaaacaacattaattttttaccttcaggatactca

SEQ ID NO: 30955 - DNA, 316 bp, Medicago truncatula
  Intron number 3 from transcript Medtr4g156880.1 (locus Med tr4g156880) derived from phytozome v7.0 (chr-ID MtChr4; po s 38955531 to 38955846 reverse strand)
cttccagttccagttccagttccagtacgcattctttacctattcttgtttttatcaaaagtttaatcaatttattcgtagtttactctaacatctaatatgaatcaactattgatgcatgtcatatcattaaagtgacatgtagtggagtgatttgaagagatgattatactagatgacagtgtaaaatttgtttttggaaataaagttcaatttatatttttgcaacttgtcataacaatttttttctctctcactctttctctttgtttatttttttctttcagaggcggtgccaaaaacaattcttgaacat

SEQ ID NO: 30956 - DNA, 377 bp, Medicago truncatula
  Intron number 2 from transcript Medtr4g079090.1 (locus Med tr4g079090) derived from phytozome v7.0 (chr-ID MtChr4; po s 15661986 to 15662362 reverse strand)
gaatttcaaggctgaaagccaaaatactatccattgtgagtcatgtgaaaaatcttacacatatgcctgattttgaatttaatctactacataatttgttaaaattagaaggtaagtcttggcacaactgttaggttgctgccatgttacctggtggtcacatattcttgtcatggaaagagtcttctgccatgagggttaaggctgggtttttgaccttccctatacttcatgatggtgggaattatgtgcagcctgattctttttttctttttctttccccctttttccaaatgatgcatattatgaatgaataacattgtcactacttactttttgcagctgctgagtttgtgtgaagcagaaaacatttcgtt

SEQ ID NO: 30957 - DNA, 324 bp, Medicago truncatula
  Intron number 2 from transcript Medtr7g020850.1 (locus Med tr7g020850) derived from phytozome v7.0 (chr-ID MtChr7; po s 4952553 to 4952876)
cattggcatcacagtcagcatcatcacaaacatctgtatgtatttcttatttttatgatctgaaaatatttcttagaattctattatggaagatagtaattgaggacctttcatattttttctttgggattcctttattgttgtcgaatgctcttgtcagatatttccttgcataacgtttagtttaccccattcacttatactatgagggttatggttattgctattagtaaattcacaattttcataattagttggtcattgttttaacaaagagatgttttgatttgttcatttgtgtttctctgccagcctaaggattaa

SEQ ID NO: 30958 - DNA, 404 bp, Medicago truncatula
  Intron number 1 from transcript Medtr7g005310.1 (locus Med tr7g005310) derived from phytozome v7.0 (chr-ID MtChr7; po s 318115 to 318518 reverse strand)
agttcatcttcgcgatcgatttaggtatgtttattgaacctttcttcttcgcgattatttcttggttattcgtatgaaccctaatcgttttgttaattgaattatcctgcttcgtcatttcttaatttgatttttctattttgtgattgtgctacttgtagctgggtgggtgggtgtatgcgttaaaatgattcatttgtatagcttcttaccgccggaatataatgaatactgtaatagcagtaacgaaagcaagtttagtttgttaaaagtttgttcctctttgttttctcatgaagtgtttactatgaactctacctagtgcagtcagtcttgttaaatagcatctataacaagtattttaatctttgttatttgatgcagatcacttttttcaagctaaa

SEQ ID NO: 30959 - DNA, 657 bp, Medicago truncatula
  Intron number 2 from transcript Medtr5g078420.1 (locus Med tr5g078420) derived from phytozome v7.0 (chr-ID MtChr5; po s 29071914 to 29072570)
aaagaggtaagtggagaaaaatattcatcatctatgaacataaaagaaatgcaacagcacattattttcatcacattctttatgattgattcacttttctactcgggttatttaacatcttgcggcttcatttcatgctcgagtgtttaaatcgacaagaacaaacaacgtaaaaacagtggattaatagtttcatgagcataatttagttggtaagaacaatgcattgcaatattcaaggattagggttcgaacccccgattctccacttattcacaagatagaagtagtggattcattgtgcatgcaccaagctcatcacaccaagcatgaaatacgggcacgtgcatccgagacgcaaataatttggtccaacaaatgtaagacaaacttcatgaaagtgcaagagaatctgatttgctagctgggcttgattcactattctttggttaatgttgtttgagttcttgaccatcacttgagttgcactagcatggctggtttattggtatcaaggcttgaattgtagggtgttctctcttctttgattatcttctatcttctttaatcatcttttgcatattcatctgatttgtttttaacttaatttttttttttttagaaaaaaccaacacaattcaatcatctcctgttttc

SEQ ID NO: 30960 - DNA, 973 bp, Medicago truncatula
  Intron number 2 from transcript Medtr5g022600.1 (locus Med tr5g022600) derived from phytozome v7.0 (chr-ID MtChr5; po s 8836787 to 8837759)
ttgatccgcaggtatattaattgttagtttatttactgagttgcagagtttgatgcttacatcttgtggttctcttagagtttttagtaaatttttttaagaaaatatgctacttatcatttgttgctaaataaataagcaatcgccgtttagacagacacgaagaagtttccgtaggacaaaataaatgtttaattttttaccaaatactccttttgtgggatccctccctggatccacactaagcctcaactttcgccatcctcttccgtacctttaaaatggagcatcttatggtctctcatctttttgacccgattttgaagacttggcgcaataatcttgtgagaagcctcttcaaccccagtgatgcagattttattagagatattccacttcaagcgttgggtaagggagcaggtccacttcgagtctgacaacaaagtgttatggaggctcttataaaccctttcactatgatttctgaatttggatcaattatcagaaagtgtcaaactattttatcatctcccacatcttttgagataaattttgtatgtaggcaagcaaatagggtcgctcacaatcttgctagggtgtcctatttacatactagggcacataattcttatgttgctcctacttgaattgaacttttaattgccgaagaaatgcaataacgtttccttgcctaaaaagacattcacaagcaatgatcttatttattcctatggtagttattctgcagagtgggaaaagaattaattaaataaaatcctcaatttcatcgattacattggtttctttccctcttctcgtttttgccttcatcaaaaacttcttctttgtttgtgattgattgctttgagatgtctggatttctaactctcattggcatggtttatgatttggtttataaatttattgttataatctaaaagtttttatctttgttatccttaggtccatcctt

SEQ ID NO: 30961 - DNA, 1020 bp, Medicago truncatula
  Intron number 2 from transcript Medtr5g013950.1 (locus Med tr5g013950) derived from phytozome v7.0 (chr-ID MtChr5; po s 4309048 to 4310067)
ttaaagcaggttttcttggatcagtgaaacttaaggttggtggggcattagcttctttcttagaaatttaggagtataatgtattgaatctggttatatgcagcggaatgatctagattcctttgtttcttcttttgactggttatacttatggatatataatgtttattaggtgtgagcaactaatctggaccatttaatcttacatcatatatgattgctcaatatttattttacttgaatctaatcttgattcatgaccttccatgttacattgaatggtcgaacttagttccttcacctttgaaattcccacttcattagctccatacacacacatttgaagtagcgctttttaagtggtctattttcaactattttctcggtatagtttttttgccagctttcttctcccaatcagtgtaactaaattttggtagaaaactaactattttattttcattttttataatttttattagcttatcttttttggttttacgtttcatagtcaatcatccattttgagtgataacatgctaagcaagctttggcagcaacgtggacgtcagataacttgtaattttttaataacgactttttttgttctattattataaacaacaatgctatatgtaggagccagtttctatcgtctatgactatacttctattatctgttggttggaatacagaaattgcagacctgtgggggttgttatggggtgtggtagaagttcactatgaggataattccttgttcttttttattttcgtttaaatctcgggcttataatatttcactaactgttattataagctgagttcatgataggagtcaatgtttcctggggaacataattatgcatcatctgagagtgaagcaaatacccatacaaatatctcaagtcatacatatatatttctaattgttcactcatcgagcaaactatttaagtagcatattcctttctctataagtggtgttcatatttgatgtttgtattttatcaaggttcc

SEQ ID NO: 30962 - DNA, 984 bp, Medicago truncatula; identical to SEQ ID NO: 30712
  Intron number 2 from transcript Medtr4g097360.1 (locus Med tr4g097360) derived from phytozome v7.0 (chr-ID MtChr4; po s 20815102 to 20816085)

SEQ ID NO: 30963 - DNA, 889 bp, Medicago truncatula
  Intron number 2 from transcript Medtr4g134900.1 (locus Med tr4g134900) derived from phytozome v7.0 (chr-ID MtChr4; po s 32619127 to 32620015)
atgtaagccatttcctaacttcaattcttttaactactacaattgattgattgatgaaaatgaaattatttgatgtactctatgcaaatctctacttaggaaatttttcttatttcccttttattgtgtttggatcaatatttttacaatcggaccgaacgagtcgaacgaaccagtcagttcaactggttgaattggaaactggggtatgtttaacattaacatgttgttacggtaacctactagtttgtctattggtttaatcatggtggtataacattctagttgaatcaggtacaatagtggttgatcagttttaattatctgtctcaaattaagtgtttctctaatatctgaagaagtaattaataatgttgattttaatgttaaaatgtgtttcatttaccaaaacacccttattagttatactagtagttagtaacataattatatgattgaaatataataaataagactatattagtgaaaaccaataataaatgttgtattgacattataaaatagacaaattatttgcgacaaagaaaactagtagcaaggaggacacttcaaatgagaccaagagagtattgttgtgtctcaaataccaataactataaatagttaagtatatgattgaaaaaagaaaataatttgatcaaatgcaacaaaatttattgtgagtagctactttgatttgattttgattgatgatactggtgaattgttttttataagatgcaaaaggtaaagtttcttattttctttttatcatgtttggacttttttttttgtcttgtgtactggaatttgatggcagtgaaatgaatttgcctcaaacttaccaagatagaggattgatattgcattattggcttattgttgcagg

SEQ ID NO: 30964 - DNA, 735 bp, Medicago truncatula
  Intron number 1 from transcript Medtr5g072730.1 (locus Med tr5g072730) derived from phytozome v7.0 (chr-ID MtChr5; po s 25972150 to 25972884 reverse strand)
ccagcaaaaacttcataggagagaatccatacccggtttgtgatatgtttttgtttaaaaaaaattaaattgtctaaattattcattatttataaccaactaaaaaagtgtatatattttttaatcaaaagtaaatgagggtaagcttactaacttatttcttcatgtttttttttcctagtaagttcacagctttgtgtgtgtgtaaaaattataaactgcaacatatactcaatataacatttaccaatatcgaaatgcagaaagtcctgtttgttagactatatgctagagcacatgattcctagttgcagggagaatgtccctcttggacaagaaaaaacacttccagataagtttcatgcccaacactgctcttaggtattttctgagacatatatacgtaattcaacatatctataaagaaattataatccatccatcgtgtatcaattaagtacttatacataattgatatcaaatattgcattagtttgacaaagaagacaaaggagattagaagaatcctaatcgctgtctaacctagaaggtgacaaacctagaaaatatgtgtcttaatactttcatcaaacctagaaggtgacatacctagagaagatgtctgaaattagaaataggtcggaatcctattttgaaaatttcaaagtaacgttatccttttatccttggtatgatagaggacatagggcttaggcctaaggatttcattaggta

SEQ ID NO: 30965 - DNA, 958 bp, Medicago truncatula
  Intron number 1 from transcript Medtr4g142330.1 (locus Med tr4g142330) derived from phytozome v7.0 (chr-ID MtChr4; po s 35389824 to 35390781 reverse strand)
cactcggggtttttcggcccaagctcatctgggccataaaaaatttgggccggcccgttagcccatatttcattttatttttttaaaacattatcaactaatttaaaatttattaacaaaaaaatatttaaataaataaatttaataaatatggatgaatttagcttacagttttaaaatttataaattattaatttgatttaattgaaagaataatctagagtttaattattattcaatgttaatataaaattatttatattttaagtccatccaatcatattttagcaaaaaaataatggtgagtaactaatacataagaaaatacataaaaacgggccaggccgggctctagaattcacggcccaatcataaacgggttgggcgggctgacccatttctatagtcgggcctctcgggtccgggctgggccggcccatttgacacctctaaccacaccccatcaatagaaaattactaaaatgcccctcctaggagcaactctcataatacaatccaaactggttaggattgaatttagttgttttccaaatagtgatgcaatatgtttcctaacacaaaatatgcacatgaaataaaaaaataatgcaatatgtatttttaatttgtgcgtaaaaaaactcaaaacatgtttgtgcataaaaaaagcagacattgactaagtttataaattcagcaattggcctaacctgagacagtttgcaaaaatcgttgtacgaagtacgttgagaagaagtcgaactctgacttaagttctaactgaagctttgactctgagcttgagaagtgttaaggtcacgacaacaattcaagaaacatggtcaaaaaacaatcaaatcggattgtgaaataataagttactctaacactgtattgtgaaatcataatgcaaacttactaagtcttaaacttcttaacaaccggatgatgtaggttg

SEQ ID NO: 30966 - DNA, 893 bp, Medicago truncatula
  Intron number 1 from transcript Medtr4g073400.1 (locus Med tr4g073400) derived from phytozome v7.0 (chr-ID MtChr4; po s 14518376 to 14519268 reverse strand)
aagaagagggtttgttgttttgtgttttttatttatttttctatttttgtttttggtcaattttatttttctaatataatatttttttttatattttaaataaatataaatcatagcaatcactgatagctatattcataaactcctacatcactaataagtgattgaaaagtccctgttattccccacctctacattatcattgattttgattgttctctttactttcatgttcataatttttttatatgtcttgaaaaaacataactttttaggggtaattgtgtgagagtggctatgttaaaaaaatttaataggtcatagtcctttttttcttcttcttttttttccaacttagtagtaatatttgcatgacaattataaaaatgtcttcattatacacagtagtatttctgacgcacgatatcttatcttgagcatgatagaattaaggaatttatctcctcatcctctattttcttagatgatctaatctttcatctaaaatattttatagaatcatactttcctaaaatgatttcacacatttcttgttcacaataaagctatcaattccattagcttcaccatacaagtatcaaattgtttgaactatccatgaactttcaatcatgacttctcacaaaatcctcacaaattacttcgattagattctacgtaaattatgccaatccacgcatgaaatagttggtaaaaaatgttgcaaataatcattttcggctgaaaaaataacaattcattctttaaggagaaagatgcaatgattttttccaaccaatttcattatcaaaactcaaaagcaactttcaaaccctatcactaaatatttgagaaaaggtcacaatattggagaaaaacaaaaggatccttac

SEQ ID NO: 30967 - DNA, 967 bp, Medicago truncatula
  Intron number 3 from transcript Medtr5g041720.1 (locus Med tr5g041720) derived from phytozome v7.0 (chr-ID MtChr5; po s 17926281 to 17927247)
ttgaagcttcaagcattcgttccgagtcgacaaatgtaacgccccgatttttaatattaattaattagtattatttttatataatattagtaatattagtatcattagagaaattgtctattgggtgtttttagtaaaaattgttggattgtggcctttgagcaaatagatgggttagttagttgtggaaaaataggagattatgagaaattaaggagaaagtgacatttttagcaaataggagagcataaatgcgtattagtaaaatagagatttaagtaggtaagctaagtagtgtcttaattaagtaaacagaaggaggtgaaaaatagtagagctgaatagttacaatagaattactaactaatctaagggtgtgcagagagtaagcctgttaaaaattttaggtgagaaacaaactcaaatggtagttataaatagaggagagtattagagaactagggttacaacaaacgagaaaacgatagcaaagcaaaggaaacaagggtttagaagaaaaaggcaaaggaggcaaagagagaagagtttaaggagtaattcaaccgtaggaattcatcaattcggaaaactagaggtaaggggggagtctctattcaccataaggattgtatgatcatatgggtagtgaaggcttttgtttccattgtttttccatgatcttttaaattcatgctctaattaatttgttgctgcaattatatatattttttatttttgttctgagttgctgtgattacatgttgaatccgtaaataatttctgtgtttcgatcacatggtattctgattggaatttgattaaaaaggattttcgacttcttattttaataattataattatgtgatgagaatatgtagcaccattgtcttttgaatcgttatttgtgttttaatttataaaatatttatcaatcttagttgttcgtggtcagaaggttgagcataga

SEQ ID NO: 30968 - DNA, 978 bp, Medicago truncatula
  Intron number 1 from transcript Medtr4g109680.2 (locus Med tr4g109680) derived from phytozome v7.0 (chr-ID MtChr4; po s 24617383 to 24618360 reverse strand)
atatcagagaaacggtattattattatttttttattttacgttttttttatatagtttttttttttttttaatcatgaaaagatgttatttttacttgagcattgataaatttcatatgccgtgcttcaattttatgtaatgatgataaaatttaaaggtgcttttttgactcaaaagtatttattttttttatttttttttatgaaacccctttttgttttttgtgaaattgtaaatctttttagtcatggaagattgtaatttggtgaaaaaaattattatttttttatttggggtgtgtgtatgttattgtatccccattggaatgaatatttaaaattatgtttgatagtcccttaggcctagatcaattgacaatgctgagattgttaggcttgaaattttttgtggttacatggattcgaagaacctgggatctccccctttgtgtgtatgagttttcagggggcgcttgtcactctgtctgattaaaaaaagttatgtttggttggtttaactgttgaaggatctttttttttttttttttgtgaaggaactgttgaaggatcttgaattgcgtgtactatgtatggttttaattgtcattatgttgtgatccttgaaattacaaagaactacgatcgagtgcagctgatctggcctcaatcacagctgcattgcggtcgtagagacaattattgatgtagttgtccaaattgatgttgagttgttttttgaaactggcaaaccatggttctatgtctcttttctttttgatcctttgtgttttaagttttttagctaaaagttaggttttggtgaaatagattcatgcttcagtatatcaaatctaattcttcatggatattagcttgcttgcagatggtctgtatttttattttacttagctgccgcataaatggactccgtggcttattagtttcattaatttgatgttggctaggttcaaaactgtt

SEQ ID NO: 30969 - DNA, 1011 bp, Medicago truncatula
  Intron number 1 from transcript Medtr6g022800.1 (locus Med tr6g022800) derived from phytozome v7.0 (chr-ID MtChr6; po s 5160858 to 5161868 reverse strand)
tagtggtggtagttctctgggcgttgttggtgttggtggctctctaggtgatgctaattatggttctcacgggactggacttgagactaacgataccagacttgtttttgattgggatgattctgatactgaatttttcgatccttctccaactcactacaaccacgatcgagagatgatttggttttttttttttttttttttttggggggggggagattattatattaggcgcattcatccttttatatttgtactaattagatccacttgctatggtcttatcatttaccattagaactcagacaaagttttgcttctaagatatatattcccttttattctcaaaaaaataaaaaattattcttattagattcaacaatcacacagttatatatattgataacattcaaccttaaaagattgagttaaaattcaaatttcgtgtcatttccaagataataacaacttagtaaagctctaaagacttcatcattcactttctactattaatgaatatttatttttcttctattttaattttactattttacctctcttttacttctattattttttaattaatagtgtgacaattattacatgtaagtgatgtatttcacatggttattaattttatgcaatttttgttctgaatattcaaataatactacaaaaatatcaaaacaataaacctttgttcttaattgaaagtacaaccaatataaaaaacattattatcaaaacccctaaataaagaaccaaaacccctaaatactaattctagaagtttcaatttaaagtcttgagctttgatttatctttctgtgttggagtagcagtgttctaacactcttagcaagattattagattctacactttgctagatgaggtacatcatttccataactaatagaggataaaagattcattgtggtatatgattttataattcaccacaatttattcttgtaggtactatcagttcttggattgtttgtttgcactga

SEQ ID NO: 30970 - DNA, 507 bp, Medicago truncatula
  Intron number 5 from transcript Medtr4g047360.1 (locus Med tr4g047360) derived from phytozome v7.0 (chr-ID MtChr4; po s 11002987 to 11003493 reverse strand)
ctttgagggattctgtggtccttgtactgtaccaactcccatacatgtctatctcttgttgatcaagacagattttcttttgcttttgctttttgcttttcacctactgtactgttcataaagtaagcatgtgcagagcttgaacattctgaccatcagaatgttccatctgtttcacttaggatgatttgtaagactaccatttgatgtaatcaaatcctaatagtgaaacaataatgaagagcagtgattttaacatctaggatgatattcccttgtggaatattcctagtatatcaatgttcatagtcttaaatgaacattgaataacctctttgacataatccttgtatatgcctttattgcttgattgatccatgcaaatgtactttcctggacatatacccatgtcacatgtgccttccattaattctttaatcatattggtttattatctttaaaattaatttagggattttgcctcaacatcctcctcatatatccggc

SEQ ID NO: 30971 - DNA, 807 bp, Medicago truncatula
  Intron number 4 from transcript Medtr4g047360.1 (locus Med tr4g047360) derived from phytozome v7.0 (chr-ID MtChr4; po s 11006219 to 11007025 reverse strand)
tttcttgaggtatttttcatacttttgtgatgtttttacatgttaaaaaatgataaaaatatatgtaattttttcttgttgatatgttctattttttatttattaaacttgtgaattttcttgctataattcgttcatgaagtcttgggatgatatgaatggttaatatgcaatttcatgttgaatatgctactgattgtgtgattgttttactgtttttatgtgatttgttaatttcttttgttacaagtaacgtgttatttttttacattttggttattgttgtttattttaccgttcgcctcgtaattctttgcttgttttcttaccattttacaccttgttttactaaccatttcatttcatgtttcatccatctcatgagcatcttgcctttttcatctcaatttctcatagtttaggcatttttacctttcaaattctatgttaaaatgtcatgtaatattttaggtagtttaagtttccttttaatttcttgcaagaccatagaatgtaaactagggccaatgtaacggacaatggactctctaatgatgtacatcgacacaagcaccgacacgcacacacgttgtatgtttaccgctttagatgtatgcttaggaagcgcgatacttaggaaaatatcaattttccaaaacaagcaaattccatcatttgaaattttttccaaataaaccttggagtcaaaactccattgcattttcttttattttcttaatcaaaacctcaatgaattctaacttctacttagacattttctctttaataattgaaccaactcttcac

SEQ ID NO: 30972 - DNA, 863 bp, Medicago truncatula
  Intron number 1 from transcript Medtr4g047360.1 (locus Med tr4g047360) derived from phytozome v7.0 (chr-ID MtChr4; po s 11014014 to 11014876 reverse strand)
aatttctgggcaacaatcaaggtatgggattttccacatacatcagaatgttccttccccagatttgccttgggaccggtgcaggaaagatctagtgggattctgcatcttcatgcccatgctttgagggattctgtggtccttgtactgtaccaactcctatacgtgtctatctcttgttgatcaagatagatttgcttttgctattgctttttgcatttcacctactgtactgttcataaagtaagcatgtgtagagcttgaacattctgaccatcagaatgttccatctgtttcacttaggatgatttgtaagactaccatttgatgtaatcaaatcctaatagtgaaacaataatgaagagcagtaattttaacatctaggatgatattcccttgtggaatattcctagtacatcaatgttcatagtcttaaatgaacattgaatagcctctttgacataatccttgtatatgcctttattgcttgattgatccatgcaaatgtactttcctggacatatacccatgtcacatgtgccttgcatgaccttgatcaaagttcttgagactcttggcttgtataagaacaaccttctgatctctgcttgaacattctgatcttcgagcaacattctgatctaactttctgacctcagtgttagatcatgaattcaaatgtcctttgatttcttgattcttggtatgatttaaacattgttcctgtcttattaaaacactcaagagcacaagttaaataccaaggaattaatcaaagtccattaattctttaatcatattggtttattatctttaaaattaatttagggattttgcctcaacatcctcctcatatatccggc

SEQ ID NO: 30973 - DNA, 450 bp, Medicago truncatula
  Intron number 1 from transcript Medtr4g026190.1 (locus Med tr4g026190) derived from phytozome v7.0 (chr-ID MtChr4; po s 6367270 to 6367719 reverse strand)
ccgtggcaggtatcccttcacaaagtgcctttggcggttgtcgaaaaatcagccatgtcgccatggccgtcaatactgctttatgtacacaaatattgctaatgatagcaacattggatcattatagtctcctaacttcttcagtagtttgttctccatgtgttggcttctagaatttgccacctatgagttaattttccataacagttcatgcaattttttctatttggtctttctatgattgaagatggccaaaatcctaaaaatattatagaaaatttttgattgcagagtttttagcatagaattcttattatactcttaaaaaggcaaatgtaaatgtaaatattttacgtatattgtacctgtattcttgcattagtttaataataaaaaatattgtgttcttttgcagtgcatcagttacttgggttaaaagggtctactttc

SEQ ID NO: 30974 - DNA, 873 bp, Medicago truncatula
  Intron number 2 from transcript Medtr4g042790.2 (locus Med tr4g042790) derived from phytozome v7.0 (chr-ID MtChr4; po s 10291007 to 10291879 reverse strand)
gaaagtttctgatttcaacagaaacactttaccattttctattgaaatggtgttaatggattctgaggtttttatttttcacttaccattttacattcaaattatgatgttttcttaaaactgttgtttttgaataagctaaatgttattagttttaattttataagctatcaaaaattaagttttgttttatgtttagtgctaatatttgttgagatatagttaaggattatgaggttcttctttttaattttacattttcactaattttgaaccttataagtaatgatttggttttacttatgttgttgatatataacattgtcactctaaaaaggtgtgttatatgttttgtgcttatattataaagatgatgattaaagttaaagaattagtaatttttataatgaatcagaaagctattgtattatgaagaatggtgaatgttagattatggttttaactatatcttgaaaactaattctaaatttttgaactttatataggggagtaggattcatgcctcaatcaaaaaaactctattgtataagtttcaatctgaaattcgcgaaggcaaagtttattcatttgaaaacatgggtgttgctgctaatggggggagctataagaccacccattatccatataagctgaacttccaatttggaacaaaatgtttgccattgtgtggtgcattagtgagtggttctgattttaagtttgttccaatttctgacatagtaggtggttcttatgattgtgactacttggttggtgagtatatatgcaaattttctaaagtttttgaagagtattgtctttatcttacattcttagcatttaattttttttttttattgtatgtcaaattag

SEQ ID NO: 30975 - DNA, 245 bp, Medicago truncatula
  Intron number 4 from transcript Medtr7g080730.1 (locus Med tr7g080730) derived from phytozome v7.0 (chr-ID MtChr7; po s 17247905 to 17248149 reverse strand)
tttcttcaagttcacaattatccatattggaatcggtaacgcagtcaaacttgattttcttttatttgatactttgacttggttacctttatatgaagagaaggaattattgaaatgtagcatgatatgtgattggcttaatttgattgaaatagaagaaaatttgaagttttgtatgtgtttcatcatgttttacctaggcttgaaccatatcatgttaatttgtttaacagggaatattggga

SEQ ID NO: 30976 - DNA, 833 bp, Medicago truncatula
  Intron number 2 from transcript Medtr5g080160.1 (locus Med tr5g080160) derived from phytozome v7.0 (chr-ID MtChr5; po s 29970001 to 29970833 reverse strand)
gagaaggtacaatcttcaatcattgatgttggtacttttggtgtgtatcttttcagttcctttggcttttaagttgattaagtcaactcaattatttttataatcacattattattcagccaaaactcccataaaggatatttggatgtttttttggctttaccaaatgaataaaatgatgacagaactcagaagcattgtatattctgttatttgttctttttgactttatataattattttgagccataattttccttctctgtcatgatgtctactatgattacttaattaacagataaatatttgaagattaattttagactaaataattttggttccttatctttattttagatttcaattttcttttggtatttttggtaatgaaattgttctttgttttacagagaggaccaccttggtatagcttttacaaaataatgagtagttttttttttggtagatagaagaaatggtaaagccatcgtaaactcacacacacaaagtggaggtgccggggttcgaatctcgatcatgatgtccggcctaacaatttcggcattttcaccggttgagctaggacttatgggacaataatggatagttttaaaatttaaaatggataaatttaatgtaacatttgtaaaataagggactattttaaaacaaaaaataaaaagggaacacattgttataattttgttatataagaaaccattggtagaaatcaagatcaatctctttggttcatgagcatctaagaatttctttcttatgttccttattttactgcaggaggcacatttgcattatactcacttctctgcaga

SEQ ID NO: 30977 - DNA, 289 bp, Medicago truncatula
  Intron number 1 from transcript Medtr7g089360.1 (locus Med tr7g089360) derived from phytozome v7.0 (chr-ID MtChr7; po s 19615994 to 19616282)
ctgtttcagttcaatgatcttcacttaaggtccttgttgttttgattctcttaacattgaaaaggagaaaatttgaatacattcttgataaaatgttgattcaatggttgaacgaaatttgaatatcgtttgatgcatattggttttttatttttcaatagttttcaagcaatctttggaatgatttaagtttaatcttgatttgagaaaatgtgaatatgtgttttttcttcttttcaatttgttgtatgcagcgagtttccctgtggtcgaatcacgaaaagaaaag

SEQ ID NO: 30978 - DNA, 806 bp, Medicago truncatula
  Intron number 1 from transcript Medtr5g024850.1 (locus Med tr5g024850) derived from phytozome v7.0 (chr-ID MtChr5; po s 9944609 to 9945414 reverse strand)
actttaggatcgcccttcaatctcaattcgcacaggtaatctctactaatttttaatttttttatttattgttaattcttttttcacttcgaatttcgcatcattgagttaaattaccatgcaaatcaatgttttgacctttttgaatttcaaaagcacgtttttttaaggttagtaaaccatggttgttctataagtagattactggctagggtttagtattaatagcaaggtttcattgtctttttattttatttttatttattgttgcaaaagttgctgctcaatttaaaggaaaattttattggacaacggcaagaccagcgcgttgggtggtaaagaaccaacacgaatgtagttaagcgtagcagggatgaggatgttgctttgatgtgtggtaagactagacgggatagaattagaaatgagaacattagggagagcattggggtatcacctatagtagaaaagatggtagaaactagacttaagtggtttcggcatgtagagagaagacttgtggattctgtagtaaagagagtagatgaggggagtcaaatcaccagagatagggtaagacctagaaaaactataagagaaactagtaacaaggatctagagattaatgagttggagaaagacatggtttttgttaacacactatgacgtcgtctgattcatgtagctgaccctgcttattgtgataaggcttggttgttgttatgtttattttttatttttaccaatttttttcttgaatgttgaattaatataatgaagttggtgtaggaggttattgtgttttc

SEQ ID NO: 30979 - DNA, 407 bp, Medicago truncatula
  Intron number 2 from transcript Medtr5g100340.1 (locus Med tr5g100340) derived from phytozome v7.0 (chr-ID MtChr5; po s 40140665 to 40141071)
cttgtggtggctggtgttggttttcgtggtggctggtgttgatttttggtgaggattaatggtggtttttgtggtggttaatggtagttttgtgtggtgatggttatgtttattgtgggttttcttctatgagtttgttgttaatggggttttcaaatacttaggtggtgattttaccagtgcttaactgcgctcaactgcagaagagaagcaaagtgcagttatacgagtttttggtaggtttgatggttattttggacgggttttgcaacggtttggcacaagacttgtttttgctattgcttaggcgttcatactttgatttttggagatgactttttggttctggtgtttagtttttattggtttcaggggccctcggtggagggtgtttttggtttgtttgt

SEQ ID NO: 30980 - DNA, 658 bp, Medicago truncatula
  Intron number 2 from transcript Medtr7g005950.1 (locus Med tr7g005950) derived from phytozome v7.0 (chr-ID MtChr7; po s 762180 to 762837 reverse strand)
aagagtaagcactgcaatgcaatactcaattttgaattttgacttaactgtttatgatttatttgaatgctgatgaatcttagaccctgtttggataaacaacttaattaagtgcttatcacataagtgattatcatagaagtgtttctgtataaaccattattatgataaacggtaaaatcaaatcaaattgtcttatgtaaccataagctgttttaagaaacaacttatgacatgtagtacgtttgtttccataagctctcctaaaaagtgtcacaattcacaagtacttatggacttgtagtaagttattctactgttctatatatgctctaaccaatgtttttaaaaccaaatcaaaccggatggtttgactgaataaaccgtgagctggcattgtctacagttcggttatttaaattgttcaactgcggtttcattccggtttgagcggtttaaaggagttgaaccatgactcgcaggtcttctcggttcggtgcctgttttgatttttgaaacattggttctatcagattcaacatttatcattcatgtatttttattttatttttgacaaaatatcatgcatttctctgaccttggaaattttgaaaaacatgcagagattggcatagggctaattggttttggcatcttc

SEQ ID NO: 30981 - DNA, 746 bp, Medicago truncatula
  Intron number 1 from transcript Medtr4g032010.1 (locus Med tr4g032010) derived from phytozome v7.0 (chr-ID MtChr4; po s 7532822 to 7533567)
attgctttgttaatgtatgttctctctctctctattctttcttaccatcaaaattctatcttttcaatcagttatcttttttaagttacaatcttttcaattactataaaatttacgtttttctttttggtgtttaatcttattagaatatctacttcgattttttttttgacaaggaatatctactttcatgttgcttcaaattacaaaattgaatgtttttagtaagattgaaagcatgtagttttgtaatttgtagatatgagaagttggtacaagactaaaaacaaaattcaagattatagaacttatttttattataattctctgatcttcagagggaagggtttggtaatctatgaagcacggacaatcctcggattaggcgtgtgtcgggtccgacactgacacatataattacactaaattatgtgattttctcaagttttagatgtgtcggtgtgtcagtgtcagtgtgtgtctggtgtccgtatctgtatccatgcttcatagcgagtaatccaaactttgaccgagcatttttccaaagatttttttagttagaattcgaatttggatatttcgaaacaatttgtctttaactaagagtttaaaattcattaatcatttgagctcaattgtttacttggataattagagaactaaaaaatatatttaattatttttctattaaaaaacttatttttctttggttgaatgagttgttgaatttgtgaaggggtgtg

SEQ ID NO: 30982 - DNA, 739 bp, Medicago truncatula
  Intron number 1 from transcript Medtr4g031510.1 (locus Med tr4g031510) derived from phytozome v7.0 (chr-ID MtChr4; po s 7226276 to 7227014 reverse strand)
ccctataagtttagcacttctaccaactgtaataggtatgttttatatctcactccttaattatatatatataactcttttcatgcatcttcttgaactgttagttgaaaacttctaggattcaaacctaaaaacaaatataacccatacctaaaaaaaaatggtaaaatgaattgaaacaaaatgatgttgaagcagaaaatatatgtacaatggaatgaggaaaaaatatttatttcatatcatattctcaaattgaacatgtgtcctccaagctaagatgatgaccaaaattaagtgagacattgaaatgataattgaagggggtcaaatatgtgtgacttttgttttttgtataaatatatgtgttatcttaattagctattattataacagagtttttttttactaaaaggtatgaaaaaagagttgaagctttttataataagtggaaacaaattatgagcgacttatgtatttttggacagtcatcaaaatagaagtaatactatgaaaattaataaatgaaattataaataaactcaattttcatttgctgtgcaattttttttaatttcaaacatagtatctcttcatgagcatataaatagttctttaatttcttgctttcttattttaaattgaatatcatatataagttttttttttagagagaatatcatatataagttaatttgtttgctttctgtattgcagcatcaggttctaaagagtgtga

SEQ ID NO: 30983 - DNA, 928 bp, Medicago truncatula
  Intron number 2 from transcript Medtr5g006180.1 (locus Med tr5g006180) derived from phytozome v7.0 (chr-ID MtChr5; po s 592375 to 593302 reverse strand)
aaaggagctgtggtaatctcgagtttgactacaaggtaaatataacttgattattgtaagaattgttccattcataaatcaaactcgagttattttaaacaatttattttttgatggagttcattaatcactttaatctattgtcgaacactattattttttggctattattgcgaattttttttttttctgcccttatttaatttcaaaaatacaaaaataccctagttttgaaaaaattgcataaatgccctacttttcagaaataattggtaccttgcaacccccacttgcggggtaccttaaaaaaatttaaaaaatgaactaccccgcaagtgggacttgcggcctcttttttttttttttttttttttttaaactaaataactacacgcctatttttttttttttttttttaaaaattaataggttgctacccccacttgcggggtatgcttattttttttttaaatttttttaataccccgcaagccccacttgcgggtttgttttttgtttttttttttaaattttaaaataaaaaaaaataataaaaaaaaagaaggaaaaaaaataataaacatattaaatatcatgatatctacaattattataaatgcccggctgtcccacaccctcgtcttcgacgatttcttccgcgatttacttaagggtcatgttggtcttcgtcgttgttatctgcagctgattgtatttgactaccataacccaatgacaatgacacatcgtgttcccttgttggccatcccatatccagaaattgatcactagagttcaacgaagccggagaaaagtgagataataggtttgttggtgttggtgggtggttgtagttttggttggtgtacattgggtactgtgggttgctgtagggggggtaattggtgttggacggtccagcttggtt

SEQ ID NO: 30984 - DNA, 415 bp, Medicago truncatula
  Intron number 1 from transcript Medtr7g005200.1 (locus Med tr7g005200) derived from phytozome v7.0 (chr-ID MtChr7; po s 246516 to 246930 reverse strand)
ttctctcgattagttcatcttcgcgatcgatttaggtatgtttattgaacctttcttcttcgcgattatttcttggttattcgtatgaaccctaatcgttttgttaattgaattatcctgcttcgtcatttcttaatttgatttttctattttgtgattgtgctacttgtagctgggtgggtgggtgtatgcgttaaaatgattcatttgtatagcttcttaccgccggaatataatgaatactgtaatagcagtaacgaaagcaagtttagtttgttaaaagtttgttcctctttgttttctcatgaagtgtttactatgaactctacctagtgcagtcagtcttgttaaatagcatctataacaagtattttaatctttgttatttgatgcagatcacttttttcaagctaaa

SEQ ID NO: 30985 - DNA, 603 bp, Medicago truncatula; identical to SEQ ID NO: 30819
  Intron number 2 from transcript Medtr4g122420.1 (locus Med tr4g122420) derived from phytozome v7.0 (chr-ID MtChr4; po s 28936089 to 28936691)

SEQ ID NO: 30986 - DNA, 1061 bp, Medicago truncatula
  Intron number 1 from transcript Medtr5g025140.1 (locus Med tr5g025140) derived from phytozome v7.0 (chr-ID MtChr5; po s 10062932 to 10063992)
ctggtgcttctcgatcggctgcttctttgattcaggttatgatgtctgttttcattatatatgaacttttagaaacttatctatcaactgatattgcaacgtgtttggatcatgattatcaaaacgagattcattagaagaattgttttcttaatagtgaattgaattactatactatactatgtcgacaaaaaaaaaaagtggtcgactacactaaatttaggtagtggttcatagtagtgaacatgggttcaccataatggactaggatttgatgagattcatgtccaatgtagacaacactagagattcgtatcaattaagtttgattttatagttaatcaagattttactcgtgtgtatcataagattctgataaccatttgaatagtcaactgagcctgtttaatgtagttttagtgtataagaaagaaattgaaatttattgtcagtatgaatgtatgatgatatttaaaaagttcttgttaaggaaccattgagctgagtggtcttggtcccttgagtatcaaaccattcatcttcatgagtattgagtacagaatggattttaaaccgttttgcaaagatataaaaattgtttcactaatttacgtatttttttttttttttaaattccattagctactttcttctcaattaatttcagatattttaacatttggcgcacaggtttattgatttattatttttaatctcaagtctgattctgttttttcttatagttatagatataatagaacttggatgttatattcccttctgttttaacatatctaccaaacttcactgtagtcttcctagaatgattagatgaaagctaacatgaaatactctcctgtgtggttggcgtgcgtgaatatgtgaattaaaagtatatttttttctctctatttggtataaataactaacttctgtttctctacctcatttatatgcagtgtgaatattgcaaatttatctgctattaacatcaaactaaattttaagctgattttgttttcacaggcttctactaggagttgtttctttgccggtttcgc

SEQ ID NO: 30987 - DNA, 236 bp, Medicago truncatula
  Intron number 1 from transcript Medtr5g074010.2 (locus Med tr5g074010) derived from phytozome v7.0 (chr-ID MtChr5; po s 26669549 to 26669784)
gcacccactttggttgatcgttttcgtgatcattggtaactcatttctcatttcctccaaaaaaaaataattacatgtaattgacttttcttgccccttttgatttaatctgactttgcaattgatgaagatttaaagagttctttttagttttttttaacaatcaatgacaaagagttgaaaaaagacattctcttgcaggaagtcttggatccttggaacaatattcaccatac

SEQ ID NO: 30988 - DNA, 1014 bp, Medicago truncatula
  Intron number 2 from transcript Medtr5g099410.2 (locus Med tr5g099410) derived from phytozome v7.0 (chr-ID MtChr5; po s 39743480 to 39744493)
ctgcttccttgctatttatttctccagcaaatcaggtttgtattgtgtagttattaaaattattagaaatattccacaactcaagaattttactatttcatgtttcagatagtgtatacagattttaatcattttttatgattccaaaatcacatggacattagctagaggaaaattcaataattattgtagtttgtaaatattagtaaattagtgaataaacgtacttgaatatgtcaaacttgtcgccatagtccataaatgtattaaaattacaaaaacatctttgtatgcgtctttctctagtcggtttgatacccaaaggcgtcttctttttgtcattttggcccataaaactacaaacataagacacgctcaggaatgtttttgaagtttcaatacattcaaggattttaatgtatcgtctcacacatttagggtcaaaattacggtttactcttgtattattgggtgcccttacgtttttctgtggttttctttgctagatacctcctcagaaatgaattataagcaaattttacttcatctattttggaataaaattataagcaaattttacctcatctattttggaatgaattataagcaaatgttaactttttcaattaatcaatgtattagttatgaaggttaatttaggcaataatttttttttattgggttgcatagattaaatgtaatcaactacttttcttaacatatgtaattttattcatttttgcttatatttcattctaggggaagtagatattttgggtgtattcactctttaatatgaccatatggatgttcttacaaatgctggatgttgctatagataaagtttttgattgataaaaaatctagtaaatatgcgtctatatatatatatatatatatatatatatatatatatatatatatatatatgtgtgtgtgtatgagctgtttcaaattttgacgcctttttcgtcaacagtctatagcagcagatatatattctcaacaacaaaa

SEQ ID NO: 30989 - DNA, 787 bp, Medicago truncatula
  Intron number 1 from transcript Medtr4g095900.1 (locus Med tr4g095900) derived from phytozome v7.0 (chr-ID MtChr4; po s 20063153 to 20063939)
cattgggtgtcaacatagttttggtatgtatatgttaatgaatctaatcaagtttaatgtctagcttaagctttaatatattaacagtactttcatgactttgttgatgcaatgagatatcatattaagaaatgtgatgagtacaaccggagttcatatcccaaccgtttcaaaaggaaaccacaaattgagtattcttctatgtgattggatattcttttgtgaaaatctctatgatataattggattttgaattcaatttttaaactcataagtcataatcacattatcaaaataagataggatgagcaaatcgttttttgataaaatattaatgatattttgactattaagtttataataactaaagataataatccaatgaacttttctaaggatgacacctatataaatgccgtgtttctaaagtgttttcaaaacttttttattttctaattgagaaaataaacacacaaaaacgtgtaaggttattttacactgatacagatttctattaaactttttcttatttgttgaaatgatttaagtttataattttttccaatgaaaatatatattagtcacattcagtggttgttttattctgtacgtcttttctcttgatgacatatacaattttctttttttgaacaaaacaacaattttcttcccaataattgtagcctcataattattgttgtttggtatttattggtaggtcttaataattgatgttgattttttttttacagggtgatatatacgaccatcagagtttggttaaggt

SEQ ID NO: 30990 - DNA, 822 bp, Medicago truncatula
  Intron number 1 from transcript Medtr5g093690.1 (locus Med tr5g093690) derived from phytozome v7.0 (chr-ID MtChr5; po s 36871369 to 36872190 reverse strand)
cctgtgcaatctgagttttgtgtattgggcctttggtttgggctttgatcttttacgtttttgtttgttttcctgctatttgcaccatatttctttgctgtttgaacccctgcatgcttaaatttttctccaaaaatctccaaaaattatcacatgtttcttgatattttcttagtgtttttatgacatttttgaacatcaaggatctatgaaatttttgtataattaattcatagcattttaattctctttgaattatgtgttatggattcttcttcacacatttgtccttgatgtgagaatatgtaataaaagctacttgacgtgttaatatgagagatttgtgccaataatttcatgttgatttgctgttttgatttggtttatgagttcttgtttttatgaacaatatatccatattttgaaagatataaaatgccaagtttactctagaaaatatggcatgaaatcatgcttgcatgtttccaataattccatgctataacttgagataaagaaaactctttcaaaatttgttaaagcatgagaattagaggccaagaatgctttaggtttcatacctaagtttttagggtttaaatgtcattttgttaactttttgtgccatcttgcatgcttttatttcttagcacttgttatgattttttttttttcactaacaagcttatttccatgtttcatgcatctcatttagcattccctccaccttctttagcctagcatttatttttgcaagttttaattcattttagagatgtaatttgttatcattggtttgtagcttggcaaaggggccataga

SEQ ID NO: 30991 - DNA, 803 bp, Medicago truncatula
  Intron number 2 from transcript Medtr5g006520.1 (locus Med tr5g006520) derived from phytozome v7.0 (chr-ID MtChr5; po s 731889 to 732691 reverse strand)
gacaggtttgtcactttggtttcttttatgcacatttacaattaatcttatttccatggtgcatacaatttcttgattttggaacatggtatctttaatgtatcgtagtttaagtaaatctaattggtaactggtctaggctagtagttcaacacaatagttgtttcgccggttattgcatcttgtatcttttggaatcacgattgtaagaaacaaataaataaatattctgatattatatgttagaatatatgctgcacatcatgacaataacacaatgaatatgaatgacacactcatgttacaagcaattaatcctggatcatagttgcatgaatttaggacacatacaaaacgaagaagagaaaggaaaccactactttaagttggtttgattctcttaaatgccaatgataataggataagatcttcccctccttctttcccaattctagatggggtagatgcaatcacattgagatttctctcatgttattgccaagtgtcttcacattgagatttatagtgaagttttcttggctataaagaatcgtctttctttctatcctgtattaccttaacatcatgatgttaccgttgtcttactcctgattctagagctgtatgagcagtcagatttttgtaatattttttttattctactttagttacaacagattattattattccttacaccatatagttgatttcttttcctttgttgcgacttgtcttgcatgctgataatcattattcctttatggcagtaactgggagacttggtaaagcatttcaagtaaac

SEQ ID NO: 30992 - DNA, 488 bp, Medicago truncatula
  Intron number 1 from transcript Medtr5g006520.1 (locus Med tr5g006520) derived from phytozome v7.0 (chr-ID MtChr5; po s 732777 to 733264 reverse strand)
tgttcgatcttgaacaacttctcatttccaaaagggtacggaaatcatcatcatcatcatttatctataaatttaattaatacaaaaattgattccacttttgattctaatttcatgcaatttcgacataaatactttcacttttgttgaattgaatcactttcttatcgtatttgaggataatcatcgatgaatttgattaggggtcggtctggatcgacttatttgagaacttatgacattgttcataatcttttcataagttattcaagatagcctatgaaaacagtttatattttgtaggaaaacaattttactttattcttattgctgccatagaaaaagattatacataagcacgtatgccataaactgtttatccaaacagagcttatgtgccttcataattctttttaaaaaaactactctgtgtgtgtatgcgttcttaaagttctgcctctttattttctaggcgaaattgacacctg

SEQ ID NO: 30993 - DNA, 522 bp, Medicago truncatula
  Intron number 1 from transcript Medtr7g010540.1 (locus Med tr7g010540) derived from phytozome v7.0 (chr-ID MtChr7; po s 2305865 to 2306386 reverse strand)
gttaattactggttggagatagttcttcctttgaggttgttaattaatcaattttctttattaactggtctggaacatttttacatgatttcatgcatgaatataagggctcgaagaatactgcaattatgtagtttaggcatatttatcatgctgcctaagtgaattggttgatgcatatttttcattcaatattgaatttattttgggcattgatctatcacatgtcaatctgtttcagattgttatttggtttgatttgtaactaaagcttggtttgacctcttggttttttcaagcatgatgattggactatagttattcttcctttaagagtccatcctcatctatgatttgtgtatgtatggtgtttaaaagtcttgctctgttttgctaggctttttgttcttatgttatttatgcgtaaatgctttttatcacataaatttattttatttttggttttttgctgtgaggttttttgccttccttttgactttgtttacgattttcaactcaagg

SEQ ID NO: 30994 - DNA, 992 bp, Medicago truncatula
  Intron number 1 from transcript Medtr5g089870.1 (locus Med tr5g089870) derived from phytozome v7.0 (chr-ID MtChr5; po s 34968458 to 34969449 reverse strand)
agattccactgaagaattcgttgattcaccatttggtaaataccagtacaatttgtacgtatattaagaaaattaagtagtttgtttaattgcgttgattttggataaatagcttatttttagattatagcataaacacttgtcaaacgataaaataaaattaggtgtctggattggcttatttgagtttatctaaggacatttttgtgagacttttaagagaactttcgaaaacagtttatgacatttttcgtaagcttttttcagcttattttcataagttctccacaaatgcttatgagaagaggttatagcgtatacaaaaacaatttaactttattttatcatttgctataaaaatagcttatgtaagctttatacattagcgcttatgtgttataagctgcaaataagttgtttgtccgaatagggcctaaattgttttcgtataagttataaggtgttcttgtaagctatcttggagaatttatgaaaataaggtgaaaatgcctaatgaacatgttataagctgttttcataaattctgtcaaagagtctcacaaaacttatgtcagtagataaactcaaataagatgatccaaacagatggtattagttttaattagtgatgtatttataaaattataataaatgtatcgagtaattttggaatgaagtttatatttaaggttaatttttttttctacaaacttatgtttagggatataggtagtatatatataacacattttgaagtgaagagcacttgtttggtgttaaggttttggtttttgttgatttgcctgcatgatgatgattatgtgtttttgttgattcctcatgataatcatggtttttattggatggaagtgaagaactgcaaaatccttagttgttggatttattttattgatgttgttggtattaactattatctatgatttttgtatgttgcagatttgaatccaaaggattctcacttatttaacatt

SEQ ID NO: 30995 - DNA, 642 bp, Medicago truncatula
  Intron number 1 from transcript Medtr5g084240.1 (locus Med tr5g084240) derived from phytozome v7.0 (chr-ID MtChr5; po s 32050733 to 32051374 reverse strand)
gtccctcattacgaggaggttattggtgagcaacagtgggctaaacagcttcccgatccactctagattatttcgaacatcatagctagagtggatagtgcaatggggcatcctgatgtgttttcttttcctatctttatgggtgtgttgcatagcattttgcaggaggagctagttccccggaggaggactagaagctgtaatccatagaagtatgatttgttttaatgttttcatgacatttgtttatttttagatggttttacgacattttggctgattttgatgtaatatatttacacttgcgcctttgtgttttttatgacatttgttttttggtttaattttgattgaaatgaatggattaaaaagggtcgaaaatgaatgaatgagtgtatggaagcatgaatgaatgaaggaaaatatggaaggaaaaaaaaaaaaaaaaaaaactaatcaaatgacagaggcagttgacgtaactcacgtcctaacttaactcttaagtcacgttggggggtattattgtcagaacacatgggaaagaacaatttaaaatgggagaagagcaattttctaaaacttaatattcaatactggccgatagaaaacctaacgctaacatacgtccaaaactcttct

SEQ ID NO: 30996 - DNA, 1057 bp, Medicago truncatula
  Intron number 1 from transcript Medtr4g109670.2 (locus Med tr4g109670) derived from phytozome v7.0 (chr-ID MtChr4; po s 24607633 to 24608689)
tgattcatccacctgaacaaccttctccttcaaaggtttttactttttttttgtttgtttgtaaaattcactaattttccatctgggtatcttttgaattggttttgttttgttggaattaatatggaatgattaattgattgctgcattgcttgtggttgtggacatgtgtacttgctagttatgatgatgattatgcctatccaatttccatatattgaattttgagttaaagtaaagatagtcacttatccagattattctcaatccctttcaaaagcactgagatttacagggaagttagttatgtttttctgcgttctctatgttttgctcctatatgtagtatagaagaataagaatgttgtctcaatttattttctgtataataattatatagatttgaatggtcaaccctttaaagaaatattgatatttgagaccattggagcaaaggagtaaaatttactgaaccaaattttatttatacttcaatttacttatcattacatccatccgtttagtttttattagaaatggaaatgaaatgaacaaaaccagatttaattcacataatcatcaatgtgtggcacttcatatgttgtcgaatgtgcagatttactcataacagtaataccatcaaatacctcttaatatctatatctattaaacacatttatgggtgtggaaaaaatgtatggtgaacagtgactttgtttagcatggagttacttcattccaattttcagataggaatcagaatgatacgaaacaatggatgttttttatgatgctatctttttcattccttgttgactcaagaaattttaatagaattgtttttcgattgaacatgatggttgtttgattcatagaaccaaacccacattgtgacaaaaatgtcggttggtagcagactggtagtggtggtggctcaagatatcttggtgactgactacagattattttgtttaattccatgaattggtactgacataaatattttttttttttgtgaacaggaagtgccttctgggtttctaagcttaaatagagt

SEQ ID NO: 30997 - DNA, 673 bp, Medicago truncatula
  Intron number 3 from transcript Medtr5g023860.2 (locus Med tr5g023860) derived from phytozome v7.0 (chr-ID MtChr5; po s 9423385 to 9424057)
tttcggtgttgttgggatattgaggcttttggctggtgagcaatcttaagagagacatggccatgttttgctttaatgaaattttacatgaagtggctactgtatgtttgtgttgctctttaagttttaatttcctgattatcggcaaggtcgatgttcatcttgatctatatgattgtgtaacaatgtgagatgattatattacgcattttttattttttagttgtgtgggcggggtgattgaagttagcaattgggatgttcgactaatgataaatggtcattgattttggcacacaaatggaagtaagaaatgaataaaatatcaatgatgtttggtgccatatgggctaaggaaaacaaagtgtttttttttatttcttcatttatttttgcaagaactggcacatggtttaatgatcatgctagctttttgcatttatatagatttcttttagttcatttatgtttatggcttaagaaagtccttactaccctgtttattaattgcttacaatagagaatttgatattgttatcctgttttctcgatcttgtttacataattgatttccttttaaataccagataatacattatttgaaaagcatagttcaatttgggcaattattttgatgttgctaagttttaccatgcccttaggatcatatttg

SEQ ID NO: 30998 - DNA, 805 bp, Medicago truncatula
  Intron number 4 from transcript Medtr5g046910.1 (locus Med tr5g046910) derived from phytozome v7.0 (chr-ID MtChr5; po s 19761393 to 19762197 reverse strand)
ggtattgcttcttttcctgctttattatacatattatagttatagttattttgaaactttggatgaatgtaatgactttgtatattggttttattacatcataatcatttattagacataagagtttgtaaaattttatattaatagtttaatttatgtgcattgtcaatgtaaataagtattacacacatttaatcacatcttaccatgtaggttgtagagacattttaggaacaattatcaaaagtgcgagaatagtgagatatgattagaagcatgcgtagttttatttttaaattaacaatgcataccgattaaatccttgtagtaatgtaatcaatttgcttcaaatcttagtatgcacaaagttgctaataacgctgagatgttgataagcacctaaatacttggagaagtagacttaaatgctagcagtcaaggggaaaaaaccaagccaacttaagtactccgaccaagcatcccatgacttaggcaccccataattgacgtctctatcataacaccaccccctatactacaacatatacgagatttagtaaaacttcaaaattgtagccctttctggtcactcccttagttggtagccctttctaagtcactgatcacaatcagttctgataccttcaaaaatagctatcaaggagggagaagcaagccactaaagtaattcatttcaggattcttgtcctttccttttcatataacttgtgcattggctttgggaaactatcttaataattttcatgtatttttcaggtttgaagcaactaaccaaattcagacg

SEQ ID NO: 30999 - DNA, 824 bp, Medicago truncatula
  Intron number 1 from transcript Medtr4g163250.1 (locus Med tr4g163250) derived from phytozome v7.0 (chr-ID MtChr4; po s 41345848 to 41346671)
ctcaggggttactctgtcaaggttcttctctattctattctttttaaacattgagagcatagtttagggacattttagttgattttaacagtttagagactaaattgacgaaaaattgatagttttgttttgggattaaattgactgtttattttctaattttgatttaagatattaacatgaaagacatattttagttgagggccatttcatggactgactgactgaagacatatttgatgaccaaactaacgaaggaaatacacgtttgataaccaaattgtatagcaaaaggcacattttgcagataaaatagttacactgtgggtgcctttgattcaacaaaacaaaattatactagtgagatgatatttttatattgcaaaataaaaggtattttagtatttttaatagtctatgttgtggacaaaaacttgtcccgtagtttaatagtgagtaacaagaattcctgttttattcagtcccttgctacctgttatgtccagtcttacgaacagtttctaaatcaatctggggtacaaaaaaggttgtccagtccaatgtttttttagcaaatcaaacacaccatatttagcaatttcacattctattcaattcaatatgtatgtataaaataaaatggttaattttccttggtttagaagacaatcaccttaattatgttattggatatatacaatacattacagagattagaaatgttctcactgatttgtcagttgatttgacagtttcaaaacataaactggtataagatattaaatcaactttttctgcaatgaaggctttggtaaggaaggcag

SEQ ID NO: 31000 - DNA, 830 bp, Medicago truncatula
  Intron number 1 from transcript Medtr4g107190.1 (locus Med tr4g107190) derived from phytozome v7.0 (chr-ID MtChr4; po s 23341633 to 23342462)
ctgcatcacaggcagtagttgcgtgagtcttctccaatctttgcactttctagattaattgcattttattgtttacgtgatgcaaattgctattttataaatccgattttatgtttggtttagcttgggatgaaattctggtgattttttgtgttaatgttctatgcatgtgttagatttcgatttagggtttaattttgtcaagattttcaattagtaaaaaggaaaatgatatattggacttgaatttggctatacaaaacttccaagggtaaattttatccaaggctctaaaaaccggttcgttataggtagtgtctgataccgttttaacatagtgaacaaaaactacggacgctgctgcagtaaatggcagagaacaaatttattgttaaacttgttttttttttttttttatgctcttgtctcttcttaaaacattaaaacctgaattagttagtggttaatttggtttttaaacgaaacaaattcattgcaaaattatgaaaagaattacaggtatgaaattatgaagaaattaagttgatagtaaaaatagttttaagatttgtgcaatgttgtgattaattcacaccacgacaaccacaatctgtaacgcaacatcagtaacaggctaccagccaaaatcgtgaaatccttaacgtgaccgcgattcaaaacctttttatctatatccatactctgtggttttacaactcctgtcaattctttgtttttattattatttatcactattattttttattgattcttacccactcaatgtttacgcagtaccaagaagaaaaagcgacgggctgttggaggtg

SEQ ID NO: 31001 - DNA, 668 bp, Medicago truncatula
  Intron number 4 from transcript Medtr5g023090.1 (locus Med tr5g023090) derived from phytozome v7.0 (chr-ID MtChr5; po s 9043809 to 9044476)
aagtatggagctaagcatttttcattttatactgatgccaatggacattcaatcattggcttcatttttgttgtttcgttaatattttttgctgattctaatgctatgttacgtatagtttaggcagtagtgtttatgcaaatatcagcaacaaagtgtatttcacaattcattacattatactatcttcttggtaattttgattcttatgaactcttcattttgacaatgaatagctatcaccatgagaaagaactcccaaaaaagctataatctctcatttcaatattcaacacgcatgtccaaatcatactgtgcccatccactaggtcagaataaatcagaagaaaatctacactagataaatagcctttatttagtctatttgcatcattagtccctctcaaggaaattgtgtgagatcatagcatcaatgcacattgcgtgtttattttgagaagtgccatactaaaatagaaagaattattggttttaaaaaaagaacaatttgaataaagttaaacaggtcctcttgcatgcaaataatttcacttaagcaatctttccatccttatccttgttctaatgttttgaagcaatagcaatgtatttggtgtcaaataatttattaagatgtgtgttgtttcattttactctttcaggtgata

SEQ ID NO: 31002 - DNA, 644 bp, Medicago truncatula
  Intron number 1 from transcript Medtr5g014280.1 (locus Med tr5g014280) derived from phytozome v7.0 (chr-ID MtChr5; po s 4536600 to 4537243 reverse strand)
cagggtgcataaggaaatgacttacgcataataacttgcccccttacacgctacatattgattctagtagaaagataagcattcgtcctcgtgagcatagctcagttgacagggacaatgcattattatatgcaggggtcggggttcgaaccccggacaccccacttattcactttaaaagtgaatttctaaccactaaactacctgaccaaaaacaaaagataaacattcatgcatccatattaatcgcattaacataataaatatatatcttaaaataagtgttattttcttttcaatacagtttaattattttattctaaatcaaaatcttaaattaatacttcacctctacataacataagtaagattagtttacttatacacttgataagatattagttgtacatacttattctttgttaatcttatttaaaagttcaatatcattattcgtaaaatccagttctattgttgaaatcgttagatttgataacttcactcgtattcaaactcaagacttaacagttatatgaaaatacttcatttttatttttttattttttagtatttgtgaaaaatagtaaagtgattcaaaatgagaggaaggaagaaagtattttcatagaaaaagagtggaaagg

SEQ ID NO: 31003 - DNA, 764 bp, Medicago truncatula
  Intron number 2 from transcript Medtr4g124980.1 (locus Med tr4g124980) derived from phytozome v7.0 (chr-ID MtChr4; po s 29369701 to 29370464 reverse strand)
gcattgtggaaccagtccgcaatatcttcaggaaggtcaggaatctcaggattaaaacatttttcttagctctgtagcactgacaattctaatggaatgcatgtccagtctctctgacacgacacatgtaattaccttaaattaatttgttttttcaaagtttttgtgtcgtgtccggtgtgtgcaagtgcttcggtgtttcttactggtgcattactattatgaaattgttcatttgtttcattagcatgtgacatagctggatatattcaatttcaaaccatttacctatggcgttatttacaataacaaatcactgttattaccagtttaatcataagttgttgggtttagttggccaaattactgtttgtcttatgtgtataggagtacttgagaaactatatctatatgaaagcatgcccacataaacatgattttttattttattttatggcatcattgtgctgtactttctgtaaattactttactttatgtaaattaaacttatcttttggttcatgtttttgatctggatgtgatacaactgaggattgtcagcactattacttgtgaaaaatatcatatttttgttcatttattggttcatctgatccacacttgggatattttagcttctaattataaataggaggcacattttgtggtgattagattgcccctatagaattccgtttagtcccttagttcactactagtggatataactggaccttttacttgtttccatccgaacagaaac

SEQ ID NO: 31004 - DNA, 475 bp, Medicago truncatula; identical to SEQ ID NO: 30652
  Intron number 2 from transcript Medtr4g084610.1 (locus Med tr4g084610) derived from phytozome v7.0 (chr-ID MtChr4; po s 17843294 to 17843768)

SEQ ID NO: 31005 - DNA, 1011 bp, Medicago truncatula
  Intron number 2 from transcript Medtr5g099260.1 (locus Med tr5g099260) derived from phytozome v7.0 (chr-ID MtChr5; po s 39671491 to 39672501 reverse strand)
ttgtaagcatgtacggactgccttctcttctttcctatgaaacacggacactccttggagtagacgtgtcccaatgtcagacacaagtcgtgtctgacatcgatacgacaccgatatttataattaaactgaattatgtgattttttcaaattattagttgtatcagtgtatcagtgtgcttctttctcatcttctctctatttcattttttggattcttcaaaacaaaaacttgtagcagaaaatcacgtgcaatcatgtgtagttgggaagatgtttttctacgcaaagtgttgattaaattatctgtctttttttggtcacacgtattttttactgtagaaactttgattttaccataaaatcttcacgtgtaatacatacaatttcttttttaacattaacaaagtgaagttttcatttttttatgaaagtttttgatcggttgtaaattcatgttttgttgttggattcaatgaacattcaacaaactaaagacttttgtactccattttttgtctcaccatatttacagtgatttataatgcatatccatacacatatgtggcttgtcaggttgtcacattggtctaaatgtgatttatcaacaaaaggaaaaaaaaaaacacattgttggtctaaatgggaatgattattgaactcaattattaaaaataaaaataaggtttggaattttgtgtaatttggtcaaacatacaatcagtccgatcaataaagaaatgcaaaacattgactttgaaaaagatgtgctgtctatgtcttcattcttttaagggtaaaatttaaattattagtatgtttctccttgtcatgatttttctgttaaactttcattttttttactttaaactatttatctatttacttatttgttggatgattattttgcaataatcatgtcaaccatcatataaattctaattttctgctttatttaatctcacatgttcaacagattcttgaaggctcagaatctgtctggcacccttt

SEQ ID NO: 31006 - DNA, 1024 bp, Medicago truncatula
  Intron number 2 from transcript Medtr5g033510.1 (locus Med tr5g033510) derived from phytozome v7.0 (chr-ID MtChr5; po s 13664063 to 13665086 reverse strand)
cctgataactcattaggcgtgagttttcttttgaggtcagtgaattttcttttgaaagtatattgataatagtaatgtattgacatacgagaatgtaagaaacaaaatataaaatcaaataaaactttaaattaggggataagttccttagcaatactaaattaataatgtattggcatcataatcagggtgtgagccagtatctatgaagcaaacacaccttcaggtaatatatcaaatagaagcacaacaaatgacaatatttttatcacatcaattgcaatattgaaaaccatttttatgaggtattcttaagaaattttttctaataatatgtgaaagaatttcacgtatatgtcgctatgtctttgaataagcatgttagtcaagatagcttgcagaaacagtttagaatgaaaaaacaatttaatcacattcttttttctttgatggttgagatagtttatcttatgcataattgcttaagcaaactatttatccatctaactatagttttcaatttgtttccccaaatgcaaacttctagtttgatgctaattaacatatcgaaatgaactttcttaatctcacccatgtaaacatacgcattaaaatcttctcgagaatgttttacttgctctttctctcttatacgcatttcaaaataattattctctaatttttgactaatattgatacacagtgaaaattaaacaattttgtccttttttccgcaatgtatgtaacaacacactctaatacacacatttcaacatagttgttcctacttattgaaattctaacatgaatgtcttactaaaatatatagtttccacataaattgttgacactcattaagttttaacaaataagatggtgtatcttgagaaatatgtgttaggtaatgtgtgttgttaacattattagttttttttaatgactatttacttttcatttaatttactaaatcatttaaatatagtgtgcagtaacatttaaagaggttaaccctacggggtggccg

SEQ ID NO: 31007 - DNA, 711 bp, Medicago truncatula
  Intron number 1 from transcript Medtr5g093260.1 (locus Med tr5g093260) derived from phytozome v7.0 (chr-ID MtChr5; po s 36672709 to 36673419)
cctacattcactcctcttccacttcaactcaccaggttctgttcccacttaactaagtactaattatgtttaatatttgttttactcgttgtcattttagctttttaagcttcagagttgtattaaaaacttggccttggacttcatttgcaatggatcaacatttcaacaagtaatcttgggtaaatactcattttcagcattgaatgtgtaatgagtaggtgtaatagtccttcaatgtagcgaaattacaaaatagtttgtgattatgcaatctgttggtcaaaataatagtctttgacgtccctaaatatgaaaactatttttaattgattatggttgatttgatatgtctgaaggactattttgactaacaaagtgcctaatgaacgactattttggaattttgctacattaaaggactattgtggctactcattgtacaagatgaacaaagctaatgtatttgactaaaaagtcgaacaaagataatgtatttgactaaaaatttgagcaatttattatctgtgttggattctatactaaatcatttgaatccctactagtgagacttggactatatcggtttttctgtctctatcagtctgttactcccacccccaattcatcaatcattacttttaaacttcctagtccttcaatttcaattttttcttcattttactgtttctctgcaggtttcaagtttgg

SEQ ID NO: 31008 - DNA, 935 bp, Medicago truncatula
  Intron number 1 from transcript Medtr7g045890.1 (locus Med tr7g045890) derived from phytozome v7.0 (chr-ID MtChr7; po s 11130747 to 11131681)
ggagaaaagcgcacagaaaataataaaaacacaaagtaagaaaaaaaaaaacgagggaattacaaacttaatacaagtggttaatgccttgcaaggctttattcaacattaaccaaagtgtcaatagcgataaaatgcattgtccaaaccaaaaaacctactaaatatagttgaggtttacacttttaaacttgggatgcttaccctttttatatatttctgaacgcttttctaattcccacgtggaaaaggaagcatcaacaaaattgggagaaaataagaagataaatattggttttgttttatgtcttctctgttatctatgtcattaattagctgaaattgaggcatgctttttctgctttatgaatattatgtccaaacttgatagtttttccgatcctattttcttgtagtgtcaagcataatttgattttgatgaatatttattgatgagattcttggtatcgatttgaggatattttccacatatgttactacttactctagtattataaagacaataatcctgatcatatacattataatttattaaaatttaacgtggtgacggccctaacccgtgggttggcctctaattgattctctcatggtcctattggagactctaaattaataaatcgtacactttattgacgagtttcattgagtctcacagttgaagttttataaagcttaaatggttattgaatttcattttgaaggtttggtattaatttctgagcaagagcctaccaatttgaaactttccttagttgattgttaaacctttattgtatttccctcattttcctctttaagctagcacataaaattttccattttagttttttgagcaattaatctgtgtagttttgcattcatagttgtaatatgaagggaaattcttaatcccgagggtagtcctgtgaaaa

SEQ ID NO: 31009 - DNA, 743 bp, Medicago truncatula
  Intron number 1 from transcript Medtr7g041140.1 (locus Med tr7g041140) derived from phytozome v7.0 (chr-ID MtChr7; po s 10484895 to 10485637)
ggtttggagcaaagattctgtcaacagtgtagcaggttagtgtgttactctgtcgttatctcatgatactactcctatattttattttattttttatcgttgaataatagagatgtctgagattcgaacccgattccggcatataattgtcgttatatctcacaggactattatattttatttgttataaaaaatgttagtatgtataatctaatatatttgctcaaaaaaattcaaatatatttgttggtatgaacaaaaaataaatccatatttactagtttaaaatagtcctttcaaaaatgattggtacttactaaatccaaatttagcagtaaatattatctcataattctactaattttttagtataatctaaaacaatttgattagtacttttactagtaatttgtaacttattatgcatttgtaattaacttatagttttttttttgtgttcgggattcgaaccccgaacttaccttacatatattatgcattgttcttatcaactgagttaagctcatatttattttactccttaaaatgattgttgtaagtgtcaagtatgtctaattcatttgatctatgcttgattgttggggtttgagtttcaacatgcaattctctacttcttcgcacttaatatttacttgttatttgacaaaaaaacatgattggtttgactgtatcaattttcatcgttttatttatgtactctctctgacctgcagaaaacgtac

SEQ ID NO: 31010 - DNA, 988 bp, Medicago truncatula
  Intron number 1 from transcript Medtr4g092470.1 (locus Med tr4g092470) derived from phytozome v7.0 (chr-ID MtChr4; po s 19319930 to 19320917 reverse strand)
ttgatcatctcggaaacccgaccccttccttcaaggtcactcttccctcctttttatcattttttttcttcttcttcatttctagttataatctttgatgtgtatgctttagtttaaattatgctgttttattataaggaacaatcctttagaagtaattgagtttgaatcgtagctgtaactgtctttggtcaaattttacttacctctcaaccttactttggattattagagtcctttccctcgtaactttggtgccaattttggtgggcaagcccatactgaactttgcttggctttaaatgggtcccgcagtgggcggtgggattggtctgttcttggacctgacactgagttttcaatttttttttattttttatgtttttataatataaaccagatacatcagttatttaatgaactgaaatgagaatttttgcatatatttgacaccatagggagtagtcaatgaggcacatacttggacatcacacggacaatgacacaggcacctataacaatttgggtaaacaaccattttggttctgaatgtgtgatacacccatggatgtatcgaaatcacaaatacatcctcaagtgtctatttagttagtcattctagtccttaaatgtgttttttggacattttggtcctcaactgtgtttttttagtcaattttgttgctaaaattacaaagaaagagacacttgtggatggatttgcattttgcaactatggtacattcagggactacaataacagcgtctcactcattcagggaccaaaatgactgtttgccctaataattttcaaaagtatgaaagtaattgacatgtggtcggtgtcgtatgggtgtcagacttcagacacacccccacaccttcaatctgaagtgttggtgtggtaagtagatatcagtacagctagaaattaaactcattgtgttgtgcaggaagcttatcaaacttggagagaagcttttgtgat

SEQ ID NO: 31011 - DNA, 1028 bp, Medicago truncatula
  Intron number 2 from transcript Medtr5g010020.2 (locus Med tr5g010020) derived from phytozome v7.0 (chr-ID MtChr5; po s 2375928 to 2376955 reverse strand)
tcaacgcttcattgctgctggtatgaatacaaccttttttatgtgaaatttgattattgatttttgtaaattttatttggaattgtgtgttaatttgttgtgactgattagtgaaattggttgaatttgtttagttgctgaaggaaaaaacaattaagaaacttgttttttgttttatttaaattgcagcctgcaattgcagttgtagtcacagtttcgaggtttttagatgtgtttggattgagggtttaggaggggaagggaggggagggtttacttttcttttttaagattcggactatataacatgtttttctataataaattacgtgtgattgaagtattatatgattgtttatcatgtattattttaattgtttaaaaaaacatatcatagtgtctgtaatttaaaaatgaaaagtaaaccctcccctcctaaattcacctcaaagtagttgaattccctcaaaacattcccccatccaaacacactcttagggtttcattgactgcaattgctgccatatttactcctgcaatctttttaggaagtgatcatggcaccttgaaatttactcgttagactgtgtgttgattaattaatgaaaaggttttttgatagccttcgatgactagcaaatttttgcaattgctaaattgtgctttttagttagttattagatagttgtgaaataatcacaacgcctcaaaattcgctcattacgctgtgtgttgcttaatgaatgagaatgctaaaatgccaacttgtttatatgatctgatattagagaactgtgtttaatttgtgaaaaggttttttcatcgcctttgatgactagataatttttgtgaaggctaagttcttctgcttatgctttcttgtcaatttttcttttgcaaatattgtgttttagattttcggactgatttctttccacatttttgtttgacgcctgcatgatatgtgagtctgatgtttcttatttttttcagaggaatctgaaagtcttacgagcaccctaccacca

SEQ ID NO: 31012 - DNA, 733 bp, Medicago truncatula
  Intron number 1 from transcript Medtr5g046140.1 (locus Med tr5g046140) derived from phytozome v7.0 (chr-ID MtChr5; po s 19371787 to 19372519 reverse strand)
gttttgtaagtaatcataagtattcaataatgctgctctttttatcttgaataattttacactacttaataactgtttttttttttggtacaattaataactgttttatcatgtaaatattttacaaaacacgttgcaagttaatattgtatgaattgtttatatagtttttttttctttcataaatatgtgatcatctgatatgttatctagatgagaattagtgaaatttaataataacatttcggtcgttggttttgacgaataataatgactttttattaaaatattttatattgtaaaaacaaaaaatcaccaaaaaaacttccaatccatccaataaatttataaaacaaactaatggtaaaaaaaatgagcggtatgttacaccgatttaatttgacctatatatatagatgagagaaagtggaagctaagcaatccaataatattgtataactatatcaacttagctatcaggtaattaatggctcttttagttttcgaaaatcaatttaaactctgaaataaaattgatttcctctaatttgttcatctattaatcagtaactcactcactttagcttcctaatcatatatcaaattgtagaatctacttttcatatatatttatttatgacgatttctttgcaaatgattcttcaagaattagtgtatggaaatatgaattactgataatttttgtttctctttcttcaaatagggtggtgtg

SEQ ID NO: 31013 - DNA, 455 bp, Medicago truncatula
  Intron number 1 from transcript Medtr6g096370.1 (locus Med tr6g096370) derived from phytozome v7.0 (chr-ID MtChr6; po s 21039280 to 21039734)
cgtttttttttttggtgaaggtatcagcttatgcgtttttttttttggtgaaggtatcagcttatgcgtttttttttttggatattgtttttttataatttttctgtttattcttttttttagtttttattaaataatagagtttttattaaataatcgatcaaactcaatcaaatactaataacatcaaattccacccatgattaactacacatcttcaatatcttagctaaagtgcatatatggttcaaaaaaatcactttatatcccatcttagtactctggattaaccaaattgagattacaattttcacaaaaatgtttaaatttaattcaaattaaactgataaatgaaccgaattgagatttacatttttcataaaaaatgtttaaatttaattcaaattaaactgatgtgaggaacaagagaattgaatcacacacaaaaaaaaagg

SEQ ID NO: 31014 - DNA, 583 bp, Medicago truncatula
  Intron number 3 from transcript Medtr6g096370.1 (locus Med tr6g096370) derived from phytozome v7.0 (chr-ID MtChr6; po s 21040054 to 21040636)
tacaactttctttttctttttatcttctggtatgacatggattattaagctatttcttttaataattaaatgtgccacacaagggtggtatgagtggtagaaccacctaaggtggtccatctatcagtgctccttgaatcatttcatcatttctttcccagtccttgccagaggaactagaaaattctttatcgtgactcttagaatttttcatcatttcagcttcttttttattatcattagaaacaatttctttgctctttttaactttttcttataccaaatcattgagttccacatgtctagatatacataaacctttgtattgaccataaaagtctattaagaagaattcaaatcaaaattgttaaatttcaacctcattgtctttcttaatgttatctaggagtgggaaaaagtaaatcaaatcatttatgatgttccgaagaaatattaaatgtacaacaacaaatgcttgtgtctttaaaacaattttcagctttagaacaaaagcaaagaaaaataaatttcaatgagcttattttatttattttgttttaattttcagttcaaactgccatat

SEQ ID NO: 31015 - DNA, 907 bp, Medicago truncatula
  Intron number 1 from transcript Medtr4g089490.1 (locus Med tr4g089490) derived from phytozome v7.0 (chr-ID MtChr4; po s 18658841 to 18659747 reverse strand)
ttaggtttatggcatatttttactgcattcttgttatttctcagcttcttgtttcctgttgaaacttacctgattgttgtataatgtctgtattagttttcaggatggattcattttatttttggtttgttattcctatttgctgcaacaaataaagtatcaaaataaaaaaaggaagcatcaaacagacggtgtcgaatatgggttgtgttgagtcttggaattttattttgtagttgatgagaattcacacagaccttctaatatggttcttcctaagcaaacatgttatttttatttcactaatacatttacgtacacattattcaacaactgcaatagcttgatagcactcaagtagaatccactactatgaacatattattagacatatccaatagacagttctttgatttaatgcattgtttttttgctgttgatacaattctttttaatgagctaagagtaaattgtcaattttgcctgttgtataatcctacaacatctattagtttgttcgatagacatttgaattggatcagcattctaccagacttataggatgaaatagaatgtgaaagacaccttgttttcctttcttattgtaacatttttgtactttttattgcaggtgttgcggatcaatgaattaggcagttattgagactaattctggtatgcagttattgagtcaactctttaaacaagtctattcggcttcaattttatcaaacatatgctaaagaatgttttggaaatgggcataccttccttaattgtgaaggttcagtcgatgcaattgattagagagaattattctactttgattggaacaatttgttagaaagagttattcttcgtaatcttattgttctcatcctccttgcaggaaatactcccaaaatac

SEQ ID NO: 31016 - DNA, 700 bp, Medicago truncatula; identical to SEQ ID NO: 30506
  Intron number 1 from transcript Medtr7g045650.1 (locus Med tr7g045650) derived from phytozome v7.0 (chr-ID MtChr7; po s 10990728 to 10991427)

SEQ ID NO: 31017 - DNA, 641 bp, Medicago truncatula
  Intron number 1 from transcript Medtr5g068840.1 (locus Med tr5g068840) derived from phytozome v7.0 (chr-ID MtChr5; po s 24766234 to 24766874)
agtgatatcttttaagctttcagtcaattctttccttccccttcatcttttaattgctttcttttatgttactcttgaacaatatttgcttcagttgttatagtttcatttcgcacaatgacttactttgtttaattaacaatttgtttaattattatggtattttcgtatttcgtattcgtatttttgtttttttttttgtgttattaagtacttcatgtagtttcattttgaaaattatggaagttttgtttttgtatcactcttgcttattgaaaagaaaatgctcaaagcttcaaatttcaaagtgcttgaaagatagccaaaacttaagaaaaattctcagatgattgataatgatagctagtttgtgataaagcgcaaagccaaggtacaagtttccagtttttctaggttctacttgaataggaaatgagtactttgcacaaatttcagttcatttagttctccgcgataatatgtttgtttatgaaccactgatgagtcatttattacctatttttatatgttatttagtttaattttaattagattttattttattttatattagtattattttctttttaggatagtttactacaaattgcattctaatttatttcaggaaagaatattgg

SEQ ID NO: 31018 - DNA, 908 bp, Medicago truncatula
  Intron number 3 from transcript Medtr5g068840.1 (locus Med tr5g068840) derived from phytozome v7.0 (chr-ID MtChr5; po s 24771046 to 24771953)
ggcataatcttcaaagacaccaagcaaagggacaggtataagactcttatctctaaacttttgcacccttgtcgatatcccgattcttatactttgagtgtactaggactaagggataatgtgtttagcttactaggaaagttaggatgggttgatatgcttagacctatgaaaggttttgaaaattttacttacgaattcttaagttctattgaatttacgaaggataaagtgaactttgataaccccgaccatagagtctccttccgacttttgaatatggattacgagatgtctcttgaaaatttttgtttagagatggacttcgcaaatgcggggttcatccatgactcttggaatccaaatctaaagtcggaagactatgaccccacactcttttggaaacgcattaccgggttaaggcaatataatcctcgcaacaataaggctagtaacattcacaacccagtgcttagatacctccaaagagtcatggcttgtaccatttggggtagaaaaaagaggtaggaacaactaggacggatgaactctttatgctttgggcaatgcttagtaacaaccccgttcatacttgcttttacctacttgattacctttcctccataggtgctagacctgataatagagctgagatagtagttggtggtatcattaccttcatcgctaggaagtttggagtgggtgaggaagaggggataaatccaattgagggcaacaataggcttaatattgaaacccttgttgctatgaatttcattaagattcacccaccatgacctatgcacttcaacttcgtatacctcttttgtttctatttcctaacccatctcggactaacaccgaggtggaggcaaatttgttgtatgttggtgatggattacaggtac

SEQ ID NO: 31019 - DNA, 975 bp, Medicago truncatula
  Intron number 2 from transcript Medtr4g032460.1 (locus Med tr4g032460) derived from phytozome v7.0 (chr-ID MtChr4; po s 7809148 to 7810122 reverse strand)
tccttggtctgtaatccttgtattttgtactttgattggccttctggttctgtgcatttttttggacgatatggtattatgctaatttatggtcttctggaatcttctgatgtgtatatgcatgaagaatttgtgctggcatattttgtggctaaaagggaagagaaaaatggtatattgatactctctatatgcctgatctgttatgtgctattctgcatttattttgcagatttgcttgttatgcctgtactttctgttgttgcatttattttgcaactaattcaggttatgtgtagatgttgtcttggttgctacaacattttgatgttcttaatgatgatctgagaatttctcattatgttttatattgtacatgttccttgctgatgttcattagagtgttggaacatgtctgtgaagaactgtgtagattttggcactattgctgcaacatcttggtgttattctgagaatttatttttctcagtattttttaactgtacatgttccctgattctgttattagaattaggaacatgtctatatgtgtgaccttgataggtctgctagttggtgaatataccctgaaagattttatgcccaagacctgaagttttcttttatctatgcattaagagtttttgactgttcagaatatatgtatgcatgtattcagggggtaatggaatatacttgtaagtagtcactcataggttcatatattcagggaaaatgatacttctatgtgtgtttgtgctagttcaagctgtttgacaggatgttaagtcagatgtttaaacatccgtgtttgtcacttgtaagtatgtgaatttactctttcctttacttctatatgtggttggtgacagtactctgtaagtatgagaaatttattttttcccttgcttctatgtgtgataggtgatcctgtctgatgtggtataggttgttggaacatcctattctgtaggt

SEQ ID NO: 31020 - DNA, 783 bp, Medicago truncatula
  Intron number 1 from transcript Medtr5g076970.1 (locus Med tr5g076970) derived from phytozome v7.0 (chr-ID MtChr5; po s 28258729 to 28259511 reverse strand)
cactccagcatccaccaatcacagctcatctcaaggtatttatgtactaactaattcaattttcatcatcatcattattatcttctctgaaagcacaatgattgatcatggagttcggctgctttacttttagattatgcaacaaactttggttgcaaggtacaaatcttcattgaaaaattacagtcgagtttacaagtttactgcttaacaataataccgggggctccagctcccacttcgcttattattctttcagcttcacttgctacgctcaagcaattagagaatatatgactcatattcaacagagaaattagtttgtaaaactactgttgagagatagacttaaaatgaatctgcgcgtcacttcaaatatttcaaagtattttgaagaagatttattatactttcgatttgcatctaataatcataaatatgtggggtaaatcaaacttcaagtttattatattacatatgctttagaatttatttgtgcaacaatcattatctttttcatcttcttctactttgttttcatgatgtcatcctacaacagaagtttaaacaataaacactttgtgaaaatttattcaaaattctctctaataaggaaaatagtcatatggtatagtcaaaaccatttaaactcacgtaaaagatatagaatttaattatattaaaaatacatattatataattattttttctttctgcttttcttatccgaattttctgatttgtgtagaaaaggaacacacatcaagaactggcatcatcata

SEQ ID NO: 31021 - DNA, 738 bp, Medicago truncatula
  Intron number 2 from transcript Medtr5g015030.1 (locus Med tr5g015030) derived from phytozome v7.0 (chr-ID MtChr5; po s 4927077 to 4927814 reverse strand)
gttccagaatcggagagccaggtacggacataaactttttcataaagtcatgaaaattaatatataatatattgagataaatttaaataatttgatacaaaaaaaaggagctacaaattatgtaccacaaatttgtcgcagctactaaatttatggtagctagccatggtagcacggcagagtttttgcattttttttgttgctatttttagatattttatgaaaatcatctataaatgttctttaaaaagcttatatttaaggataatattacaattatgtgttcccaataacatttatagatgattttcataaaatatctaaaaatagcaacaaaaaaaattaggatattattatcctaatttttttttctctgtttcatattaactctaagataagaaaaaaaattaggataataatacaattatgttgccaataattataagagcagtttttgtccaaaaaaaaaattataagagcaatttaaaaaaaattaactattttttattagttaaataagttttattttaaatcctctaaaaaaaaatcttatattaaagtaaggagggaatataatttaaaaagccttcctttgcttttggatttgtggttgttaagtatggatttgacagattaagctaataaatgttggtgcatgcttgttgtgacttatattaaataaattttggtttgaattttacagaacaaagctgaaacaaacagaggtggattgcgagt

SEQ ID NO: 31022 - DNA, 773 bp, Medicago truncatula
  Intron number 1 from transcript Medtr6g062290.1 (locus Med tr6g062290) derived from phytozome v7.0 (chr-ID MtChr6; po s 11330246 to 11331018)
aaagagaagaagagtgctggtagaaaaagaaaaaaggaactttagagtggaatttcatcaccaggatctagtcatttgaatttgctcatttttcttgatgtacatttaggtttataatctttaattatatttttggttgtaatcctgttagatttgaatcctattgttgtgtttttctttgctcatcatgcactaaaagtgtttggatcctcggaaacatgcatgtgtgcaacaatctctagaagttggatgcatgatcacaactccaattccttaattagtttacaaagttatttttttttcaattatattcactttggctgtgcaattttttattgcatattcgttgtgtgttatatgcaattttttttttattacattgcatttttttttgctgcactttaattaaggcggcgttttttttttttacaagttaaggtggtgtttatgagttgagtttggttggttttaatcaaatatattattttatgggttgagttggatcttttttttatgtcaaacacaaatcaattcaatgccatgatgagcaggatgatttacgttgggttaacgaatcattagaaacaactttgcatggggcatatgtgaggggagtacgcgacaaaggtgaaaagttttcatcttctttttgcagcaatccgcataaaagcttcatgatcggacgataatagatgatgttaatttagagtatccctaaggaggatttctctacattcatggcgtcgttctttattgttggagttaatgcagtg

SEQ ID NO: 31023 - DNA, 387 bp, Medicago truncatula
  Intron number 1 from transcript Medtr6g094060.1 (locus Med tr6g094060) derived from phytozome v7.0 (chr-ID MtChr6; po s 20585035 to 20585421)
taatagtgtctgatataaccatatcaggttcagaggtttttcttttccatcatgttttctttttttgattcctattttttgatgaaagccatatttcactaactatttatttctttcgtataatatatgcagctgagtctcttctctccccaatcttttgacatctcacaagcgcaaaaatgcctgggggccgctatgactgttctcaccgcctaggcctgtatcacccacaacctcccaagcacaaattttgtatgagaaaaaccaaagccacggcaagttttgcaattgctttcttttgatcctagtttcacaattttagtttctctaatattactatttaatccaacaggatttcgaactggcatcgttggagattatacttga

SEQ ID NO: 31024 - DNA, 587 bp, Medicago truncatula
  Intron number 1 from transcript Medtr7g009920.1 (locus Med tr7g009920) derived from phytozome v7.0 (chr-ID MtChr7; po s 1993165 to 1993751 reverse strand)
taccctcttggcttctcaaaaaaggtaaatacaaatatttgagagacttatatgttatagttttaatctctttccaagtatcagcatctaatgtttcaaaaactgaaccactagcaagacttacatgtgttatagttttaactgttttaaactgttcgaacaactggttcacacactactagaaactctcgctttttctgcggaattacccgtggactttggtgaaaattccgcaggaaactgttgaatgaggtagatacaaaagtggccaatatgttttgttttggtgaaaaaaaatatttgatatgcgaatgatgcacatagtcagaccatgtcacttattttggaccaaagcgagtgttataaatacacttttttactaaaaatgataaggttaagctttcaactatttttaaaaggtttatagaagacaaatcctttatgaatgctgtaaatttgagttactatcttgtaaatattgagttaattaaccatttgttgctgttgttgaatgattggtccttgatcaattaaattaaattaaatatacaggtatttgctgaggttatagggacatatttattggt

SEQ ID NO: 31025 - DNA, 424 bp, Medicago truncatula
  Intron number 1 from transcript Medtr5g038080.1 (locus Med tr5g038080) derived from phytozome v7.0 (chr-ID MtChr5; po s 16062109 to 16062532 reverse strand)
aacatattgagtacaaaaagtgagtagtttctgccctgtttctttataatagttaggagaataaaattctgttagtagttaggaattaactacgaccactaacactagacacgacactgatatgttcataccgataataaatttaaaaaattcacataattgaatgtaatcacacgcgtggtgttgtgtcggtgtcagacactggacaccggacacactttatataagaagtgttgatgctacagagggtcagttaggagttagtttagaatttgttactaaattagttggggcaattgagttagttaatcaaaatgacttcgtatgagcttttgcttcatgaatacacttatgttattctttgcagtcatgttaatttttttttctctgtgaaggtaccagtgctcatttggcccagaaaatt

SEQ ID NO: 31026 - DNA, 983 bp, Medicago truncatula
  Intron number 3 from transcript Medtr4g095590.1 (locus Med tr4g095590) derived from phytozome v7.0 (chr-ID MtChr4; po s 19921276 to 19922258)
ttgaaagcaggtaatggttgttttgtttccgtatttatacctttctagtgttagtgtgtgtgtcagtgtgtgtgtgtgtgtgtgtgtgtgtttctttttttggtctactatagtggtaatgaggtttgaacctttgatttcatataaaccatccaaacccctcaccactagtccaatcctagtggctttcctaatctatgatgtgcacacaaaatgtataaagaacaataaatttaatataatgtattagatgtaaagaataataatggaagaaaaaaaagactttcaaagttccaacataaaactttgtaaccctcctcctgaccacggtaaatatatcaaactcggcactttttaaggaggccttcaagcaagcagttgaaaaataaaatgtttggaagttattacagcctgacctttaatatatccttagtataactgatagtcaaataaatcccaaacttttggataggcttggtagttgcaggcttgcagcccttaattataaaagccgaatccaaaatcttggtgcactgaattggtatactacaatctgtgtttcagcgggtataggatgaggttatggaataattatggaatttccaaaatctttgatttgaatgatggcaaagtgacaatgaagcaatttttatatttttgattgagaacgcccgtgttcttcgaaaggttccttcagtagtgactgttatatatgcatcagaagaacaccgtgttttatagtaactcttatatgaattacatgaatcatactgttaatctccatgattcattgcttcttgcttgtttatgttaatttggggctggattttatcttaaaaaatattgaaatttaacagattacatactttgtgtgtagtatggtatagtgtgtagcagcacatgtctgttctgattgtaaactttacatcttaatgttttaaatggcagtttctggaactttgattccttgttccagccccaac

SEQ ID NO: 31027 - DNA, 388 bp, Medicago truncatula
  Intron number 3 from transcript Medtr7g084770.1 (locus Med tr7g084770) derived from phytozome v7.0 (chr-ID MtChr7; po s 18384162 to 18384549)
gtgctgtatcctatttaattcaattctaatatatgatctatgtagtgctgtagcaataactgctttcattacgattgttattttggttaggaaaatcttgagttctactattgtggcatgtgtttcttaggattttagtttctgcacatttattgatgtttttcaattggctggaagacatgaagagtctgcattttacttttttagaactttgaaggaacaaaataggtttaccattgcttccatcttgtttatgcactctagtttgattgatttatttattttttgtttatgacgagagcagtgcagacctgaagatattaatatttaataattatgtttctggatcttttgcttctttttcttgacttaatatgtagcttcttcc

SEQ ID NO: 31028 - DNA, 198 bp, Medicago truncatula
  Intron number 1 from transcript Medtr5g104420.1 (locus Med tr5g104420) derived from phytozome v7.0 (chr-ID MtChr5; po s 41872262 to 41872459 reverse strand)
gaattggtaactttttttttctttctctcttctagttcgacaatacattatttttttattttaattttgacaatggttaaagtttatattttgtttaagtgtaaatttgtgaaaagataaattgctaagtttttttgttttgtttttacttcccaacacgaaggcacatatcattctcgagggattccctttctagtc

SEQ ID NO: 31029 - DNA, 730 bp, Medicago truncatula
  Intron number 1 from transcript Medtr5g044150.1 (locus Med tr5g044150) derived from phytozome v7.0 (chr-ID MtChr5; po s 18295481 to 18296210)
cattcaagcacatcattttcatttggagtctacaggtaagaatcgttttgttatccgttcatttaattctttcatctattaataatgtagattatttatcttaaattttctcttctttgaaagtgatactaaaatccctttcatatcataccaatattgtgaaaagttttatcgtgcctagttcgaaaaatgactaaaaacaaaatcgactcatttgatttttctcaagaaccaaaactagaggtattaaatttaaatgatacttacatgatttcttttaacttgtgcagtgaggtgttctttgctatgcatatacccttggatatacaagatagaaactgtgatgagtaggtgaaaagagagagttatccagaggagcgtgcgaagagatactttgacgtggtggtgttagatgagtttttttttttttttttatgatctcaaaacatgtaaacacaaattatttttacaaatatgttttaggtgtactggttgttagagaaacatggactaagatcttcattgttagatcctagcctgttgtgatttaaatagacaaacaattataggagtgaactagaaaagtggagtaaactagtgaacatgtctttgagattagtgttcacttttcacttcactttcgttcactttatcttttagatatatatgcatgactactgttgtaaatctgagagagagagagagagagagagagagagagagagagaga

SEQ ID NO: 31030 - DNA, 424 bp, Medicago truncatula
  Intron number 1 from transcript Medtr4g024120.1 (locus Med tr4g024120) derived from phytozome v7.0 (chr-ID MtChr4; po s 5459161 to 5459584 reverse strand)
gctcaacaatctcaggaaactcttcctaaggctttgtatgtttccttaccttataatatttttgaagaaacttaatttataacatttttttagggtttgtaatatatttgttcatcttatattaagttgtttaatgagattatattaacttgattcaccttatgctatgtttatggagaattatattttgattatttgaatcaaagtttggatttaagtgtctgttaaaagatgaaaaggaaaaaaaaatgatatgatgaataaaatttcaatatatgtgagaaaaattcatttaaaattaagcagaaatatatattcatcacatcaaatatgatcatttaaagtgatttatggtgcaggaaaattatacttgtgttcttatactttttcactgtttgacaaattttgcaggtttatttacgtt

SEQ ID NO: 31031 - DNA, 533 bp, Medicago truncatula
  Intron number 1 from transcript Medtr4g032640.1 (locus Med tr4g032640) derived from phytozome v7.0 (chr-ID MtChr4; po s 7924702 to 7925234 reverse strand)
ggttaaaagaggtggaaggaggaggtaaatgaaaataatgaaaaacaaattgcctatatataggaaaatttgattggctaataaaaaataaatgagtcaaactttattttgattggttgaaaaaattgcattaattaagatgagagatataaagatgtcacatgtacttttaaattttaacaacccaaatatttataataaagatagagatacaaatagagatagagatatcaaccatacactttttcagcaattgaaactagtataaaacaaagggtaaaacaacaaggcaaagaacaagaaaagatatttgaacatccattttttaataaattttatgacaactttttttctcatgctcacatcatattttcattttctctctccattgctttgatttttgtgcctagactcactttctttgtatattttggttgtcccataaaatggttgttcaaataacactcctccttttattcaatatgttgatgttgattcctccaaatcagtttccactaaagttgtcgaagtaa

SEQ ID NO: 31032 - DNA, 670 bp, Medicago truncatula
  Intron number 2 from transcript Medtr5g075350.2 (locus Med tr5g075350) derived from phytozome v7.0 (chr-ID MtChr5; po s 27431462 to 27432131)
ctcccaaagctgtgtttccttctgtaagtgtgttcattacacttttttgttttgtttgtattttgttgtttttttgtgtcactggtattatttactactttcagagcttttgttgttgatgttaatgatgaagagggtactggcaatttcatgtggtcacaagtttgtactgtttgatattgtaattaggtgcaggaataatttatagtttgttagattaaaatctttgcggtagcacttattgtagaaaagatagtggaaaactctgcttaggtggttttggcacgtagagagaagtgctgtagattcaggagagtagttcagatggagggtagtcaaatcattataggccgggaaagacctagaaaaactattaagaaagatctagagattaatgagtttgatagggatatgatatacgatagaacattcattatggtgtcgtttgatccatgtagttgacccctcttagtgggttaaggtttgattattgttgttgttgtaagtcagtactggttgtctgctagatagtgtaatgagattcatatgttttatagtttgatagattaaaatcttttaaaatctatggatggtttactcattgataatgtgatgatggggagttttgtcctgactcatatgaactaaggttgttggagcgattgatcaa

SEQ ID NO: 31033 - DNA, 846 bp, Medicago truncatula
  Intron number 1 from transcript Medtr4g023360.1 (locus Med tr4g023360) derived from phytozome v7.0 (chr-ID MtChr4; po s 4978464 to 4979309 reverse strand)
gttataacttcaagtattgtgttctttctattcttttaatttcttttatcatataataaaatacttaatatatacactatttaaaatggtttgccaccccaaattgtaacggtggtttctattgtttttttaatatcttccaactgcaattaattgatgctgcacaaccgagtaatatttgatgacatttctataccatatttaggattttcatgctgctacaatcaaataatttcattagtatttgagaaaaaatttctacaatatctcattgatggtaactacaccaagggtttcaagttgtggaccacatcatgtgtcgcgactacagcattaccgttttggtagcaccagctcgcaattgatccccctccaaatgagtttttgcattttgaatgatcgtgagtgcatcattataacttttgattaaaattttcattatatggccgtggcttcaatattgtggttgtgggccgcaatcgcatcagctcacaattgcccctccaagagtttttgcaatgtgaatgattgggagtgtgtcattattatttgaaatgagatgctattcattacgaatgcccgtaacacgaaacgccagaaccatttattttaaaataagtcaacaatattttaagttgtctttgatggaatacatgaggtatcggaagtggaaccactaaatagaagcactttcactaaacggaggtcccataatatcaatgattttgtcgtaacacattccaaaaccttgtttaattaccctggcttattgacatgctggcaataatgacattcaaaattaatcttgcagagctgacatttggtcatttggcataactgcattgg

SEQ ID NO: 31034 - DNA, 481 bp, Medicago truncatula
  Intron number 1 from transcript Medtr7g026990.1 (locus Med tr7g026990) derived from phytozome v7.0 (chr-ID MtChr7; po s 6997321 to 6997801)
aaaacgcagccggagttactcgcttctcaactcaggtaacttttctctctacttcttcttcatcgttcaactattgcttttcaacgcattccaaaatttgaagatctgaatacgtaaccgcttcaatttttgtttttgaatctcaccgttactttctacattgctttgttttgggttttcattttcaacacaaaggaaaattatagtttcgtagcatttttttttatgtgttattaaagggtttatccattccatagtttttttagcagaggtggaagagtagtaatttaattgtggaacagtgcatcgttatgttcatgaatatagaaaaattaaacaaagtttctttagtgatatatgttgcttttatataatgaatcaattgctttcgtatttgtgcattttgaagtttcaaagtttggaatttgaatgaattttgggtgaaattgaaacagaaaagttgagaagaagaagaagaata

SEQ ID NO: 31035 - DNA, 976 bp, Medicago truncatula
  Intron number 1 from transcript Medtr4g073050.1 (locus Med tr4g073050) derived from phytozome v7.0 (chr-ID MtChr4; po s 14325668 to 14326643 reverse strand)
gttactcactttttcatccgtaagttcatttcacttttcagtttctcgatcttgaattcagtgttttcacttgttctagtactgaattgatgaatgtagttgcttattgaaagaatcgattaagtgtgaatgaaattgataaatgaagttgcttattgcaagaattggttaagtgtgaataaaattgatgaaataagttgcttgttgcaagaattgactaaatttgaattaaattgactaacgtagttgcttattgcaagaattgattaagtatggataaaattgtttcttacataggttatgttacatatcggtaaattatggaattgaattattgtaactacttgttacttattgcttttgttacttacttggatttaatttatatgcactgacagtgtaataatatcttacactgtcaattaatcatagcagtcatatcaatagaaacatttgaattttatttaaccaccgctgaagtcactcacatattggttgtgatggactgaaggtgtagaactctttacactgacagtgcatagaaattaaactcatgttatttattagttatatttgtgtttctgcttctaagtaacttatcttactactgtacagttgaaaggatttaattgatatgtatgttatacactctcaatcaatcataacccttaggcagttaaaatatttgactttaattttatctaccttaaaaatcatataaatgaaagtttacgattgattgacggtgtaaaaagttttacaccgactgtgtatcaaagttgatatcatattgaagtataacatgatgggaaagggatacgcaccatcaatatgcttattcatttttctttgattttccttgggtcagagatttttttcttccagttcttaattatgaagaaataacaagttggtttgatgtcatttttttttggaagggacttatgcatgccttactatgctttgcagtcatctt

SEQ ID NO: 31036 - DNA, 406 bp, Medicago truncatula
  Intron number 3 from transcript Medtr5g093390.1 (locus Med tr5g093390) derived from phytozome v7.0 (chr-ID MtChr5; po s 36738791 to 36739196)
ccaaggaagtggtcttgtttatattcgagggaaaggttagatcattcatttttctgtccttttttggtcttctgatagttggaaagtttgtgcttgttatgaatttggttttccatttgtacaaaagggtattatttagttgatcaaataaatattaagattttagtaaacacaatttggccttaaccttctcttcttatgagaggattcaaaatcgagttccgccaaaaatattcgttgagtaatcaataaatgataatattatatcaaactttttatttgtttgttcctctgttttaatgaaaaatgcattaagtgatgtttgattattgatatgtttgacattttatgtatgacaattagttttttttatattttattttaattttttctttatgttttgcag

SEQ ID NO: 31037 - DNA, 893 bp, Medicago truncatula
  Intron number 1 from transcript Medtr5g105950.1 (locus Med tr5g105950) derived from phytozome v7.0 (chr-ID MtChr5; po s 42579010 to 42579902 reverse strand)
tcggtatgttttgcaattctacttgtcattttgcttctttttctctaatctatgcctcgttaactcacttggttatttgttacgataggtaaatttgtatagattttttttttatatatcagttaggtgatcgataaattttgatgagccttggcatttttcttctgggtgttagaacaacaacaaagttaaaaagcaagacaataaaacacgatatttgtgtaagcagttcaatcgatgatgcataactttgtgactataaagtagttataattcttgtttatttctttgattaattagggtttatagtgttacaagccgtaaatataagattatgatctaagacatactcaacaatgagtgattttaagttttacgctttacgtttaggcaaagattcagtgaccccaaacttatacgtgctgcttatcctgggttaggttaaggttgtagggaccgaaaggaaagagtttaggggtaatgtcctattaatcacacaagaaaatttcattagttaaaacaaaaaaaaagtaatatatgtttcattatgtacaaataatatatgtttagttatgctttctttaaaccttgattttcattatatatttgatggacgtctgattcttatattagatgcaaacgtatgctagttctatgatgcacaagtgaaatatttgtttccaaccattaaattgagataataataagatttattgatttaatggtaaaactaactaaacgtgtatatgattgaaacactatttcattggtgcattatagaattaactttaagagtattaattaattgagaatttgaatatactaaagtacactacactttattacagaacaaatctaaaggaaagtcgacattagtcccccaagtttgggga

SEQ ID NO: 31038 - DNA, 931 bp, Medicago truncatula
  Intron number 2 from transcript Medtr5g104640.1 (locus Med tr5g104640) derived from phytozome v7.0 (chr-ID MtChr5; po s 41981543 to 41982473)
atagacctcgacaaaacagaaaaaaaggtatttcaacatctttctgctgggagaacacaagtttatttggtagttaaatccaaattgtgtatttttctgtcaatgcttctatgtcacattttaagacaaaattggaaaccgggtagggaaaaaaaacttgactctcctagtgaggtaaagcttggttgttgtcactttctctcttgctcttgttcaggataggagttttagcattctttagttatagtgatggattcaacacagatcatcaaaatcaacattttgtttctgttgcaggaaaggaaaagaagtctatcttagacatttatttatgacatgttgtagttagcttaagatacacttttgtttcgtagtgggttttactataacatttatcaataatacagttgggacaatgcttggttcttactcataagtaagtaactcagttagggaaatattagtttcattctctatatattttcactgttctattctctttcctttcgctttttgtctctctaacaaggtgcatacttaggttagcatgagaatattatgctgttagaaaagtgttgggttcaaaacggatattataaaggatttgaatttcagtaaggtgggaattcataatatatcttttatattagctgagtaaaaattcagcagtttggtcaatttgaatagtcgaaatccaaaatatcaagtgattgcttgtctttcttccgttatcatccggagattttgatgaaagtagtccgagtcaataattcttatgacctacatacgttatgagcagataccttcaatgacttgcatgtttgaataattcgtcttaaatgacagctctatctaatctaattctacaacgtttaataatttttaatctgttttgtttctgatttttgcttgcagggagaacttggggcaa

SEQ ID NO: 31039 - DNA, 872 bp, Medicago truncatula
  Intron number 1 from transcript Medtr5g079710.1 (locus Med tr5g079710) derived from phytozome v7.0 (chr-ID MtChr5; po s 29752014 to 29752885 reverse strand)
gaaggcgacacatcaaggtaaactattccacaactatcatggttattatggcattagagtttatttgcatcaaaaacgctcaagttctgtaatatcaaaaccgatttatcaaacaaacataaaaaggatcgatcgattcgaacgcgggtttgattgaagccacaagttccaaacctgcgttttcttctataaacgtgagtcttgttttttctgtggtgtttggatagaagaaaacgtcattgtgcagaacatgatgaagtgtccaaacgcaggtttgattgaagccacaagttcaagcttctgcgtcaaagcaaacgcagcttcaacttttcagtgacatctatatttaccaaattacccataagttatacaccaatttcctacacataaacatatttcttcttcattactgcacatcatcagttctctaacatattattctccctctgttatttaccaattttgcctgttttttttaaatggtcatttttgaagttctggtttttttctttctctactatgcatttcactctctaggttagagaggaagaattattgggctacaatcaacccgtttcttttcttttattaaacaagcccataacttctttttacaccccttcaaatagtgaaaaatccaagtccaatgcatatttttctgatgtttttctcgtttttatattttaaattgtctccttgcatactttcacttttggactgcctcaattttaatttattttgaacattgtttctgacaatttcatctttctaagtgtatatatatttgttgtatttgtactccgactttatccattacgtactatttttgtgacaatttgaaattaaattcttctgcatatgttgtattgtag

SEQ ID NO: 31040 - DNA, 727 bp, Medicago truncatula
  Intron number 1 from transcript Medtr5g015170.1 (locus Med tr5g015170) derived from phytozome v7.0 (chr-ID MtChr5; po s 5008286 to 5009012)
gtgtaacggatcgggttattttggggtgagtgaaaaaattcaatccaatatagaattattggtgtatgatttaaaagtttatgaaacttatttttaattattttgaattggatcaatttacttgtgagcatctacaataaaatgatttgttttgaataatcgacattgagacctttagcacaattattgaccaaaatataaaggaatgagtaacttaatttaattattttgaattggatcaatttacttgtgagcatctacaatagacttctctcatttgttgtgtataataagtatgatttagaagtttcataatgtttaaaaatgtggacgttgaatactttataaagaagatgactcatacacctaaaattttaaaattttaggttaaagtataatgtctctttcatttgtgttgtcgttccaaacttctcaccggactcaacattatttgatgttggagaaattattgtgtaggaacgaacctaactatcattcttacaaacaataaattaaaacatgacacgttattttttttcttttaaccatgattggtggtggtgaatactaactgcaaataatggttgagagagaggaggaggagttatttttcatttcttaaattatttcctaattattttaaaataaaacaatgacgtgtcatgttttaatttgttgtttgtaagaatgatatattaggttcgtttctacacaagaatttctcttg

SEQ ID NO: 31041 - DNA, 791 bp, Medicago truncatula
  Intron number 1 from transcript Medtr4g128970.1 (locus Med tr4g128970) derived from phytozome v7.0 (chr-ID MtChr4; po s 30536428 to 30537218 reverse strand)
tcaaccctgaccttcaacagaagattgttaaacaggttcttccctcttttcacgtttacattggtgattgcttattaatacaaaaatgtatcagtagttaatatatgataatcaagatttctttcaataaaaataaattgtgatcaaaccgtacaatttgttacaaaaaacatgcaattttgtgtctttaattagtaagaagatgttgatgatgtatgcgagaagtatcggtgaaagtttgttaaaaatgatattatcggatattctttaggtacgtatggaaactgtattggtatcggataggtgttcgagacattgatatggttcatagttcgaaatgcttttctttcgatggatagatgtaatcttctttcttaataaatcttggatgatttggattttacattaagttgatatgtattgtgcgcaaaatgagattaagttaatttgagtgtgttaataaggccattcaaatttcagattaagttgatttgcattgtgaaattgtgagcgaaatgatattaagttgatttgcgttgtgaaattgtgagcaaaatgagatttttgagtaaccacattgtgccaaatggatttatttttgcacgtatattgatttatgaatgaatttgtttagttcagttttttttattagcaaaatcagttatgaagggtgtttttggggtatgaatttttgttcttaattgtaacttgtaaaatttacattgctaaatgctcatataattgaggatgtaataggtggagtatcagttcagtgacctgagcttgctagc

SEQ ID NO: 31042 - DNA, 692 bp, Medicago truncatula
  Intron number 3 from transcript Medtr4g107890.1 (locus Med tr4g107890) derived from phytozome v7.0 (chr-ID MtChr4; po s 23683866 to 23684557 reverse strand)
ttgattccttcagcttctgctctcttggttgtaaggtatataatatatagttttaactaaaccatattcatatgcatttatttgcttttaataccctatgtagcacggacactcttcggattaggcgtgtcccggtgtccgacaccgacacttgtaattacaattacactgaattatgtgattttttttctttcaaattactgtgtcgtgtccgtatccgtgcttcatacttaataccttcattttcgtcttaactatctggttggtaatctggaatccagtcaggcaagtaaagtttggtcaatgattgtttccgctaattgaagctgattgacctgtgtgggaagttttctattgtaaagtgttaaaatggttagatggattcacaaactacatttttggatcacattagcaatagcaaaatattgcttattactttccgaaatttgattattatattgtttttgtagaaatgttacacttgtatgtaatctgtaaagtaaaacaattgtaactacctcctacttcttttctgtataaagtatgcaaacattaaggtgtactttttatgtttcctttgaaaaagtaaggaaaatgatgatgagagtaggtggatttataaatgacttcttcaactttttgattttttcttgttagattgttggaacctccaagaagttgaggaagaataa

SEQ ID NO: 31043 - DNA, 707 bp, Medicago truncatula
  Intron number 1 from transcript Medtr7g083430.1 (locus Med tr7g083430) derived from phytozome v7.0 (chr-ID MtChr7; po s 17802341 to 17803047)
agagggaaaaagtaattacaatcatcataaaataataaaaaggggtatattactactataaatcaccctttgtcctttaaaaatataaccacactttgtgtaataaaacaatcactcctagcataatttctatatgacacatatgctatctctatttctctaatatcacttttctaactatttttgtttcattgatcgctaattttttttcctagtgtatatgagggaaaataatttatatttttatttttgtatcattgttagtctacttttagtggagaccaaatgctagcacataataaaaagaaactcagaaaacaatagatgcatattattttccttcatatacactacataaaaaacattagaattcaaagaaacataaataaatagaaaatgctattaggaaatagagagagcatatgtataaagattttcttttgagggtgagagagcatatgtatagagatgaagaaaaaaaaaaaaatccaaaatgtagtatacgtgctaaattaatttgaggtgattgttattttttttttcttcatgataattgtttatcttaataaaagaatttggagaattatttggctttatatattttttcaactaattgtttttgttatatctattatatacatgacaaaaaataaaactgagtttgttttaatttgcagcattggcaaaaccctggaacgatatcagag

SEQ ID NO: 31044 - DNA, 1001 bp, Medicago truncatula
  Intron number 2 from transcript Medtr4g158870.1 (locus Med tr4g158870) derived from phytozome v7.0 (chr-ID MtChr4; po s 39995139 to 39996139)
gatagcagccagaaggtagccctcatgagtaatcaaaacgctaaagatttattagccattgtactgtcatctttttaactttttttcttttctagtgacaatatcagaaaatcatctctgttgcaatatgcatttagatgtgacctgtaataatcactatgatagtgaacatttagacgtttgtagaaatatactactcgagttactatttcttggattcattgatcataataacactgaattttaggttactaagacgtggagtatgaagaaaagcttttccttcatcttatcataaaaagtataatatgcatctaaattgtgaagatagtttagatagtctcaacgaatcttagataggcttcattaccatcgtagcgttttgtttggacctaacttaaccgcacaaaatcaacttgccacctgagagatgtctcctgcttataaacgctttttcatgtcatttttcatccaatatgagattctcactcacatttggcaatgatatgacatcaggttctctcagaaactttaggatgatctcaatctcaaattttgtgctctaaggtgctagatattgaagttgtattggagttccactttgctaaggttcccaggctgttggatgtatatatgtgcttgggcactctaatcctttgagctagctttaggagtgtgatccaaactcatttaaaactagaataatttgcgattatctaaatagtaaatatggtcatgtactcatgtgtatatatcaaaatgttaatatgttttgattgcataattatccacatcttaggtattagggatgaaaattcagttattataagtgatggcctgcaacttatttgatctttgatttatgcattggatcccaatgactgtcacgtgttagtgttaaagataatcatcaagatgtatagaaatattgcctataatcttcaacttttggcaattctgaaataggagctgaggcaatacaagaacaatcaatcaaaatc

SEQ ID NO: 31045 - DNA, 668 bp, Medicago truncatula
  Intron number 1 from transcript Medtr5g086500.1 (locus Med tr5g086500) derived from phytozome v7.0 (chr-ID MtChr5; po s 33177929 to 33178596)
tgctttaaaaggaagtgtgcgtgagagagagacaaagaaattgtcttattattacttagagacaaagaaattgtcttattatacttactttacccaaaaaagaaagaaacaaaaagagggtaatttcctcacaaaataaagaggaaatttgaaaattttgacttgtgttagtaaaaaaggctgagatattgtgtttctgcaagaaaaatttgattgtggtggtttttaaggaaaataaaattgtggaaatttgaaatggagttgttttttttattttttttaaacttatccagggtttttgttaaataacaccaagaaataaattgcaacttgagagaaataaaaaatgtttttttagtgtttaatattgtttctaccgttgtaaattgtttcttctattgttgtggatttttcatattttaatgagatttatctgattatttaaaggagaatgctaatgagtgcctcccttgtttgactgctatctataatagaaaaaccaaagcattgaatgcaatcgagtgatgatgaaaagatattcaaatgacagagtattagagtaaaaaagttacgaaaaatattcacatatgcaagtccttcattttctggcaatatgcaatttgctttttgcagcttcttgatttttgcctaaagtcaccccttctccc

SEQ ID NO: 31046 - DNA, 435 bp, Medicago truncatula
  Intron number 1 from transcript Medtr4g136010.1 (locus Med tr4g136010) derived from phytozome v7.0 (chr-ID MtChr4; po s 33153386 to 33153820 reverse strand)
agttagactgcaaggcgcacgcaccttgagttgttgtaagagttcgattctcttgtttatagcatcatttcctcttcttcttttttcagcatacatatgcacaaaaaatagaccactttaattattcaagcttcttattatttgtcttgttaagccagcaagttaatttcctcttctttcttcttttcaaattttcattttgagtttaggatatcgattttgactagtacaaggctatgtttttatttcataactaattttgttgatttttctatacaaattccttgctatacaagttttataatttagtggtctgtttagctaatgtcatttgatcatttcccgtatcttttaaccaacttctattatgttgttgattataggctttctattttgatatttggctcttgttgattttctgtttcaggtggaagc

SEQ ID NO: 31047 - DNA, 796 bp, Medicago truncatula
  Intron number 1 from transcript Medtr7g010500.1 (locus Med tr7g010500) derived from phytozome v7.0 (chr-ID MtChr7; po s 2283437 to 2284232 reverse strand)
gcagccgaatcactgtttcatgttaaaccttctctttgaaactgtttgcttttcttatatttttcaatgcaaaatctaaccatttcttccttgctttgtttttttccattttttatgttcattgctactttgattttaaacaaatttatgttatctttaatcttcacttgtcatacactatctttaaagaaattgtgtgaaacatcaacaaaagaaattctaaagtgcttgaacatcacttacaattccttgttagaatgtcttttgcaaatttcttttaagatgttgtgtacgaatgaaaactaaagataaacttttagctttgtgttcatgttttaggtaatgcactaaactggaaaaaggctctctaatagattagtgttatcagtggccttattatatgtgcataaatgaaattttgggtaccgctttgcagatctaacttctcatgtcttgagctgccagtataacccatatattaagtacaatgtttgctttttttatttttatttttttgttctcatattggttggttatgatcaaatttaagttaggttaaattatgattgttaattgtgtcgttcttttaactaatcactgaagaaatgaaaaacataatgagtttacttgcaaattttaatatataatgtctcaacatagcgtgtgctgtttacatgcatttagtatatcagtttttgttaaattccacatgattaatggcatatcatggatagaaaaaagaaaagggacgtgtttgtatgagactatgataagcttaaataacagggcaacataa

SEQ ID NO: 31048 - DNA, 381 bp, Medicago truncatula
  Intron number 3 from transcript Medtr5g021180.1 (locus Med tr5g021180) derived from phytozome v7.0 (chr-ID MtChr5; po s 8042866 to 8043246 reverse strand)
atctatagggggcgcctctttgtggttatttagaggtattctgctgttacgaggttttcctttcaatgctattttccctctgtgtcgtgctattcttctcttttgatttgttcctttaatatcatttgtttctaggttattattcattttttatttatattttgttatctttttatgttggtggataaatttaaggtcttattagttaatttaggaccggattctatataattcgtgaagatattagtaattcacgaatttactttgaatggggatagagcaattagttctacgtttagtattgaaagaattactatggtcttattagttaatttaggaccggattctatattttctggctgatttcttgatctgcagacc

SEQ ID NO: 31049 - DNA, 475 bp, Medicago truncatula
  Intron number 2 from transcript Medtr5g021180.1 (locus Med tr5g021180) derived from phytozome v7.0 (chr-ID MtChr5; po s 8043204 to 8043678 reverse strand)
ctcttaatctaagtaagatcaattttgttcttaacctaaagcccaattgtgatgattttttttctctgtttttgattttgtgtaaatttgtgaattttgattagaagtttttttggaccgattttagtgttttcgttgcattgggtttcatgtattttactattgatatattgttcttctaggttcacttttgattctattgcgtgcagcaaattcttatagagattgagagcggagagtaaaaattagagtcaagataattaaacaccatgaggtaattttatcttcgttttttagatatgtttttgatctatgatatttatttcatctaatatgattatcagtaacttatagggttctgatgttgtttatagctcactggtgtcctatttaatgtataccttagcctcatttttatgtggaatgatgcagatctatagggggcgcctctttgtggttatttagaggtattctg

SEQ ID NO: 31050 - DNA, 762 bp, Medicago truncatula
  Intron number 1 from transcript Medtr4g115650.1 (locus Med tr4g115650) derived from phytozome v7.0 (chr-ID MtChr4; po s 26823562 to 26824323)
ctccatcttctctatacaaggtaattttctcactttctttttctttattttgtcacctttgtgtctgtcacaagatcttttcttaggttgttattatttgtgttaatgtaatgttttgtcctagatcttgctaccttattttattagtatatgccacaattcttatagtattattcttaatctcattctttctcttgtttaatatgtctgcatgtgtatagaaaaacacacaagatttcattcatgtacaattgaatattctatatttgagaatgttctatggatttaatattcttttattattttctcaattgaaaagcacagatccttttgttaaattaaaaaatcatactattcagcattgcatagatactgacatattgttacttttataaataagtgttattagtacatatgatttccgacaccgtatcttgacaccatataacattgagtgtgatcttgtcaaaagaaaacattgagtatgaacaatggtcccgaggagagagaacaaacatcggatgagaaagataatataatttaaaacttgcaaaccttataaacatgttgtgtctgtgtctagatccgtgtcaagaaacatttcgcttttataaattatattattttcatgttcataaattattcaattttggtcttaaccaataataagcatttcaaagtaatatacattgtttatatgtatgaattattttgattttgatcttcatgtcacacagtgaaggaagttaagaaaaagcaaaa

SEQ ID NO: 31051 - DNA, 638 bp, Medicago truncatula
  Intron number 1 from transcript Medtr4g124610.1 (locus Med tr4g124610) derived from phytozome v7.0 (chr-ID MtChr4; po s 29200679 to 29201316 reverse strand)
attcattcaaacctagcacccaattccgtttcaaggtataatctactttctattcttctgtcaataattgatgataattcgatctgtcggctttgttttttgctttcatatgattgaaatccttctgattgatttgaaccgtttaattcgatctgtcggtattgtatgattcaatcattttttgatcaaagacagtcttcagattgtgacaaggggttcatataaaattgttagatcggattatgtattgtatgattccaaaatgtcctttaattaggttagctcatgaatattgtttcgattgattcattgattggaagcaatttttgtgaatgagtagcttttcaatgtaacttgagtctttttcactctgttataacaataatgaatagttgatgattgattcatttgattttgtctattttgcataaggcttatcccacttagtagaataaggttgttgttgatggatgagtatgttttttaaatgtctgccgtaatttgaatcgattataattgctgatcttctgcttccagttttctatagtccacccccttttaaccttgttgtacttataatataatgaagaatattggtgattgattcatttggttttctttgttttggatttatatag

SEQ ID NO: 31052 - DNA, 527 bp, Medicago truncatula
  Intron number 1 from transcript Medtr5g062360.1 (locus Med tr5g062360) derived from phytozome v7.0 (chr-ID MtChr5; po s 21950164 to 21950690 reverse strand)
ttgggtccttgagggttagttcttctaagagatcttttctgaaagtaacattctgtcttttatgatcagatttgttacagtagaaacatgtcttcttagccttttcagccttttgtgaactttctgatctattgagatgagaacgttctgaactaagatttaaattattttgtttgataaattttttcttaacatgacatactgattcattatgtccatacttatcacaaaaacaacatttaactcttattttagctttaggtacaaaacttccaataattttgcttggatccttaaagcctaagccagatttcttagtacttttattttgagatcctactatgttttgaaaagtttctgtagattttataaaccctgtcagatcctttttcaatgtttcaacttcctttttcaaaagtatgttttccttttgtacttcagaaggtacagacataatgcctttttgttttctgtttatctctctttgtttttctgacatgtcaaaatgagaatcttgcagaattttt

SEQ ID NO: 31053 - DNA, 968 bp, Medicago truncatula
  Intron number 1 from transcript Medtr5g075650.1 (locus Med tr5g075650) derived from phytozome v7.0 (chr-ID MtChr5; po s 27603754 to 27604721 reverse strand)
tcggctggtaaagtcgattacaattctatctcttactatgacaatttaataatctaccatctatatgtttatcttatatagatagtatattaaatgtaattatatttagaagtactattgaggcatcaagatcctcggtgtcaaagatcaaaactcattgtaaagattgaatcaaataaacctaaagaaagaaagacaatgtctatttcaaaatagagataatgtggattctaattttttagttgtttctataaatcatacatgcacaaattcatacacacgagcagacacacacttatatctctctatcatttaggaaaaattacacattttatttttgaagattacatataaataaataaattaaatacatttcggtagtaattttctccctagtgttaaaaattataattttttattgtctagaattaagtatagtttttatgaagttaaaattaaaatattgtttacattcatgttttgtttttagttataagaatcaaaggatgagctgaatcaacagtataattataaattctctcccctttttgtcaatgttaacgagttgtcaaaaatgtgaatcgttggtcacatgactatggaagaatttactaatgattaaaaaacaattacgtttcttcaataattaaataaggaaattgttagatagacaccccatacattaggaagagggaagaggagagaaaagagaaagtgtgtttgtgcggggtccatgtgaccacgtgtcagatttttgtgtgggtgtcaaagggtgtattgccacctaaggatgtctatgtatcataactcattaaataaatatgtaataattaaaaaacagttaagtttatgttgcctttataaataaattaataaatgttaaatgattaaaaatcaattttcgacaataatatttgtcttttattgatttgtattttttgttttgtattcaggcacttgttgatccg

SEQ ID NO: 31054 - DNA, 602 bp, Medicago truncatula
  Intron number 1 from transcript Medtr5g077300.1 (locus Med tr5g077300) derived from phytozome v7.0 (chr-ID MtChr5; po s 28463364 to 28463965 reverse strand)
gaacaagaacagtgttttctttgacaaacaacaaggtacaccactatctcttgttttttagtatgtactatatatagtatcctcctaattgagaggattaacaaaagataatttttgattatattaaatcatagttttaatgtggttgttgctgcatcactctcaattagactagtttaattatattaaatcatagactagtttttatattaatttgtttgattatattaaatcaaatttaagttttaaaggttattgttaattttttttgacatatattagttagtactagtttaattgttacagtttctcaatttctggatgtttttcgagcttttcgattaacattagttaatctgtgtttgtgtaggtaaatgcattactagatctataatggtgttcctgaccttaaattgtcttgcttggcttttcttatgagtattattactaacttaatgaaagaagataatttgtaagattagtaaattaattggaactaaccccaatataaataacaattagactcaaattttcttggttagtttttcttttctgatttttggtaaatatgtcatcacttttatggctgaaggagtgtggaa

SEQ ID NO: 31055 - DNA, 535 bp, Medicago truncatula
  Intron number 2 from transcript Medtr4g115250.2 (locus Med tr4g115250) derived from phytozome v7.0 (chr-ID MtChr4; po s 26619537 to 26620071)
acattggagagaatagaagaggccgtttcttaaaggtacttgcacattctcaattaatttcactctatttagctcgaattggaatttggctgttgtatcaactcattctatttatgccaatattttctatatttgtgatggaatgaaattcaaagcatctaggctttacttggttttcaattggaaaagtttgcaaatatgtttctttctttgctacgagggatagggaaattcagttattctgcgggttcagtctgctccccagccttttacccgcaatgatgaatatttataacagactatttaccatttcacaacttgtttatttgtgagaaatggaaatttttatttggattttgcagtaaatgctgggtatcttgttagacattcctatcgcggttgcttgaaatgcataatactactgtaagatctaggaattcaaatttcacagatttcgtgcttataatggtggtcgatagagagtgaattgtgctttgcagtgtttcagtagaattattttggtgctggtggagat

SEQ ID NO: 31056 - DNA, 498 bp, Medicago truncatula
  Intron number 2 from transcript Medtr5g086460.1 (locus Med tr5g086460) derived from phytozome v7.0 (chr-ID MtChr5; po s 33158920 to 33159417)
ttcggtatgattattattcttcctttgattttttatatgccagctgtttcgtttctttcatatgttttacatgattttatttttacctagaatttgtattttgcttagcgccttttataagttcttaggatgaatttgtcatcgtcaatgttgttaaatagtggttatagcttagtaaggctgtagcgtaacggaatttgaacaaaattactattgttccgctatccgtgatatgctatttagtactgtacaaagtgttgttaaatggaggtgctatagcactgttgcataagggaatttgaatgaacagctattttctgcaatttgtgtttgacaacactggtggttttatttccctattttacttttgttttgtgcatgtgtgtgttgagttaatgaattatgagtcatgtcatatgcggggtttatcttttttactgaattagtttgttacttggtgcagttattttacattcataagcctagaaaagctcacaa

SEQ ID NO: 31057 - DNA, 920 bp, Medicago truncatula
  Intron number 2 from transcript Medtr5g096370.1 (locus Med tr5g096370) derived from phytozome v7.0 (chr-ID MtChr5; po s 38288010 to 38288929 reverse strand)
aaaaagaggctcaggtgcatagaaaagtgaagcaagtatgtacaagttcccatgtaaaacgtgaagactgatttcctttgccgctccgtagcttattactgatattatgtcaaaaccatgccgaagggcagactgtgatagaactgaatttgaattcagtgcagtaggtgactgtataatcatgtagtcagacaatccatgaccatccgattgagattggacggtccttaaaaaagcacattttgattttaaaaaaataaaatttccgactttaaattctgaaccgtccaatctcaattgaacggtcacacgaatctctcagtgacttcatggaaaatccagtccgacaaaaccacaccccttaaaaattataaagtaacaatatgaattgacagaagatatttatgttaaagttttaaaactagttcagttttctcactttgtatataaagagcaatttgcatgagagaaggggtatgttggaatcacttttctgttaggccagagaacaatatcaagtttgttttgccgtgtcaacttgtaatgtaaaattttaggaatataggctgagcataattacatatatgaaaatgctaaatgatttcatgttagtcctttctgaagcatattaggaggatatatctttcatcagtctgtagttgacatcttaacattttctattctccacataattcagctggttacaagacatttaagttttaattaagcattacttcttgaaaatgttaattgtgtcaatgaagaatatggcaagtgctgtaatatgcaatactttgaaaaaaatattactactgccttaaacctgtgtttatccctttttgaggtttaaaattgaactgttttaagagttatttttggtttcagaatttcgaggactttgttgtggagcatttcgtcag

SEQ ID NO: 31058 - DNA, 659 bp, Medicago truncatula
  Intron number 1 from transcript Medtr5g096370.1 (locus Med tr5g096370) derived from phytozome v7.0 (chr-ID MtChr5; po s 38288925 to 38289583 reverse strand)
gcttcttagggtccaaaatccaaatctagcacttggtagatttgtgttctccacttctctatttggcccacttctaacattccgatgactacatttgattctttcttcggaatattatactgacgtagatgaatatgctttattacagaaggcagtagcagaagtatgtaccatgcaaatttcaaagatgatgaaaagctgagtgaattctgaagttttaagcaatttgacattgtcaacgacgattcgaccatcactattttggtgaaaaatcttgcatgaagcaggtaatttgtatttttcataccattaaatagtgtatttcagttccaatcttaattatgtgagttttcaatgaacctatttcctgaacagcatcaagaaaattgggctaaagaaatccggaaagaaagaaagattttggagaaggattagccaggtgagattgttttgtattcctcttacaaaatagcttgttataattttccatgtcatattgtatttagcatttaatttcttttcaagctaaatgccgaattgcatttaaataatttgattaatctaagtgtactcaggaaatatcaattctttcaaatgtttgtttgttgtattacatgttttcagtactcatacaaaccaatcatactagcagagaaaaa

SEQ ID NO: 31059 - DNA, 870 bp, Medicago truncatula
  Intron number 1 from transcript Medtr7g070640.1 (locus Med tr7g070640) derived from phytozome v7.0 (chr-ID MtChr7; po s 14314333 to 14315202 reverse strand)
gacaaagcattcgacaaagctagcaggtaacactagtttataggaataaagccactttgtacctcatgctcattttgattgtccgtcacttttgttctttagctcaaacttctataacacacaagtcaaatagggaaaacctaaatatggtttggattcgaaaccaatgtcttgtgaagtaaagcttctcatatgaagcttattctaaaaggaaattttgtaacctttgagcttgtacatttgaatgaccttttccttctgttgccattatatatgctttcattctaatgaatgatgtgagagttaattcttaaattaatttttcgactatatatcaagtatatattagctttttattccctaaagaaggaccatagattcttaagccttttatatatttttgtacttatctttttattttgttttataattaaagctgacatcagattctatttatgtttttatcaagatttctagaataaagtgaagtgaaaagaacatatgttttggtgtttttggacaaaagtttctctttatatgctatccttttattttgtctcttcactttcaagctttgtaaacacttatgcggtaggcaaatctgttgtttgcatgctatcttttttcttttttcttttttctttctaggatcttcatactaattttctgtagcatatagtatctaggcataacaactttgtgtctttgtgataaaatagatagattataaatgcaaattttgaaaataaaccagcttttttacaaaatcatgtataaatcctcacttgaaatgtttattcttaggatctttttatttatttatttggtatttgtttaggacctttttacttaaagggagagcaaggacta

SEQ ID NO: 31060 - DNA, 614 bp, Medicago truncatula
  Intron number 2 from transcript Medtr6g014890.1 (locus Med tr6g014890) derived from phytozome v7.0 (chr-ID MtChr6; po s 3629222 to 3629835 reverse strand)
ccgtcaacacgctgactataactcgcggtcttggagttggcagtgcgctgcaaatttgacgtatttgaagagcgtagctcaaatgatatactattatagtaaattttttataccgtcaaataatcacaaccaatcatgcatgtgacttttaagatagttataattaaactcaaatatttgcaatgatccgacaattataatttattaacaatgtaatgaatctttacactaagagtgtatacttgaatgtctctaatgtgatgctttgatttattgtttaatgatgttgatgctcaataactgaacacaaattattaattaattaattgcaactaaagtagattatttcgacaaatttctgcatatatattgcacgcgaaataaaaaaagaagacaatgcatgttctaacatagacagaatgtgattgcagcatagatgttaagaacaactttagtcataaaaaaatgtgacaagacctttttcaatctagactgagttctcgttggagatagagaagccccggaaggtgaaaaagcgaaacaaactttgaaaaaatttaatctcaatggactcctgagggaaaaatcttgacaacaaatcgttggtcaataga

SEQ ID NO: 31061 - DNA, 409 bp, Medicago truncatula
  Intron number 1 from transcript Medtr4g079860.1 (locus Med tr4g079860) derived from phytozome v7.0 (chr-ID MtChr4; po s 16188217 to 16188625)
aattttggaatacgttcaaagtaagttaaaaaatttatatattttaacaattgagattaactttatggccctctgtttgattcagtaaatttgtaggtcaaaatcattttcgccttagttatgttcttcattagctaatgtatctgaatcttaattcattcaaaagagatgggatgtagacttgcttactagttaataaaagcaccaaaagcaacaccactgttgctattatttgcatatctaagaaacttttgattcatttttctttcctatcatttcctctattcttccttaatctcaattattaaaacaaaactaagggaccataataggggctcccttaactaaatatattttataattaatataattactaaattttttatacattattatttttgcaggagaa

SEQ ID NO: 31062 - DNA, 626 bp, Medicago truncatula
  Intron number 1 from transcript Medtr5g101940.1 (locus Med tr5g101940) derived from phytozome v7.0 (chr-ID MtChr5; po s 40825829 to 40826454)
tcttaaacaaacaccctggctacgtgttgagagtggttagtgaaataatggaaagaaaagaaagtattcttgacatggcagaaaaaaaaaaaaaaacaaaattctcaatgttatttattatatcttgtctataaattctttgtctataaattggtaaaaaaaaaaaacctaaactattagtgtgggatgtcctgattgaaatttaacccttaactctttcatttatataaattaccgataatgagtctttggcatatataccttcatctagacattcttgttttgttccttttgctaaaaaattctaatttttttaggagaaattttcacaatattaccaaaaaattatttaaccctttttactattattatttgtatcactatcatcatatgtaattatagtttcataacgtatatttgtcaaaatgaaaaaacttacacttaaatctgcttatttaacctggtattattacaatatacaatgaattcattgtatattctaataggtatacgatgttatccactgagaataaatcaaaattgccactatcttttgtccacccattctcaaaagatgtatcctgtaccggtttctgaatatatatgcatctagttggtgaacagaa

SEQ ID NO: 31063 - DNA, 423 bp, Medicago truncatula
  Intron number 1 from transcript Medtr4g079370.1 (locus Med tr4g079370) derived from phytozome v7.0 (chr-ID MtChr4; po s 15912503 to 15912925)
ctccgccctcgaactgtctttgttacttgttcaaggtgataatttgcatttcgaaattgcaaaactaatttatgtatccttatttgtttagtgactcttcatcatcctgactaagtctagttttaacggaaaattaattaccaaaaacatagaaaactatatactaggtgcttctattatcaaacttaattccttatatgcaaaaaaactaatttcaatttttggaaaactaatttcagtgtttaccaatttctttctctggtaggtgaatgttgatttctaattctattgttgaattttgatctttattgttaaagttgaatgtccatttgataaaatgaccacaaggtattaacattgacaaaaatttcagtgttgttaattgttaaattacgtaaagaaattgtttaccacttttcagag

SEQ ID NO: 31064 - DNA, 599 bp, Medicago truncatula
  Intron number 1 from transcript Medtr5g103280.1 (locus Med tr5g103280) derived from phytozome v7.0 (chr-ID MtChr5; po s 41371294 to 41371892 reverse strand)
catcaattccatcaagcccttcacttcattctcaggtaaagttctcctttttaataacactagtaaaggtatatcgcaagattatacgaatatggcaaaaaatagtagaaaaagaaatatgtgaaattttccggtgtttcgttagaccaaaagcttttcttaggttattggcctgtttggattgacttatttgagtttgtgtactgtcataaacatctgtgagactgtttgggagaacttgcaaaaacaacttatgacgtgttcatatgttgttttccgtttattttcataagccttccataatagcctctaaaaacaacttatatccttatacataagcaattaatttgattttatcttttgttatgaaaatagcttataataagtgcttatgctatatgctgcaaattaagttatgctctcaaaccagacctatatagagatagataaacatactagtaaagataccgtataaatgtggtggggggtcgatagttgaaagacttttctaggaattgataaagatagattgtataaatgcacatgtcgtattctaaaggtgtgtgtgtttcttcaacacaggatattcaaagaaggac

SEQ ID NO: 31065 - DNA, 778 bp, Medicago truncatula
  Intron number 1 from transcript Medtr7g084400.2 (locus Med tr7g084400) derived from phytozome v7.0 (chr-ID MtChr7; po s 18213406 to 18214183)
tttttaagacacagtttgggagacttgatatcttggtaagaactaagaaggcatgcatactactaaatattctaactgcggagaatctataatcatatgtttggtttggcggtgaatttcataaatttacggtgctttttttgaagctacaaaatgtaggttttggcaaaatcacattgactcaccacaatattgacaataccgccatcaataaacaaaagacacaaaagtgtgttttgctatttgatcataatataagaaattgttgaggtggagaagtgtcacatgtgatctatagtcaactgatgcttaaaaattgttcaaaatttcaattgatctattaaagtagaagtttttagttctccacatccttagagttagtgacttgatcaatgtagattcaacaaatataaaagaaaacgaatataagctagaaagattttgaagcactaatattcattttcttagtttttttgcataactatgacgcccgattgggtcacctcagttgtgaggaggacaactgatttagtgagtttctacttatggtgagtagcacagatgattgttaaaatttcaaacgattttcaagtatcagttcatgatagatcatgacacacttccctaagctgtctataatagatggcaaaataataataagttttatgatatcacaaaaagaaaagaacatgacaagccaacttgtttgtgatccttagttttatacgagtgaatcttttgaaatcttaagtattttaaattttgttgtaggtgaaca

SEQ ID NO: 31066 - DNA, 939 bp, Medicago truncatula
  Intron number 1 from transcript Medtr6g036490.1 (locus Med tr6g036490) derived from phytozome v7.0 (chr-ID MtChr6; po s 8073895 to 8074833)
tgggttgccattagggtgaaggcaggtacctacaggtaaaatttcaattctctttcattaactagtacaaaatatatgcaccaacatgattaattttttattttttttttaaagaaaatcactaatatgcaatgcatcccaaacttcaatattttttttaataattaataaatagtttattttttcattagtttttattttatcattaacacagatcccatgggacatgccaaaccaacaacactttgtttttattggggaaaaagggacctaagcccgagaaaagagaaaactagacactctaggggttgttatacccataacatcagctaacatcaaataacttagcttagttagacactgcacatacacacgcaacccagtcgcatgctcacaatctatatatgttcgcaagaatgtcaacacacaagttcgtttctttgtccacactttgtttggtttaattgtttttgattatttttttgtctcttgacattcattcaatgctttaatgtttgagaaactaaccgtgaacaaatttttttcttcttaaagtattgtatgttttgaaaatgattttttagaagagcaaatgagtcatcgtttgtgttttattggtgcattattgtagtcaaaagaactattattctttgtggaattgagggtgtggtttatatttgtatattacttttgatgcataagatagatgggttaaacagccttttactcgtgatttatacataaaagatatatatgatgtaaaaataactaatctttatataaaaattaattcattttgtttcgtttgaaaataacactattgtacaagatttttaatttttaatattttgaactctcgattttaaatgaattatgaaaaatgttaactttgtgggtatttcagggaaaagatagagattccacgtgataaaccttaca

SEQ ID NO: 31067 - DNA, 718 bp, Medicago truncatula
  Intron number 1 from transcript Medtr6g031260.1 (locus Med tr6g031260) derived from phytozome v7.0 (chr-ID MtChr6; po s 7156187 to 7156904 reverse strand)
gacgtgtggttccagatttcataggtaattttttacttttattctaagagcatccatagtgtagacgcctattttcaggtactttaggttcaacgtgtacaaatcattcatttataatttcttaatagtagtacctaacaagcattcaatccctgcaatccatatatcacacaaatttcttaaatgagacctactaatcaactatcaataactttatatcattacatttcaactttttaatattaaaagagtgcgagtcccgtttaagattgaggatcttaagtaagatccagagtcttataagacccctaaaaaatttctaaacaacacttataacttatatgcaaaaaccttccaaaaaaaaaacttatatgcaaataatttaactttatttaatcttttataataaaaacatcttatacgatactccctcccgttacaattttaaaaaatttataagaaacttttcaaaaaaaaataatatttggttctatttataagaaaaggtcacaatttttaagatgtatctatttcgtaaaagactttcttaacccttatttaatgtttgtctttttaatattaataaatatatttaatatttctcaaattcctataagggccgtatatttataaaaaaattcaaaaagttgaaccagttaatatatgattgtattggtttttatgttttttttgttcttctaatttgttgcagctgagt

SEQ ID NO: 31068 - DNA, 1049 bp, Medicago truncatula
  Intron number 1 from transcript Medtr6g098810.1 (locus Med tr6g098810) derived from phytozome v7.0 (chr-ID MtChr6; po s 21477675 to 21478723)
ctctcagagattctctctttttcatcttcgtagtaagtttattcgttgaccctttggcaaatactcctcaaagtttttgtctttttcaatcattctttcgtaaattttaatttttatggaaaatttaaaaatgggtttttgtttttttgatttatttttgcatggggaagttatgttagtttgcgattagattgcatttgctgttgtattgataatttgacataatggaatgtgtttttgacaaagattttgtattagtgttgttgttgcatgttgaggatgtgtatctaggtgggattgacacttcatattagagacatgtctggtgtcctgcatatgtagatgctaatgataatgaaacactcaaacagacccggacactagacataacactgacacgttgatatcagtaatagtttgagaaaattgaataattgaatgtatcacatgtctatctacccaagacgtacacttcatattgaagagtccgatgtccaacacatgtcacatgtttgtgttggtgcttcattgacaccaacacagacacaacactaacacgttcacacctgtaataatttgggaaaattgattgcatttggcattatattgacaatttgacatatggcatgtgtttttgggagtgattgatattatttctgttgcatattgaaagtgtgtacctaatgtagcatcttcatagggacgctttattgcctaatctctgggcgttatggggaacaatgttggttttgtggctcattactgttctttacgctttttgagggttttggtctagtcacctctcatgcgtttattttttcctttttttaataatatatattgagcaggcagtagaggatgggagtttcagtttcatgccaacctagttgggatgtttatgtctctccctgatgcctaacctatctcaatgcttataaaaaaaataaaatttagtaattcataggtatgtattataggttaatgaactgtgattgcttttgggttgtaattcaggtgttagactactgccccaaaattttggtcttaaa

SEQ ID NO: 31069 - DNA, 679 bp, Medicago truncatula
  Intron number 1 from transcript Medtr7g025400.1 (locus Med tr7g025400) derived from phytozome v7.0 (chr-ID MtChr7; po s 6205208 to 6205886)
cgggagcttcagtgcaccgggttgccctttttttttttttatatctcgagttaagttagtacgggtttgttaatcggttgagtcaagctttgtacataaaattttctttatgactgcatgcatatagtacaagctcatttcatcatttcattcattcacattgctttaaattatacaagtgttctaaaaataatttatggttcactaagtgtattatattttctgtttgtgtacagtggtgaaactcatcatgttgttggttcatttgtttagtttcatctgttgaattcctgtaattgagggcttcttcaaggtctgcattgaatattttggggactttgttgcctcttggttctgtttctgtgtgcatgagtctctttatgcatgatcatgagcaatattcaaaccttttttcacttcattgaagttataaaatcaattgtaatgtgcagggctgtaaaggtgtgggatttttttctttctaatttcattactttgcatggcattggaaggtggagccttttattgaggctatatttttacagatgctacttttgcatatggactatatagtataatatgaagatataatatataatataggcaaaatgggtattgatcttgtcactaaaagccactttcagtatcgttttatagcatatggctgggagttaccaaa

SEQ ID NO: 31070 - DNA, 334 bp, Medicago truncatula
  Intron number 1 from transcript Medtr5g034850.1 (locus Med tr5g034850) derived from phytozome v7.0 (chr-ID MtChr5; po s 14300452 to 14300785)
gaaaaggtaagttctcttcctcaaatttttcaatttttagtcttaagtagatctgatgaatacgagctggtcttgcatggttacaagactaaatgcgtagtgtttagacacacgcaaaaattaacaaacatcaagaaaaagtaaaatcatttttcttattacatactccatttaactttttttaatgatattgattcaatctaaaaaatgagttataattactaaaatattcataaaacatttttggactgtccattctcataaaacatttttttgctttgattttctcttatttgcagaaaagaaacacaagtgggtgataattattggtatc

SEQ ID NO: 31071 - DNA, 518 bp, Medicago truncatula
  Intron number 3 from transcript Medtr5g096580.1 (locus Med tr5g096580) derived from phytozome v7.0 (chr-ID MtChr5; po s 38376106 to 38376623)
atccggttagtatcactcaaatctttcctatgattcttaagatcttaacatggatagtttttgtgttcatttcttcccttctgttgttctacttctgaataatgcaactctctaattaaacagacatgggtatatatcattcttttaaaacacaaaagcgtacagtgataagtgattggttaagcttacttgatatattaacattctatggatatagttagtgccaatttgtttttcgaagctcttctatgtttctataagctgttctaaacagtcacgaaagtacttgtgctagtaggcaagctcaaataagtcaattcaattaggcccttagtgtaagatgtgactatagagtgtagacctttaaatgatcggcaataatgtaaacagttctactaatttggtgcttgcttcatttactcaaatactcgtgaattggttttgccattatctatgactgaattttctttattgatcatgtagagtacccttcctcagagaggtggggaagtaaacat

SEQ ID NO: 31072 - DNA, 647 bp, Medicago truncatula
  Intron number 2 from transcript Medtr7g045520.1 (locus Med tr7g045520) derived from phytozome v7.0 (chr-ID MtChr7; po s 10896213 to 10896859 reverse strand)
ggttgacatccttggaggaacaaacccaaagcgaggtatatataaaagaaatagttttcgatcggcttctcataactattttttcttcttataattatgtacatgggtttatataattatattatttttttcacttatcaagatgttgcatggatgagttgatataaaaaaatttggatgacatacaatgtgttagtaacattttaagaagaaaaaaaacttgatggtactggttatattgttccacctgccaaatgctgattttagaaatgtttgtttcgtttctatcaaaaaattaacatgcatgcaaattcttgtttaattgtatttgttaatttccagctgatttattttgtactttcgttttttaaacaagaaaacgagaatacatattcattagttagaggactaattgtgtgcattgggaatctccacattattccgtcatgtgtaatggcagactgatataataattctgaccatgttgtaaaaaagttagtgttgcgatatctttggctttgatagttatttttggcttttgtacttataatgtctacaataattataattaataatcagagttagattatgtttcaaaagagtttatatccttaaatgatatagaggtcttgtttttgcagctttgg

SEQ ID NO: 31073 - DNA, 886 bp, Medicago truncatula
  Intron number 1 from transcript Medtr5g101690.1 (locus Med tr5g101690) derived from phytozome v7.0 (chr-ID MtChr5; po s 40704701 to 40705586 reverse strand)
cttccatccaaggtaactaattaactaactaggtataaaaaaaaaaatgttagaaataaaaagtttgtctcactccatcgtgtgacatgcgtgtatctttcgtcatatatataagtccataatctacacattattttagctaatcaacatatagtctacacgctttgacacacacaactcttggttacatcaaatagtacatcttattactatacagtatgtattatgcaaaatctgtgaatatattgttgacaaaaactacactttagagctccaataaagtatatagttagatgagcttggtaataatttattgaaattccaaaattcagctttgaccaaattacaatatatgtgattttgttaatctcaacatcagttcaaaatatacatagtcatagtgtcatcgtaattatgtgaaatataccgctcatccaaacacatactcatgatacatagccagtattagtgtttgggtcttgggagatatgtacacaattgtgacacttgaattgcgttttattgtttatttattaaccgaatcttctttttctttctagcttcttggtttaaatttagattttatttagacacaaaaagttgacacattgtataaagttacattcaatttaaatgagacacaaagtcaggaaaaaaaaatcaaaatcgtatagcatacagtatcaggtgtcaacataacacttttgttaatttaacgattgttaattaccagtaactattaatcttagaagttaaaatagaggaataatagaatatatttagctaaaaggaaagtcactattcatcatctttaaacaaaaagttttaagttactttttttattggtggctgatgacaaaatattttaatttagttttcagttatc

SEQ ID NO: 31074 - DNA, 892 bp, Medicago truncatula
  Intron number 1 from transcript Medtr4g160590.1 (locus Med tr4g160590) derived from phytozome v7.0 (chr-ID MtChr4; po s 40734243 to 40735134)
aaacaccgcggtaatatttgttttcaatctttcattattcattttgttttattttcccttcatcttatatgagtatgaaatttatgtactatttgtttttctgctggatttatgtgttttggtcaattcattatgatattgttattgttttagcaaatacccaaattccattaagacatacattaggatattattaattttagatttttggcaaattagtataatttttaatgatatttttagttctatcttgactaatttaatcacatggtattttatccatttctcatgaactatgcagcttagacactttagattgaaggcatgtttggtgtctaaacacctacacatgtgattgcttgcattttctcaaattggtatcgatgttgtggtgtgggtgcctttgtcgtgttttcgtcagtgcttatggtctccatgcttattttccaacaattatcagctggattagcatggtcttgctttctgtatgtaagcatgtatatgtaatgattaggaaaattgatttactctactttgagggtagagaagcctcctaagaaaagataagaagaaaagactaatttctcatttcatgatcattttccttgtcaatacaagattatatagccttatgcaataactgaatttagtaacaaactagcaagagaatgtaaataacgctaacaaacttaatctagattttaggcgagtcaccgcatcagtccatctttggcttcgacattgtatttggcctcctgaatcataacagtatatgtatttaagatgaaatgaaaggcactaaacgtactagaataatttgatatttagataatcgatacagctaatttggtgtcatttatgatggcaggatatatcaaggactttcaggtct

SEQ ID NO: 31075 - DNA, 966 bp, Medicago truncatula
  Intron number 1 from transcript Medtr5g037260.1 (locus Med tr5g037260) derived from phytozome v7.0 (chr-ID MtChr5; po s 15681327 to 15682292)
ggaaaagtaataagagtaaggcgagacgggtaagtttgaggtagtgcgttcaaacacaaatttcattttattaaaagacataataacgagttttaattattattttttagggcgactgaggagttggtagttgacaaaaaaaattaggaagaaaatttgcaacattttgtttttttaaaaagcgttgtctacgaaacttaaacttttatatgtaagatataagagcatttcttaaaacacggaaaaaaagaaaaacgttaagaaggaaatttgcaacaactttttatctccaaaaagttttttttattgaaggaatgattctaaaaatttttctttatttgagggaatatctctaaaaagttgtttaattgacttaacaagttttaaagaaaaaaattagtaagaaattttcaacaactttttttctcgaaaaagtagtcagatagatttttttttaaagaaaagttgcctaaaagattaaagaacttttttttcccatagaagataagatatcattttaaaaaaaaaaaaaattagttaaaaaggaaatttgtaacttttttgactgtaaaaagttgtctaaaagacttaacttttatatataagataagagatcatttatttaaaaaaaaacaaaaaacaaaaagttagcaaggaaattcgaaacaatttttttttctcaaaagagttgtctaaaatcataagaacttttatatataagataagtgagagaattcaaaatatcaagaataggagtaatcttcaactcttcttttgacttcatttctaataggttacttgcaatcatacatatatagtattgaccttgattaagggtgtcgagtttacttgatagcaaattcaatcaaatgtcatttaatgatttgaattactatgttttaagcttctaatctttcattataaatgaccttttttgtcttttgaaaaatatttattgttgcagta

SEQ ID NO: 31076 - DNA, 754 bp, Medicago truncatula
  Intron number 1 from transcript Medtr5g037330.1 (locus Med tr5g037330) derived from phytozome v7.0 (chr-ID MtChr5; po s 15702531 to 15703284 reverse strand)
tgagagcagcaagcaagccaaatacgccacagcgagtactactaactactattacttgatctttttggttcctttgtttaaaatttgatattaaaacttgataaatgcatgttaatacctaattcagtcagtaaaagaccgtattttcattttttaagacttttgaactaaaggaggataaacaatggctatatatatcaactggctggtgtcacatcacatcagcttgaagagaaacactctttaatgcatgcatggtgttcttgcttagactgatgtctgacctagcctacgatgagccgttcactaggccttgtacactgtgtatgaggcgggtaggaagtagatgagaattgggttagctagtgacccctatatatataggagaatttcagggtttcttgcttgttcctaaagtatatcctgtttgctcctaaatttcgcttagggcctgggaccttgctccccacattaggagtgtataggtctcggatgatgggctctttagtttggccaatgggcttaggcaataatgacgatatgggccaagcatgaagcttgaaagagtgaaatgctgtaagagttattggattaactagggccgagcctgtaacccagtacacatagacgaaacactaataagagtaatatatgtgaggcaaaaaagcccatatattttgaatgtgatgcttggcattcgttctaacttggaaatgaaggttgatctttgcagatttgccagccactgctgggc

SEQ ID NO: 31077 - DNA, 361 bp, Medicago truncatula
  Intron number 3 from transcript Medtr5g032710.1 (locus Med tr5g032710) derived from phytozome v7.0 (chr-ID MtChr5; po s 13273374 to 13273734 reverse strand)
gtccataaaatcgtcacaaaggtgattgtttcttcactcatacaatttaacactgatctaaagttcatattatatcttctgttctgactaatattgctattccagacttcgatgttattcagcaaaatgtcaccaaaacaatcctttttaatcacttttggataattaagtagtaaattttttatgaagaactaattatttaggaagaaactaattaagtagcaagtttttgatataattacctggtcttgctatattttgtttatgttaaagagatctcacccaatttttcatgaagaaactaatatatttttttttgttaataagttgaagggtatagctgaaaaagcagtgtcaagaa

SEQ ID NO: 31078 - DNA, 376 bp, Medicago truncatula
  Intron number 2 from transcript Medtr5g032710.1 (locus Med tr5g032710) derived from phytozome v7.0 (chr-ID MtChr5; po s 13273760 to 13274135 reverse strand)
ggactttggtataaataatgtatgtgaaatatgtgctgctactcaatcagttatagtataaaagttcagtgaagactcttgtagctagcattagtctttactttcaatccttcaccgaaatatacattttttgtttctacttgaattttgttaattggagtttagttttggaccaagaaactgatatttgaatttgtattgaaactttatctataaaagcataagtggcagcatgaaatcgaaggaacatatatctgttaaatcctgctaattttataggttgatgatttgcatctactttattaatttttttttcttgcatcatttttcttcttctatagagaatttcaaagcacaggttaaacttgctggctat

SEQ ID NO: 31079 - DNA, 317 bp, Medicago truncatula
  Intron number 1 from transcript Medtr4g143100.1 (locus Med tr4g143100) derived from phytozome v7.0 (chr-ID MtChr4; po s 35770254 to 35770570)
taggtagtttacaagttaaaagaaagaaaatcagaattgacaaacgataagaaccctcccaaatattcaaaaatcaactggggcaatttccgaactgcctgaatgcaaagtaattttattaaattcaatgttgataacctccaaatttttcatttcaagcttttctaatagatatttgtaataatcgaatataaatttgtagtttaatttttttaatgatcgactttatgtattatatagtttaaatttgtaataatcgactttatgtttattgcaattaaggtattgtatacaatatatatatatatatatatatc

SEQ ID NO: 31080 - DNA, 780 bp, Medicago truncatula
  Intron number 1 from transcript Medtr6g077080.1 (locus Med tr6g077080) derived from phytozome v7.0 (chr-ID MtChr6; po s 15148119 to 15148898)
ttttcagccgagtcaccagttcgaatccgtaagaacaactcgtacttgccaattttctcttttttccagtcgggtcaccagttcgaatccataagaacaactcgcacttcccaaatatccccaagtgagttaccagttcgaatccataagaacaactcatgtttgtccaagtaacctctatcccctgtgaagtgaccagttcgaatccataagaacaactcgcagttgtctgtttgtttcattcccggtcaagtggctagtttgaatccaagaacagcttgtacctgtccaacttgtttctagttccccgttactctgctattcattatctttgtcaatgtctaccaatcccgcaatggatacgacatattttggtaattccaatccccatgaggtcttgcattcataatccaaatgaggcatggcatgcatattatttgaaaatgggtaggcgtatttttacgtccaaacacagtgcaaatactaatatttaagtatcttcgtcatatcaagccaaagactccgtctcttgactctccagacaaagaaacttaaataggggcagctgttataccctgtttttggacctaaaaatactgggcccaatttcatttcaaactttgtcaattatcaaatttcaactgcacagttcaaattgtctctgcctcgcagtattttcaatcacaattttacctatgtttttcttgcataaaaccttttgaaatgtctttacttgtcttataagtcattcaaaagtgtctctggatcattacattcctt

SEQ ID NO: 31081 - DNA, 975 bp, Medicago truncatula
  Intron number 1 from transcript Medtr5g014090.1 (locus Med tr5g014090) derived from phytozome v7.0 (chr-ID MtChr5; po s 4448680 to 4449654)
ccgtcgaaaggtaacgcttccttcatattcttgatttcattttcgaattacaagatcatcatcatcatcatcattctttcattgatttactaatcattctatcgttattattcctatttttcatgataataagattatttcatgctagattcctcgcactgttattatttttaaagatcataattgaagatgcatagaatttagggatctgcagtgaactatttatactttcttctgctaactacctcaaactatatttagtgttttcgttaagtagtgttaatgttaactgcgagatcaattaagttgctatagcttcaaccgaagtatcaaatcttgatgtagtcgtgtatttttgtaaatattcattaacttgaaacgtcacgtctgtaacgtttccaaattttgatcaaatgccctactattcttacatatttgaagaaatatccattaatcacttaccaaattaagtagcggttcaacactcaatgcccaagctagtgaaagcatcatgtgtgaagtgtgacatgtccgattcttttttgtattttcctcaccgctctcttctttaactagcagcagaggggatggtatgctgttagtttaaatatgctttgctttgttacatatatatatattgtggttagtttctttataagatggccatatagtttacagttcagtccttgttatctccattcttttatataatatataaatttcaaagcaagtaaggtaggcctcgaagctatccatactttattccaaagggaactttcttgaggggggtgttagatgtaaaaatcattcacttgctttcaccaataaacttaaaatctttgtgctaaccggtttatgacatgagttgattcattatatagagcatttcttgttttatcatttactcgacttgttactcattactttcatgttgtgacagcagcaagagttctcttaccaaacttgctccaattg

SEQ ID NO: 31082 - DNA, 813 bp, Medicago truncatula
  Intron number 1 from transcript Medtr4g079000.6 (locus Med tr4g079000) derived from phytozome v7.0 (chr-ID MtChr4; po s 15614967 to 15615779)
caggtttgaaggtggcgggagagagtaataaataggtatgcttataagggcatgctgaattataatagaagcattaattcctttaaccatgtttttctgtttctcacactttgttgtaggtttgagtagatcaggtaagagttgcaggttacgttgggttaattatcttcaccctgatctcaaacgtggcaagatgacaccacaagaagaaagacttgttatggaacttcactctaaatggggaaataggtttgagactgaataatattatgcagactcactattttccttttcttttcctactacttcatatatccaaatacatctcatgtcaatcataattggattggattctcgacggctgcaatatggtgctcaaacagtaaggacggttagatttacagagaagttttttttctctcaaaatctaatagtccttacattgcagcaccgtaataactatagaagatccttgtcaaatatacgaaatagaatcttctacaattgcagtaaagtgctgcagctgtaaggactattaaatttatagagaaattttatctctctaaatctaatagtctccactaccgctgccatagaggattcaagtccttgctcagataggctgatgcagtgatgaacaagattgcgttgtggcctcagagtcgcagtgacataaaaattgcggtgtctggtcttagtttggcgtcgcatacttttccttatgtatttttatgaaaattattgaatagatttggttttgaatttctatggttactcaagtttcatagacgtagctatgtgtgatgattgcag

SEQ ID NO: 31083 - DNA, 716 bp, Medicago truncatula
  Intron number 1 from transcript Medtr4g081040.1 (locus Med tr4g081040) derived from phytozome v7.0 (chr-ID MtChr4; po s 16808397 to 16809112)
acactcagatacaggttttccccctttaccgttagtgctggtcaaaatcattgaccccatttttatgtatttttataaaaatttgaacttttttcatttgggttatttgggtttttagcttgatcaaaatgattgaaccccatttttctgtttttgtaaaaatttgaactttttcatttgggtttttaacttgatcaaaatcattgaccctgtttttatgtatttgtaacaatttgaactttttataccttggtcaaaaatgagattgacctcagtccgtaagacttgattcaacaggattgtcaaagttggacgccttcacccaagttcaaactccgaaactcacatttgtgtaagtgagtttcagaggttgaaattcggtgacttcgatgacaggaaagtcaccaaaactttagggaaagagaaatttagtttgatagatatgatgagagagtagacataaagtcatattgactttcccgccttaaatgtagtggatctcgatcgagtttcggatggttttagccgctttgtttattggcaaaagaaaaatgattgatcccatttacctgtattcataaaaatttgaacttttttcatttgggtattcttctattttctatcaacttggttggtttcattgcatgtcatgcttttaatggtttcaagtttctactgcagtttaaagagagtgttgctcaatttgcaactgaaaa

SEQ ID NO: 31084 - DNA, 589 bp, Medicago truncatula
  Intron number 4 from transcript Medtr5g094080.1 (locus Med tr5g094080) derived from phytozome v7.0 (chr-ID MtChr5; po s 37085686 to 37086274)
gtgcttcattagaggtatatgtagaagaatgggtggctttatatttttgtttttatatttttgagttccacgtgcaagttttaaggcaagtagaagaatgggtggctttatatgtactccctccgtcccaaattataagcaaaaaaaaaatcacacttattaagaaaactaaaacataagaatttggagtatagttttttgtgtttttttttggaaaaagttttataggaagatgtaaaaacaattttcattagctattgtttatggaaaaaatgaaagacagagaaaattgaatgtaatttgcatttaattttatgagaataaacaaaaaaaatcatggaaaagataaaagtttgtcttttttgcttatattttgggacgaagaaaatgtgttttttttgcttatattatgggacggatggagtatatgattagaattatgatattatctctttaaattgtccctttccccaacatatctcaatgacattgctggtactttaacttcattaactttcattttcttattttatttcatctttgtattaaattaggaggagattgcatctttacgtgcaaaagttgttgt

SEQ ID NO: 31085 - DNA, 791 bp, Medicago truncatula
  Intron number 1 from transcript Medtr6g018020.1 (locus Med tr6g018020) derived from phytozome v7.0 (chr-ID MtChr6; po s 4485989 to 4486779)
ccctcaagtacacgataggttgatcaaggttgcatttcacattttcctattgtttttacaaccaacagcaagcaagccttatcccactaagtgagatcggcttactttgagtgcgtcatcgcccgtttacaaaatagtacaacatcattttgttaaaattccgttgtgcatagcgtctccatttgacaacacaatatttcagtcagacacttttcaaggtacattactccctggattacaatatatattctctagtcaaaatttcacacaaacttgatcatgtgagagttttggatcttttttttcttctgcataactattcaatagggtaaggttcttatacatatttatgaagagatatgcatacaaaattttcataggtcatgtgaaatttttaacatgaaaggattacacaacacagcctaagacttggaacaagctaaccaacttttggatacttgtctatgaatttatatactcccaatcctctaaacagggtcggcccaagcccaaagcaagtgaagccggctttaggccccaaatttttgggccttaaaatttggttgaatagaaagtgtttcggactaattaacccgaacaaataaatgtagtcgatctaagatagcactgctaattcagtttaaaataataaaaaaacaattgagaaattgtttcggtaatcggttctaaatgacgtaaaatcaataaccgaaggaaaaatcaaatgtaattattttgatttgattgaattattagaattatcaaataattgatttgattcttacacctct

SEQ ID NO: 31086 - DNA, 984 bp, Medicago truncatula
  Intron number 1 from transcript Medtr5g079590.1 (locus Med tr5g079590) derived from phytozome v7.0 (chr-ID MtChr5; po s 29688211 to 29689194 reverse strand)
tgcttaattgcgctcaactgcagaagagaagcaaggtacggttgcacgattttttggtaggtttgaaggttattttagagggcgtttagagtttgtttttgggagatgactttatggttttggtgtttagtttttattggtttcggaggcccttagtggagggtgtttttggtttgtttgtagacgtttgtatttgatatatgagtgtttgtttgagtgtttcgcgtatggcacactttttctttgtatgttgctatttaagtctcatagcttagtatttctcgtgctagttaggattctttgcgttttgaaaaatttcattttaacttcttaaaaaaaaaaaactaatgctctatttggtaaaaactagccggtggttgatatctaggtgctctatgatgagtttatagcggttaatagataagcaatttaataacagataaactagttttgtcaacaaaaaaaaaagataaacttattgattttatttgaagtatgtgataaaattaaccgttgaactaactaaaaaaaatataaaatgacaattttgtaaaaaaaaaaaaagaaatatgaaaggatatttttttaattaatatattcttttcacaataagataataagggtataaataaacgaaaaatagtattttataagttcaaacgctattataagttatataaaaagatgctacaaataaaaagatggtaaactaaactgatccatttttttttggtatgaataagaacaagccaaatatatcatgtgaacgaaagtaaattacagtgtaaatccaaatacataaatggttaactaacaataattgaaacaataatgagactgtaaactccgatacatcatgtgaatgaaagtaaattgtttcatgttaatatatagagcagaattttctgacaaaaagttgctatcttataacttaatttacataagaaagcaaattgaagcttcaaccaaagggagaactgtgca

SEQ ID NO: 31087 - DNA, 817 bp, Medicago truncatula
  Intron number 1 from transcript Medtr4g137180.1 (locus Med tr4g137180) derived from phytozome v7.0 (chr-ID MtChr4; po s 33718826 to 33719642)
gcatttgtgaggtctgttttattaatctttcccatgtatctggtagatattttgctgtgactgtttacttgtttaactatactctgttcaatatcccaaaaaacaaaacattattccatatattttgcagagtcacattggatgcatttgcttcctttttgtattcactagttctgttgatgatggtattttgcatagggtatgattggatggagggttttgttaggaaaagaaagggaaagcaatggccatttactgagtcatttttaattagccaaaatgtcatttcttataggaaacagttaaattaatgtgaaaacaatatttgtaattaaagctttctctaaatgaatttgtctccattacaagtaaggctgcattctactttaaattttagtttgtcatcaggatacacttagaattataattaagaatgaacacacttgtttactttagaagaatgctgtccataaaactttgcttcatttttgttcgaaaaccttaagtgtgggcttcaccatgtctgaaggtttaatttttaaatcccataagaacaagtgtgatatgcctcagtatacaccctttaattgacaaaataatatacattgtgtttttgaacctacaaatacaatcacattaccaatcctgagcaggtctaaaccaccaaatcatgtgttgaattggatcaacagtttggtgctgcacctgccaggcagcacatgtgaacgactgctcttatcttcctataatgtcctttttaataatgttttttcttgtttcaggtggcacgaactggacgcataggacttgtccgtga

SEQ ID NO: 31088 - DNA, 869 bp, Medicago truncatula
  Intron number 1 from transcript Medtr5g091350.1 (locus Med tr5g091350) derived from phytozome v7.0 (chr-ID MtChr5; po s 35746443 to 35747311 reverse strand)
ccccagttgaaatacaaaagcaaaagcaagagaaggtacgtacttgataaacaaatattgtgtcatatacggtgtttgtattttgatgttgaaataacatgactgttttttattataggttaaacatagcaacccttcttgttctaaaattgacgttgaaagaaagctaaggaagaacgagtgattacatatgaaactggacgctgaagttgtcttgtggttgaaaataagattttttgaagatttagttacggttgtaggaaagtgagaactttactttagagataaccttcaggattttgttcttttttaattttatgaattttggtttagacgcccttagtaattcttatggatttttcttgtgtggattcttgataatgcttatggattcttatatattatggatttttcttgtatgaattcttgacaatgctcatttattcttacggatctttagtagaaatgatgaaagctattttggccgcaaacatttttggcttaggcatgttaagcatgagcatatatatcaccatcaatttagatgtcaatattgaaaattgtcgatttagaaaatctgtgtttgtgaactctaaaataaggaaccaatgcagacttagtaacgaactaacaattttggtgtctagatgcagcaatctatttttggtttgctattttcatttatagatatttgaagaaattaatattgcatgtttaaaggagtgactgtagtaggttttaattctttcttagatcaatgatcattcaattctttcaattgtttgttccaaaagttatccctgcaaatgttttaacatagaccttagggacaattttgacttgttttaagttcaatcgtctcgaggagg

SEQ ID NO: 31089 - DNA, 933 bp, Medicago truncatula
  Intron number 1 from transcript Medtr5g039710.1 (locus Med tr5g039710) derived from phytozome v7.0 (chr-ID MtChr5; po s 16882073 to 16883005 reverse strand)
ccgcaggaacatccacaggtaagtattattttgctaaggattttcctgcataattattttccaatattatttctatattgccttaggatattgcgcatggtattgcagcgattttcctacgattttggatatagtttgtttctgcagattttcctgcggtttgtttattttgttgaaatttgtaagattttgaatttcttaattttaaatattgaatatagacccaataattttaaatttaagtccaaattaacatatatccaagtaaaatgtcaaacttgattgtaactaatatttttttgtttatattcaatattgaaatatttcgagaattaacataacattagaaatcttttacataaaccatcaacatccaaaaaattatatatttattaatttatttaaattagattattttgagaatgagaaaagagaaaacactctataagtgtaaactattttttctttcgatgataatctagatgggttagttcggctttaaatgaaaccttgtaatatacaatgagattgaaccttaagctaaatcaatgattgaacctgatatcgagttttaaaaaagaaaaagaaactaattttacactgacgtccaacaaaacttaaaaatcttacatttttttttaaaaaaacagttacaaaatatgttaaaatggaaagatgataaattctcgtcggacaacactgtaaaacaatttttcattgtctagattttggtaattatattatatgttatttatataacttttacaataaattttagttttgttataaagtaaatttattaattttctttttaattataaatgataattgttagaaaaaataaaacattttatagatagataaaattgatcgaagagtctgatattttgcacaaaagcctggtcattcacttcaccgccatatctctcacgt

SEQ ID NO: 31090 - DNA, 492 bp, Medicago truncatula
  Intron number 1 from transcript Medtr6g013540.1 (locus Med tr6g013540) derived from phytozome v7.0 (chr-ID MtChr6; po s 2888305 to 2888796)
ctcaagattggagcattcgaggtatggtagttttttggtgaaattttttctcaagctattgtgtttgttacaaagtatataggaatttaattcgttaagtaaattatgagaactaattaataaatttggagtaatatagaatttattaacaatcattttttcttcttcttctttcaagttttctctttaaaagagaaatagtctaggataagagatggtatatgtagcacatatatagaatattaattcaccacctgcaataatataaatatgtgagtcattgagaaaatgatttctctcattgaaaagattaatattaattctcatggtttattttttaatttgaatctaagttacaacaaatgttaataaaaggtcaaactactcttgaataaaacttgatacgtgatgtcaactaatcttgtttattttgtttgtgtttatttaataaaataaaatttgctgaatgtttattgcagtttaagtctcaaa

SEQ ID NO: 31091 - DNA, 585 bp, Medicago truncatula
  Intron number 1 from transcript Medtr5g074410.1 (locus Med tr5g074410) derived from phytozome v7.0 (chr-ID MtChr5; po s 26829564 to 26830148)
tacgttagcgaatgtatttaaatgttgattatggtgtttgatgggaaaattcaatgacttaccaaccaaacataaatgttacctagggtgtttgataggaaaattcaatgacttacggaccaaacataaatgccacctttatatataggatcatctagctagctacattttcaaagttgagagtcttgatattgaaatacacagaaagtgagataaaacctaaaaccgataatcatgtccctcaattagggtaatgcttatgggatggggtggaattggaagctgaaaagcaaggaagaaaatatgatcagctgtctctgaaggttagaaaagacctgttttttagtttttaaattctcttttgaagatgaaaaacattcaaaaacaataaaaaagagtgtgtcggaaaatttgttatagagtgtgatgctagcatttgtcaaaaatgctagttactaaatcacttctagtaatgtgattgttaaaatgatctctatccaatgtgtattgtttgtgtgatgtaaaactaagtaataaccacttatttcaggaaaagaagaaagaggaggcagaatttgaaatcgc

SEQ ID NO: 31092 - DNA, 569 bp, Medicago truncatula
  Intron number 2 from transcript Medtr5g074410.1 (locus Med tr5g074410) derived from phytozome v7.0 (chr-ID MtChr5; po s 26830235 to 26830803)
caaagaataaggttgttgaactttaaacactgttcacttcaattgatttagtgttatgacttgtttattacgggcataagaacttctgaacttgtatgggacccacccaccatctccctacaatgttttagcttacttctataagctcttcaacacagtttgtgaaaacttatagcttatatgacatttggtagcaatagttagcactaatgagcaatcaaacattcacctttgattccctgagtttttacttcacttaaccttgctttccatttatcaatgaatgttgcaccatggtttatttatttgcttgtgcctttgtagtttcaagatagaagcacgtgttctattcagatactgtgtttaattttgttgagatttttaggtgataaactagttcagtcttctctttttggtcaaattatacattttgttgagtattttaagcctaattatttaacaatttcatccatattgaagcatcaataccttgtctttatgcatagatattgatagattcatgtgtaaatacaggtgaccggaagttttgctgcacacggatcaaacat

SEQ ID NO: 31093 - DNA, 941 bp, Medicago truncatula
  Intron number 1 from transcript Medtr6g025290.1 (locus Med tr6g025290) derived from phytozome v7.0 (chr-ID MtChr6; po s 5627464 to 5628404 reverse strand)
gatttgggcgtcaacgttgtagatccggaggccatgtatattccggtcactttaattttatcgcatatttttgtaggcattatgtcgttatatgctattaacttggatgctgtgagtgtgttcgcaaattcatcctttacatttttagcggtgttgaatgatgtaatctctcgatttgaatgaatgaatattatctcattggtacaacaactctcatgtgaattaatattgggtggcaaactaattgtgttgctcataatttagcgagggcatcatgtttgtattactaatattctagtccccacgttgtatttcggccatcattataaatgaaatgaattagttgttctcgtgtaaaaaataaaatcatgaaattcggtgaataggatgactttgtgcacaattaacatgtttactccactccctgaaaaaactgtttacttttttttgtataagttttcatgtcattttttatagaactttttaatatttttaactaaattaattattttatataaaaaaattcatatgggtgtgattggttgtgaagataagatgagaagagagaaatacataaaagaatgtatgacaagggaagtgatatgtaaaaaaaaattgggtgtaatttttttttttatttaaaaaaattaatgtgaaaatttgagtccttgtttgttataagaaaaagagaaatgatataaaaagtagagaaatattgattatgtttaagcaattaggggcatgaattgaaacttaattattgattaaagaatttgtctcattttatatctcgtcttataatactattgaattgttaatgtttttatttttctaatataaccttcactatttattatctttttttttttctttttcaatttttgtaatttaatctctattacctagagattcttggaattggctgtggaaactaaaaatcc

SEQ ID NO: 31094 - DNA, 558 bp, Medicago truncatula
  Intron number 3 from transcript Medtr6g017570.1 (locus Med tr6g017570) derived from phytozome v7.0 (chr-ID MtChr6; po s 4162995 to 4163552 reverse strand)
aatatttaaaacgtgagttactgtttcattctataattgccatagtgatttatttttcttcttttgttgatacgtccttgacaataatgattgaatatgtaaatgtgtattcgacaataatgactgaattgcatctctagagagcaattttctagatgattactattttgatttctcaaaaattacatccctattaaatgaaataggatatggacatcaatttgttaccatcatttcatattcacaatcttgtatctgtgataggtgaccataaattttgtgctgtttctctaaaaattctggcattgtcagtgtttgtacttcaatttgtaggatagaattgtattgacataccaggcagttcattttgagattttttacttgcaaattatgaaatttggaatcgcaataggccacaatccgacttcctaactgctattttgattggcagcggcccccttctgacataaatttgttttattctattttcttttgaattctaatcctagttttatgtttgcagcttatttcttggaggcttatcgaccagtgagggaa

SEQ ID NO: 31095 - DNA, 1015 bp, Medicago truncatula
  Intron number 1 from transcript Medtr4g098390.1 (locus Med tr4g098390) derived from phytozome v7.0 (chr-ID MtChr4; po s 21153148 to 21154162 reverse strand)
ctcttaacaataagaaaaagaagaatctcaaccaggttagttcatccactctacactcttccttttttttattttttttatttttttaatttggtgaggcatttttgttctgatttttggtattgtttaaagttagttttccgctatggtgatattttgctcttacaatgtcgctgcgtagctctgttcgctaaaaaatagcagatatctgataaactagttgatagaaaatgaagttataacaataatcaataagctaacctaacatgttgaatttgtagtatttgatcaaattagcttttgaactagttcatcaatatgaaattatataattttttatttatttatttaatatttattaatttttttcgataagataggaagggtaaaattgataaataatgataaactaagagctcaaaagctacttgaagttgcttatcaaaaaacactaggctctgtttggcaatgccagattttgagcttataacttataaacttgtattacaaaaaactcgtatggtaatattattttcttacgagcttacaacctattttttactagcttatagcttattttgataagctaaaagcttataacttatcattttttcccctcaattttacccctgtcatcttacttcaaaaaaatatatttttatgtcatttgataagttagttcaactgctaattttaccaaacactacaaattcaatcaactagcttacaagctcatcagcaaagaagagcctagaagccagtaaaaaaagctacaagtccgttcgtgacaaaaaattgttactaaccagatgtattttggtcatgtgattatataagctataaactaaaattttccttcccaaatagagccttaatgttcataatgttctagtgtttccttctctggcttagtttaatgtagttttgaattgatcacatattgcatatgttctatacttctatttatatattactaagaccgtcttaacattttcactactactgacacagggac

SEQ ID NO: 31096 - DNA, 987 bp, Medicago truncatula
  Intron number 1 from transcript Medtr6g069970.1 (locus Med tr6g069970) derived from phytozome v7.0 (chr-ID MtChr6; po s 13081906 to 13082892)
tcctttttttctttgttgttgttgctacttattgggttgttgttattgtttgttcttgttgttggtgttgttctttttttctttttctttttcatgaatgtgttgttggtggtgttcttattttccagaaaatgggggaagaagatgaagaatttaagtggagaagatgaagaaaataaattaagtttttcaaccatgccaaaatgacacgtggatagcagttaacgttttttttgattaaaactaatggaagggaccaacacatgtaacggagataaagataaagtaccaaaacaatcttttttttacttaagggatcaaagcgataccaaataataacttaagggacgaaaagagtaattaagcctaaagtttattaagaattaaaggtattagaaatacctagatatatgattaaaaagttttctattagtaatttgaaacacactagaaaagttagcggtgactaatttggtttttcctcaatcggtacttttaagccccaagttctcttcagatggaaataagtgagaatatgccatgtacggtgtattgggggcaacagcctagtatactttgatgatcaatttgtattttccattatttcgttcatggatcatagtaaaatccactcatattaagtccatatcagaagaagacaattttttttttgatgttcttcagagcgttgacttcatccatcagaggttgtcttcagatcaaagtttttcttcaagttttggtgcatccggactagatttttgactttttgttgacaatcatagttttgtcatagtgaattatcttgacccaaaatcatctctccaacttgtctttcattttcccttttattgaaataaatgattttcacatctattttgttttttattttgtgctttcatcgtgaggttgtttgtctttcttgtttcgtttatgtatttgttcggttcagattaacagatcaacttcgttccacactactagaaa

SEQ ID NO: 31097 - DNA, 767 bp, Medicago truncatula
  Intron number 1 from transcript Medtr7g011120.1 (locus Med tr7g011120) derived from phytozome v7.0 (chr-ID MtChr7; po s 2609335 to 2610101)
tatcatgtaagttcttctctcttacactaagatcaagatttttgatattgtaaaaagttgtagtaagataaagttgatatatgatctcaaattcaagcatgatttttgatatagtaaacaattgtagtgaaataaagctgatatgatctcaattatgatcttgatattgtaaacaattgtagttagatgaatctgatatgttctcaagatggtagttagatacactagtgacaagatcttatttatgatttatgttgtaaaatattgtagttagatacaactaatatgatctcaactacagtcacattgtagtagttgcaagacatttttaactaagatatgttaatttcttgatgagtaaactaccaacttagcccctaaagtctaaattatatatagagtagtactaaaatatataaaatatgtgaatttggactaaatattttgaagactacttatattcataatgatactttagggattatattgattaggctaagtctatcatacacaagtaagatattgttgtaccatgtagaaattcggtttttcaccattggatcaataagtatcatcatatctcggttgatcaatgctgagacttatagatggtgaaaaacaaacttgtgcgtagtagaacgtttatcacactacgtgtgcatcattttctaatgtatagaagtattattacttctatgacatataaaagcattactactactattcttaatcttgaaatcttttgtgatcaaacaacaggttgcaac

SEQ ID NO: 31098 - DNA, 841 bp, Medicago truncatula
  Intron number 2 from transcript Medtr5g013710.1 (locus Med tr5g013710) derived from phytozome v7.0 (chr-ID MtChr5; po s 4184089 to 4184929 reverse strand)
ttgttgctatcaaatacattgaaagaggatataaggtcaagtatattttcttcatatatcttaattaaataaagcttatgcgttgcatgtacattttacttgtttgataagaattaataaaaaaaattctgctaaataaaaggattaattcgatattctgattttgaatatttttcttgatccatggatttttccccaacctaattgccattgatcgaccaaataatctgatctcacatttggccttgttttttttttttttgtttttttttattttttatatatgatctcattgtgttattactatgtagtttacatctatatattttctgccactccttcgggtttggtatcagttagctaggtggtgggttgggtgtttgtgtcccccgatgatcttattcaacacttcgagtacttcttaggattaggtgtggggaagagagtgaaactagggcttcttttagtttgacatgttgttatgtggaccatcaaaaacccgtaatgatctgatttttgtcggtgactcgcgtgcagatgagccggtggtggatatagtgaaatttttagcttggaaatggttttgagtccttgctccttctatgaatgagaggtgcaactcatcttgtgtttgacctaggagggttttgtggtggtagacgccctgcggttgttggggggtgggggtggttttagcccctctcctagctgtcatttccttgttgtggttccttttttccggtttttgttttggtgggttgttttcctgggggttcggtttgtttttatttttctcttctttgcaggggctggtgttggccttgacgtgtgttcctccttt

SEQ ID NO: 31099 - DNA, 843 bp, Medicago truncatula
  Intron number 1 from transcript Medtr4g096430.1 (locus Med tr4g096430) derived from phytozome v7.0 (chr-ID MtChr4; po s 20299715 to 20300557 reverse strand)
caaaaatactgcaggatttgaatgtatgcaatgcaatttgacaataaatattcctatgagttttatagatccaaatttttaatcaatagctgccctttgttccaactctaatattatcacaaatacgtgtggttttataattttctctttgttttattttctattttcttcgaatatgttctttccaaacaacgagagctagctagcataattgtttaatgcaagtatgcaaccaactttgaatctcctttttttaaatgtaaggcgaataatatggatatcattgaacaaatattgcctgccacacaagatttcggccactttttacttcacaatctcatattcgaattttctctctttttatttatttaaggcaaggtagtttatgataaaattgaaaattgtattttgatcgtgcaacatttgggaatgttatatgttaattactcaatatcttatgagatttggatcttaattcgtcatgttgtaagagtctagacaacattgtatttatacatgtaaaataacaaatataaattataagatggtattaattaaaagtataaaaagatgcgtaaatacatgaatcttaagtaatgtatcagatgcatccaaagtagtgttgttgctggaagttggttgtaaatggaaccatctgtgttttgagttggtaacttaagtttaaggtcttcttaatcgtttgttgaagtgtaaggtgtgatatatttcctacgaggtgaattatacgatggatatttttttaaagtttggtcttaatttacttttgtatacttgtatttttaatttggctcctaactttttttttccttgttggtagattag

SEQ ID NO: 31100 - DNA, 481 bp, Medicago truncatula
  Intron number 2 from transcript Medtr4g083990.1 (locus Med tr4g083990) derived from phytozome v7.0 (chr-ID MtChr4; po s 17531450 to 17531930)
tttacagttgtttcccggtctcatctcttaaaagggtatgtcacatgatgtatatctaacttctctaacccaatttaattcatatgcatgttctaaaattgttttacaccgacaatcaatcacaacttgctaagaaaacaaacaaattgcattattgttacatctttggcagctctttatatgcacacaaattgggtaaacagctctttttctatttactagttacttccaaatttatgaattaccgacacatacaccaaacatgacactgatattgacaaatagatactaataataaataatttattaaaatgaaagtgattcaatgtaacaatatgtgtccgtgttgattggtgtacaccacacacatgttcaatctaaagtatatgcctatttaaaacctcaaaattcaatactgattcttacttctgatttttcttttgcagccaactctggaaaacggtgataaaagtaagtgcac

SEQ ID NO: 31101 - DNA, 498 bp, Medicago truncatula
  Intron number 1 from transcript Medtr5g048310.1 (locus Med tr5g048310) derived from phytozome v7.0 (chr-ID MtChr5; po s 20419503 to 20420000)
gagttcgagcccttatgttagatacttatgactacaaaggagatatatgattgtgccattcatttaaaggaaaatgccacaagtttactgcatttgtaagtgattcttaaaagcttttatctaataagaaaattttacatgcttgtaggactgatgatgaaaattattgagggatcttgattttttggtatacaaaaatcaaatcaaatatttgctgcagtcatgcaatctggactgtcgaatctagattagacaaatcacctttttgagtttagtaaatttggaacctgaaccgtctaatcttgattcgatggtccatatcagcaactatgtgattgcacgaatgcatataacctaaatccataagtaatattctgtggttatcgtaactttagagacaaactcagagttttcgttttgtggttagatgttaaaactaagattttcttgttatttttctcaagttttcttcttctttcaaacaggaacctgccataa

SEQ ID NO: 31102 - DNA, 470 bp, Medicago truncatula
  Intron number 2 from transcript Medtr5g068810.1 (locus Med tr5g068810) derived from phytozome v7.0 (chr-ID MtChr5; po s 24716274 to 24716743 reverse strand)
agagcatccaacaagtatttgtttctacgagctttgtttttatcttcatcaggaacattaataaaaagttgctgttaatacgtctcataatatttttcctgccaagaaagaacatgtaattttgaagtttgaaaagagtggaatacatattcatggactactcatatacactcaatgtcttataagcttttgtcagtatttgacaagctttgatgttaaaccaacatgtggcatgcaggtaaaaatcttaactatgtaatcattatttagtattcaccccttgtacaaattgtgtattttacttcaaaggcctgcaactaaaattaaatcaaattaagtttagtgaattttataatatattatacacatatttgctagtattcttcatggatgaaaattttgatcagcttaaatacaaagttattggtgttaattttttatgatgtcacaggaacttcatttcattgttg

SEQ ID NO: 31103 - DNA, 700 bp, Medicago truncatula
  Intron number 4 from transcript Medtr7g015120.1 (locus Med tr7g015120) derived from phytozome v7.0 (chr-ID MtChr7; po s 3734362 to 3735061 reverse strand)
atcggacgtgtaaggtttgttttactgtttttatgtggcagtgttgttgtcgaaaaatagataaacaatggaatatatttatcgcatcatatttactatagcaagattaaattgtcaatctttactagttgaaaattttaatcatttatggttacatatcaaaactttcataacgctggggggaaaccatctgttcttgttcttgggtgataatgtcaaaggtgcattgtgctttattcaagtataagaagcatatatttaaggaaattttggccatgaacataatgcttttttgagaactgatactgtaataaaaagcttagctaatttactgtttgagtggactttgatctatattgtcttctgtgattaagtatctttgaacctgaattactgtgcttctcagttgtgtattaattactacctctgtccctttttatagaatctctttccagtttttaactgcactaattattctattccaaaatatccctgattattttgcatcaaatttttttttttgctagtataattatttttcatcttctttgcaaccaataagtaagcaataaatactatacagggtaaactttgcaaaacaatacaaatttgttttccaattcatagatttatttatttttccaaaaggcaatccacagatcttgtttctgaattctaatttgttttctttttttaaggt

SEQ ID NO: 31104 - DNA, 839 bp, Medicago truncatula
  Intron number 1 from transcript Medtr6g017500.1 (locus Med tr6g017500) derived from phytozome v7.0 (chr-ID MtChr6; po s 4109375 to 4110213)
tgttggctcactagtatagtgtatagttgttatgatgtatatactataaattagcaccagttgttagagatttgttaattgacaactattatttatgtagtggtgtatagctacaagttagttgcataagtttgagtcggttagtcagttagagattaacctgctaatatagtttactttctagtcaagtaaccatagttagttaaagctttgcattgtgtatataaggagaacactagaatgcaattagatacaaagagtgtgaatcattgttgattacactgaatagagaatatatattataactatttttctctcttttctctctaatctcatatctcttctattccttttcacgttgttttcatgattcactttaggtttatcataaattagaagcttatcccaacggtgactagtcgaaggggcaagaggtaccacattgatgtagattaccataccggtgcaacgctcataccaggaaaatatttctacctcaattattttgtattttatttgtctggctttaagactttttgatccattacctgttaaattaactaagggtctatatggggtttatgaaacgatagaaaattgctcttttaggcacctagcaattgctcacgaacatcttaaattttggaaaataccttcgatggtatttaactaccgatcatatatttcagcgagtataggaatggtagtaaactaccatttaaaggaatggtagttaagtaccattctaactaaaatgatcgaaagtttgagtttcttttaagcacttttaaagttttattacagcctccagttgctgcagtttccatttcctatccaaa

SEQ ID NO: 31105 - DNA, 982 bp, Medicago truncatula
  Intron number 2 from transcript Medtr4g033780.1 (locus Med tr4g033780) derived from phytozome v7.0 (chr-ID MtChr4; po s 8443978 to 8444959)
aaaaaaccaattgttcttaatatatttttcctttaatttaccttgatcattaagcatgccttttgtgcttagtgaacagtgtttgctttaccttcctgaagggttaactgccttggctcgttaagcatgactttcatgcttagcgaatcgacttttgcattttcttatagaatcctctatttaggctcgcttccacctagccatgcatgtttagcatatcgtggttgtctcaagatgtctttatgatgctcttgcgcgtgcgcttgtctttgattactccgtatttgtgtagtcattgttttaaacctataaaattgtataaaaactggacgtaaaagctttctggcattatatactaatataaacgatatttgtatcaacttgggggttttatatgattgatttcttacaaaaacaagtcgataagtactatggtaactaacagtaacttttcactaatcaccaagtaactcttgaaactagttatttcttttgctttgcttctcaatttatgatccttaattttgatcttcgtgtgcacctttggtcatgtttctttcatcattctttaagatgttatataaatttctccttctaaagtccttttaatcttgcttttgatctttagaatttcaatcatttgcaacctttgacttaatattctaatctacctaattcataacctaaagtacgcttgattttctattttttcttcaaaaacgttgatcttgacttatgagatgagaatcattgttgaacaccatactaaacttcttggtttagtcattctgaagtgtttctaatatgcaattaagatcttcttaatttgcaatctgaagtgcttttaatgtctgatttgaagttctatatttttattgaagaattttgttcttgaaattgacatggatttgcttatgatctcatatttccttggtgatttttgtttttcatctaaaagtgcccaaatacttttgatctcatc

SEQ ID NO: 31106 - DNA, 709 bp, Medicago truncatula; identical to SEQ ID NO: 27838
  Intron number 1 from transcript Medtr6g099190.1 (locus Med tr6g099190) derived from phytozome v7.0 (chr-ID MtChr6; po s 21770403 to 21771111)

SEQ ID NO: 31107 - DNA, 564 bp, Medicago truncatula
  Intron number 2 from transcript Medtr5g087730.1 (locus Med tr5g087730) derived from phytozome v7.0 (chr-ID MtChr5; po s 33934891 to 33935454)
cgtcgcgaatccctgaaattgcggagattcgcgcggtacggtggatatttttgaaaaacccttgtagtattacttatgttcttttttgaagattgatggtttgacactagttgacgtaatgttggtaattgatattctttctggattactgtaataggatttatagataatgaattgattaatgtagttttctgttttatatctcttaaaggcagctgtttacttgtcttgttaatgtatgtgtttaagttgactttgaattcattctgaatttgcagcaatcttttttgtttgtttctgttgttggaatttcagttttgttgaccggtttttgtcttttagttatagctaagttgaatttggagattcatttctatctacttgaaatttcttgtctggagtgttactttgtaactgaaaaatgttattataattttaatgatcatgagctaaaagttacgagttccgataaattatatactaaaatattgtttatcgtgttgtcgttttgtgtaattattgtttctaacattttctttatcatgattttcatagcaggacgaa

SEQ ID NO: 31108 - DNA, 597 bp, Medicago truncatula
  Intron number 1 from transcript Medtr5g093230.1 (locus Med tr5g093230) derived from phytozome v7.0 (chr-ID MtChr5; po s 36659172 to 36659768)
ataaaagagttggaggttccaaatttaaacccgaaggaaggagaaaaaagtaattaacaattaattactaacatgagtctttcctttaaaaaaataaatattagaacaaagtcttatggaccaaaatgtcaaattatatcctttcatgtattcgttacagtatcattaccctttatgtaatcttaccataattacagaattgtcttgtaaagtgtcagtagtccattttttttttatctttttaaatctaaaaacaaaaattaaaaaacaaaattactctgaactgttttcccctaaaactagaaactaggcttcaaaactattattgtaaaaatagttaactcatacaaatttttttaaaaattgataactgttttttgaaacgttaataatgaatccatggttattgtatgcgttttttcaacattatctgtgagagaaaaactaggaccgcatattccaaatgagtcttcccatgaagtctatccattttgtcttcatctagttaagtctccatgtcatttgtattttgtttataaatgcgacaagtaataataagttgagttttaattactttggcagaaagcaaaattgaag

SEQ ID NO: 31109 - DNA, 706 bp, Medicago truncatula
  Intron number 1 from transcript Medtr5g017060.1 (locus Med tr5g017060) derived from phytozome v7.0 (chr-ID MtChr5; po s 6078969 to 6079674)
tgtatttcggtgacttaaattttatcatattatttgtaggcatttaagtcattgtatgctattaacttgagtgctgtgagtttgttcgcagattcacctttgcgtttttagtgacgtttgtatttgatgcactatatcaatttgaatgaatgaatatcgttttatttttgttaaaaaaaatgttgtgagtttgagtcacactaaggggagaaaatcacggggttcaattcactaataaatgtagattgtttttattaataataaagtttatattaattaatgtactttaatgtataaggtaattagaagattaaaaaataaataaatttagaagttctcctcatgaaaagatggggtaatagtcaatttgatttttgaatatgtaaaaagtagttacaatagtcacttaatgtatcaaaattttaaaataatatctgattgtgcattttgatagttaaaatagtctttgatgctaaaataattcatcaatactcacgatcttttcatatagagactgaattgatagttagtaaatacttataagaattgatacgacactaagtaagtatattaaaggactaatatgacaatactaacctaatattttaaatgtcaaagactattttgactaacgaagtgcataatcatggactattttgaaattttgatacattgagggactattgtggctattcgctacacattc

SEQ ID NO: 31110 - DNA, 698 bp, Medicago truncatula
  Intron number 2 from transcript Medtr5g007370.1 (locus Med tr5g007370) derived from phytozome v7.0 (chr-ID MtChr5; po s 1078029 to 1078726)
gtctagcttctcacaaagatcatagagctatccaggtaaaacaaaatacttataaacaccaagtgctacatatgttatagatataaataatctataacatatgtagcactgatacttcgtattaaaagtttatctttaaacatgcgattacaatcaattacttatttgtttcaatgtggtgtctgtgtgttcagtctttgatagtctatgactccatttcatccaattttatgaagatttcaaatcaaaagcttaaaatttgagggtttaaaattaaatttgatacatgtaattttgattgtgtaaaattaatgcattgttactttcttggggaagggtccaatccattttaatggatcctaaaaatatttgtctcctgtgttggtttcatcgatcacagtgtgtcattgaattgaatgctcaatttacaattcaaaagtcaactatggatggccaattaaaaaaatgtttttgactttttttttcatcaaacaagttattatttttttgtcaaaaaagaagaagttattattgtgcaatttaaatatccattgctcaaggaaaaaatagactatgatgacttttataaaatttaggttagatctaactcatctcttacaaaatatgtattactagtaacaaaatattattttaatttaatttttttcttgtttcatagataagaaggtcttcatatc

SEQ ID NO: 31111 - DNA, 837 bp, Medicago truncatula
  Intron number 3 from transcript Medtr4g028690.1 (locus Med tr4g028690) derived from phytozome v7.0 (chr-ID MtChr4; po s 6652258 to 6653094)
agttgtgttgcctaggtctacttgtgatattacaggtgaaataatttgcttgtttatgtgaatggtgaaataatttcaattaataacttttttggttaatttttccttttgttttattttgttggaacttggaaatggattccctactttcagattgagattttattcaaattgtgattgtgggaagatcttatatatcctgtttagatcaatgatttatgatttatttattgagctttaaatctggaccatctgatttcaatcaaacgctttattgaaatgcatggctactttttccgtgtgcaacattttcaaataaagttgcaagaaagaatgtatttggttgaagggtcacaatatattgtattgattgagtgaaaaggatctaatcatagtgtacatcttttgcaaatcataggtttattgaaatattgactctttttcatcaatggttgagattacttactttatactattcattttagatgagttatatcttgtaatttgttcttccttggtataactaactgggatttggttaatataaagtaagtaattcataacaatctcaacagttgatgaataaatcgctgtgtaggattatcacatgtcaattttttcatcaacgttttgattgcttatttcaccctttaaagttaattgctcgctttagaaaagctaaatccatgtataagcgaggataggtagttacttttgaaatattgtcatttccaaatcataggtttattgtcatgtacatgtattgcaaatcaatagcgtccttgtttacttattgactgttccttgttgtatgtacattttcactttgtagttaca

SEQ ID NO: 31112 - DNA, 879 bp, Medicago truncatula
  Intron number 1 from transcript Medtr5g064990.1 (locus Med tr5g064990) derived from phytozome v7.0 (chr-ID MtChr5; po s 22664379 to 22665257)
tttttagtaatagggataaattctttaaaaggttatttaccctctctgtgatttttttctttgttttagaattctttacaaatattaaaaaattgatagtaaaatcagtcttctgtatacttttgatagtaaaaaattgatagcaattgtcgccatttattgtgaattactctctgaatatggtaaatttttgtaccatactttaatgctagtttttgttttaaccaaattaaaatttgttactttgacttttatattatttgatttgcatattaattttcattgaagaagagcaaatctttagcaattcggctttctaaacaccaaatccccaaattggttttaattgttgttcatcattctttttataaataattttaataatgtttcttacaatttagtttcttgttggctgtacgtgccaattggttatgcaaaattaaaaataacattttgtcaaattgtccatactctatactgtaagtcgtgccaattgaacataatacccaaattcaacgtgacctgggaatggtaaattaagcatttcgtttctcattccttctccatttttaatgtttgtttgtttgttaatgggttgaggaaatgcttattgttagaaaatggcttatggttcagaaattgttagaaaattacgcacttaagcactcgtttgtgagagacaatgtctacttggaagagtttttaaaaacaacttctaacttatatgaaaacaattcgacagatgttgaaacgaatgagcaacaacaatggctgcttatggttgtcatccgtagtgaggcactactctagagtttgtcccccgaggcccgttttagttgataaagtaatcagagttttcgaacaacattactcgcttgg

SEQ ID NO: 31113 - DNA, 882 bp, Medicago truncatula
  Intron number 1 from transcript Medtr4g101130.1 (locus Med tr4g101130) derived from phytozome v7.0 (chr-ID MtChr4; po s 21856134 to 21857015 reverse strand)
actaataaggttggaggaaaatcattttggttttggaccaagaggtcttgataaaggtcccgcaaaggtaaagaatttcatatttgttatggctgattgaaagatttgttgattattgacttggttattattattattattattattatttttaataagctaaactagcccaccttgagaggagctcactccaaggtttcaagccacaccaccagaacccaaatgggttattgacctggttattattgattattttgtttttattgtcacacacacacacacacacacatatgtaatatatataatatgataaaccaagccttgccccattaagtgagatcaagtgatacacttttgctctattcgaaaccaaatttacagcaagtccatttagagtatggtccttttaattgtttctcctaatttttttgagtccttttctcctcgttttaaattggattgttttcattttgatcccttttgtgcaactatgcctctctctcggttcttcttaaatgagagaatcaccttagatgagtttctggcatacatttttttttagttgaacttgcttacccttctgttgatattatccaccattttaaagaatcaaatttgcagacatcaatttttattttgttcattttgaaattgagttataaaatgattaagtacttctgagcaatactttgggtagttctttacccgatatatgtgaccagattttctgcaacccttagacacgagattggatcgagtctaccgaggtgttgcttaaagcttcactgtttaaagtattgatgctataactcttcaagaaaacatgtttttcttttttggaagatacaatttataaacttgtctggttgcaatctgaaggca

SEQ ID NO: 31114 - DNA, 880 bp, Medicago truncatula
  Intron number 3 from transcript Medtr5g040020.1 (locus Med tr5g040020) derived from phytozome v7.0 (chr-ID MtChr5; po s 17062385 to 17063264 reverse strand)
cacttcaagctcagaaccaaaaacttcaagctgaggtttgtagttttctcttaactcataatcatagttttaatatattaggattttaaaggtttatgcaacggcatcacaaccgcaattgcgtttattttgctgtaatgtaaaagtttgcagcgtaattaaccgaagtttaccgttctttcttcgtcatgtgcaaagacttaattattaacaaactttccaattaaaaaaaattaaccaaaattcaaaattgtcctcataataacacaatttccaatcatatatattgtagtttagttgcttgctttcattttattttttgcttaatttattatttttcataacaattgaaaaaagaaataaatgatctagaactaaagccttgcttgattttattttacaaattttgtagaaataatactatttggtaatgatgatacttctttttgatgtagttatgcttttttgactatctgcatagttttcagaacctttcctttcacctattctctaacaacaactttatcaaaagctgctttttccaatcaactaaaagtaacttaatcaagatccaatgattttattttcacttcaatgacatctttctcttaaataggttactagttttccacataaaaatgtctcatctcaccatattgtatatatagtttctagacattttattttataaaattatcacaattccaattttggcctcaatataattgtttttgaggtctttgcaacgacatcgcaactgtaattgtgatcgtatcagccgcgcgcagtttcttgccgcgaaattagaaccgaaccaataattagataatttaaatttgttacagatattggcattgaaaaatagagaaccaacagaatc

SEQ ID NO: 31115 - DNA, 422 bp, Medicago truncatula
  Intron number 2 from transcript Medtr4g103620.1 (locus Med tr4g103620) derived from phytozome v7.0 (chr-ID MtChr4; po s 22354812 to 22355233 reverse strand)
atagaaaatagtgaaggaagaagagtgtgcaagaagttgatgcaatctcaccaccaatatcactggtactccttctctctcacccaccctcactttcacttccttccatttagtattttctcgctccagtattagtctttttttccctcttcttttttataattgaatggcctcaaattcatatattagtttttcttttttaagtttgagattattactaaaaaaattttgttcaatgaccttattaaaagttaatttgaagtagtctcgctgtttataaatacattaatttttttttcttaaggtcactaccttgtaactttttcttttatgttatgtttgtttttttatttttattttgtttcccgtggggaagaaataaacgaacaaagagtctaatttggtgttggtgcagattcaag

SEQ ID NO: 31116 - DNA, 838 bp, Medicago truncatula
  Intron number 3 from transcript Medtr4g115000.1 (locus Med tr4g115000) derived from phytozome v7.0 (chr-ID MtChr4; po s 26476082 to 26476919 reverse strand)
accgaagggtgggttgttatgcttttaaatagatattttgtaggcattttacctcccctgatcttttgtaagttgcattttaatttagtgtggcatgtttgtgcaactgatatagtggagaactagcatatcatatgtgcaacaaaataaatatcctaaaagtacctgtgtgttgtttttaatttgattttcaatgcttgaagttgaaatgctgtgttggcagatacatggtggatggtttttggtttttaatattgacattttcaactgcagatgcctgtttggttttggatttttttttttaacaaatcaaaatttgacacattaaactttcaattgacttgtgatattgaacccctagaacttgtgtcttgatgtctagagatggttaaaatagttcttacaaagtttgggcaatccgcagctcttaaactatgagttggggttgagttattcgatctagctcaaattttaaaatggtatcaaagactgtcctagatttgctgttggatcatatgtctgtccatgctctagatgtacggtcttgagtgggagagaatgtgtagagatcccatatcaactagagatacgggcaaagtaatctttgaggcttgggctatcctcacactcaacacctcgagctagcttttgggttgaagagtaaagttgtatccaaaagctgtcagaaatttgtgtttatgtatatgctaattacaattttagttcctagtttatatgaatgatagatataaaagcagtatgaacttaaaagaatacttattgggaatctcacaatccaattgacgaatttcttttgcagacaattgccacagtttgc

SEQ ID NO: 31117 - DNA, 505 bp, Medicago truncatula
  Intron number 1 from transcript Medtr6g015440.1 (locus Med tr6g015440) derived from phytozome v7.0 (chr-ID MtChr6; po s 3849613 to 3850117 reverse strand)
ctttagttttgtatgttttttagtaactgagagtatatattgtgtgaaaattttacgatacttcaaaatgtctattgtactagtgtgagatgtatatccattttgaatgcttcttctgacatcattcgattttctggtgtgcagtctttaattattttaggcaattgttagtttcttttgtatctagacagactaatgccctcatgttcggaatggccctcatgtctgattgcttatattattgtctgcttttactgttttatttgtatttgaattttgaagtgccatttttttgctgtggtatggtagtattactgattactgacatcattccatgcgaggtttcagtttttgaagcagtatacaactggtttcataaattcatctgcttatacttttatgtatgtgcgaagccttatgctggttatcaattatgttatactaagagatgactttttcttttaccgtaggcaggaccactggctgcttattacaagttacccct

SEQ ID NO: 31118 - DNA, 714 bp, Medicago truncatula
  Intron number 2 from transcript Medtr4g154700.1 (locus Med tr4g154700) derived from phytozome v7.0 (chr-ID MtChr4; po s 38043557 to 38044270 reverse strand)
tcaatcacctcagaacacttgctcccttcacccaggtatgtctctctctctctctcttccattacatgttactcatacttgactgtatcagtatcaggtcattgcaaagctctaattcgattcttgcagaattggctcagttcaagttgtaaatataggtttaacatgagtttataattgcaaattattatggggaaaaatggccgacaatggtatggtttgtgtatcattttcatgtttagatcaaattatataaggagttgatgcaaacatgccgcacactcacctgggtagacccataaaaatcaccataattggctgtcgatctatatttattttcccccaagtttcattaatttcaccagccacatgaagagcagcaaggtcctcataagttaatctgattgcagtcccaatttctgtgattcatggaacatggattgactgacattttggaattgttagttgaatgatgtttgctcgtgacttcaaatttattgttcttagaacggcctaattgaagagtcgtctgtttctgctatctagttactttgagtacttaaatgtgaggaaagcaaattatttgtaggaaagttctcgagacattttttgtttattgtatgtctttcagttagccatttgctttgggcccacatacctattttgttggatcatgcaggtttcttgtcatattgttaaacttgttttgaggaa

SEQ ID NO: 31119 - DNA, 746 bp, Medicago truncatula
  Intron number 1 from transcript Medtr5g014270.2 (locus Med tr5g014270) derived from phytozome v7.0 (chr-ID MtChr5; po s 4521137 to 4521882)
agaaaagaaaggaaaaagggtcatcgattcgttctgtaagtaacttctcactcatcaacattttacttcattgtttcttgggttttattccattccgtttattctttttttatatttcaattatcaataattcttttaattaagcacttcttattgaataagtgcttatcatgatcaattttggggacacgttataaaccttgtttcgataaacaacttaattaagtgcttctgtataggctatctctataacaaatcatacatacaataaactcaaaatgttttcatataagctattttcagaaatgatccctgagagtttatggaaataagccgaaaacagtttatggaattttcataagctgttttcatacgttctctaagacagtgtcaaaagtgcttatactagaatataagattaaataagctaatcctcacaaattctgctgaaaagttgcacaagtgcctatctcataagtccaaataaacagtaagttcttccaaacacatcctaagttattattgctattaatttctgtctacaaattgaggttagcttaactattcaaagttcaatttgtttgattagcatgtcttatccatgttttgatagtttcgattcacgactgatatgtattcaataatgtaaatgtctgtttatgcagaaaacatatatagagggcattgaactccattttaaattttggttgagggattaaaccacagttatttgtaggtagagaaag

SEQ ID NO: 31120 - DNA, 910 bp, Medicago truncatula
  Intron number 2 from transcript Medtr5g014270.2 (locus Med tr5g014270) derived from phytozome v7.0 (chr-ID MtChr5; po s 4522111 to 4523020)
tccgacaacatttttgacaagttgcctaaggcttggtatgcttgcttattgctcttttcctgccatttttgggacatatcattgtgttatgtgtatcattgattattgtgtgactcgttaatggtattgttttttgttatattttgctgcatcagtttgttatgcgttatctagtttgactctagtctagcttatatttaagcttacgaaaaaaatttgtcctagagattgggataaatttcttcagtagattgtagatttgtggccactatgtgtgtttgatgccgtattgttatgcttgggtttggtcacacttaatgacggatataagccataacttttgaaatggctagccacccaatagatttgtagatttgtgtggttaagtaataactagagcttcattatttggttttattggtgaattaatcatcattgtttccttttgagtaagaaaacaaactttaaacaaacttgctctatacacttcctagaatggtacgcaaaaaagtgaatctgaattgagccttatttcttctacacataatgtttctaagatttacagtctactttgatttgattgtgagaaagagaattactgataaaataccatacgtagtattttgtccttattattgtcattattgtaaattgacgaggctttatgatcctaaagctttatttgttatcattcatgactgactatttacaattaaattctaatctgccaatgttcaactcataatatcagtatgaattgcatccctttcactttggcgtaattctcgatacgtatcgtattgtttatataggatgaagttaacgaaaaccatccggtactgtctcactctaattgcatgtttcatgtttggcaggtttatttacttatttattggtgtcggagctgttc

SEQ ID NO: 31121 - DNA, 905 bp, Medicago truncatula
  Intron number 1 from transcript Medtr6g067390.1 (locus Med tr6g067390) derived from phytozome v7.0 (chr-ID MtChr6; po s 12546160 to 12547064)
cattcgttcatagaagaaaaagaaagaatatcgtcgtaaatttagcatatatattcataatgtagtttctgtgttcttcattttgtttgtgtttaggtttcttgttgtttatgttcatattctgcatgcatttggctacagttttttttttaattttctttttacattgttttgaaacgtgtgaaattttgatgatgcttagttatgaatgaatgaatttttgggtttaattttaattttctctgagtttggttatttttattagttttttcattggattaggaaaaatggtcttgcaccggttattaggtagcaccgacacttttagtggaaggcatgtccagacaccccaacgcgacacatgtgatcacgttcattgaaataattaattttttttaccggtgttagtatcatgtcaggtgtcgatgtctatgtcagtgcttcatagatcattacaaatttcaaatttcaacaaacaaaggttggtcttgttggaaaaggtttggttaatatctcacaaggatatgggttttaatctcaattccgttttgacttgtgaggactttgttgctgtgaaatatataaattcttttgtaagtgttctttgaatctcggagcttttctgtcaccctgatgcgctatcaggaccaactcaccttaactaggagttatgttgaattttgaatgaattgtttttgttggagttggtttttgcttgtgagtactgtgtctttgtttagtcgaatgctttaattctatcgattttttacttcaacaaaaaatggtcctttgattgagttattactatatatgagatgcatcaagttctattcactttctttgattgttttaacgaggaatgttctaaaagaattttatttttaagttgataaaggtgctccaaa

SEQ ID NO: 31122 - DNA, 546 bp, Medicago truncatula
  Intron number 1 from transcript Medtr4g033380.1 (locus Med tr4g033380) derived from phytozome v7.0 (chr-ID MtChr4; po s 8221478 to 8222023)
ttattgaaaggttaataaaatatgattttaagattaacttatatatgtttctccatcattaggtatgttattcataagttctctcccaagttaaactgataatgataggttaaaattgacaaaccaagaccttcttttgatctatatgtattactaataatgcttaacgtgtagttttcaaaaaagtgtgttattattatattgaaaggtcacatataattagtagtgtagtggcatcgtgaattgttgttttaaatttattgtgaattgatgttttcccatatagctgagtggtgtgcgcttttaatatcgtagattagcatgtgaggaattgcaaaagtctcattatcaagctttgtaaactgatcacattttttctatataaagagctacttatatgttacaatctaccttaattcatttcaaagccaaacacataaaaaataccacgcgcgtcaccatgtctaattttttttttacattcatctttgttgttaacatgctctgagttttcttatctgttgattttttcaaataggcttggtg

SEQ ID NO: 31123 - DNA, 843 bp, Medicago truncatula
  Intron number 2 from transcript Medtr5g087410.1 (locus Med tr5g087410) derived from phytozome v7.0 (chr-ID MtChr5; po s 33752781 to 33753623)
ggctcgagagagtagtgtttgaacgcgactcacaagtagtactaaactcttttaattctagttcacaaggtgattcaaagtttatttcaattatctatagtattattattaataggctgtctttgcattctaactttgaggtgaagttcgttagacaacaaacaaatatgattgctctaccctgacaatggtggccgtgtcttagactaattgccagttgacgtattgttgagattatacctccttgtattgaactcttttcaattaatgatacaagttaaatttgctttggtataaaagtaaaaaaactttaccttactaacttcaccgactaaaaaatgagtatgaataaattagcaagtcccaataaaacatgcatggaatagggaaaaatcagttctatttaacattcaatttattaagatattttatttattttttaaataaagaatgttaccttttttatatatgaaaatgacaataagttatctttttttttttcttttcattatttgctttttagtttgtacaagtatgtatataactgacaaaacgatatcactatatatataaaattagaaaaatatttttgagtattgattttgtcatggttttttattcttttaaaatgataaaaaattaatatagagagaacagttataagggcttctgttaggtacctaaaagtaaaccatatctgcaaagtcaaggcagaagtattctcacttttcacaaagtcctaaccgtgtttccaacacttgcttaagttgactatgaccttatgaagtcgatccaaacaacttatattggtttggtttttcattctttcagctaaaattatcc

SEQ ID NO: 31124 - DNA, 929 bp, Medicago truncatula
  Intron number 2 from transcript Medtr7g035140.1 (locus Med tr7g035140) derived from phytozome v7.0 (chr-ID MtChr7; po s 8541030 to 8541958 reverse strand)
tggaccagcttttgtgtggtactgagcttcatcaggtatatttattcttatgcattattgagatgaaatcaatatgagagatttaaatttggactactggaactatgacaatgtaatagggctgtgtttgttgattgcgggtaaagggttgtttgtattggattattcgagcttatttagtatttactgacacaaacatttgtgagactggtttagagagcttacggaaacaggttatgacatttccataagctgttttcagcttatttcaataagctgtacatgataagttacgaaaacaacatataatgtatatgcaaacagtttgactttattgtatcttttgttttagaaatagcttatgcttaagcacttctatgataagcgttatggcactgtaagtgtttaatgaagctgtttatccaaacagactaaaagttttctttgctgcaatatacttgggtgaaaatggctagagaatcctgcttgttttttgattgaatttttgctggttagtttgtcttcaggtttcgtttattgccttgtatttcatttgacttttgcattctagaatcgctgtgaagctttcgtatcttgaataatgtcaaatgactttttagtttacttattgcttttcatttgctatgcctggggttcactgaaacgtgaattataatttatttatttcacaatgatgtccattgaaagggagtttcaaaatttcagaagagagacaagggttcatattaattagtttatgatgctggttgcttttgagtggcataaactttaagttatacgatattttcatgactgttggtactcaacagatatagtgagatgcaaaaatgtgtgcttttcctttcatgaacattttctgatctcttacaattgtaggcagacagtgcaagaagataaagctcttgtct

SEQ ID NO: 31125 - DNA, 1001 bp, Medicago truncatula
  Intron number 1 from transcript Medtr4g114530.1 (locus Med tr4g114530) derived from phytozome v7.0 (chr-ID MtChr4; po s 26210585 to 26211585 reverse strand)
agttcacctccacctgatatttttggtatgtaaaaaattctatggttttttaaatttccagaaaaactttatataacctttccattgtgaattataaattcgaaaaactcataaacatatccagtttggtttttccttttctaaaaacttaaatttaacatttcatgtattaatttttattacttgggtgttttatttgtcttcaatgtaccacctaagatattcgtcattttctacccaaaaacttttatcccgaaatgtaattcaaagtatacaatctcaactcatgaaaaaaattcattatgtaatgaaactgttgtgacaattactttttggctactcgtataattttttatattaaagaaagatttcaacacacatataacagagtgaatgcattgattagaaataacattagtctttgataatagtgagagatagtggttgtttgttctctccatagtgaaatgctaaagagcaatttttttttaatgtacaaatgacattacttcaataaaaacgcacgtacacgcacacacccatatatataacatgatggatgcattgattagaagacatgtatgtataaacactgttattttcctcattatggaccatactaagtgttgtgcgacttctttgaatattcccttaattatgtagattattcattatgaaaggtgttattattttacctatgacataaatggagtcacagtagttagtgtcgttgggaacccaggctgcttctgtgtatgcgaatggagatgatgactcaatatttggaattagttagtctaggagtcgggtatcatggagttaaaattttgtatttttattgttctaatggtgtaatttatataacataatatcaaggatgatttaaatattatttttaacatcaagtaaacgcatagtttagattcaagttattctatgcaaaacatgtttactacgacaacctttgcacactgatttatcctttttttccttttgtagtg

SEQ ID NO: 31126 - DNA, 738 bp, Medicago truncatula
  Intron number 1 from transcript Medtr5g024230.1 (locus Med tr5g024230) derived from phytozome v7.0 (chr-ID MtChr5; po s 9605820 to 9606557)
aagcttcttattctgaattttctcaccatttattggtatgatgattattattattattttgtgtgtgtttggttaccatgaaatttgaatcattctgtgtttggtagtcttaaaaaaaaagctgaatttgattatagccataatcaaattgttgttaaaattcaagagttctatgatttggttcaagtgttcaatttctagcatgtgctcaactcaagaaatttgatgtttggtttctatgagtgaattctgaggatgaaactgatttttgagtttttggaacgaatactacttattctcttttgaattaacatgaaaacatagttttccaaatttgtttatttcagttgacttgttgacatgaatgttcaaaagcttatttgacattggaagattggtttgcatgaatagttagttgtttctattgattggttttatgctaattttgatatacatagataaaattgttatgaaataggccttaaggtagcagattattccttctataaaggaatcttacatgcaaatatgctgttttttcatagcatatatgaatcttacatttttttgattaaaattctcaattgtaatcaatcttaagatatttttgtcaaacttcaagaaagatgtgttggtttttaatttttgttatagaacaatgaattctctttgactgatacatgaatatcttgtagcattgtagggtgaaaactacaaagaaaagttagaatcggcgaa

SEQ ID NO: 31127 - DNA, 659 bp, Medicago truncatula
  Intron number 2 from transcript Medtr5g082990.1 (locus Med tr5g082990) derived from phytozome v7.0 (chr-ID MtChr5; po s 31421273 to 31421931 reverse strand)
gtaccatatttttcaaatctgaaatagatttacaggtatagccactattcttgtcaattttgtatacattctttctgattattagtatttttcaattaatactatcttatctttagtactagcatttacataaaaattacctcatcaacattttttttctgcattataatctaagggtaaaattttagtcacaatattataatggtcactagtggtggagagaggttagaaagaaattatggaaagaaaaaaacagaaattggctaatatgagccataataggttgcagggtgtgtctatggacccgctgcaatgtgagccatcatatatgtggagtccactgtataataatattaattaggcaacacatgtcatggtactatgcagaatattaagaatatgatattatagtgtgtgtttgtttgatttcaccgtgaacatgtctgaatcacggtgacctacaataatttcatagaaactacaaagtgttattcttagacggtgtagtttaatatattgcatgattggcttttgtaaaataatatgattattttgggcattaacgaaatatgatagttacggttgtgttattcgagcattaacgaccggttaattatgattattttgggcagcaaattaacgtgaaaactagacaagac

SEQ ID NO: 31128 - DNA, 514 bp, Medicago truncatula
  Intron number 3 from transcript Medtr5g029620.1 (locus Med tr5g029620) derived from phytozome v7.0 (chr-ID MtChr5; po s 12366190 to 12366703)
cttttctacttgcagactgggagactggaaataaagtgtatatttctatgaaattttagatcctgtttactttctgaaattttccaaaatttatgtttgtttcaaattgctaataaggagattgaagactcgtgtaatgaacaatgtgatagagagaatatggaaggcaagttaagaagattgcactttcagaaactataacaccaatgttttggcatttctgttttcaaaaattgtagaaaataatgacgacgcaatatcaaatctatattctcttatgtttattagtttaagtgaaaatgaaaacagaaaacactggaagtaaatgtgcccttacctactcttttctatttgtttttttaaattagcataggtgaaaaatgtgaaattttgcgaatattttataatgggctctgaatttttcgtgtgcttgtcaacactggctaacagattctgatcagaaatatattttaatgcagagtggaacaaacgttgctgagactgcacagttcat

SEQ ID NO: 31129 - DNA, 538 bp, Medicago truncatula
  Intron number 1 from transcript Medtr5g032260.1 (locus Med tr5g032260) derived from phytozome v7.0 (chr-ID MtChr5; po s 13014224 to 13014761 reverse strand)
tcacttacttagtacaccttaccttacaactaaaggtatggtgaaaatctaattttatccttaatcattttattttttttaaagaatccttaatcattttttaaatattttatatttatccaattttgaatttcaatttttttagaattattttttcttcataatttcctttaaaaattcagttatctaaaatattgatagtgatcttgaacatgatcatgatcataagagacagttggagcgggtgctatgaaattgatgtggtggttgacggtggttcttcactagtgcagagtggtgttcgtacaaagatacttcaatttccaagctactgagacctcaatgtgttttaatgtttttttcaaaatgagaatatgtacttgatttgatagttgtttgctctatttgtagatttttagatggacgataaatatgggcattttgacgaaagcatttactcaaagttcgggaaggagataagcgaataatttgatttaaggagggattttttttcatttggtagaaattttggcagctc

SEQ ID NO: 31130 - DNA, 653 bp, Medicago truncatula
  Intron number 1 from transcript Medtr5g033430.1 (locus Med tr5g033430) derived from phytozome v7.0 (chr-ID MtChr5; po s 13624519 to 13625171 reverse strand)
gagcaaaaccttcaaggttcattattagcttataataataagatcttcattctctttttcatatattttaaaattacaagttcatgctttggttttaacgttaaatatataaacatatagtatatgttttttatcatcaatttcaatattgttattaaggcttacatgacaaaacagtatcttatgtacaatatatttgtattctctttctgcatgagtgaagaggtttaaggaagatgtgttatggttttattgttttaaggaacagtgtttaatatactctcaataggtttaatagttgtatatgattcttactatgcttctctgcttactccaatttccaaaatttgacctcaactaatcaaaagcattcaatgtttttcattcaacaactccaattattatgatgcttttcacaaattataaactttgatcttgttgtacatcttaattttaaaataaattgtactgatttgaagtcatttctatgattttaggattttaatatgcttaccttgatcctatgtgtgtatgtaactagggacactgattatcttattgtaattagaagattaatttaagattaacagtgtacttttatatgtaagtctttggtagatgacaaactgaaatgtatatgcaaaactgcagat

SEQ ID NO: 31131 - DNA, 836 bp, Medicago truncatula
  Intron number 2 from transcript Medtr4g149890.1 (locus Med tr4g149890) derived from phytozome v7.0 (chr-ID MtChr4; po s 37319599 to 37320434)
gtcaaattctcgccggtagaaggaaagcatctaaggtaagagtaattaccatacaactgaaaattaatgcactggattaaaagtctacaaagttattttgtatttcttaaaaagaaaaaagattttattttgtggcgtaggatttgtgtgaagaatgaactaataatataatacatactaaataaaatcaaagtttaaaagatatggtctgacctataaatataatgctcgttttgttgtggagtcagggacaatgtgcgtgacacttaatttggattttttttttcttttcgaattaccttctatatataaagtttaaggagatataaagtgtaactattttttattattaatattttttcaaggggttattattactatttttttttagacaggggttaatattatttttcacgtaaccctacttttacttctttacacgatcttgtcaccgacatcccataaaaccgttttttttcatcggctgttgtctcatcccactaagtattctactgagtttgcaagatttcatggtgtcgatgttgtctttttgggttttggttttagtcgaggacctgacacaactagtccgtttgacaaagtattagttcccatactctaccgaactgactagttgcgtctggccctccacccaaattaaaaacttaaaaatagctgacaacgggttctattccaattaccaacgacgacacatgaaatctgacgcatttgatagaatgcttggtggtcatccttggcatatatcttgattctactttatttttattttttcctccttcccttacaacggtggaaagcggttttgtaagttagga

SEQ ID NO: 31132 - DNA, 366 bp, Medicago truncatula
  Intron number 1 from transcript Medtr7g012730.1 (locus Med tr7g012730) derived from phytozome v7.0 (chr-ID MtChr7; po s 3376890 to 3377255 reverse strand)
gaaggtatttttaattcctagagcaaataaataatctttgttatcatgttgaattaataattgtgacaatgtaatatctctatattttttcccataaattttattaatcaagatatgtttttttttttgaaaggttaatcaagatatgctgtccatatgtttacttatttctatttcaacatctatagcatggttatttcatttcaaactgtttaaataattttcaaaacctttcaatttgaatttgaattagtgttatgtgacataaccaaggggatggacatataccaaccaaacatcctctatgaatattgtatcaaaataacacatttgttcttcacaggtgtagaatcatttgacattgat

SEQ ID NO: 31133 - DNA, 661 bp, Medicago truncatula
  Intron number 1 from transcript Medtr5g066630.1 (locus Med tr5g066630) derived from phytozome v7.0 (chr-ID MtChr5; po s 23470975 to 23471635)
gctctgtaaagttttcttattttcagtttagatacatcctagaaatctgcgttgaaagtttgatatcaccttgttcttaatgttagaatgtagttgtgatgctatattcaactaaaaactatattttaatttatgtttatgatatttatctcgcactcgttctgattattagctacttcatggatcattattaattaatggtcatcttaatctgtagcttgatagagaaattgtagttattttcatttatttgattgttaattcccagtcatgcattgcttttgatggtttgagtttgaggttagattttctatgatcagaaataatactcaggttgtatgctaaatcattagtatgtttggttaaatgcctgctatgagccgcacaaatttcgtaatgtctcaaatctttcacacgttgtccaaaatacttggggttaaacctttgaaggtaattattttggtctgaataatgctatcttaattattctattagcgtgttcatttcctctcgtaatcttggttttaatttcttcgatattttaactgttgcgttcttggtttaaatttctgcataatcactttaatttgctgcaatttttagtgtttctgttttgtttgaacaagtctgcagcggtttatttcaaggtgttgattactgg

SEQ ID NO: 31134 - DNA, 542 bp, Medicago truncatula
  Intron number 3 from transcript Medtr4g073090.1 (locus Med tr4g073090) derived from phytozome v7.0 (chr-ID MtChr4; po s 14345499 to 14346040)
cacataaaaaggtgagtaagttcaaacaagaattcaacccctttatcgaaggcagtgttgtcaatcgcagaaaataactttttgttcaaattccggtacgctataatgttgtagcgactatttgacaatactttctactaaatcatgtattgtggaacaactatggtttgttaagtgcttgtttgtttatccagtgacctaccgctactgcacgttttgatctatttccaccgtgatttagaaaagctgctagttgtagcttcttatccaacgtgactattcaccgtgatattataagcttccaaacacatgctaaaattgtaactgtaatgcagctagctatttgacaacaaatgaaagttttataaattctagcaaaaaataagtaatttttttctggctggctcaaagcaagtttttgtcagacaacttaaattaaggacttgaaccgctttatatttgtgagtaaaacctttgttgcatttgttttgaatatgtttttcaagcatgatagggagtttgggatgatgcaggttaagttg

SEQ ID NO: 31135 - DNA, 542 bp, Medicago truncatula
  Intron number 3 from transcript Medtr4g116010.1 (locus Med tr4g116010) derived from phytozome v7.0 (chr-ID MtChr4; po s 27016774 to 27017315)
ctcttggtaagaacttatgtattgcttatcattgacacggctaaacctgcccttttaatttcactttataagctctgcggctatgttatttaggaataatgtgcaaacaaaccaatgaatatgaatccgctctagatcaccggcatttgtgcaacctttctcattgtgaattttagaaaacaaagttaatatttttggaaatgctaaaaagtcttcaccatttttaaaaatgtcaatgtaactcacaacctacatatggtaatgaaaatgaaaaatgagcatatggtgaattggtggcagtgagaagaatgcagctaataaactcaaagaaaaatgaaaactcaatattttcaggaagtaaataggcttttagtctcccaatgaaattgcaaacctttttctatttgaaccatcccataatctaaaaaaaaacacttcaagtaagaactcttatttgcaagttattttcatttcgattaactattgacaggtctgtgaatgttttatgaaccttgggttttggggttgcagtttattcttca

SEQ ID NO: 31136 - DNA, 300 bp, Medicago truncatula; identical to SEQ ID NO: 28609
  Intron number 1 from transcript Medtr4g041980.4 (locus Med tr4g041980) derived from phytozome v7.0 (chr-ID MtChr4; po s 10040616 to 10040915)

SEQ ID NO: 31137 - DNA, 505 bp, Medicago truncatula
  Intron number 1 from transcript Medtr6g014990.1 (locus Med tr6g014990) derived from phytozome v7.0 (chr-ID MtChr6; po s 3658018 to 3658522 reverse strand)
tgggacaaactgttctataaatatgtagtggctataggtcagcttgtggtcatggaaggaagcttatcaccaagtcatcatcaatgattgcatgtgttatatagatctcaattcttctatgatctttgttgctctcgttaattgttttgtgattctagaagaaaatgagcgaataattgaggggttttaaataaaggtttgtgactgcgtgatataacgatttttgatttagttgaaatcatcatgtgattgcagacaaggcagcatcggctgcattttgatcgcctttctccacaatattaagaatcaaaacctaaccaaaacttcactctgtgttatttaaaactatcatgatcaacttcctatctatgagcccgatcttgatgaatgatgatgtagtaaagcaatgtcgcagaaagaaccttttcttcagcattgatgtcaaaaaacatgttatacagctgacatagtgtttgtatctgtcaatacaccaacaaaaacttgc

SEQ ID NO: 31138 - DNA, 661 bp, Medicago truncatula
  Intron number 1 from transcript Medtr7g032510.1 (locus Med tr7g032510) derived from phytozome v7.0 (chr-ID MtChr7; po s 8135112 to 8135772 reverse strand)
ctgttagtgtgcagtatctccaacaaccagagaaggtcagatatattctatgacatcatataattttccaaaccttatctattgtcaatctcaaatctcaatgttactttttcttaggttttggtaggttactaaaactatagagaaatttcaaacagttaatcgaaggagtaaatagtcggtcttgaatgtttcaagcattttcaataatatagaccttgaatgtatcaaaattataaaagtatcctgaagtctttctttttgacgtgtttttcattggccagtttggtccacaaacatgtcttctgttagtcagtttagtccatgatattactagcaaaagacacactcatggatatttttgtaatttcagtatattttgattgtaataacatcgcatcatacataaatatgaaccaaaatgacaatttagtctgatcaaacgtgtctcactctcatgtgacctcaaccacagttgctttgtcgcaaaaacataaacaatttgatgtcgcggtcttgattgcgcctggaaataattttttaaaactgctattaattaatttactttgaaacttccacaataatttatgagtttcttaatatttactaataaagataattcacaggtatttgcagaggtgtttaggttgctaaaaccagg

SEQ ID NO: 31139 - DNA, 888 bp, Medicago truncatula
  Intron number 1 from transcript Medtr5g006700.1 (locus Med tr5g006700) derived from phytozome v7.0 (chr-ID MtChr5; po s 809637 to 810524)
tccgagtttggagcttaattttcgctgcgatagattggatctgttataataatattattatttgaatgtttgcatgagtttgtgaagttgtaacttagagaacataacccccaaaataatgtttgaagtaactaaagatttgtcgtgcgactgtcttatgatttgagtttaaactgttctgacaattttttattgtcgtcatctattggcctaatgacaattctgcatttacatcaaaccaattttttttttaacaaagttgattttaaaggttgcaaaaggtttttgataaacacataattgtttggatagaaactgtggtgagaaaaaccgattttggatggatagagcatgcgtttggaaagcttttttttcatggtgctgtaatgttggtgaaaccatcatatcgcggttccaaacacagggagaatcaactttgatggaagcgacaaatttttgcttttgcgtcaatacgattctattttactatataaacaaaattgattcttccaaactcaccttttaaatatctttacacaacaaaattaaatttctttaacctcgattaggttaaaatcaattcttttaacatcatttcattccaaatcattactattaaagtccgctgaaccctagagctgcttgcaaatatcctaccagctaatgaaacttgagctgatattcactttatgtcaaactgtacttttatgaataatctaaactaattgttgaggaaaagaaaaactagtaatgtgaggaatatagcagtatgctgctaactctgttatccttttgggccggtaagagcattgcagaataaggagatattttctgacatttgtattgtcatcttgaattttacagtgaaagtgttggattggggtgagg

SEQ ID NO: 31140 - DNA, 1016 bp, Medicago truncatula
  Intron number 1 from transcript Medtr6g080930.1 (locus Med tr6g080930) derived from phytozome v7.0 (chr-ID MtChr6; po s 16352425 to 16353440)
gagactagcagtagccagtaggtatcagtaaattaatctcttaactagactttatcctttttccagattaatagttcttatattattcataaataaatgaaacaaacttcaattttaaaatataaatgaaacaaaatttcaatttaaaaataaataatagtctactcatttaacaacgtaagaagcaaatgattgtgttacttttccatcctccattctcatacacaaattaaacatgttgaagaccaaagttgaccctgtccaagtatatctcaagtctcctcatacgtatctaacccggccattgatctattccaaatcacatatttcatctttatccattgactgactctaactcgtcgtctcaaaacaaaacaattatacaaagtgttttctagattctacatcctcttcacttggacggttctgagtatgaagcacgaatacgtaatccggatgcaggtgcgatgcaatatagttaagatacgttaataaaaggtaaacaataaaacttataaatatgtaaaatacttaatatacattgatcgatcattcttcattaatttataattatagacgtcataatttataaaaaaaaaaaaaaaaatgtgatcaaatgacaaagtggagagtttttttataaaccataacctattttcatcgctatgtttgtatatcaacaaaagaataattgaaagaataattcactcatactataattttcatagcttttacaagcttaaaatgaataatgtgcatctctattgaatttacatagcttttactacattttgatatgttgcgatcgattgaataaacatctttttatgttttagcaccaccttaccctatgtaattgggcatcataagtcgtcataagtacaattattgaaatattttactatttaattgtatatcaatatctttatcattatatagataaatatctttgttttagttatattttttatttatcaatcaagagccttcataacgggtgttcaaattaagtaaga

SEQ ID NO: 31141 - DNA, 852 bp, Medicago truncatula
  Intron number 1 from transcript Medtr5g100840.1 (locus Med tr5g100840) derived from phytozome v7.0 (chr-ID MtChr5; po s 40338440 to 40339291)
tcatcagagaagccacaagtggacttctgcatacggtaaatcattgctttatgtcttttgttatctctgtgttctcaatttttccttcctcttcataattatgtgtaattgaattttccatttatgtattttttttttttttacaatacagacaacaattaaggaagaattgtgaaatttaagcaaggaacaatgaagtgaaaatgagagtaaaaaggagtaagaccaacggataacaaggcaacatcatctgtaatgacgaaagagcatgagatgaccaacacaggataagaaaattagactgttttttccgacacttggccactgcttgctcccatggtcattgaacgaggcgacgtgagttacaattaagttttctctcttatcattttgatacgttaaaattattaaaaaattgttgattcagattattgaattttttaaaatctgcaagtatatatgtttgtttcaatttgatttttgttgtctcttttttatcacatgtgtcaaatttttctccaattttcttactaattttttccccttatactctccagaagaaggctgcaatcttgggtaaaacttaatgttcgtgttcgtattcagtttttataagttagggtttgtttcctatgcaaagtattgtttgtgtttgtgtgagttttaaaaacaatgtaaattttgtgtatcattattcatgaaacttaataactaaagatgtgaaacttgattactaaatgcaatgagggtctataacataaataaaggcaaaccacctaattttgacataaaaatgattagaaccactaatttcattatttcagcattgcaggcacacaaaagtggtaggcg

SEQ ID NO: 31142 - DNA, 953 bp, Medicago truncatula
  Intron number 2 from transcript Medtr5g082600.1 (locus Med tr5g082600) derived from phytozome v7.0 (chr-ID MtChr5; po s 31116384 to 31117336)
ctattttgttgaaggtaaagtgttctatgatgttgggttaattcattttgaattattccattgtttgatttatgtgcatttattagcaaaaaaaaataaaatcaacaccttagtattatcttataataatctcacttaatttcaacatagattagcatgaggaagagaagtattattgagagaactaaaaatttgattgattataaatgtcaaatgtaacaggtatttctattagagttcggagattttagatatacttctaactttagagagaaaaattgtatttagtcttttcaattaagagtaaataaatgtacataaaaaaggtagttggcaaatatcccaaaatgtttgaaattgaatgaagcttccacatgttcggattgaggaccacgccacaatgttccaatatccaaaacgattatgtcgaactatataatgtatagacaacattaggttttcttagtggctgagttaggtgttagaaactagtatcaaacatgtgcatctttaccaattaaattatatgagtattagttccagtgattgagttaaacacctaaaacagattgaaaaagtggtttggaattcaaattgttgctactcatgaaacatatttacaactaacgtttacatacagaaaaactatttgagtattagatagatgggaatttataatttgctgtggtgcataagaaaagtcacaaaattaagaccattgatagactatagtcaatcgacattaagagcaagcattatgagtccaattattttctcctggaaaccaagaaaacaactcgacacatttatgtatttagtacaaaaatatgcttcaactaataagcatatgtgttgatcgatatatgtgcaaaaacgtattcatactataagactgttaatttccttttaataattctgatcctttttactttgaatgatgcagtggatattgc

SEQ ID NO: 31143 - DNA, 806 bp, Medicago truncatula
  Intron number 1 from transcript Medtr7g088180.1 (locus Med tr7g088180) derived from phytozome v7.0 (chr-ID MtChr7; po s 19068542 to 19069347 reverse strand)
ttttcggtccccgacggtaaggccgagacccttcagatccaatgactcgccatcttcaacttgaaccattatatttatatttaggtctgtgttttaattttcaagcaaatgaaagaaaactactcgaatctatgatcattgatcaatgttctaaagtttcccttttggactttgtaagcagtagtaggcttgtttctttttgtattccttgttttattttctttatgtaatatttcttttgaagaagatggttgctcttaattctctatattgatgaatttcttgtgtctgaatttcagtttactacttaattattgtgtttgtcagtctagttctcatctctctctctctcttctatttcttgttctcttaaaatgattatactacatatcatcatcctggtcatgttcttttaaaaacgaccgcctcgaatattaggttagttcacatgtgggatttagtaactttgtctttggagagatctaaatcttgtttgagaatatgttaatttttacaggccttgatgatcttatttcattacgatgtcatcatcatcatcatggtccaaatcaagaagtaaaaggaaaggaaaggattgtgttatctcactactacctagtgtgaacacataccctaattgttagtttttttttgtcacacacagattaagaaatcacaatttgtacccaacaaaatctcataattttagtttttttaaccataatcaataaatgaattttgatgttaaatttttttattttgcatttggagtgaagagactgagtggagactggagagtagtgaag

SEQ ID NO: 31144 - DNA, 859 bp, Medicago truncatula
  Intron number 1 from transcript Medtr7g009210.1 (locus Med tr7g009210) derived from phytozome v7.0 (chr-ID MtChr7; po s 1586075 to 1586933)
atgtaagcttatacttctatttctctttctatttattatcactcttgctatttctatgtgaaagtttgtagcctttcttggataaacaatatcattaggagcttatagataaacacaattcatataagtgtttgtgtataagttatgagctattttcataaactatatatatccttgggagcttaaaaaaataagctgacaatgtcaataacttgtggacatgtcagaagctatttgcataaacactctctcacacaatattagaagtatttttgttagtagaaaatctcaaataagttaatccaaacaggctatatatatcatgttaaatttatgtttttgtgctttctttttaaaatcaaatttattttcaatatttagaataagatagtcaataacaaagttcatatgaaattcaacatagaagattcaattcaagttttgtactaaacttcttagcaagtgatctaattcctccctaaatttcaagcatatctaaattttccttctggaatgaaacctacattagaagtggcttggagtatttcttatatagtaattaattacaaaacatcgatgttatttggacacagacaccgtatacaactccgagttagggccttttttctaatcgttatcatccgaagagagacaaaatattaataaaagaagttaaattgtatgttaataccacgtttgacgttaaaatttgtgttaagaaaatatttctgcaaaattaatgaaaaacttctatttgggaagatttaattacaattttgcagtaattaagtggagtagcctacaattaattttgttgagtgatttcagtacacagaaaaggaacaaaattggttaaacc

SEQ ID NO: 31145 - DNA, 328 bp, Medicago truncatula
  Intron number 1 from transcript Medtr4g142270.1 (locus Med tr4g142270) derived from phytozome v7.0 (chr-ID MtChr4; po s 35347637 to 35347964 reverse strand)
cgtataaatagagcgaggttgttttatagaagatgatgataacgataatttcataatgtatctctcttgctccaattaaagtttatttttttctctcttcatcgtgagctcacaggagcttgattttcaggtaaaaacagaaaaaattaataaaattgaagctcaaattatagttgttgaatagaatttaatacattgatcctctcaattataaatactactattttttagaattttgatgtagtttgatcattgtgtgttgatgattttgtttctaatggcggtatcaaattgatgttgtttgtcaactactttgatttgtatatag

SEQ ID NO: 31146 - DNA, 610 bp, Medicago truncatula
  Intron number 4 from transcript Medtr4g031780.1 (locus Med tr4g031780) derived from phytozome v7.0 (chr-ID MtChr4; po s 7397809 to 7398418 reverse strand)
agatcagataaaattgaagttacgcacaagtacaggtctgtatatgaatgagtgataattgatctccgaagcacctaacatctatgattgaaggcgtgtctttcacggcacctacacatgtgattacattcaattttgtcattttttttaaattactaccggtgtcttgtctggtgttggtccttcatagtaattgatttcgttactatattgtctttgatttatacgattagtcaattagtttagatctaatagaacaaaacagatttgggaaagtaataaatttttggatcgctacttttttgttgtttcttgaaaatacagcagtcatccgataaaattggagtgtgcttctgaaaaatagttagtcttgaaatttttgtagctctacaaaaaaccattttgtatgtgctgtgtgtaacttgtatattatgaggctagatcatatatgatagttccctgtattagaactctttaagagtgttcttctatatagatattgaatcatttcattggatagacagatctagtaatgtttgtggattgcggtactagattttttttttgtgctaacataattttcaatcttgtcctcccagcaccacctctc

SEQ ID NO: 31147 - DNA, 340 bp, Medicago truncatula
  Intron number 1 from transcript Medtr5g013460.1 (locus Med tr5g013460) derived from phytozome v7.0 (chr-ID MtChr5; po s 4075040 to 4075379)
agatttctcctcgcgttcagaatcacctcaaacaggtttcttctttttcttcttcttttcaattttcaattatttcattcaccataatttctagggtttcttgattcatcttatatgtatcatttcttgttgagaaccaagttaaatttatgaccggaacaattcttttcttgattaagctagttttgattattacggagatttagaagaattaggttaatgaaatcattgaattttttggaataattcattgattacaatttacgagaactagttttacaattgtgttgaattaatgattgtaggtttatttgaccttgtgttttgctgtggccgctgc

SEQ ID NO: 31148 - DNA, 636 bp, Medicago truncatula
  Intron number 1 from transcript Medtr6g022550.1 (locus Med tr6g022550) derived from phytozome v7.0 (chr-ID MtChr6; po s 5053779 to 5054414)
aacaattttcgtaattttctttgttataattctcttctttttgagttcattgcatttgatgagatttgttttagaagattaagttgtgtttcttttggaccactgaattttgtgtaacatgtgtgtaattttcaacatgtgtctgataacgacagtagcacgtgttgatattcaatcattttcttaaataattataggtttaaactttatacatgtcactgtaaatgttttgtagatattcacatgttgggatgccaatgtgattatggaatatggaaattttagctttatgttgaaacataattgttcatgtaaaacaaataaacttttcgacagaatcataaatttctcatttttatgaatttaatgtgacactatgtttgcctatatgttcaaacacattcattctgtatataaattattactggattatacttgatacatgtcaatgtcgtgtctgatgttcgtgaattcacgagttgggatttgggagatatataatggtgaaaatgttaatgtgattttggaatatggaaattttaacttcatgttgaaacatagcatttgacataaacaaacagactttcctgtagaatcttaaagttctcattttgatgagttgtttggtaaattcag

SEQ ID NO: 31149 - DNA, 358 bp, Medicago truncatula; identical to SEQ ID NO: 30605
  Intron number 1 from transcript Medtr5g065260.1 (locus Med tr5g065260) derived from phytozome v7.0 (chr-ID MtChr5; po s 22781276 to 22781633)

SEQ ID NO: 31150 - DNA, 869 bp, Medicago truncatula
  Intron number 1 from transcript Medtr6g046580.1 (locus Med tr6g046580) derived from phytozome v7.0 (chr-ID MtChr6; po s 9872803 to 9873671 reverse strand)
atcagtctttgtttagagggcttgcttgatgaagctgagaccttgctgtcaaaaatggaagacaatggatgcatacctgatgttgtaacttatcaaaccattattcacgctctatttgaaaaggatgagaatgataaagcagagaaacttgtacgtgaattgattgttagaggtttactttaagaaaaaaccaatttgagctaaagtttccattggttccaattcaggaatggacataaatttatttcaggcgtattatattccctaatcttaacttatctcaaggactcttggttagcataagtaaatcattttttctcatcaaatttttagcttatcatgagtacgacaatggttatattgttgcttttcttgttctcccaataattcaattagttcaatttcctttgtaaagttgtacttgttggacctctgtatgtgaacttttatgttatgtggtcattggctataagtttattccactatgagattttgccctttaatggctattttgcaaaaatcaaacactaatatattgtcttattttggctatatgtttaatctggtgtcgggtgcatgagtagttggtgtagtcctttagtatttttaatcgatgatttacaatattttttttattacatgctatattggattttgaaatacatggtgattcttcatacttctattatgtgccattctgccatctaagttcttctctcttgctactttagtaattaattacctttttcaatgctgatactttttgttgttttaattcttcatattctaattctaatgcaatttttagttgtgtaaaattgtatgcacatcaattgcttccttttttcttttttttttttgtaacagaa

SEQ ID NO: 31151 - DNA, 639 bp, Medicago truncatula
  Intron number 2 from transcript Medtr7g075870.1 (locus Med tr7g075870) derived from phytozome v7.0 (chr-ID MtChr7; po s 15319372 to 15320010)
cagaagattagtgcaagccgacaaatagtgagtcttgaaaaccaatggtgcattgacacctgctgctttcatttcttattttttgttatgtatctgtgctagatttcagtttttatttttgtgctagattttttatgtatttgtgctagatagtagctagactattcaaaattttagtggaccaaatgtctatgaatgattatgattattagatattttttatttgacctttaaagaacattagaaatgggtttttgtcaaacttactcctctgctagcagcagaaggggatcaactattaatgctgacatgatctgtttctctgtggtgttgatagaggtagtgctggacatccctttgaaaattgtccgtggcggttgtcaaaaaaactgccataccatttccgccatgactggcatttaactacacaacactatatcagattcaatcataacgttaaaatctttatcatgtatgattgcatgatcatgttggtagtaattggaagcctgtaatatcaaatatggtaaaattgttattaccactttacatttagcagtagatttcttattaattgcgtttcaattggtcacttgatgcctgtgttgtgatatgtttcttttctgatttacagggagt

SEQ ID NO: 31152 - DNA, 694 bp, Medicago truncatula
  Intron number 1 from transcript Medtr4g134280.1 (locus Med tr4g134280) derived from phytozome v7.0 (chr-ID MtChr4; po s 32357553 to 32358246 reverse strand)
aacggaaatcaagaatcacaaaaccacccacccaagttttccatcaaataacaattttttttaaaaaaaaaaataaaaaaaaaaaaaaatactgtgaagtgagcgcttttgttgtagtcacgtgcattttgctctcaactatgagccctaactatcttccaaccagcgagtcctaaaatccatgttaagtggtaactacgtataagagccagcagaaactgggtcagagatttagttgtctggagaaacggtacggtggtagaacgagtgttgaacagagtctcctggaccactgtttatgtgccacgtgatgcatgcagatctcataatatgacagttggaagtgacaatgtattgtccttctataattcttttgttttcttcttaatttcaaataatccaatccgtatcagtttacgtgatagtgtaataattataattaataataatgatttcaatagtattttaatcattttaaaataattgtaaaaatgtactgtactatctcttccttcatagtttgacttacatatgttaaatcaatattgtgcaatatgatgtcaattaatatgaatgggtgacaactagggtactcatagaagaatggtgggtaatttactccaaccaatacacattagtcacataagcacatttttaagtggtattcttgaactatcttgaccccaccaacaaa

SEQ ID NO: 31153 - DNA, 452 bp, Medicago truncatula
  Intron number 1 from transcript Medtr5g072950.1 (locus Med tr5g072950) derived from phytozome v7.0 (chr-ID MtChr5; po s 26054808 to 26055259 reverse strand)
catcatcaaaaaaacccatcaaacaaaactactaggtactatactattgctgctttttttctttgatctctttgttgtagtttttttagtaaccattgaattgaatagtgatttttttgacttgtaagtgaaaattcactattctgtaacttgttaatgctactcaccaacccatatacttaaagttttcaatttttttggtttttggttataatggtgactgatatatatccatttcattgctgggtccgtgatttatatcagatgcggtgaattaattactgctatttcttgtctttattcctctgtttttgattcccttttcagaagaaaaagttttgttttttacttcttagtttttctttctctctcttatttaactttcattttttttttcttttcattttggtattgtagacttgtgattcttcaactggagctggattctcaaa

SEQ ID NO: 31154 - DNA, 535 bp, Medicago truncatula
  Intron number 1 from transcript Medtr4g110480.1 (locus Med tr4g110480) derived from phytozome v7.0 (chr-ID MtChr4; po s 25031843 to 25032377 reverse strand)
cagttttgggtctggtaataattcatcaaactcttatttttcttctgtttattacaactagaacaataacaatcatgcatgtgtttttgtggaatttcaaagatattagtgaaaatggtgtgatagagtggtgaatattaaccttttatcagtttacaaaaacatatctaaatgtgttttttgtttgccatttaggttatatatagttagttagtttagttctcaaatgtgtcttatagtcaatttggttcattaaatttgacacttggggtttgtgttagtaattcgacttgttttagttttgatgagtcaaacaaggaatatcttagttaatcaaaaaagtaactttcatacttcttttcaaccatgatttgagtgattttcttaactgtgaaattattttttatatgggtctttcatattttctgaaccatgattaggtgaatttttcactttatctatatatattggatgctgaaataaaatttatagatttttaatgattgttaaattggtcctttttaccagcttccag

SEQ ID NO: 31155 - DNA, 671 bp, Medicago truncatula
  Intron number 1 from transcript Medtr5g090360.1 (locus Med tr5g090360) derived from phytozome v7.0 (chr-ID MtChr5; po s 35253956 to 35254626)
aaagaagtcctaaccgtaagtcttattccttctttcgatttcgtttcacagttttctagctacgaaatgaagaacaccgaagaacacgaacactcaatatttttgaataatagattatttatgcttatagttcgcaattgaatactcttcagttttactttactagcttgattactgtttttgctcaaaaaaagcttgattactgtttaatgtgaaattcatgcagatctgagtgtataattttttcctattttttgattattacgaactatcgagtgagaagcttaatcgcactggaaaataaaattataattgaattattgattattcgttcttatattttgctcaattttgtcttctttcaagttgaatcgaataatcttcagttttactccactagtatttttatacttaatgtgtgaaattcacgtagatctgagtttattattattattattattattattattattattattattattattattattattttttcttcatatttttatgattattatgaattattgagtgagatggttaatcgtttcgagcgatgtgatttgcgtgatctaatttatgattatgaattatagagtgagaagctttatcgttttgatgaattgagtgatgtgatttgcgattacagttaccgagtgttggaatca

SEQ ID NO: 31156 - DNA, 898 bp, Medicago truncatula
  Intron number 1 from transcript Medtr5g095390.1 (locus Med tr5g095390) derived from phytozome v7.0 (chr-ID MtChr5; po s 37802031 to 37802928 reverse strand)
tgtaagttattttttatttatttaatttatttgaaataaaaatacatgtaagttgttttttcttttgaataacttttatatatataaccacacgtaagttgttgttacattgttaagttcacctaaattttaagactcaatccatttaatttatatgaaggatctaattcatatgctctatcaaatatcacatctgttgcaattttaagctcaagccataacttctacccttcaaatggtaatttttggcattagaagaggtatttactctttcaattagacaacaattcatcatttattgagccaaaatcacaattttaaaaatacaatatatgcatgatcccgttcgaaccccaaactccccactaattcattttatatgagtaaatttcaagtcatctaggttaattgacaaaataagaatataaattttaggttgagatcaaaattacaccaaatgcgttagttaaggggcaaacaaatttgattttaaaatgtgaaagacaatttttatgataaccgatccattgttgaaaaagtttgactttcataatatctaatgtaaaagtttataaaaagagagtttgtgattggttgaccgtttaacaagtttaagcgtcaaaattattataaaatatcagagtaagggtttgtttgattgtatttggtttttaaaattattttgtaaaattgtttaatacaaaatttgttgcaaaaacaaggttataagtaacacatgcaaattttacaaaacaaatttttctcttttataattttcaaaaactaaaagagtttttaagaagataaatcaaacacatcctaaatttaaatttagattttctcatgttttaattatttgattgtgtagggaaaatatttatattcccaacgacaaacc

SEQ ID NO: 31157 - DNA, 916 bp, Medicago truncatula
  Intron number 1 from transcript Medtr5g034990.1 (locus Med tr5g034990) derived from phytozome v7.0 (chr-ID MtChr5; po s 14394143 to 14395058)
cactatctctgtcaggttctcaaccacatcaccaggacaatttgttacctctaagactagtgtattaatcgaatataaaactgagctcaaatcttttcatatcaccagcaacttgttatgattattaattaatcattattgatgcatgtgttatcaaaagagtaaaaagaaagagtacatttttaacctactggtgatgttttatagagagataggcaaatagcacatactcccacatcggagtatgttttttgagctctgatacactgaagcggcctaaaaatttgagggttgtgtgaaaaataatgaagtcgccacaaatgtttaataaaatagagaaaacatttgatgccatattttaggttcgggaagtattagcatcctacaacatttgtttaaaaagcggtcacctctaattaattgtggaagatttattaactttaaaaatatatatttctccttattattagatgcgaattaaaattaagtttttacatgaaaaatataatgtgtttaaatagggggaaaaaagttttgttattattgtgtttgataacagtttaatcttactcttacgtatctcctgctacctagtttttggtagaaaatgtttgtgtgttgattgattttaaagaaaatgttattttgtcacgatgattttggttaaaagtttgttgatttgattaagtaaaaatattatattaattgcaagaaagtggatttgtgatgcgtttgtttggtaactgataagcgccagaaattgaataaatcacatagataattaaggcactcgttaatttgtttagcaagttacctcattaaaagctctaaacgcaattgccatggaaacgcaattattgtaatacgtgctttttatacctaatgtcaatcatttatgtaggtaaacgcaattgcc

SEQ ID NO: 31158 - DNA, 777 bp, Medicago truncatula
  Intron number 2 from transcript Medtr5g099990.1 (locus Med tr5g099990) derived from phytozome v7.0 (chr-ID MtChr5; po s 40028125 to 40028901 reverse strand)
agaatttgtggagcaggtgtgttcatatttaatttctttgtatttcccttttatgtttctgcaatgttttatgaacaattcagtatcatgtaaccttgtttttagtgatttcttttcaattttcagtatatttatttaaatatcaatgaccatgaatatcattaatattaaaatataaatttgctccgttcaaaaaacagaggctcatttttttgtctggctgattgtatacaagtatagaagaaaaggcatcagcaatatcttttatcaaaaaaaaaaaaagttgtagcatcatcaagctttaaattagtgtttattgataatagtatgtgattttgcaactcatagtccatatttaggagggtaaatttccaatatgaggatcagaggaacgaacatgcatgattagtggtttgatttgaagtttataacataaaacaatgaaactttaagttattttcacacctaaacatctaggtaagaattgctgctcatggtttgatttttatcattctcttataaaatccttgattagtgttaaattttacattatcaataaaccagtgtcatgtacgtagtaatatccttaaatattcatttttaaaatgtctgttatttgtttcatatttttcattcagttttcttggcatcccaacttggtaacccttacgttttttaacgatattttgaaaatggctcttatgtttttgaagggtgttttgaaaatgattataatttctagataagggttctcatcttactcaaactcttagcagc

SEQ ID NO: 31159 - DNA, 702 bp, Medicago truncatula
  Intron number 1 from transcript Medtr7g009100.1 (locus Med tr7g009100) derived from phytozome v7.0 (chr-ID MtChr7; po s 1540117 to 1540818)
aagttgattgctctactgaacaagaggttacaaaggtacacaccaatcctaatcctcaacaattttttcttctcttgaaacatctatactgttcttgaatagtattatttgcaatattgtttttttttttttttaaatttttactttgatgatttgttatgtataaggattatgcatatgtagcttgtgtttcatatcaatagaagatgagcaattacactctagtttgacacatgattatttgtaggtgacatagttcaatgtaaatattcatacatgtctataaaagttttaaaataaagttataattgtctaaaaatattcatgtgtgttattgttttgttcatatagtattgtagttaagttttgtccttatgaatctttttacggagttaaaagttatattgatctgtttggtttggcggtgggaaagccaaacccacgtctcgaagggcaactttcgtggaaattgagaagctagctttcctagctttcacggcaacatgatttcttgccacaattttgaaaatacaacgccattctaaacatacataatgtcttctagcttttcatgtgcgtgttataatcttgttcatatgatactatatgtaagttttgtccgtatgatgttgtaaataagttttattcgcataaattttattaatactactatggttttgaaatctaggaagacaaaccaaa

SEQ ID NO: 31160 - DNA, 773 bp, Medicago truncatula
  Intron number 2 from transcript Medtr4g144810.1 (locus Med tr4g144810) derived from phytozome v7.0 (chr-ID MtChr4; po s 36554875 to 36555647 reverse strand)
gttggaagttcgtatgtctctcccccctatgttcctctctcaacttgatttgtaacctgtccatgcttcttttaggaaaatgacccttcatctgaatctccagttgtgaacattgtaaaatgaaagttgattatacaaatcactttgagttgtttgttattaattgaagaataagctatttgtaaacggcggtttgctagtgattcaaaataaataatggtcattattgttttgtacgcggttctacttgtatttgagctcattttgttcgacgtgttccgatttatttatttcaattgttattgtttgtttgtgttgttgcttgtgttctgtctatgtttcgatttcatcaccccgtcgacggcaagttgtgttgcttatatgaaaatttatttaaaagacttgttttatactatatggctattaaagctcttctaatgtatactaatcttagtaagtacatttatttatttataattacgttgggatctcactttgggtatcatttgtgaatcttagtagagggccaactccgagtttggtctaggcacgagtgtgttgggaaagacatggcgataaatggaacttggtttgaaatgggtgacaccattcttgtagatacaatattgagtcttatgagagtcaaagtactgatgttaatgtttagcgcttcaatttttaatttttatgttatgtacttcaatttgatccgaagtaaaaaagctatacattatgcaggggacaagaattggccaggaagaatagtggggtgt

SEQ ID NO: 31161 - DNA, 959 bp, Medicago truncatula
  Intron number 1 from transcript Medtr5g101060.1 (locus Med tr5g101060) derived from phytozome v7.0 (chr-ID MtChr5; po s 40433588 to 40434546)
ctgaacctacccaaagatcccaacatcttatacaggtttaatttctctccttctttcatggaaggaagttgcttaaataatatttttttttcttggcttcgtgagaaaatattttaaattaatctaattagggtaattaattactactatgatagaaaattgattatttatttacttgattttgtgaaagggtgttgattgcattcgtcaaaagttttggatcaaaagctcgctgtttggggaaaatactctcttcatcactgtttttctcttcctcgaggttttcatttgccaaacactgtatggtcaatgtggcctcaatcaaagttgtgttgcattcaattctttattctttattctgtagatagtggaattgactcttattttgtttcttgtttaattcatttcacaggttgaactccatagttctatgttgaaatttgaagatcatcaagaaatttgaagatcttccaagttgaactccatagttctgcaacaccaacgtgagcttgtatatattttttatcaacccagttgaacctgcaacatgacttctgcttgctatacctgagctaatatttcccttaacatgtgctaacatttttaatcaaatgtatatacctttttattgattcttgatttgttggtaatgatgtataaaattaactttactggtgtttttgcaagtcatacagggttacgggtttcaaatgttagtatttagtttttgcctttagaaagtaaaggttcacttggtcaaacatcttatgtcatttgaagttagatgttacttatttgtggccttttaaggcctctgccatttacttaacgtagatctcatacctactcaagtgttatatgatcttgttatttaaacattatgttataattaagttcttgaggattctgtcgtctattttccagaaacttgtgttgcttgtccgtgcattgcaaacaca

SEQ ID NO: 31162 - DNA, 1005 bp, Medicago truncatula
  Intron number 1 from transcript Medtr5g008610.1 (locus Med tr5g008610) derived from phytozome v7.0 (chr-ID MtChr5; po s 1661141 to 1662145 reverse strand)
tgtgcaaattgtggagtatgtaccgtgtacctgctcaatatgttccaccgtagactaacttttttgaaccatcagattaaacacatcactaatgttatcgtgttgcctttcacactatatttattccctttctcctgtttgactttttcttacttctatttcaacaacatatttattccaatttatttatggcaaaattacactataaatcctgtcataaatcctttgtattaaaattttgtttaaattgaaaattcattattttaataaagtttaaattcattactattatttaataacgtttaaatttgtttttggtcattgcatatttttttcatagcaattttgatatatatcttaaatcattagtttcaaccatcaaaacaatcttattatatatctcaaattatgattagtttgtatcaaattataaattttcatatttgattatcaaaactataatgaattatttttcctattatctcttgatatagactatgtttttgtaacacataagtccttttttcattttttttattataaaaatgctgaaataatagttttttttttttgttgaaaggatgctgaaataatagttttattaataaccttatttgttaaaatatttttaattaaaaagataaagaaattcataagtcatatgaatatcttcatcatcttcctccttgattaaaaaaaagtacacttaaatacacatctaaattaaacatctctactttgatcttcttataatctcaaaatccctaaaactcaattaaccacaaatagttcaagtaatttagatgctaacaatggtttgaagagaaacccataattttcaattatcataacagaatcttcagataaactcaattataaaactagatacggttagattaaatgatcaatcatcataattagggtttcggaacaagaacgattgaaattagataatatagaatctatgtagtgaacgaaggtgggtagagttgtctcggttcgttg

SEQ ID NO: 31163 - DNA, 780 bp, Medicago truncatula
  Intron number 2 from transcript Medtr4g101170.2 (locus Med tr4g101170) derived from phytozome v7.0 (chr-ID MtChr4; po s 21893007 to 21893786 reverse strand)
tgttgttgtttctccagtgaagtctggaaagaaaggtaccacctttacttttctgcttcgattttttgcttaaagatgatttttttttacttgtttttgatttgaattttatatgatttcgttcatgggttttagctttgaagtgttggttttgattaaagatgatatttttacctggtttaatttgaattttattgtttttgattcatgtgttttaactttttaagtgactaatttttttagctcacagagtcgtctatatgatttttttgttccgagttttttaagtgatttttgaaacttcgttttttaaagatattgtttttactttgttttagttgaatttcattagttttgattcatgctgagttttgagtgccaattattttttctgtccattgagatatttatatgattatgatttgttatgaagttaggttctacatgtattgtgtgttaatgttaatatagctgttgattggtcaaactgatggtgattacttgtacttttatgttatagagttgttctgatgttgattatatagggtcgaactgattttaccataaaacctaaagcttggtggttcttcaattttatttgatgttttgatgctggccatgctactctatgttatagagttgttgattggttgaactaatgttatgtaaagtgtatttttttttctctggatacttcttatgttctgatgttggttcttattgggctatcttgactttgatataggcaagaggcaggctgaggaagaagtcaaggcagtg

SEQ ID NO: 31164 - DNA, 722 bp, Medicago truncatula
  Intron number 3 from transcript Medtr4g160270.2 (locus Med tr4g160270) derived from phytozome v7.0 (chr-ID MtChr4; po s 40587193 to 40587914)
gttcctcaaaaggttatattttcttttattttggggtaaattttcggttatctgaaataatctctacgttatctcaatcataattttctcctttatatatcttttacctaaacattaaaacaaaagttaattattgaacagaaaaaccaaacatgatattgccaaggccattaactgagctgatgtatcgccacaatcccatgtttatgcagaaatttccaagtgatgtatatgacattattaaagtgcactgatccaattaaaacaatgcctatgctgcaaaaaccaaatttataccaattacgctgatcttatataatcttaaaatcgtatgatagaacttgttcgtttaaaatgtattcatgaatgtggcaaaccaacgttcttcggctgataaaggtgctcatatttaatgtttgaccgtactttgagcataactaacttccataaaaggaacctatcggctatcggacggaaacaaaaaataaaatgtattaataaaatgttattatgacagacgagagatatgcagttttagttcaattgaaattacgcacctcaaaagatcttacaacataactttgttgaggtccacaattttctgatagaaaggttctgttaaagttgctggaattctagacacaattatttcaatatatgtaatttatttctctctttgtttaacagattattgctaacaaagatagtccaagagggataca

SEQ ID NO: 31165 - DNA, 386 bp, Medicago truncatula
  Intron number 2 from transcript Medtr4g114550.1 (locus Med tr4g114550) derived from phytozome v7.0 (chr-ID MtChr4; po s 26229343 to 26229728)
ttcagtgcctacctgctgcccttgaggtggggaattttggttcttctggctatgttgcaggtttctacatggctttagtggacctcattacacttttcaattcaaatattcattatcatacaccacacagtttttcttcttttcttttagtaatttaatccgactgataggttttatagattgttggggaacaaacaaatgttttatcaatgataaccttaactaatacaaattccatttatctgtaaaaatatcatctcaaagccataaaggaactatgccagcctttttatggtatataggttggtctgatcttcaatgaagttagttaaagccatttcttatttcttgtaaacaggggccaggaggtgtttggtgcgacgtgg

SEQ ID NO: 31166 - DNA, 463 bp, Medicago truncatula
  Intron number 1 from transcript Medtr5g083090.1 (locus Med tr5g083090) derived from phytozome v7.0 (chr-ID MtChr5; po s 31466361 to 31466823 reverse strand)
gatacctataagtttgtgacattgaattgtgttttccttggcaattgggtgttctcccatatttttcattgtcatttgcctgaattaacattttgggcataggaggttgcaggtatatgatgaccctagtgtttaataagatcaagcagtagttattaaggaaagtttgattgaatcttgctttagactcataaatataatctgtcaaaagtacagcaataacatggtttggttcatgttgtcttcatgatagtgagatttgattttagtttgtgtctgaaatactgatgcttgaagtgtgaagggaaaaattgattaatgtttcatgcttgactgttcttttgtgaagcaatgttaatcccctttttatttaaataaaaaattgaaaattaggtaactttgttccttttatgtgatattttacctatttttcttaattacagcagtatctttggtggagtcc

SEQ ID NO: 31167 - DNA, 559 bp, Medicago truncatula
  Intron number 1 from transcript Medtr6g046450.1 (locus Med tr6g046450) derived from phytozome v7.0 (chr-ID MtChr6; po s 9775751 to 9776309 reverse strand)
aggaaggacggtggttggagtggagagagagtggggtttagttttggacggtgcagctctttctttttggagagagtgtttttttttaaggaagatagtgggttatgtgttagtgttagtgcgcgaaaatgaaaaaatccatccgcccttttttaattttcatataacccaaacatagcgtttgtgaaaaacgctatctatacccccttcaacaatagtgttttcttaaaagcgctattagtacgaacaagaataatatcacttatagaaaagcgctatgtaacccagtttttcacaagctttttttagcgctttctgaagagtgctataacaggtctataatttgcatttttaatagcttttatccaaaaacgctattaaaattgtgctattaaaagccaaaattgtggtagtgaaactagtccagtttttattaaaataaaaaaaaagatataggtggagttgtttttatttttattttcttggtttgccaaattcaaaagtaaaaggagttttattttcagattctgccattgatacaaaagtataaagttgtcca

SEQ ID NO: 31168 - DNA, 391 bp, Medicago truncatula
  Intron number 1 from transcript Medtr5g095120.1 (locus Med tr5g095120) derived from phytozome v7.0 (chr-ID MtChr5; po s 37701841 to 37702231 reverse strand)
aagacttagaagtggaggaggaggttgtttgcgtatgatactattcttctggagtgttgttttttgctacataacattgttttgcaggcacaaaatttttgaaatttacaaattgatccctaatttcaatttttaaatttggctcaagaaaattaaaatttataaaagttatccaataatgatgataattaatttttttttactccattcaaacaaaagtattgagaaaacgaaagtaatttaattgattcatttttttttttgaaggaaataattgattcatttaaattgcctataattctaaattctttaaaattttccaattacctcatccaaatgtttttgatggttggaagtggttacttgatcccattaaagattattttgtcca

SEQ ID NO: 31169 - DNA, 724 bp, Medicago truncatula
  Intron number 1 from transcript Medtr5g045380.1 (locus Med tr5g045380) derived from phytozome v7.0 (chr-ID MtChr5; po s 18974423 to 18975146)
gaagacaaccgatcacaataatcaagaaatagagggtgagactccattgcatcaaaattatattattttattttatcttttgaaaatccataaatataattgaaagtctctgatgagtaatgaaattaatgtgtgtggtaaatgttatatggtgcatgtcgtgtgacaaatataatgtgtcgtaccatataacactactcattaaaaatgtggggggcaggtaggggttttaagaggtgtcccaaactggtagaaggagatctctttattgagaacatgtcagcctgtgtccattgattggttctctgaaagtatcttcaggaaggttagagatgacctacatacttttggaaagatccttggttatgagctattcctttgagtattcgtttcccggctgtttcaagtttctattcagaaagaagctaaagtgtttgatatgaccgttatagagggatctaaataggtttgggatcttaagtggaggagtgatcttttcgagtgggaatttgattttgggagagctgctccaggctttaaagagtctgaccctctctgaaggtgcatacttttggatttgggacaatgattcatcgaacatttattcagtgagatcagtttataaatttcttcgtatgagagctagtgtggtgaatgagatctaagaagatattatgtaacttatttgcaaaggtgtgggagtcttggtctcctctcaaggtaa

SEQ ID NO: 31170 - DNA, 394 bp, Medicago truncatula
  Intron number 2 from transcript Medtr5g045380.1 (locus Med tr5g045380) derived from phytozome v7.0 (chr-ID MtChr5; po s 18975108 to 18975501)
ttgcaaaggtgtgggagtcttggtctcctctcaaggtaaatgttttctcttgacagctgcttaggataggattatgactcgtcaaaatatcttttcgaggagaattatagttgatcctggttgtatttctgttgtggttttagtatatgttcttgtttttccaaaggagcgattcttggattttgtaatcgcttgacatcagcacttcttgcactcgaattctagttttttaatttgtttcattttgacctttggattttttttttagcaatgacggtctccacaatcagggcaattcatcgtgaagagcgtgtttaatcagtaataattaatatgaagagcgtgttcatcgtgaagagcgtgttcaatcagggcaattgacacatacacgaca

SEQ ID NO: 31171 - DNA, 1062 bp, Medicago truncatula
  Intron number 1 from transcript Medtr4g025780.1 (locus Med tr4g025780) derived from phytozome v7.0 (chr-ID MtChr4; po s 6217869 to 6218930 reverse strand)
gttctttaccacaacgacgacggcgacctcacaatgtgtgtttttcatatctataagaagggaagggatgagttgcagccggaaaaggaatgaggcgagggaattgaagtttgtaacttccatcggtgttgtttttaaatgcttcaagagtgtgaaagtcagatttttgttgttgatgaaatcaccaaactctgttgaagttagtttgtcaagtagtgtttgaacagaagcagagagatatgagttgctgccatcttttgaagttgttttactaaatgttgaatgaaggtaaggtagcttaaagatctatcaagttggttacaaattatcaaagggatgagttgcaactttgggattaaatttctatgagatagagttttttaattttcgaatttggggataaatttctgggttgtttatgcatgaatctgtggatgaatttcttgaggaaaacttccttaatgttatgagtttgctgttggtttttgtgtgttcctttacttttttgtgattggtgtgattgtgtgcattcttgtgacaaattggcactgttgattaatgtgagaataattggtgttcataaaacccagattttggtactgttaatttagctccggggaggaagaagacatggatagtatggtaatttcacgttcatttgatagtctcaagggtatttttgtcctttcaagccatattactgacgtgacggtgattaagtgggtcaagggacgaaattttaaatgattaaggtttgcaagagtaatttgccaggattaacgattacatgaccaatttttaaatgacccctaattgcgatatgtatatcgtctgctactacacgaccaattaatgtttgtatcaaaattctttctggtatcattccatttcgggtatttacagaaatcccgcgaatcgtatcgcaatctgttcgacgtgcagggacgaaacacatacttaagccttatataaatttataagataacatacaaattcaagttgttttctgcttctccttggaatcggtggctagggttcaacttgaacggcgggcacccttca

SEQ ID NO: 31172 - DNA, 680 bp, Medicago truncatula
  Intron number 1 from transcript Medtr4g086950.1 (locus Med tr4g086950) derived from phytozome v7.0 (chr-ID MtChr4; po s 18149677 to 18150356)
ttggacaccaggtgatgacccctgaggcattccatactcatgtttcttggcctggggccagaccattttatctggagggggagaaaaatgttacaatttctggtcatgaataattttggtatcttggatcatccatcttatgaatctcacttttgctggaattttgtcaatttaaattaacattgatttctttacgtaaacttataattactcatttaaaaaatgtaaacttaaaaaaagttaaaagctagatagcaaaacagcaagtccaacaaatgaaataatcagagagtcaatttttttttttttaaaggaatagagtcaaatgttttgttttttaaagaaataaaggtttcagaggtagaaaaaagtaactaaaaattaatgggggaaggtggaaaactaatgcattactgtacatgcaaatgaagcaagactcttcatttatgtacacaacccgttgccaatttctttgggtgaagctgacttatccattttgctttgtgggtttggttttctttagagagattaaaattggtgtgaagtagaaaattgttcaaagtatagaagaaagctagtaagcttcactaaggctttaggaattaatggacaaaagatcatcaatgaaagaaacaaattcaattttaggcttcagctgaatgaatttttgacatagtcaa

SEQ ID NO: 31173 - DNA, 967 bp, Medicago truncatula
  Intron number 3 from transcript Medtr4g110010.1 (locus Med tr4g110010) derived from phytozome v7.0 (chr-ID MtChr4; po s 24774534 to 24775500 reverse strand)
ccagttctcacctgggccaagtgactattttttgagtcttccaagtttgatataaattggattaatagtgtttttcaccctgtaatataggctatttctggttttcgcccctataaaattttcggtttgaattgcatccttgtaaaactttttttttttcttccggaaaacacccctcccccatccaactcaacaaattcgcttacgtggcgctgattttgcattttttttaattggccatgtgtaaaaaatatatccacatcagattttatttttaaaatatttaaaaacaaattttaaaaaataacaaaaatattcagtttttttttcaaaaatttaaaaaatcgaaaaataatttttaaaaaattcagaaaaaatattaagattttttccgaaatataaaaaaaaacagaaaaatagtctttttttttagaaaaatcgaaaaaaaaattaaaaactattaagatttttttcgattaaaaagattttaaaaaattctgaaattaaattttcaaaatacaaaaaaattaaattttcaaaattaaaaaaaaggtcagattttttaaaaacattctgaaaaaaaatataatttttaaaaatctgaatacaaatttagagggttttaaaaaagtcgtggaaatttcatttttcctagaattaagcttttccctagaggaggtagaaatcataaatcttatatttgtggaatgaaatgattttttttccaatattttattaaaattgcggaataaaattttcgaataaaaaatctgaattttttctatattcgtttacaaggatgcaattcaaaccgaaaattttataggagcgaaaaccggaaatgacctatattacaggggtgaaaaacactattaacccatataaatttagatatttgttcgatatcttacctataattattaatcttcttaagtaataaattacggccaccataacatttggagag

SEQ ID NO: 31174 - DNA, 790 bp, Medicago truncatula
  Intron number 1 from transcript Medtr5g033180.1 (locus Med tr5g033180) derived from phytozome v7.0 (chr-ID MtChr5; po s 13525874 to 13526663)
caaactcttggactgcaacgagattcccattagaggtatactacccactctgaaactgctcttagaattttaattataatttttttcttcttctttttaatttttgatttaattattatacatatgcaaggctaaagtatatatataatatatgtagtctcaaactgctcttagagttttttttgcttaattagtgtttggcttattttgatacacattgcacataatgaatatgaaacacttctaaagtacattgcacataatgaatgtaaaacacttctaaagtgaatgttagagatgaacatcttgtacgtatagatccgtttggattgacttagcttacgcgggcttatatacttataagcatgtgtaaaagagattgggtaaatcaataagaataactttatgcaatctttctttaaaaaaaacttaattcaactcataagccgtctatatatgtcatatttcataagctcccaatgcgagcttaaccaggaactttttaacattttatctgataatctatgtggttttcactacaatatgtgggatctatttctaaagtatgagacccacgtaagttttatctaataaaagagtaggtgattgagagagtgttcgtaacatattgttcatagctacggctcctcttatttcatacacctatcttttttttacttaataaacttatctactattgcataccacaattcaaaaccttggtcgtatattgatgcaaataatgagttttacgtgtgttctggctgtttaatttataggagacgaggac

SEQ ID NO: 31175 - DNA, 969 bp, Medicago truncatula
  Intron number 1 from transcript Medtr5g025070.1 (locus Med tr5g025070) derived from phytozome v7.0 (chr-ID MtChr5; po s 10013775 to 10014743 reverse strand)
ccacacctcatcaaaggtttcttcagtttatcatttaattgatttaggtttaggatttaattcatatacaccctcgatgtaaaaagcggtgtaaagagttttttatgctgtcaatcaatcaatcataactgtcagtctcatgtgattaaggttgttgttggttatgaattatgacccttgatattgttgtgtccataattatagttgaatgacggttacattaaatatcctgatactgcctgcaatatagattgagattttggcccgggacctttgtttaagaccttacatgtcatgtaactaatatgagttccaaaatgcaatttttatgagcagaatgttttgtcataagcacatgtgagactattttggagagcttatgaaaacaacttatgacatgtccataagttttttccgctttatttcaataaattgtctaggataacttatagcttgtgcaaaaaaacaatttgattttatctcttgtgaatgaaacaacttatacactgtcacatatatgttaaagggtttgtattgtttggattaccgtgtcttccacattgatatgcttaataaaaatgtccatctagatattattgttttctttggttttggtgcttttaagagtttatccatttagtttataaaaatgcaaatactggtttctggaattgtttcatggttaggtgcatttgagtttgatcactttaacttgatgtggtgcttatttcgtatcctggtgaatttagcaatatcgcaatgagccactgtgattttttaaactttgtagctttgaaccgtgattttttccaacacacgatatcaaacattcatataagattatatcctctcaaatacaacagttaatttttgcaaattttatattatatagtagcatagtttagttttctcattctactagccaattattgacctttttatgtatggttgattattaccagggaaata

SEQ ID NO: 31176 - DNA, 833 bp, Medicago truncatula
  Intron number 1 from transcript Medtr5g038000.1 (locus Med tr5g038000) derived from phytozome v7.0 (chr-ID MtChr5; po s 16019758 to 16020590)
aggcttgacttgtcatcaactgaaaatcaggtgtgttgttatatcaaatatgaatatgaagtttgaatagagagtatatcctttatatcaaatatgcaaaacaaatgtaatatgtgtaatcatattttcattgtagccgaaaaattgtcgaacaacagtgatgcatgtcgttacacgcatccatgcatgcaacctgatccaccatcacttttgtgagtttttctaccattgtattttcttggaaccctaatttaacatatccaatttcaaaaatcaaaataaattgtgctaataaattacatttattggatctatgatttatgactctaatatgttaatattagattttgatttgtgaatttgggttgattgattgtagattggatatacatttttaatttattgaagaaatagtaagtcgaatttaagtgtttaattttataacgttcgttgttaaaaaaaatctattttttatgttgcccgtcttcacactttttttattatactaatgcatacggtgatttttattgtaattttaggtttgattaatattataggtataaatgtttgtaacttttgtaacaaaaaaactatatgacttttaaattgtaacaaacagtgtttattattttttacatcaaaaatatatcaataaaaaattaattcttatctttttttaataacactaacaatacaaaaattaattcatttttctgtattcattttaatggatatgcatgatatatgaacaagtccacccaggttgtaggaaagaccttgatgcaatttgcaagtttattgaagaatatattgttagtggagtttttatagat

SEQ ID NO: 31177 - DNA, 852 bp, Medicago truncatula
  Intron number 2 from transcript Medtr4g159300.1 (locus Med tr4g159300) derived from phytozome v7.0 (chr-ID MtChr4; po s 40154495 to 40155346)
gctccggtgttgcacccgatcaccctgaaactaaggtctaattttattactattatttttgctgcattcatgtataactgttgaacttctaatttagtgtcggtcggtataaattggtttgtttgagcttatttactacggttgtgagatagtttgatagagcttatggaaagcatgttcataatctgtttcagcttatttccataagctctctaagatatagcttacatgaaaacaattttactttatttccataagtttttattttttatttttttaagaatgatcacagatgcaggctatatttgtcatgatcagttctttgggattaacatataacattttgtggttttttggaatgagatgggatttttgcattccagaaactaatgtgcctgctgtcaaatatcttagggctgggttaaatatttaaaaaaaaaacattttttattaatttgatgctgggttaaggtaggtaggtcattttgggttgccatggtagaaattagaaaagtttcctttgtagatttatagaagcaatcaccagtaaggagggttgtttattcagaggatggtcataataaaagatagaggaagaccaaggaaaactatgtcaaattagtgctaaccaatctatctctggatttagtacttgggaggacattatgagtcatttgacccatttacttgacgccacgtattggacaaaaggcttggttgtgtgttattattgtttggtaatgggatggggttatccatgtttttctttggtgagagtaactttattgagcttaatttaccagaaaacttgcaacagattgtcgtcaaccaattttcaagggtggcgcaaca

SEQ ID NO: 31178 - DNA, 760 bp, Medicago truncatula
  Intron number 2 from transcript Medtr5g038250.1 (locus Med tr5g038250) derived from phytozome v7.0 (chr-ID MtChr5; po s 16151096 to 16151855 reverse strand)
gtcaagctactgatagccatagtcttgcagaaagagtattttcctacttcctatttctcacaaagtgtatttttatagggtgttcaatttcttattttcaaataatattgatcctcaaagatattgcttgcttatgttgcttttgtcttttcgattttatgttttacaaattggccagtaaagttaacgactttgaatctgtaggctgcatttgtcaataagttgagaactttaggaaccaaattccatactccctcttgtattcctaaactaatataggttttattttatataattataatactattttattctcatcgaacaagttgttataagacacttttgagaaagtacatattttttatgagactaagaagattagttgcacttgactaagtttcttattcagtatgtatgaactatgaagttaagtacttttgtttataattaaaaccgaatggtggttttgctaaatagttattttagttttaggtaactttttgtgcatttatttgcaaggttcatgttcttaactgggataattgtaatattgaggctggcacgctgactcagctatggtacaagtcatgtgatccgaaaatttccgaaaaatgttgtgttaagaaaattaaactgttaaggaaatgagaggaaatattgatttattggatttttgcaatcagtgttattagcttagttttctaatggaatattgatggacactgatggacaggctagaagggaaaagattagtgaaagg

SEQ ID NO: 31179 - DNA, 636 bp, Medicago truncatula
  Intron number 1 from transcript Medtr5g021190.1 (locus Med tr5g021190) derived from phytozome v7.0 (chr-ID MtChr5; po s 8043984 to 8044619)
gcggtggtaatgacgtgatgaaagttgacggcggcgatggtttgttaacggttacgctgctgagttcagcgactcggagccatggatcggcaaaaagggagaagcatataaatgtgtggatgatgattgcggaggagaggatctagaaagggggttggtgaagagagagggagatggaacaatgaagaaatggtgaattgaagttgaagagatgacacaaataaagtttgcttctttggaaaatgaaaaacaaattaacgtgggagacaaagatataaatgcacatttgggttttgcaaaaggtggttgtgagatttgaatttcaaattcaaatttgatgagcactttttcccgctaaataggtttaaggtttgggtatgcattgtgaactttagtattatatattaagattatatattaagataaaagtaaaagttatctaaaacttttctggtcatgttttcttttttagtgtagtcgcatacagtttatagtcaattttcatgaaaagttcatgccagtatacttgccccctttttttcttagaatgatacaggcatatatcatatcatgttacttttgtttctgtactgcttatcagaaactgctacaagaagcaaaaaggaagcttgggga

SEQ ID NO: 31180 - DNA, 352 bp, Medicago truncatula
  Intron number 2 from transcript Medtr5g013490.1 (locus Med tr5g013490) derived from phytozome v7.0 (chr-ID MtChr5; po s 4085852 to 4086203 reverse strand)
attgatcagttatttgatttttcaaaaagtattcggttgtcattatatttgatatggttatcgtgtgtttgagttattgagaaagatcaaaacttttcttcaatttagtttttttttttttattaattacactataatgtagtgaactttttgagtttttttacaatacttgtgttgggttaaactttgtgttttgattaatatatttcattcctgcctctacaaaaaagtatataatataatataatttgttagatttatagagctttttttttgtcaagagatttatagagctttatagtaaaatgtatcactatggtgtggccaaggcactcatctctttggtggaagg

SEQ ID NO: 31181 - DNA, 1017 bp, Medicago truncatula
  Intron number 2 from transcript Medtr4g079670.1 (locus Med tr4g079670) derived from phytozome v7.0 (chr-ID MtChr4; po s 16104622 to 16105638)
caaagatatctggaatcagtcgcagacaactagaggtatttatttgatggtcttggcttaacgtttctccttcgttattcttttatgcttccgtttggtcattctaattttgttgttttataagcaagtcttaacaatctaatttgcttatgttaaatatacttgttaatttttcttttgatactatgttctcaatgtcgtggatgtgttttactccctctgtatttaattatgttactttggaaaaaatatttatgatttattatatttcagtttacaataccaatgtgtcattaatgtttcttttcctatcacgccctttaccttttattactctctcttctttcaattcttatgatctttttcccatgttattaatgtgggataattttgttaaaccattcataatttatctttgcaatacaaaattaattgcatttcttaatatatgtgaatattgcaaattacttataataaaatacagagggagtacggaagaagtgtattggaaaaccatgtcccacatagattaaagataaggcctagctagagtttataaagagagacatccctcaccttacaagccggttttgtacggttgagttaggcccaccccaatttataagaaagttaaaggacaatctaaactgtttaaagagtgctaatgtaaacggacaatctaaactagtgttttaaaaacttatttatttgcataagttgttttatataagctctaaaataagctaatccaaacgggccctttgtgttttaagctgttagtgtcattgtcaattcttgtgcgttgatgtaattgtttgttcacaataaatacgatcatttttgcctctacaaaaaagggaactcttgaggtctacaccttctgtttgtttttaaggttttgcctccatattttctttacgtttcatgtgtttgtttgtattggtttggtactgattccctcatatatgctgtttttattcaggtttttctagatatttgtctatcacgttatcgttt

SEQ ID NO: 31182 - DNA, 528 bp, Medicago truncatula
  Intron number 1 from transcript Medtr5g079380.1 (locus Med tr5g079380) derived from phytozome v7.0 (chr-ID MtChr5; po s 29538949 to 29539476)
gccccataggtgatcaggtaaattttcttccagtttatccttattatctatgaagcacggacaccggacactgacacgacgaaaccgttaataatttgagaaaatcacataattcaatgtaattatagatgtcggtatcgagtcagtgtcggacacgacacgtgtcagacaccaggacacacctaatccgaggaatgtccgtgcttcatagtttattatcattttttttatatcattttgtatttatgttagttcaactgctaactttatcaaatactacaaatttaatcggctagtttatctactatattttttttttttgagaggagtttatctactataattaacatgacagttataaattcatccgttatcaactagcgtttatcaaaaatatacatgactttttaccaaaaagagccaaaaacatgcatatatcttttggttccactaaatccttaacaattacaattatatatttgaatttttaaataaattgtctgttttttatttcaggtgcatcaagat

SEQ ID NO: 31183 - DNA, 856 bp, Medicago truncatula
  Intron number 1 from transcript Medtr6g047100.1 (locus Med tr6g047100) derived from phytozome v7.0 (chr-ID MtChr6; po s 10301318 to 10302173)
aacaggttctgatcttttcagaattttaatcttttgactcttaggatcagattttgtcattaccttgatcttaagattctctggctttgatgtgatcttagcctgtgaacctgaagcttcaggttttgactgaacagcagttatagcatttgtaccttcaggcacaaaggtggatttcaatccatccttgatacaatcacagtagctcttgagactgtattctttggatttctcctcagaatatccaatccctttgcctttgttcttgtatgtgctgtagatcatagaagcaactttgcttctgtctattccagccataataaaatcatccaaggcaatctcatgtttattgcctgaacctttatcacatttttcttgtagcttctgacaaagactcttgagtctatcttcatatgttgttgatatgaggttaaaccctttgagttcttcttcagaagcttccagttccaatagagttgatttttgttgtttcatcaaatcaacatatttttcttttaaatctgtcaactcattggttctgtgttcaaacagtgataaaagttcttttagagaatcaacaagttcttgtctagggattttggaatatacctcattttcatcttctgaatctgattcagcttctgatactgcttctgatgatactgttgccactaaccccatggctgcttttgcatcatcatctgcttcttctttatcagaaccagattcactgtccaaatcttcccaggttgccatcaagctctttttgatttgttttctaaatttactggagctgaagcttgatttctttgatttgcttttagatttctccttctgaagatcagggcaatcagca

SEQ ID NO: 31184 - DNA, 776 bp, Medicago truncatula
  Intron number 1 from transcript Medtr4g140750.1 (locus Med tr4g140750) derived from phytozome v7.0 (chr-ID MtChr4; po s 34597187 to 34597962)
ggttctgatcatcttctccaatacattgctgataggtaggtaatttgattgttgattgatatgcttttttgtcggattcaattttatgtttttttacgtcatttggaatgttatgctttttttttatcattctatgtgttttctttagttgttgttaatagctttgcgactaacttttctatgaatggtagtatgtaaatcctatggattgcatcttaaacattttggagactatgttttaattttgagccctcaaaattttgaacgccgaaattggcatatgcaaaaatttggacccttaaacacttttgagacactcaaaacttgggatttattgccataattaagtttagaatttcagatttgattaaaatttggccccttgaacatttttatttaatgtttttggaggaatttggaccctcaaaagtttgaggccctgcacagtagcccagcttgcatagggggatagtcgaccctgcctaaggtcctagattttaattaaacatttgggtgtccttttagtttgtttcattcttcctaattatagtactcgagttgtatatgagatgagtaccccttgcacttttatttctaattgaaactcttctttgtttctaaaattttaatttggatgtgtttgaaatgtagaagtcgaaatgtttgtttttttacatatagcgccatgtatcatacttttactgtgttcttcttagtctcttcgtcatttaatttttacagggcaagtaacttaaggcatatacaacttgcttcat

SEQ ID NO: 31185 - DNA, 176 bp, Medicago truncatula
  Intron number 1 from transcript Medtr5g027050.1 (locus Med tr5g027050) derived from phytozome v7.0 (chr-ID MtChr5; po s 10978641 to 10978816)
ccattgttaagctctctcatttctattgtgacgatgttctgaataacaagtaagtttcttcttttgcacgccctttttttttttttttttttttcttttcgatttatttattttttgtttttgatttttacattaatagaaaatggtatctgaaattagatttttttaggttaagt

SEQ ID NO: 31186 - DNA, 825 bp, Medicago truncatula
  Intron number 1 from transcript Medtr7g073460.1 (locus Med tr7g073460) derived from phytozome v7.0 (chr-ID MtChr7; po s 14904059 to 14904883 reverse strand)
cagttctgcttaaggtatgcttttctaaactatattttacctctgtcactttattttaaaattcatatttattttacctctcgagataaattagtagtattcgtgatgggtgatcatgtgcgaacttgcatagtataagaagttaaaaatagtaaagtgtctagtaatttaaaatagagcttgtaagtttttttttgagataatttgtcttgtaaggaggctttgtatataatttaaattaaaaagaaaaattggaaagacaaaattattattaataatgttgatgactacaccctatacatttactttctttgactttttattttagttatatatgtgattgaagtagtatttcacaatgtgcgatgctatatatcccgagagaatttgtctcgaggggatcgtgaaacaacatttagccaataaacttacttactggccggaaagcatgggatgtcatgggtataattctgaaaagacttttattaaatatggactcgtgaattattcgtgagactatttttcgctataagcaacaatatccgttcacatttgtttcacgtgagattcaaactctactccttgagattatgaagttaaactcttaccattgacttgacaaatctttgaaagacatgtttataatcaattgcaaatttagtactttttctgaaatctgaaactatgagttaagcactttccagatgaagttattaaagatcatttgaaaatttaattgagtccgtaactcatttatcacaaagttattagggaaatttataatatttcttctcttgctttttgttactttgcagtggattttac

SEQ ID NO: 31187 - DNA, 666 bp, Medicago truncatula
  Intron number 2 from transcript Medtr7g032310.1 (locus Med tr7g032310) derived from phytozome v7.0 (chr-ID MtChr7; po s 7999303 to 7999968 reverse strand)
gcaactacacgtgaaattgagcttaggatgtggatattgccgaggatgatcacaaaactgatttgttacatttcttttctaaatcatgattatgattctgtactcctttaaccaaacaagccttggaattgcatttgcttaattgatttttttttgacaaagattattttagagagaagattgattaaaagtgataaaaattaattttgctttagattaagtaaatggatacattgtgagcttaaagttattttacacaaacatacaatcatgtttaattcgttaaattatgtttgatatttttcgataaaagtaaatatttaattttttgttttttgttttcttctcttaacctttaattataaatagaggctcttgcacactcttttattcatttaaaaagatagcagtacaagataaggttcagacatcaaagcttcagagcagaggatctcaattctccttttattctctagggtatgttttatattgttttgtaatgatgtattttgttatgtgcaactaaatctctcttgattaaggttccacaatggacctcttcttatttgttggattcaattaatcaagttttttattcagcttatgattcaagtgttatatttaatttgtatatgtctagttttaattttttttttcttcagacaa

SEQ ID NO: 31188 - DNA, 836 bp, Medicago truncatula
  Intron number 1 from transcript Medtr5g049410.2 (locus Med tr5g049410) derived from phytozome v7.0 (chr-ID MtChr5; po s 21127502 to 21128337 reverse strand)
ggtatgttctgttttttcatttttttgctttcttgtgctttgttcttagatttctgtttcatggttttggacattcttaaattttttgattttttctatggcttttgtcttttgggtttcacccttttgtgtgaatgattctccttttgtttttgttttttgtttctttggtttggaaaaatttagatacgaggtttatgtttctttatgtaggtaacacaaattgttaatcatgagttttttctggttttttttttttttttggtgttcatatttttgcttcttcttctctaagtttttatgtgtattttctctcttttctttctggcttttggttatgttgagttagcaaaacatggttttaacttttaatatggtttaattaacagctaagcatgtgtaaaaaagcttattcttttatgggtgtttggctttcttcaataagtgggtattcttcttatgttatgtttagtcatcttctttacaattggtcactctttttttacacatctcactttgtcccaatccaaaatattcctctttttctctctctctctctctctctctctctctctctctctctctctctctctctctctctctctctctctctctctctctctttctgctgtgttctttttactacaacttgctaaacaaggttaccttacccatcattatcctattatatgtatatatttattgtttcttcttactattattgagtttttactagcttttgattttcattgtttatgttttttatgttctatgttttgattggtttgtttttgtttttgtttttctctttcatagcttttatttctgaagtcaac

SEQ ID NO: 31189 - DNA, 1006 bp, Medicago truncatula
  Intron number 1 from transcript Medtr6g046330.1 (locus Med tr6g046330) derived from phytozome v7.0 (chr-ID MtChr6; po s 9650088 to 9651093)
gtggttggtgaagcaactgtaattcaagaattctttagaaatgaagctctctcgaaaccatctttttactatgatatccaagttgatgctgcagaagacatagctagcattttttgggcagatggaattatgcaactagattattctctatttggtgatgtcatcagttttgatacaacttaccgaacaaacaatcaatatcggccattaggttagtattttttacttctctcaggtttttaattagtgtttactttcattatgttgtattttgttctggcatggttagtgtaggtaggagtacattttgaactcctagtatctaggtgtggctgtcataagtgtccgagattgactgtaagattgataaagttgcaggcatttttacttagccagaaattaaattcatcatatactaaccatataccgataataaattcatctaaaatcattacaccataagtatggttttacatataacactatcaaaatcattaaaccatacttatggtttcagtattccatacccctaattttgatcaaattttaattaaattcaacattcttgggcctaaaataactgttagaaccacataccgataataacttcatctaaaaccattacaccataagtatggttttacatataacactatcaaaaccattaaaccatacttatggtttcagtattccatacccctaattttgatcaaattttaattaaatttttacatagaacactaatgaaattgtcttgtgtgatcgatctttagtacatacttattagaatacttagtgtctatgtgttttatcattgagtttattcactgctgaggcgtgatttcttataatttgtgattacatactagcataaatgcattataatttagggttggtttcattatttattgtaagttatatgtatgttgtattttattctgatttaggtcatttattggtcattatttcagctgcctttattggttttgacaatcatcgcaagagt

SEQ ID NO: 31190 - DNA, 359 bp, Medicago truncatula
  Intron number 2 from transcript Medtr4g156260.1 (locus Med tr4g156260) derived from phytozome v7.0 (chr-ID MtChr4; po s 38693990 to 38694348 reverse strand)
atcaaaggcaacttgccgcattacttgtatcaaaggtagtgtattctgctcattatttgaattgtcacatgttctattgataactgtgcgatgctgtttttgcacatacggagtctctttcgtcaagtagctaagctgttatgatgtgttttacatgatatttgagataactattgtcggctttcattctttttgattgtacccggcttctaaaccaatcaccagaggacttaagttttttcatatccatccatatattattattcttaaatgctggattttgtctcatggtttgtattttagtatctgatttttcttcgctcctttatcttaggtcttttattacttgggcgagttga

SEQ ID NO: 31191 - DNA, 549 bp, Medicago truncatula
  Intron number 2 from transcript Medtr4g041710.1 (locus Med tr4g041710) derived from phytozome v7.0 (chr-ID MtChr4; po s 9935121 to 9935669 reverse strand)
aagttgtgcactgaattgaaagtaacattgagaaggtaaattggactgtggtttaggttttccagtgtgtgtagtttttttttttctttttctttttcttgagggagtttgtcttttccattttgatatttataagtatatgacacctctgcttgtctagtactaggtttaatggaatgttgcgtgttggtttaatgattaaaacttgatttaatgatgtaatcagttttaaatcttctcacagttccagctggtgtttccatcaaatttctttgtgaagtgttcacaacgaagataatacatctccaatgatgctaaattcttgaattttcaagcttggtcttctatgttcaatactttgatcgtattttgacctcatctgcgatgaaccaccccttcttttatttttcttatatttacttgatatgtggcttgtgttgttagtgatgtttatgggcattattagatttgctataaatttttaaccttttgtatttcattttgatcattctaggtatcaacaggaaggcataaattggttagcttttc

SEQ ID NO: 31192 - DNA, 640 bp, Medicago truncatula
  Intron number 1 from transcript Medtr7g011600.1 (locus Med tr7g011600) derived from phytozome v7.0 (chr-ID MtChr7; po s 2859806 to 2860445)
ttgctaatcgtgtcaaaggaaaacctcaggttcatatacaattttactatttttttggtacaacaaacaatatttttttttaaggaaacaaacaatatctcttatataagatattaaaaaatttaaccgtaggttaatttttttttaaagagcctgtaggttaaattttctcatgttatcaatcgtctataagtttcttctatttagagttatttctttctttttttttttagaatgaatttagagttattttttatgtttttgttgctaaaaaattcatattaaattcatgttttgttaaaagaattctaattttttttttaaaaaaaataatgccataattgtctacccatttttggaaaatttcattaaaaaatatgaagtctagacatgagttgactaaaaagtaggtaataaattgataaaaaaaatttggagggaccaaaacctaagaaatattttagggggactaaaatcaaatgttggtatatttagggggaccatttgcttatttaaccctaaaaaaagttacctatcctaaataattacaaaaatatttcaagagtattagttaaaagaaaaaaaaaatgtttctaatgttagggttttgaattataggttgtggcaatagggttaagaa

SEQ ID NO: 31193 - DNA, 892 bp, Medicago truncatula
  Intron number 2 from transcript Medtr4g080070.1 (locus Med tr4g080070) derived from phytozome v7.0 (chr-ID MtChr4; po s 16333120 to 16334011 reverse strand)
ctgtaagagtgtcctttattaggacataatttatcttttattttgcttgtttttttctttcttctatcatgtaacaaaaaaaaaaatcattaatatctatatatttataattttttattacataaatataaacatgaatttttgtcaaaaaaaaaaaatctttataattgatatacaatgtatgcttgttaatataatttattagttttcaatttttgtaaattcaaatcatattttataaagataaatatttgtttttatatttatgtattatgctcggttccaaatcaaccattatgacacacgataaaattctatctataataatgatatagatgtcattttaatcatatcaaagactaccagacttgtaaatgttttttctcgtttaatgttaaatctcactaaaaagtgtagacaatttttcaattttgttaacataacaatattaaaataaacaagtatattaaaatatataaaaaattagaaaaaattgaaaaggtcaaacttatctggttcaaattctatataaaatacatttgacatttttatttttcatgatgaagtaataattaattcaaattctttcagtacagacaagaaaataaaattgcgttctcctcaatggaaaaaacaaaatcacattcgtaggatcgaataacaaatccacgtgttaaacatctaaaccactacatacatcacaacgatgcatacgtgtaatgtagagaacccgaacaccagctagagccagttaagtcactcaacaaaacaaaacgaatctataacaaatggcatctccgtaattaaccaaacatccaagcctttttaccaaacccttaactacataaaaaagcgagggagaaaagaaggatccaaaacccgaaaacaccat

SEQ ID NO: 31194 - DNA, 819 bp, Medicago truncatula
  Intron number 1 from transcript Medtr7g084360.2 (locus Med tr7g084360) derived from phytozome v7.0 (chr-ID MtChr7; po s 18200896 to 18201714)
atccttggttcaataaggttcatcatctttaactcactagttttttgagttcgctattactctgtttctatcttcgtttttattttttttttattagtgttttgatgttctaattgttttaattttagttctttgttatgttaatcaatgatttgatataaaaatgtagttattttgaaggtttgtctattacagattataaaaaaaaaagtgattttgatagatttttaaaatgttgaagttgttttgtgtttgcttaccactatgaaaataaattattacatacaaaaaaaatcagttatggaaaaagtgattttaacaacttatttgaagcagtttttagattaaaacaaacatatgatatgattatgaaatcatctaaaaatagttattttgtttaaaaaaatgatgtttttatgaaaaaaggtgtaacaaatggggctctgagtgttatttgttgataatcacttttgttttctgtcaatgttcatttgaagtcccaaaatttgatgattttgtgatttgattcagctgatttaaagtttgaatactgatattagttttatgaatgagaaaatagacattgggaaagttataccattatatgtgttcattcaattcacctcgaattagtttaggttcaatgtcatttttggtcctggatactgaggatttagataaacgaataagtactatctgcgtaaaatttcaagtttctgattcccgttcttaaccattggtttggatttaatatatatattttttttgaattctcaaaatgtaggatacaggatttcctttaactgaaagagatcgttt

SEQ ID NO: 31195 - DNA, 592 bp, Medicago truncatula
  Intron number 1 from transcript Medtr4g066990.1 (locus Med tr4g066990) derived from phytozome v7.0 (chr-ID MtChr4; po s 12877522 to 12878113 reverse strand)
agaatcatcctgataagggtggtgatcccgagaaggtttgttttcttttaatttcataatttttatttattgtttatgttgatttgattcattattgttatgtgttttgactatttgatttcttgattttgaattctttgatttgatgttttatgtatatattagaaagttttggtgattgatttagggttaggttttgtagaaaattttcaggtgttgtttgtgcgtctttggtaaatgtgagtttaaggagaaatagtttatgtttggatatgattatggacaataaaattgagtgtaaaaatcatgttttttggatgaagaagctgcaaatcatagcttcaagatagaatcaatgctagaggcaaaataaattctagtcgagaaccaccaaacattggaaaatcaatgttgtcttcagaatcctaacacgcacttgagattttctcttttcaatttgtgttgttgggaaatttgattgcattgtataatagtgagattgcaaaaccaattgaggtcaggtttatgtgtttctattgaattttaatttatatttttgtggatgtgtagttcaaagagctagcgcaagctt

SEQ ID NO: 31196 - DNA, 1031 bp, Medicago truncatula
  Intron number 1 from transcript Medtr5g101200.1 (locus Med tr5g101200) derived from phytozome v7.0 (chr-ID MtChr5; po s 40486947 to 40487977)
aagtagagtggaagataagggtaaccgaaatggtctatttaccattgttagctcattcacatgtttcactgaaaattattatcgtacacgtcaaaaattaaggaactcattttatgttattaaatgaagccggatgaaaggaagggtagcaaaaaatgtccatttatcattgtcagttttcattgaaaattatcgtagtacacgtcaagcatcttcattgatatgaatttaaggaactcacttatgttttttaatgtttcatgcataccagctcaattttataatactaatctaatttttacttcaatgaaaggtttcatccaaagttccttaacccacatatatcatttttctctcttccatatttcatgttcacactcccattttaacactttttaaatgcataaaatcaatactttaatttatcattttaaaattccttgaataagcaatttgactaaatctaattctataggataatcctttatatctaatcctagcaaacatgtttaccctaattgccaaaccctaatcttaattttttggctccaaatcattctggccgttagataaatctatgttgatctctacacaatccatctatttccaataaacattttctttcaattttaaatcataagtgcattggtaacgtacgcttcataccaatatattctcctccactttcccacggcagacttctcaacttcttctgtaggtttcccatgtattgctactattttcaaacaaaaaactgatataatttttttaggcttccttttctaaaaaaaattctcttttcttctttgtgtcccaacctttctctttcgtatgatcttctccataactctttcttatggagctttttcacccttcccatctgttacatccattcatttttctccttcttccactttgattcgaaaatcataaacgccatgtccttctgattcctctctcctccgcgccaaccacctcccctccactgcccgccgcttctccaaacaagaactccgataaagctctcttct

SEQ ID NO: 31197 - DNA, 984 bp, Medicago truncatula
  Intron number 1 from transcript Medtr5g033200.1 (locus Med tr5g033200) derived from phytozome v7.0 (chr-ID MtChr5; po s 13531139 to 13532122)
agcttcccattaaaggtattataacactgaaactgctcttagagttttaattaacagattttttttttctttataattttcacttggttcttgattattatttcttttgccaaaataattgagtaaaaaatgttccactcaaaacaccatcttagggatctagtaggtgaagcagtagtggataatctgaatcggttattatattgttgaattatttcattttatcatggataaacatatgcctctttacttttcctttaactaaatagttagatagtgttagccaaatcctaactaaactaacaaaaatgcggagtttgaaccatagcttatccatttatgtaagtttttaatgactattgtcatctagtctaggtagaaaagtaaaaatagtttcacatatttttttttaggattaaataaataaatggtccctttaaatatacaaacatttgattttagttcctctaaaatattctttagacttttggtctctctaaaaaatttcatctatgaaattagtttttgctctacattgagtattacactagagcatggactaatttcatacatgaaaatttttagagggaacaaaagccaaaataatattttaggaaaactaaaatcaaatgttagtatatttcagaggactatttacttatttaacccttttttatatagacacatgcaacctttgaattaactaggtatttttgttttaggtttcttctaacgcaacaaaatgtatttaatttttctctgtaactttttttttgtaacttttgttatagatgaattttgctacacattggtgcatgctgaataagaaacacttctaacagaaggtgttatagatgaacgaatgatacattatagagttgatagtgacaaaatgtgaataaatgcgactgatgcaaataatatgattgtatatttattcaaataaaatgagttatacgagtgttcttgtttaatttataggag

SEQ ID NO: 31198 - DNA, 388 bp, Medicago truncatula
  Intron number 1 from transcript Medtr5g091970.1 (locus Med tr5g091970) derived from phytozome v7.0 (chr-ID MtChr5; po s 36047432 to 36047819 reverse strand)
ggtatgtattatttctcttctctttcttcttcccatatttcatagatttacaacattagtcatgcatatatctaaaaggtgaacaccaatataaaaggcatacatgacgaatattaattaaagcaaaaaatttcaaattctccagctaaacattagattcacattttttcaatggattggattttgtattttgaatccccaaaaaaacaaataatatttatatatgtgtgtgtatttatatatgaattattgtcttcaacatgattatatacagatacacatacaatcatattgatgagtggtgtttataaacttcttatatgcatgcatgtcaactgacccattaattttaacattgcagtgtcttttctgcattttgctctcttaa

SEQ ID NO: 31199 - DNA, 380 bp, Medicago truncatula
  Intron number 2 from transcript Medtr4g080200.1 (locus Med tr4g080200) derived from phytozome v7.0 (chr-ID MtChr4; po s 16408594 to 16408973)
ccaagctaggatagataaacaactggtatgtatgcctacattatcttttcatagcgaagttttcatttgtcaacacagtatgaagttctctgtgaactttgaggatatcaagttccttaatgtgctcttaacccaatagaactttgtttacatgactttcctatggggctctacttatggtcatttaaaaggattttgtttttttgattttctttctgatgaaacattattatccgttctcatgtaaaatttatttcttttctagaaaagtagttaataacaccattgcacttttcttgctgtaataattattagttaataatattgatgtgcaattttggtcaaacttgttatgatgatgcctgaagtattagttcttc

SEQ ID NO: 31200 - DNA, 550 bp, Medicago truncatula
  Intron number 3 from transcript Medtr5g037450.1 (locus Med tr5g037450) derived from phytozome v7.0 (chr-ID MtChr5; po s 15741715 to 15742264)
ttggggggagacatcaagtgataaatatgttttaatgatctttgacaaggactctattttctcgtagtgcggaaaagtttcaatgatccttgcaatttcatagtcacaaggactctattttctcatagtgcggaaaagttaaatggtaatgatctttgacatttaaggtcaatattttgtctacatgtttttgtttgagttttgttttatagttatgctttctctcatctaattttttttctcacgtcaatacaatttgataggattcttgcattttgaaggatgtgaatgtctttattattatgcttctctagttaatagtatatacattgttttttaatgtttgtagtaggtgtacaaattttaaacaacctccggggttgatacatctacccacttggcaataatattaattgcataaccaaatgataaaaattagtgctaagaaaaaacttttgttggatacctaagaagttttttgtaacacacaataacctttacatttacttttattttgttgcaggttttgcaccacctctataacgcaccg

SEQ ID NO: 31201 - DNA, 810 bp, Medicago truncatula
  Intron number 1 from transcript Medtr4g049890.1 (locus Med tr4g049890) derived from phytozome v7.0 (chr-ID MtChr4; po s 11583460 to 11584269)
gtcaaagggtcaaaggtacatgaatgagtatttgttgatatggtatatacctatctaggtgcatgtgcagagtaagctttccacaaaagctttccaaatcaaacaggcatgtagatgatgtctagcaggcactagcatttacaataatgtgctgattgtggaaaaactactttggcgagtatggcacctcccacccatgatgaatacaattcaatacgtgtttaaattttcttccagcagcataaacataaattttaacatgatatataatattataaatggtcatgttaatcagtgtcccggagcactagaataagggaaataaatcacctaaatttgtaaatgaatattgttcttccgttatcaacctaaatttgataaattcacgcacggctggtgacattatcaacctgcggaatcatcagattcaacgcatcatcaagatcccgtttcatctgagacatatatattttttctttttgaaactcggtatccgatctaagagttggaatcatgctgaccaatggaagttttgttcttatgataaagttgttgataacaattttccaagcctaaaaagactatatgtgcaaagagaagcaagagaacacccgatggatatgaagatgataagtacgtttatacatttttttgataaacaaggaagactgggtacttcaattaggaaaacttcctttagatgctcaaaatttccccctcgacgttgttgtccagaatatgaagtaaccagtctttctgcgagtagatattttaggacaatcgtaaaactatagacatcgatcctctatt

SEQ ID NO: 31202 - DNA, 350 bp, Medicago truncatula
  Intron number 1 from transcript Medtr6g033470.1 (locus Med tr6g033470) derived from phytozome v7.0 (chr-ID MtChr6; po s 7404909 to 7405258 reverse strand)
tttagttactggtgtaacgggattcctaggaaaaggtatatgttgtatgcttttactacttctatattacatcatttaaattcaaggtgaagatttttaattataaacagaaacaaaaaataggcataagatgaagattagttcaatcaaagtaacgattttgtctaaaataaatatatcaaaaaagaggtttaaaggtgaacttttttacatttttcatagattttaataaagtatttttttctttcatatttttattattataaaattttcatactaggattcacctttttctctttcaaaccttttaatgcctttttttcctaatgcacgcagtttttgtggagaag

SEQ ID NO: 31203 - DNA, 752 bp, Medicago truncatula
  Intron number 1 from transcript Medtr4g032890.1 (locus Med tr4g032890) derived from phytozome v7.0 (chr-ID MtChr4; po s 8023239 to 8023990)
cagaaacctctctctctctcactctcactttgcaggttagtaatctttcttcgcttctgaattccaatcattgatcatcatcgtcttcttcttcctcttagctacatcatcttttacacttcaattatgtatttttttcttactcaatttttcaatctctcataatcttcatcataacgcgtctttttctatctctatagcgattctgtttaactatatgaattcaatttgtcatctttacttctaacctgtttttacggtttatcgtctttgttcactgtaactaacaacaacatcttgattcaacaatttttttggtttaagtttgtttattattggtgtgagttgatttgattgactagttagtcaatgttaccgacacttctgatcaaaggcgtgttcgacacatgtgattactttcaattatataatattctcagcagtatcttcagtgtgtgtgtgttttgtgtccatgattcgtagctagttactagatctacatacttgaaattttcatattgttttctgtagcaccgacactcttgaaggtgtgtccaacacgtctcattaacgcatcaatcacactgaattatgttattttctcaaagatttataggtgtcagtgttgtgtccatgtttgtgtccatgcttagtagtttttgattcatcatattttggttaaatttgttattttattggtttgatttgattgactagttactatttctgtacactgaatattgaaatttcct

SEQ ID NO: 31204 - DNA, 593 bp, Medicago truncatula
  Intron number 1 from transcript Medtr4g127990.1 (locus Med tr4g127990) derived from phytozome v7.0 (chr-ID MtChr4; po s 29962814 to 29963406 reverse strand)
ggtatgcttttgttattatttactatatcattatatatagacaactctaaagttaactatttaataactagtttttgtcgaatcttttcttgaacaaatttactttagcaatttatattttttcaaaattaaatttgcattgacattatataggggactcaaaaactaactacttatttcagctgaacatttttatgttatgaatttgctcgtaaaacatatttttttttttatcttcaaattcttattttaaaaatttaaaacatatcaactaatcgttaatttattataacagatgagttaattcgtctcttgcatgaaaatatgagactactttatgttgattttttttatgagaaattagattgagccgcaagaaaattacgaagaaataaattaaattttcactcttatttttatccttagggtggttaacagagagctactgtatatccatatccgtggatatccgaccatttctatccctaatataataatatcaatgatattattattattatttgaaatttaataaatctaaaccacccaaaatgaaactgtggtagtgatacttggtgacattgcgcagaact

SEQ ID NO: 31205 - DNA, 954 bp, Medicago truncatula
  Intron number 1 from transcript Medtr6g104370.1 (locus Med tr6g104370) derived from phytozome v7.0 (chr-ID MtChr6; po s 23023346 to 23024299)
atccataagaacattcataattccagccaaaccatgtgcagcaccccaatacttctctccgtaccactcaaacatcaaaggacattttctcttttgacccaatgccctaccattctttataatctcatccactaccgtggcctgaaaacaaattcagaaacacaatctcatcatatttatagactttttgtcttcaatgcaaaacatacaatttgacaaagggaaaaataaagagttggagaacagactcacagtataactggaaggaactgttccctgaccaaggtgcttgtttaagaacaaacatgcccatagaaaaccacctttcccgtataacaactcatcaggaagatccttcggtagcttaatctacatcccacaacaataaggcttagtcaagctatgagagctgtggtttgttaagtcaataaatagaaatgattagttggtaaactactgttatgatctggttcctggggtgatttcaatttcatattttccaattcccatagttaaatttctacccataaaccactagagttatccataaccgtgcgatcaagatcagacggtccactacaaaaacatatttcaatttaccgactcacgtctgatcggaatcggacgtaaatcactgactgcatggctgcattcagtctgttgctgcatgtagtctgcatgaaagcccaatcctaatagtataagaagcacaaacactaatgcccggacaagatattgaaaatagaaactgacaataatttaagataattaaagtatcaagtaattgaatgtaatcgtgttggaaaccaacacatgtcagatagaaaacaccatgtgactttcaatctacatagctagcaagacaaactccaaacaaataagactaaaaagtaaaaacccattttgatccttcgcaatttccttgcagcccaactcaatccgggacaataagta

SEQ ID NO: 31206 - DNA, 574 bp, Medicago truncatula
  Intron number 1 from transcript Medtr4g118030.1 (locus Med tr4g118030) derived from phytozome v7.0 (chr-ID MtChr4; po s 27228059 to 27228632 reverse strand)
agttagatttctcaattcctgcgagtattggaaaggttaagtttgtgcattttcttcatttcatttgcatctgtttagtttctgtttatagaggtattgatttattttcttttgttcgcctattttattttaattttttttttaaggaaaataaaaaataaaaaataaaaaaaatgaaaacaaaataggcgaacaatgtagattgtaaataatggtaaacaacattttcttcctttgcttcttaaaaaatatattcctccttaactgaacaattggtcacatgaaagcatgacttttttgttttgctttaaaattcaatgcaaataacatatttatcctttactgaacaataggtcccatgaaatttacgccgcgtgtactagctctccagcattctatatttctacagtgtttgtgatcattgcacacattgctagtatagcttaaaatggttaatttttgagtttttctgtttttattggtaatgcatttgagttatagtattaactcacttttttatacacctcatttttctgcagtttatttgtagacagctgtcgcgtcatttttcgaa

SEQ ID NO: 31207 - DNA, 922 bp, Medicago truncatula
  Intron number 2 from transcript Medtr6g069560.1 (locus Med tr6g069560) derived from phytozome v7.0 (chr-ID MtChr6; po s 12826885 to 12827806)
attttaaaggtacaagaccatgttgaaataaaatgattgttttattattttgcttgtttagcatttaatatttttagttatcgcattgtataattttttgtttttgttttgtaattatatttttacatttgttgtcgataaccattgttttttgttttttcagaatctgttgggttgttttttaacatgtgaagctatagttattgtttgggttttagttgatttaatcttgatttatgttttttgtttttgtggttttttattgatcagttgtttagttcggtactaagtctaaaataaaactcgttcaaaagtttgctagttgacttgtgggaaattggttagggatttagtttatttaatgttgcattattagaacccacaattgaagaatctgagcaaggatgatggttgaatttgaatatgatgaagtgttattgatagggaatgtctgaaaaagttttttataaatcttatgatgtattctttagtgcagaatgttaatattacatataacgatggttttaatttatgatttaatatggtcattcaagtgcacaattttttttcatgttcatggaagagttttgtggtctttactttattagatccatatctgctgtgatgacatgcatacttctttacgagaacataatcccggttcatgatgcttttttgaggtgaatctcttttactgattattcggaatctggctaatatcgtatcttgtatagcactgtggatatttgtgacattatatgatatgtgcatgttgaatttggatctggtaattttgtttttacacaatgaaatcaatttgttgtatttttgtgaattacataataatttgctctttggcctcatggttatcttattctatcacttgtctatctaataatctacctatctacatattttacag

SEQ ID NO: 31208 - DNA, 828 bp, Medicago truncatula
  Intron number 1 from transcript Medtr4g101390.1 (locus Med tr4g101390) derived from phytozome v7.0 (chr-ID MtChr4; po s 22023219 to 22024046)
tatattctcctttgtcaaatcaacgccaaccacaggtaaaacagcttatttatttatagctattagacaaccaacaaccatttagattatatatgcttcaaggttttgttgctcatggctcaattaggatgagcagtatgtgacacacactacttaggcaatgtttcaaacacttatcatataagttcttatgtatataacaaaagataaaataaacccaagatgtttataagctgtaagttgttttcataagaaatcaggaagagcttatggaaataagctgcaaatagtttatgaatatgtcatgagttgtttccgtaagctctctcaaccagtctcacaaatgtttataccaattaataagttaatccaaattcttgtacaatttttttatctttggttatgaattttgatgtcataggtttctgtcgtatgccttgttttttctatcattttaatattaatattatcctttcattttggattcaatggatggtagatcaatggacttgattgccaatgtacaaatcctcgtagtaatttgagtgacaatcatcttagtatttctggattatatttcaaactcaataataaggatgtcatgccaaaatccaactggtagaattcaattcgatttcatagattttaagatttgttccaaacaagagatttttgtgaaatatggttttagtagttataattaaactactagtagtggtacttcttgcgtgagcgtgatgataatagtatgatcaacatttgcttgtttctgatgtttctcttctgaatgcagacaaccttgcctaattggtgatttggtaacgacca

SEQ ID NO: 31209 - DNA, 234 bp, Medicago truncatula
  Intron number 1 from transcript Medtr7g032240.1 (locus Med tr7g032240) derived from phytozome v7.0 (chr-ID MtChr7; po s 7939252 to 7939485 reverse strand)
gttgtgggacccttcttgtaatgatttaatatttatcttcatttatttatgaatttattctataatttttatcatcatgttagattttttttttcttccaaagttcatctacatttatttatgattttattttaatatttttgtgaagtttttataatttgtttatcattttgttagatttatttaagatttaatttgaatatttatttttgtgtattatttttttttgcaggg

SEQ ID NO: 31210 - DNA, 936 bp, Medicago truncatula
  Intron number 2 from transcript Medtr5g101280.1 (locus Med tr5g101280) derived from phytozome v7.0 (chr-ID MtChr5; po s 40530527 to 40531462)
aaacagcttgaaaaggttcttaatttaattaatctaattttgtttaactatgctaattttctttaattcttcctaatcaaaattaattaaaatcaccgtggatttgtcacgttacactacacgccgtaacttcgtagaagctacactttatagcttttgaaaacttacagtggctcgttgtgattctgacaaaatgactgataccaaacatgcactcaggtttctggctatcaaaatattgtggtgcgtagttagtaagtcaaagatgttgaatgaaaattgaattcattggatgtttgatcttcttatttaagatcgaagtactctgataccatgcagtcaaaatttcgtatagttagtttagtcagtccatctaaacgcttagatagaggtcgaatgactcacatcatgcattgacaaatcaatagataggaatctctattttaagttaggtgaatctggttagatcgctgactaaagtgaccgctgactgcagtgtggaaatgcacacattcatgcagtcactgagtcaacttttgaatgaagatcgaacaactcattttaagaaaagtaaaacacgttaaaaaaatggaaacttgaatttgagctgtttgattttcatccgccggctcaatgcactgacttgactgcaaagagtttgaatccttcaatttactattatttacagtgaatgcgtcattttttagctgtagtgaatatgcctcatgcttgaattttgatgatgataatgtgaaattttacatgacaacctgtttttgtctttatcacttgaaaacaatttcagtggctgacataatttgattggttatgtttgttagtttttttatttaactgtatcctcaatatgtttataaaattatctttgtattatcgtttataggataaaaagggactcaagttggggcctgaagataa

SEQ ID NO: 31211 - DNA, 875 bp, Medicago truncatula
  Intron number 1 from transcript Medtr6g080730.1 (locus Med tr6g080730) derived from phytozome v7.0 (chr-ID MtChr6; po s 16272315 to 16273189)
gaggtctctacatcggccgttttgctcagaattaggttaggtaaatgcctttcatgctgaacttttggctgctatacttgctatgcaaaactgcccacaaaaagggttacactcacctatggttggaaactcagttggtttgtttagctttaaagtcttctgctaatgttccttggattttaagaactagatggcaaaactgtttgttttttgttagaagcatcaatttcatttaattattcaaaatcttttttctataaacaggttttttttttctttcaaacaaagatgcaaagagcatcaattcattagataaaccaaaaaagaagtaaaaaaaagggggctataccaaaaccttttcaaaagatagagaatctaaaattgggcattctcaatttattccattagttcgaactcacgtaaagaagtggttaaattagtaaacaaaatcagttaatcataataataatatatttgttaacggtgtgttttaacttcagaattgaacttcataagaatgaacaaggtaaataagattcttatatattatgaatacgaagtattctaaaattaaaatatatgccacacaaccccataaactaaactaaactaaatcctctcacaacacacaagcatgcgcgcgtgcgcgcgcacacacatatgcatgtgattaattatatttacttcacaattcattcatcttttgaattcatagaatattatttaagaatgactaatctactttcattattctttgtcatgagaatgacattgatttgtttcaaaattgagaatagtaaacggcttgagcatgaactactatatgtttagctgtagtagttcaagctgaagtcatttactattcctaatttaag

SEQ ID NO: 31212 - DNA, 693 bp, Medicago truncatula
  Intron number 1 from transcript Medtr4g033280.1 (locus Med tr4g033280) derived from phytozome v7.0 (chr-ID MtChr4; po s 8191391 to 8192083 reverse strand)
agccaggtcggttgtaaaagaaattgaacattgtttctctgatatgcatattgaatgttctgtttggaatgaatattgaaacaggttaatgttgaattaattcttatcaggtatcaatggtgtcctgtatcattttgtaggcatacatagttttttcttggaactaatttcaagctatttatacaatatatgttgtagtgaataagtgtaaataccatatttcatgctatcttgccaactgcgagttccttccgcagattctgttgaatatgtgtttttactacattccatattttcatgctatcttgattttttataatttggttatataaattataaaatctagatcaacttgtaataaaatctgagaataacaggcaacataaggactgatatttatctcataaatcatttccttgttcatattcatagatgttaagcactatggttgtattccaacaacattcaaatggttcactagtgtcatttgtaaggttatgttagcatgactatctttacatcactcacatgttaggtttatcttttagttcaaagaaggtggtaaacatgaaacactatttgttccaagcaatctggaacattactcactcataaactcaattttttaaattcctatgcctttttatctcagttaatgattacttttgaaagatctaatttcaggtaggaggg

SEQ ID NO: 31213 - DNA, 195 bp, Medicago truncatula
  Intron number 2 from transcript Medtr4g108170.1 (locus Med tr4g108170) derived from phytozome v7.0 (chr-ID MtChr4; po s 23856909 to 23857103 reverse strand)
ctctccggcgacgcccacgcagttcacctgtccaggtttgtctcctccttcttctctgttttctctggattacaaagcttaaatgcattttcttagaatgaaatttgatttgtttttaattaattattaataatctattaacttaatggatgcattttcaatttctgtttaaactaaagttcggtgtgttgcaga

SEQ ID NO: 31214 - DNA, 639 bp, Medicago truncatula
  Intron number 1 from transcript Medtr4g025310.1 (locus Med tr4g025310) derived from phytozome v7.0 (chr-ID MtChr4; po s 5996407 to 5997045)
agacacaaattctttaccacttagaccaattcaatgtttgataagaaaaacttaatttgtttttaatgttgtgattttcagttgaggtaatgcttataagatagtgcgattcataggtcaatatcatctatacggttaatatagttccctctatagctgttccatggtggttttacacaacagttgcaagtttgtggtgtcaaaaatgatattttatttttttcaaacaaattattcttttattacgtgttattttgatatttatttaggttggatgaattcttgggtgaaacaactcatgagattttaatttcatttcggttgaatttcaaattactcttttgaaaatcatgagttaacataaaaaacaaaattcaagagtgaaatgaggtaaccgtttactttattttaaagaaaattaaaactctactcataatttacaaccgaaacaactaaattttatttttggaaatttcaaaagagaataataaaccgtaggtaaaaaattagaaatgggtccccgttagcataactcagttgtcaggaacatgcattattatatgcagacgttggggttcgaaccccggacactcctattttgtagctgcatcacagctacttatttacgtgggagctatt

SEQ ID NO: 31215 - DNA, 787 bp, Medicago truncatula
  Intron number 1 from transcript Medtr5g101680.1 (locus Med tr5g101680) derived from phytozome v7.0 (chr-ID MtChr5; po s 40697668 to 40698454)
gaacacactcacaggtatgtgttgaaggatctctgtttatgaactttgattgtttaatttgagcttattagagatttgaattctcataaatgttagttaattgagctagctaagaagaggttgataatgtttattgagctgaatcatggaaaatcttaccagaaaaatgaaaccattgatagttagagtagttgttatttcagttagatacagttttggtctaatagattcttttgatgcatgttaattctgcatcttctttagataatttacttagtgaagtcaatttgagaatgtttcttaaattgaaagaatcttgtaataaacaataatttctcatataagttgaaattagtttctgtgtcttatggtttttaaggagctttctagtttaattttgtcttttgggaagaatcataaacttgtttttaattaaaaagcttatgggatggagctaaaaacttaatttttgtttgttttggaaatttggtatccggctatggaccgactaaactgtatggaggagtccaacacaaaaattgttagcacctaagagattcgaaccaaaagacctagagaagagtacactcgtagtcccaaaacttcactaccaaagttttacttaactggacctgatataattgttaatataatctcaaaatatgacacacttttccattttagaagatgtactttcattgaatgactcatgcggtttctttcatatattctttatttatatttcctttttctttatttgcaggaagtccaccactggtcatctcac

SEQ ID NO: 31216 - DNA, 563 bp, Medicago truncatula
  Intron number 3 from transcript Medtr5g093310.1 (locus Med tr5g093310) derived from phytozome v7.0 (chr-ID MtChr5; po s 36709096 to 36709658)
ttgttgtaatagtgcttctctgctgaattttcaaggttacctttttttcagtttgaattttttttaacttgacttgaactggttgtggtagtgtacttaataaattgttatattcattactgaagtctgaattcctggtctaacatataataaaaagcctgttttatgcatttgtttcataactcattcaaatgcatcctcatatttcttgtgttatgaggatttagcaatgtatatcctttactggtttccgttgtaatttaacatgattttcattagtgaggattttgttgagaatcatgaaccaaattcatgttttctgcgaacattgcaaataaaataaataggagcattcctttccatttctccatcgaatgatgtgatgtgatttaccgacacagttcaagatcgtaattttttaacgtattgatcttatggcaattgattttattaaacccaaaagttaatgttaagacaacaagcttcttttgtaatcttcatacatacaattgatgttgtatctagcacacaaggtcctctagctaatgtatttgaattgcagc

SEQ ID NO: 31217 - DNA, 980 bp, Medicago truncatula
  Intron number 2 from transcript Medtr5g013610.1 (locus Med tr5g013610) derived from phytozome v7.0 (chr-ID MtChr5; po s 4136143 to 4137122 reverse strand)
aaaggaggaattcgttatcaccccgaggttttctttctttcttacaatgatttaatattcatgaattttgtcaatgtttatgattgttattgtgattgatgtattgtagtcgcgattgtgattgcgattatgtcttaccgttattattgtggtgattcatacaatcctacatattgtatgaaatcacaaattaatgtgattgttgctaatgcattttcaattacaatcatgatttgtaatgatctctaagtttttgatattgtggcaatccattactatccttaatgttacgattgtcatttcaaagatctttaaatttaccgacgaatgttggttcaagtggcaagaaagtttggtgctcctaagtacgatatgaggttgaatcttgtaaatggaaaaatttatgttattccctttattcttatctactgactcagttcatgtcatacatatagtgtaaacgacaaaatattctaataagtccaataatttttttttcctaaatgttaatccgaatttgtttttcttaaactaaacaatctttaaatttttccttgcgtgttccaatcctttaattccaaacatgagacacatgctgcattttatcctattcattaactgtttctcagaatatatgaataaaatgtagcttgtccaaattttttagcaacaaagagtgctgcagggtatgagctgaacttgagaatggttttctatgattggagcagattttaaattttacaattatattgtctgagtcataaatttgtatttgtaaaagcagtttgtaagtttaacttcatcatgcatgtttcatcatcggtattatccagcacagttcttttgattgtcatcaagactgccattctcatgctttatgtttgtagttatgattatgaatgtaagttataaactatttaccttgcttttgagtatctacatattaaagtgtcacattttctggtgctaggttgaccctg

SEQ ID NO: 31218 - DNA, 847 bp, Medicago truncatula
  Intron number 3 from transcript Medtr4g122380.1 (locus Med tr4g122380) derived from phytozome v7.0 (chr-ID MtChr4; po s 28925825 to 28926671 reverse strand)
aagctgacgatacaagcgtatcctattttgttttgaagaggatctaattacacatttgatgatttagtatttcatactttaatttggtatatgttttatctttgaaattgcaaatttattttagattttatattgtcgcaaaaaatgattaaaaaaaatcagttagagtaacaaaaaattgttaagatattaaaggaatcaagtggattaaaaaaagttcacaaggaaaacaaagggttaatagtgttttatccgtgtaatataaagcatttttggttttgtcccctgcaatatagggttcattaaactttttcacaaacccagtacacacattaattgtgttcatgttcttgtttcttcacaaactcaaaccttcataccacaatcccaaaattcatgaaaaaaaatccaacagagttctttgacaaataatattatttataatcatcaacaacaacacaattgtttaacagttaattacaatccattaaaattcttcaaatctagaatcgacttacccaatttatcttcatcttcccaaactggaaaaaaatcgtagaagaaaatttatcaaacttagttctgactcactcagtaactcagcttcatgttcaaaaccaaccgtcggagctgacgaacaaaaaggtaacgacaaccttggtttggttgttgttgattctattgaacgtgcgaggtttaaaacagaaaagctaattaatcatagagaggaggttaatttgggtagtgttgttattatttctctctgtgatgtgccattgttgttgttttgtttggattgttttttgctgatggaaaaattgggcaggagaagaggaacaaaatagtg

SEQ ID NO: 31219 - DNA, 493 bp, Medicago truncatula
  Intron number 3 from transcript Medtr7g009780.1 (locus Med tr7g009780) derived from phytozome v7.0 (chr-ID MtChr7; po s 1915043 to 1915535)
tgtccttggtcgatttgcctatataaatcgtaagtaaaattttttaacacatattgtcttcaatcgcataccattatcaatttctcaaatctcaaacataattttcttttctttttctactatttcactctcaagtcattcctcaaatatagtgaaaagggagttcttcccttatcccaccatatcaatcgtgttcggacgttccatatttcaatgcataatttaaatttttataaagtcaaaattcttaaagatctggatattattccgatctcgatcaagatatcacttacgtctttgactacgtgaatgtgttgattgttgactataacaaattcaaagttcaaacaaacatcaacatggatagatttatatcaaagttttcatgatttttgaaaccgaattaaatagagttattctagtttgttataatagtaaaaaaaaactcaaaaattatgattttgttttatttgaatttcaggtattccggtga

SEQ ID NO: 31220 - DNA, 589 bp, Medicago truncatula
  Intron number 1 from transcript Medtr4g142820.1 (locus Med tr4g142820) derived from phytozome v7.0 (chr-ID MtChr4; po s 35670218 to 35670806)
catccaatttcacctcatttcatttctaataataggtaattttatttaccttttttttttcttttcaatttgtattcaatattcattcatcttcttaacctcactgttaatcgttttttcctttattgtttcaattattgattgatctactattaggttaattggagatttgggggttttagtttccttttgttaatttgatgttaaaagtttaaattatcccttttagacttcatttaatgacttatttagggaaatttaagattttagttttgtttttttttggttacaagattttagttttgtttgatcaacagatttgttaattttagattgtttttttggtacaaaattttatattttatttatgcaggttatatccatctcgcagtttttagtcaataatcatagtgaattcaactgtatataagatatatgcaatatatgcactgatacaattattatatgtacactagttttagcattgattactatacatagaactgaaagaatatgaaatgttcagtttagttctttactcaatcttctgcttgacgaaaccatgctattcgtttttgtagaggacaag

SEQ ID NO: 31221 - DNA, 839 bp, Medicago truncatula
  Intron number 2 from transcript Medtr4g097180.1 (locus Med tr4g097180) derived from phytozome v7.0 (chr-ID MtChr4; po s 20682559 to 20683397 reverse strand)
aagaggtaattgaagacttgaatgaattattacataggcatgcacaaacatttgtaattagaatatcttggaattactttcaacttctttctagtcttttttggggtgtttcaatgaagaagttgaattgccttgctgatctagatttttaattcttacctgtgaaatttaaaaagctatatttgttacagcataatttcttgaacgacgccaaactagaacaaaaaagtaatatggagaatgaaatattgtctatgggctaattttgcaaaaacatatgaataaaggaaggaattttcttcctgcaaaaatgtcgaggcttctaatatttaacaacttttgttttgatgatcaggaaaacttacaccacatgttacctttcctcctctgcttatatagtattgggaaaaacccaagttccacatgataaaggtagggcatgaaataagtttataaagagtgacacatctcaccttacaagtcggttttgtaaggatgagttagacccattataaaaacctaatatggtattggagcctaccctagatctgttggaccacctgttatcttaccagttgggtcacgctccagatgtctaattttgggcgtaagggtgtatgtccagtctttgataattatgttgagcatattttatcaaactaaattaaattttaactcaagtctatctgtatgttatgtctagtttatgagagttcctttttttgggttgactacattatgaagattgcttggcatttggcaaaataaattctcattgatgatatctttttttctttttttcagaatactaaaccatcagaatctgagaagcaatacca

SEQ ID NO: 31222 - DNA, 988 bp, Medicago truncatula
  Intron number 1 from transcript Medtr5g018350.1 (locus Med tr5g018350) derived from phytozome v7.0 (chr-ID MtChr5; po s 6684325 to 6685312 reverse strand)
ctcctgatctaagcttcctgactcttctccaagaggtactaaattattgctattttgtgtttttcccatatttcatagttatcatcaaccttgggaacatatgcacgatgcatacatatgtggctaatctagtgaataagacataagtcataataatgcatacatatgtggctaatcaagtgaatttataatgcatgcatatgtggagaatcaagtgaataagacataagttaaaaattccctcaaaaaaaaaaaaaaaaagacataagttaaaaatagaaatttcaaaaataatctagctgggagcataaataattctttttacattttttatttttttagtaatctaaaagaattctccttggcaaaaatataataaacattaggaatagaaattagccaaaccggccaatagagacttatgacctagtctacgccaactttaaatcatatcaaaattaaagtatatcattataaactaaaattgaaataggatatattaaggtagctcaacttcattaaaaaaaatataaaagttagatgtctcgttgactacttgagaattagtctcaaaacagatttaaaggactaaatttttcaatgcaagtggatcattttgttgacagttgcattggaattgacgattagatcatgagggactgcattggagttaaaaaaaatgataaaattctaactttaaattaaaaattaagacaaagagtagttgtgtccttttcttaaatatataagggttaaagtgtccaaacacatgaaagaatagcaacgttccaaaaatcaacatcatacccctaattttaaaatcaaaattttagaaagaaaaaaaaatcaaattttggaaaagaatgaaaaaacgtagcctataaaaaaaaatagtaaccatttttttcttcttcatcaattactgttctataacttcattttgcaaattgcagtatcaacagagattggattccagcttggacacaaa

SEQ ID NO: 31223 - DNA, 252 bp, Medicago truncatula
  Intron number 1 from transcript Medtr4g121110.1 (locus Med tr4g121110) derived from phytozome v7.0 (chr-ID MtChr4; po s 28290420 to 28290671 reverse strand)
gcctcaaagtaattcattcattctctcactctttataatttatttgattgtgtctttttcttttatacaattatgtactcaaatgtattatagattgtcatataagttgtttttttctcttatacaattatttgatagtgatcaaatgtaactacatgtcagcatcatatcggtgttagagaagcttagaagaaaactaaaatttagttatgttgttgcctttgacaattcttggtaaatcaggtgttgcac

SEQ ID NO: 31224 - DNA, 860 bp, Medicago truncatula
  Intron number 1 from transcript Medtr5g017370.3 (locus Med tr5g017370) derived from phytozome v7.0 (chr-ID MtChr5; po s 6223432 to 6224291 reverse strand)
gcgctttatcaagccaccgaagatcaacaaggattgttagtttctctattccatttcttctcgttttcgatttcgttatatttttagtttttgtgaaattagaatttttattctataatttgggattaatggtgtcgtttaggatcttttagatagttcatacttcaaatgaagataatttatttgtttatttcaatgattctggaggatttgatgtattcaacataaggggagaaaaaaataagctcattagtttgaaatgttatgcaaagataatttttttgttgatgctattgtatgtttggatcttaattttagtacaatgagtgaggtgatttaatcaatatgcatttctggtttaccatatcattttatttttgcttcattgcacttttggtctctatttcatcatgctcacgaaaatggtcctctcttctttaaatcgaaatttttggtccatcaattatcatatttgttgcgattatgcacctgatcaagttttttggccctagagcgatgattttcggttccaaaagtttgaattttggcatcaataattgtttgatcacgctaaaagggaattattgtgctgacaagttagctaagcgcggacattccttgtccggtgctttttagcgggattctcttcctattttccgctgttcttaattttgcttgggtttcccctcctcttctctttggggtgcaaacctagttaggatttggcattttgatgcattgcaagctcttggtttatctaaaaataatgtatcctctgaatttttgttagtaaaacatatacttcgtttatggctgacaattgatcttataattcatttttttcctcaggataccctgga

SEQ ID NO: 31225 - DNA, 383 bp, Medicago truncatula
  Intron number 3 from transcript Medtr5g105480.1 (locus Med tr5g105480) derived from phytozome v7.0 (chr-ID MtChr5; po s 42364716 to 42365098 reverse strand)
tcaggtatgtggcctttttaattaatttttctgaagtttaaattttatatctggtttggaattatttattgaatttgatgatgagtttcctctattttggtgattgatgaatttttatttttctgtgaaaaaaaaatgattttgaagtgtctgtttgattatttgtggaaatttttttatgcgggtcagaattatttgttgaattgaataatgggtttcttctgttttagtgattggtgattttttttggttatgaaaaattcagttgttttgatgattttggtgtttttatgaaaattttagttgattgatgattttgatttttgatttttttgttgaaaacttcagttgattgaccctgctgataggacagtagatagaga

SEQ ID NO: 31226 - DNA, 600 bp, Medicago truncatula
  Intron number 1 from transcript Medtr5g093090.1 (locus Med tr5g093090) derived from phytozome v7.0 (chr-ID MtChr5; po s 36562692 to 36563291)
aaacagagcaggtatttttcccctttatttggtatatatagagagacatgttcctctgctctcaattatacgtgaaatagtatatactccctccgtttctaaataaaatttactttttagattcatctatttaatgatgcatgtggtctatattatgaaccacatacatcattaaatgaatgaacctaaaaatttaattttgcttatatttaaaaacggagggagtatttgcacatgtgttaagaaagatactttcgtgcatttactaaaaaaatttcaaagaaatatatttacaaatccatctctaagaattataattatcttatcacaatattaaataattaatataaatgtatttttggaataataacaataaatataaatagattagttaattgttgtttatattttaatacataaaaaaatatatatatatataattgaatgcaaaataatattctcttcgtctgaaaatgtaaacaaaaattggtcaacagaagttaatgtatttcctttcaaaaaaaacaagttaatgtatttgatttaaaatttgtacctcatacatcaacttatgttacccatttttacttatattttagg

SEQ ID NO: 31227 - DNA, 677 bp, Medicago truncatula
  Intron number 1 from transcript Medtr4g114540.2 (locus Med tr4g114540) derived from phytozome v7.0 (chr-ID MtChr4; po s 26212625 to 26213301)
ccctctctttgttctcccacaaccgccactacaaggtaaaccccaccttctctttctctcttcctgttaggtattcaataacaataaatttaccatggtgatggttttgttaagattcattattatgaacgcatgtcatagttgttgactttaatttgcttaagaattattattatgaatgcatgtcatagttgttgacttttatttgttctaataactatacttcacagattcatgtttcatattaatcatcaatttcaatatattattacttattgaagattttagttaatcgagttaaaatttgaactgatcgatcataaactaatgttatgtttggattgacttataacttatttgagcttatctattgacataagtacaacgatattgtctgagagaacttatgacatgctcataagttgattttagcctacttccataagctctgctgaattgtttttgaaaaccgtttacggcttatatgaaaatagtttgactttattttatcttttgtaatagaaatagattagacataagcactgatatgagaagcgtttcgtttatggtataagtgcttagctaagttattcatccaaacagggcctaagttttgttctatgccattttgctactttgaaggttttgtgattcttgattaaaatatcttttgctta

SEQ ID NO: 31228 - DNA, 847 bp, Medicago truncatula
  Intron number 1 from transcript Medtr5g024760.1 (locus Med tr5g024760) derived from phytozome v7.0 (chr-ID MtChr5; po s 9868651 to 9869497 reverse strand)
ccaaagcaactaagtaggtttatgtttttttttctgccactgttgtcatgtttttgtccttgttaccaaacttgctatcaataatgtgtatttttctaacatctagaatttttcttggtaaggcttttggtttgaggttaaaagttttaaggagtattaataaatttatcaatcttcgcatcttggagttggttctgtggggattttgtcatgtgtttcttgcgactgcttttaaaaaaaattgtgaatggctgtgatttaaggactgtgtttttgaagggttttggttcttttgatttgatgttaaaagaagactgttgaagttatgagttttagataaaaaaaaaagaagaagaataataagaagaaatataagtatggtgtgatatgattataatgatttgatactaactttgcagtaacttgattaaaaagactaatcactaacctctttttatagggacacaacataagaatccttatcctaaataaaaaggaaaatcaggaaacaagtcatgataatgaccacaaaatatggaaactactccttggagataatctaagatactctaatagtaataatagaaaggtctaggagataaacaaagatattctaacataatctcaaagatattctgagatattttatatattctctaacagagataatcacccagcatttcgagtttccattcttatcaatattatcacacttatggttacaaagtcaaaatgtggctgtttgatttgtagtaaatagcatttatccagtttccattcttatctatgtaactggactatctacttaaaaagctacatattgttcctttgatgttgatgcaacagg

SEQ ID NO: 31229 - DNA, 286 bp, Medicago truncatula
  Intron number 1 from transcript Medtr6g013710.1 (locus Med tr6g013710) derived from phytozome v7.0 (chr-ID MtChr6; po s 2986973 to 2987258)
ctgacataccttatagaaatctactctacatcgttgtttgaatcagctacatcttttatctcatgtttgttttcccggttatcatcaacatgggtaaaaggcatttattaacaaagattttttttgatttttttcttctgtttttaacattaagctgatgtgttgaattaagtggttttaattggctgacagtgtaaagttgttttacactgtcagtctattcaaattaatctctatatatttttatagaggtatctgcaaaaagcagctcaaaatttgatttctt

SEQ ID NO: 31230 - DNA, 746 bp, Medicago truncatula
  Intron number 3 from transcript Medtr4g142880.1 (locus Med tr4g142880) derived from phytozome v7.0 (chr-ID MtChr4; po s 35690100 to 35690845 reverse strand)
ggctggtgtaagtgcccttgcattactataaacctagattaatccatttccttatgacatccatttgaccacaactctcaattatatattttttaataaattcatgaattactttaaaataagtgtgggagtgacatctaccccaacatcatggtgcaaatcctgaccctaatcatgaggggcgccaatacgcaattaatgaaacctctcgtgacaaaccttttgttgtctaagaaatccaacaagtaattgcatctctataggcgtgacactcaaacctcctaactgtgatgcatgagatgataaatctttctcatcagactcctccgatccgtataaatagtctacaaccctggaatgtcaagagcggtgggcagttcttaaatttagatgatgaatgttgtttagttattgtttctggtgtattccttgggtttggggaggctggtttggtagcttgtactgtatttgcctttgttttgtcttgtactctgctgctccggggggtgatttgtttttcttcgtgatgtgtttctgtttagagtacccctcttactctgtgtatcctatctgatctctctgtaacctcatttattttaatctatatgtttataactttgccataaataaagaacttattgttttggtatttttttatgctttcaaaattgtcattcttttgtactgattttgtgacgcaccttcatgcagttgtgcaaaattgattcagaaggaaaagctaggaa

SEQ ID NO: 31231 - DNA, 792 bp, Medicago truncatula
  Intron number 2 from transcript Medtr4g023870.1 (locus Med tr4g023870) derived from phytozome v7.0 (chr-ID MtChr4; po s 5333512 to 5334303 reverse strand)
catcctttttgcggagctcacagctctctatcaaggtttgcttctagcaaccaatcttaattacaacgagttggcatgctactcagattctatgcttacggttaatctcatcaacgatgaattgaacccatatcatgtctatgctgtgctcattcagaacatcaaagacctcattagtgcacgtaatttctctcttcatcattcactaagagaaggaaaccagtgtgcagatttcatggccaagatcggagcttccaatgatgttgatttgctaattcactcccaccctccagacgggctctaccctttgttgcagtcggatgaattaggaacgctctttttgaggtgttagtttttctttttttctagttttgtctcttctttttattagccatgtaaccaaaaaaaaaaattaaagttttataaaaagataacttaaaaaaaaattgaagctcgtaagttgctggccgcctcaaataaaataaaaaatgctggttacaaaatttttatctacgaacactacttttacacaggagtttgaaatttttatccatgaacactacttttttttataaacaaattttttatgtataaataaaaagtagtgttcaaagattaaaaatttatccataattctttaaatttttatctatgaacactattttttatccataaaaaaaaaaaaaaatgttggctacagtgagatattatggataaaattttcctttataatttcttaactaatgccctgaagcactagttaatatttccttaaacttaactccagctcac

SEQ ID NO: 31232 - DNA, 184 bp, Medicago truncatula
  Intron number 1 from transcript Medtr4g069880.1 (locus Med tr4g069880) derived from phytozome v7.0 (chr-ID MtChr4; po s 13443133 to 13443316)
ctcgtcttgaaactcttgtcaaagcttctgatctcgtatatattctttcttttcgattttctggttccgtttttgttttcttttttttgaatcattttgccattattatttatttttgatgatttttgatgatgttgttttcggtttagactattaatcttgctgcgatttgcacaccggcgga

SEQ ID NO: 31233 - DNA, 753 bp, Medicago truncatula
  Intron number 3 from transcript Medtr4g159820.1 (locus Med tr4g159820) derived from phytozome v7.0 (chr-ID MtChr4; po s 40397996 to 40398748 reverse strand)
actgataagcttttggaaaaactgtaagttcactttttgaagttcaaagtttaaacatatttgatttcagtaattaatattgttttcataattatggttactgctatatgtcataattattcacgttttccatctttcttttgacataatttattgtttagtgttgttccatgacacccccaaatctatctgtgcttctgtttttttcatttgaactgaattgatgtagatatgacactaagaactttggttaacttaattcaattacaaatatagttgaaaattatatacaagttgcagggtggtttttgtaaccattcatgacataaatattgaatacaggtgaccgaatgacactaagaactttggttaacttaattcaattacaaatatagttgtaaattatatacaagttgcagggtggtttttgtaaccattcatgacataaatattgaatacaggtgaccgaatggaatctaatgaagataggtgaactgactgcaatggttcttcgtttctctcgtcacggggaccatagttttgttatataacttacaagtttgtctaggattttttagaatgataaattagacctgccatttcaaaaaggatgattgttctggtttagtgcctgctttctttttgcttcttattggtagctgatattagtttgaaaaagaagataaaagtaaattttgagatactcgcacgtatctgtttcattcattcttttatttttatgacagttataat

SEQ ID NO: 31234 - DNA, 679 bp, Medicago truncatula
  Intron number 3 from transcript Medtr5g083170.1 (locus Med tr5g083170) derived from phytozome v7.0 (chr-ID MtChr5; po s 31519071 to 31519749)
gcgtatgaccgaggcatgatggcagtgaggtggttatggagaaacatggccttgaaaggaaaggggaagaactaggaacacctaggagtggtgacccatatggtcggggaaggcagatcacgatgatctgggttgttttgccgccgctgaaatcatgttaagttttagagagaaaacacattggctattttttctttttttcttgaattcgatgcaatgcaatactgttcttaaacgtaaaacgagcaaatttcaatgcatatgtgcgatcaatacaagttcatcaaaactatctatagatcatgtttggataaatagattatttgcagattatagcacaagcgcttatgcataagctagttttatagcaaaagataaattaaagttaatttacttttgtatatgctataaattattttagtaaactatattaaataacttgagaaaataggctgaaaaaagcttgtgaaaattgtcttaagatgttttcgtaagttcttccaagctttaatcttttgcttcaattttgattattcttggtatactaatcaggcaattatcataattggactgcaatttccatctctgctctatatcttgtattacttttatttgtcatatgatcttataagttatttttgcaggttgaaaggcgtcaatctgaattcggaaaggtcaa

SEQ ID NO: 31235 - DNA, 1040 bp, Medicago truncatula
  Intron number 1 from transcript Medtr5g087710.1 (locus Med tr5g087710) derived from phytozome v7.0 (chr-ID MtChr5; po s 33914867 to 33915906 reverse strand)
catcaagcaatcattctttctccaaactttgcaaggtaactataaattatttaaccaaagttagaaattgctatgaatgcaaaagtttgatttggtgtttaaaatatgaatttttctagagttacagccaagacatatttcaaacataaccaaataactaatatatatccttgtaactaaatttaatttttcaaaacacccacatccacacgaaaggtgaaaacaaagacatattagtcctattattatgttttattttttatttttttaagaggtccttttattatgtttaaaacgtgtctttggatgtaactagataaaacttgggtgtaattagaattttttttttcttaaaatagtaatcaactaataatatatatatttttggtttaaaatttcatttggaaattcaagctgtcttttttttgtgagtctatttacttttgtaatatgaaaattgtgtttttggggctttgttccctttttatggtattctcttattgctttttaattaaatattggcttatatgcaagttttattttttagaagttacacttgaccccctattttgaatgaaattggactataaccccctattttaaaattcaatttgttttaacccctatgttttatacttttcatgattttggccttgctagaatatatttttcaagatgttgagggtcaaaatcctgaaaaatagaaaatagaagggttaaaattccaaattttaaaataaagagggttaaaatctagtttcaaccaagcatttaagccttaaatattaaaatcgtgtatctttaattttccgtttctaattcttagcaacgaaattgcaacaaattttatatattttctaactgaatttagtgacttattcagcctttttagcagtataacaaatgtgttgataacactcgtaattgtagttttttatttattttttgcaaaatggagaataattttaattaatttaatataaatattgggtaagcaaagataaatttaaatgacatatgttgtatgtgtgcaggaacaa

SEQ ID NO: 31236 - DNA, 1023 bp, Medicago truncatula
  Intron number 2 from transcript Medtr4g109870.1 (locus Med tr4g109870) derived from phytozome v7.0 (chr-ID MtChr4; po s 24730373 to 24731395 reverse strand)
ccacttccggcaatcacaaagaaaagaacttccaggtaatttatttcatttaattttcttgtcatgtgttcttaccgaaccttgtgaaatattgttcatagtactattgcccatgtttgttttgcttgcagtaaatcttgagttggattgagttacggttttggatgtgacttggctagaagaattttcaacctcctgacgaatttgtgatccggagaggattgtacaggggtgcagttattagaacttgaaaatatttattgcttgttgtattttacacctatggatttgatttaatctcaaaaggatcgatcataaatagtaatttagctaattcctttaggaagaaacgggaatacaaaataaagattaaactacaatggagaaaagtcatcgtgatagtgagttagagagtgaaaacagtagaatctaatcaatttatattagattaaatattaaatttgaagcacaaacccgtagagttctcaggtcaattttttaattcttgttttatgttacatcagcaacacatttgggttttctcaaaagctatgtacctacgcgttttagtgttctgtttggggcttagccccttttttctaccaaaagaatatattacatcagcaaatttgaacaattgaaagcccctttagtgtttatttattgtgttacgtcatgctatctgatggctaaatttaatatagggaccattttgattgacatgttaaattttcacaaacaaaattgctaattccgtgaaaggtaggtataaagttgatgggtatgtgggtaaaatattaaggaagaaatcattccacttgtgttattctttcgttacactatattagatggcctataacaatgtctccgtaagcttagcttagttggtaaggacaatccataatatatataagatctggagttccaaccccgaacactacaaaaaaaaaaaaaaaaatgtcctgcagcagtatgagtatcatccatagcagcaccaacaatatctcctcttcttcagctcta

SEQ ID NO: 31237 - DNA, 719 bp, Medicago truncatula
  Intron number 2 from transcript Medtr4g156290.1 (locus Med tr4g156290) derived from phytozome v7.0 (chr-ID MtChr4; po s 38707829 to 38708547)
gctcaagatgtgagttactcatgcttttgaattttgagattattattgataagctcgtttttttcagcttttactctttattttccctatttttcttttgttttgaattgttgtaataaaattttgttagttagtaaaggattgatgatagttattacttaccataggtggtttgtagaaactcggcttaggtggtttgcacatgtatgtagagagaagacttgtagattttgttgtaagagaataaatcagattgcgagtagtcaaatcaatagaagcagagaagacataaaaaaattataagagaaacaattaggaaggatagggacatggagcttgtttggattggcttatttgagcttatctactgggataaattatgtgagactgttttggagaacttagaacaacaacttatggcaattttcataagtttttcaactcattttcataaattatccaatatagcttacaaaatcatgcgatgggatattgaatatagcttactatgtttttttgaaattccatattcttaaacaccggaacacacacacgcacagaggcctataatcatgcgatgggatattgaatgtttttgtaactttgagtgtttacgttttattaactatattgtttatactaagtccaccgaatttatttacttgctcatttcctctgttacagcttacattgtcaggagagtttcgttctcgcctcat

SEQ ID NO: 31238 - DNA, 255 bp, Medicago truncatula
  Intron number 1 from transcript Medtr5g032350.1 (locus Med tr5g032350) derived from phytozome v7.0 (chr-ID MtChr5; po s 13080005 to 13080259)
catgtatgttggtttttttctttggtgtttgttttttataggaaattatatgtttagtttgattatttgtaagaataagtgcttaatccaaacatgacctagatgcttaatcaataaatattctgtaattacaggtcattacaatttatacagtacaatttatggagttgtcactatttctgcactaaggattagtctttgtgttagtaatcattgtcttcatgtgcaggatatagaataacttaacgcatttgt

SEQ ID NO: 31239 - DNA, 652 bp, Medicago truncatula
  Intron number 4 from transcript Medtr5g032350.1 (locus Med tr5g032350) derived from phytozome v7.0 (chr-ID MtChr5; po s 13080824 to 13081475)
aaataccaggtaggactatgttatgttgatttggagatcataatgagctgtagtgatcaacttttattcacctaagtgatcaagtttgaaccagttgaaagtcctattaatgcttcctttgaatcttccctcactttcaatactactctttattttcaattcttgcaagcaatataaatttctttctaacttgaataaaaagagaatgttcagtaacatattgttcaaatatattggagtgtttcaagtttagcatatatgttgcattgatgcatttttgattatttaggtgcataaattatttgaaccctatttatagtagggtataaatagttttaccaagtggtttcttcagtatgaattgtacttcattgcaaattatgcaaattcatacaaacattactgtgatgtgcatgtgtaaattgatctattcgatcatcaatcaagttttagcctcgtgtttcattctaattgccccaaaagtttcatttggagtatggctgattaggaagtttaaaaatgatacctatcattagatcgttctgtcttattaaatttgaatttagagaccagtcaaattttgaagttggtcttagttgctactcaatcttttacaggtcgcgtacagatagatcaatcaaataaagaaact

SEQ ID NO: 31240 - DNA, 759 bp, Medicago truncatula
  Intron number 1 from transcript Medtr4g097630.2 (locus Med tr4g097630) derived from phytozome v7.0 (chr-ID MtChr4; po s 20947320 to 20948078 reverse strand)
ataagaaggtaacctttcttttgattctgattcggttaaaatctcataataacggtttttacaaccatacccttttttggtgtgcataaagtttgcagctttattcaaatttgaaagctttgatttggtacaattttttatgacactgcaataaccttgaaatcaatctgtagaatgttaaatttgaaaatgatttttgaatgcgaagagaaatttgtctatttactgaagtagaatctcttattgataatgagcttgattgaattgaatcatttaagcttatttactgatacaaacatttgtgatactatttgggaagagcttatagaaataatagcttatagcattccttatgatgtttttagcttatttcaataagctttcctgaatagtttatgaaaacaacttatatgcaaatagtttgcctttattttatcttttactatagaaatagtttatgaataaacacttatattactgtaagcgttaaattaatttgtttattcaaagattttttggtcttatctattgaggtaaacacttttgggtttgggagaactgatcgaaacaacttataacattttcttaagctattttcagcttatttatataagttttccatgatagcttattgaaaacagcttatagtttgtagcttatatgcaaacaatttgtctttatgttatcttttgttacattaaaagcttaattaattgcttatattactttttgtgtagaactcgggtaagaaactcaaag

SEQ ID NO: 31241 - DNA, 328 bp, Medicago truncatula; identical to SEQ ID NO: 30500
  Intron number 1 from transcript Medtr5g066600.1 (locus Med tr5g066600) derived from phytozome v7.0 (chr-ID MtChr5; po s 23463283 to 23463610 reverse strand)

SEQ ID NO: 31242 - DNA, 425 bp, Medicago truncatula; identical to SEQ ID NO: 30753
  Intron number 2 from transcript Medtr4g032230.1 (locus Med tr4g032230) derived from phytozome v7.0 (chr-ID MtChr4; po s 7646553 to 7646977 reverse strand)

SEQ ID NO: 31243 - DNA, 411 bp, Medicago truncatula
  Intron number 1 from transcript Medtr4g110060.1 (locus Med tr4g110060) derived from phytozome v7.0 (chr-ID MtChr4; po s 24803348 to 24803758)
tttacaccatcaaggtttcattgagattttatttgcatctttgattttgtgtgcaatatagattgggatagtgagaatgatgatgaagttaacctagtttagtaggattgctttctaatcaaaatcctaaagtatagaaaatttgttccttaaaatataagtgatgatgttgaataccttaacgtaattggtattaaattagttactgttaggatcaacacagaaaccattcaagacaatggagtctctcactaggaataggattacttcataaaataatcttgagaagacaataatcaataacaagtagaaactgttaaccgagtattgtagcataattttcttcgatatgctaataacaactcttaaataatagaactattttgaagctgtttggagctttaagttgac

SEQ ID NO: 31244 - DNA, 1029 bp, Medicago truncatula
  Intron number 2 from transcript Medtr5g017800.1 (locus Med tr5g017800) derived from phytozome v7.0 (chr-ID MtChr5; po s 6443495 to 6444523 reverse strand)
ctacaagtgctcatactgtggttgcaatcctccaggttggacacacctgaaattctctttggtgtatatttgaatttttgttttttttgttatttatacgatggggctagataagactaatattccggttacgtcggagtgaaacaataactagtttatggttatcttgcagtgactcgaacctatgataataattttaaccaatgcgccaaagcttcctttcttatattaaaattactaagttgcattaaaattttcttgcaactttattattttgacaaccttataagggccaaacatattacaggtttattgttggcaacctaacttgatggtttattgcagaaagttataataaaattttcctatcattttggtgacaaatgtgcaagatttaagttgaaaacagacagagtgagtttatgcacattaatttggactgctatttggttgatttcgccttttgtctttctaagtaaagaaaaaaaattatttatgcaataagcgaaagatctttccattgcaaatattttttctgattttagtgcaacatgattggtatgtttagaggtttcaagttgagccatggcccaaaaattcaagttttatgttggctgacatgttgagagctttcaagtacttcggcctttttagaagataacttactaactcatttccctgtttaaatcttacctttgtattcggccaacatcattctcccagtttagagttcctttatttaaatgtttttttatgagatcgttgttatatcttcctttattttttattctgatattactttttttaacatataaaggtgtagcggcatagataatctgattttttattttattttagagtaaattccacttgtttcgtctatgtttttctgaatttattgtagcacaaacttgttttgtattagtttacatgtgagtttttgtcattgcaaagcacttctgtatttattacagttattgcttttcatttgtaggattgtacattaagatcttgcgattttgacttgga

SEQ ID NO: 31245 - DNA, 856 bp, Medicago truncatula
  Intron number 1 from transcript Medtr4g031530.1 (locus Med tr4g031530) derived from phytozome v7.0 (chr-ID MtChr4; po s 7239645 to 7240500 reverse strand)
ccctataagtttagcacttctaccaactgtaataggtatgttttatatctcactccttaattacatatatgagaaacgctaacgagttttttaagaatactctttaaagatctaaagtagcaggttaatgatcttgaaagtttgaaacttgcatattcaatactaaaaaattaaagtgttcgacttttttagtgaataattttttaattgaaattttttaaagaatatcgttagggaaaacaaaaccctatatatgtgtgtaactcttgtcatgcatttctttagctgttaagtgagatctaaagtacctgaagaagttttaagtaggaggtctatgactcaccttaaaaaaaaataccaaataacttattaaatatgcctaaataaaatgaagtggaacaaaaaacaatatttacaatggaatgagaaaaataatatttatttcatataataatattctcaaattgaacaagtgtcctccaagctaaaagatgatgacgaaaattaagtgagagtgagatattgaaatgataattggaggaggtcaaatatgtatcattttttttttaatataatatatgtgtatcattttatttattaaaacagattttatattgtataaaataagtggaaacaaattatgagtgacttatacaattttggccaatcatcaaaatggaattaataccataaaattaataaaaaatattataaaataatctcaattttcatttgacttgggcaatttttttatttcaaacatagtatcccttcatgagcatatatatttatagttcttttatataacttaatttgcatgttttcttctgtattgcagcatcaggttctaaagagt

SEQ ID NO: 31246 - DNA, 660 bp, Medicago truncatula
  Intron number 1 from transcript Medtr6g089240.1 (locus Med tr6g089240) derived from phytozome v7.0 (chr-ID MtChr6; po s 18199594 to 18200253)
tcaaatctttttattctgtttccccacctctggaggtatgcgccttctatctagttttggttttaattttcgatttatccctaaaatcatactttgatattcacttattattctattttgtacctttcaatttatccttgccggagagcttgcaaaggaagcaatttattttcctgacatttagtagttcatgttaaattctagagaggagctttagagataatgaacatattgggtgagaaacaagtcgaagattgagagtaaaacatcgaggatgggtatacaaaaacggtaacgtttttatttataacatacttataatatcatagtttagtcgattccttagaataatcctttctttctagattgacgataataaagggatatactaactgcacttcattcattttgtattttcttactattctcccatgttcttgcaccattcaaatctcttgtttattcattgttcagaagtatgcctgtgctctgtgtttataactgttcatacttaagcatattattgatatctaatatcccttacttccacacttcgcatttgatcaacattattttccttaatttttttttattgttaaagcaatttttttctcgtgaaagtaatcgatttcttgttaattggtttcttgatgcaggtag

SEQ ID NO: 31247 - DNA, 568 bp, Medicago truncatula
  Intron number 1 from transcript Medtr4g159260.1 (locus Med tr4g159260) derived from phytozome v7.0 (chr-ID MtChr4; po s 40132659 to 40133226 reverse strand)
catcatagcggccgcgaggtacttaagggttttaattgttcattgtttaatttgaagcatttgactaatctcaattttgtgcgtgcttgcattgaatttgttagtctcgggaatttctttaacttgaattgttactaattttagggatgatttatgttaactggatgaacttcttagttcaattactaattaaattgattgaactactaattcaattaagggcataattttttttattaccttttttttataagcataccaaattaaattgtccaaatattttcctttttcttctttatcggttcaaatatttttattgggtctgttttctgttaaataaatacttgatttatactagaattatagcaacagcacaagctagagctttgattcgtcaaaaaaaaaaaaaaaaaaactggacctttgaatttgcatgaaaatttaatgtgtttcagtgaaatttaattcattgactatgcatctgaagtatctgtctgacatttggctatgtgattttttctgttgatttgtagactttttccaaagttgttcagagctgggcatcaaa

SEQ ID NO: 31248 - DNA, 720 bp, Medicago truncatula
  Intron number 1 from transcript Medtr6g099230.1 (locus Med tr6g099230) derived from phytozome v7.0 (chr-ID MtChr6; po s 21851817 to 21852536)
tgctcatttgttacaccagtaacaaattccccactgtaatatttcttctttaatcatccatataatatataaattccccattttttattttttgatcttttattatttaaacgtttttttttttctattcaaaatatatattacgagcttgttgaattgacttatttgcgtttatttattgatgttataagttttgtgagactattcggaaggacattcttattttcataagttatccaagatagctatttaaatcagcttataacatataaaaaacaatttaacttaattttatattttgctataaaagtagcttatgcataagtgcttattatgataagcctataagctgcaaataagttgtttatccttctttctttaaaaaaaaaagatgtttatccaaacagggtctatatgaacaagataaatatttgaacattttaatgctaatcatatgcttcattatatgtttctgatttttctaaagattcaattgtttaattgttgatatgtttatttatgtctatatgccatgtttttgggcttttttctgtgaaagaatttttatatattatcatttttgatttgtctaaagattttaattctggtatatttatgatttttcagataattttttctaaaaatgtttctgatttttgttaattttttaatttttgtgctgcaggattatataccaacagtatttgataattttagtgc

SEQ ID NO: 31249 - DNA, 702 bp, Medicago truncatula
  Intron number 2 from transcript Medtr5g007980.1 (locus Med tr5g007980) derived from phytozome v7.0 (chr-ID MtChr5; po s 1402338 to 1403039 reverse strand)
tcgtccatcgttggatacacccaacaaaggtaattcaattttattttgtttaattaagatatactattaagcacttattcaatatgacacttagggcccgtttggattggcttatttttgagcttatgaaaaattagcttatgcaaataaatacagttttatgttaattcttaagttctcactaacaaaaattgtatcttcacaagttgtttttccataaactacattgacaagcttatgaaaatacataaaagtttatttatttgcttaagctgttttgcataagcccaagaataagccaatccaaacggaccttgactccatcaggccttaaatataagtaaaaaaagtacatgtatgtggttcaaatacatgtactttttgcttatgattatttttaaggctggagggagtatcatatcatacaagagcttatgcataagctgtttatacaattcaagagagaataagcaatgtggaggaacttatgaacataagctgaaaacagtccatgatcatatcataaactattttcttaagctcttccaaacagttatgcaattatttatgtcataagataaacccaaatgcatttttttgggctagaatgtaagattttattcttgtttattgttaaagctgatacttttttatttccttttcttagggaatttcggtctttttggtcgtgccatttcacaa

SEQ ID NO: 31250 - DNA, 618 bp, Medicago truncatula
  Intron number 1 from transcript Medtr6g005650.1 (locus Med tr6g005650) derived from phytozome v7.0 (chr-ID MtChr6; po s 422348 to 422965 reverse strand)
gacaaattctcgtttgaattttatccaattggggtgtacgtgtttcatctcccataattaggacattgctgtctaggatttctgtgtaagttttttttgttaatgacaaatagtcagtattttcaaactactggactttaactccttaattccttcaaaccctggactggaagtgcttcatagaagatgagagtttttttggtttgtatcaattactaacaacttcaaagtactcgtaggaacagaagactaactctagctggaagactctagaacaataatgacaatgtttcaggggttacacctttccatactgcctatcaaatttttattattgtaagttgaaattgtctacaacaacaacaaccaagccttttcccactaagtggggttgctacctggatcaaattacgccataatgttctatcagtttaataaatcatatacattatagcgtaagttctagctttatgatgaaatgagtttattttattgagtatggccttaaacaattgaatatatgtgtgaaagtgaaaccttctttgctcctgttctgtgtgtattttgatttccggcttatcaattgggtttcttggcaggaaaaacaaaggattgtat

SEQ ID NO: 31251 - DNA, 638 bp, Medicago truncatula
  Intron number 1 from transcript Medtr5g020740.1 (locus Med tr5g020740) derived from phytozome v7.0 (chr-ID MtChr5; po s 7841974 to 7842611 reverse strand)
aacggggagtgttctcaccatcaagaagactgagtgtatgctgaatcaaaatattaatttatagatcgaggagttacaaaatttcaagaattaacaagatcttttatctgtcgatcttcagataaagctttactttgtaacaaggcttaggatgcttaataaacaagtgcaaccgaagaaaaagctaatagaaaaaatgaagaaaataacttatactgaataaatgattaagaacaagagagaggtgtctcttccaagggttcccttctataaaggattactcctttcacaaaaaagctatcaaacatacaaacttacatatcccctctaacaaactaagctatcctcttactaactaactgcctaattgtacctaatccgtttccctttagaacgatgtctaagcccattagtgtgtttgggagcgatgaattgatgtggaagaatttgctggtctgatcaatgcatgacaaactttgacaacaatgtgtaagaagtttgtatgaggatcgagtggaagaactgattgatggaaaaagcgaatgcaaacaaattctagatgttcttggtgacacagtgctgtcttatttgtgtttaaatgttacatatattgtcaggtataaagggattgggagggt

SEQ ID NO: 31252 - DNA, 665 bp, Medicago truncatula
  Intron number 1 from transcript Medtr5g039000.1 (locus Med tr5g039000) derived from phytozome v7.0 (chr-ID MtChr5; po s 16470817 to 16471481 reverse strand)
ttgtaagatatgtattctttcttattttttctaatttatgttggctgtactttattattttttattattagtaagagaaatctaagatataagttttgagaagacattgctctaattggtgtatgtgcctatattaggaatagctgtttaaccaaacactttactttgtcctatccttataaaaaaacatcaggaaatccttttataatctaggataaatgtcatggatcactcttactatagagacaaaatttattttatggagctcctcatacttgtactcccttttatctatttttagacgtatttttagatggcaaagaggatataaatatagaataggaatccattgataagagattttgtgaaaaagaaaggatagtttatcaattttgtaattaaaaactataaaataacattcctacaaccttttgaacctttcttaatcttatagaagaatggttgaaagtatgggagaagaaaaagaatgagttcaacaatcgggaaggggagataggaaatgtggatatgatatttaaacaatcaaatgaggatcatattcttttaacttgttatttaaaatcacgcacttacaccaactttgcgtgataaatttttaggtttttagaaatccatttataggttgacacttgtgaatttggaaa

SEQ ID NO: 31253 - DNA, 705 bp, Medicago truncatula
  Intron number 1 from transcript Medtr4g096740.1 (locus Med tr4g096740) derived from phytozome v7.0 (chr-ID MtChr4; po s 20455369 to 20456073 reverse strand)
gctttctagccgatccagaacattttctgacaaaggtttgagctttcttctgaatcagattaactattgcgtgacttaacttgttatcaatcgaactgttgttagttactttttgtcaatggtttgaccttacttgtatatcagatgaactataatgagacttaacttttgattagtcgaaatgtggcttgttccttttttgacaatggtttgaaatttatgcttgattttatgagctacaaggagagttaaataaagatcagtcaaattgtggttatcacgttaaccaaaaaaggttcgacttctcctgaattgaatgatatattttaaaaaatgttaaggaatatattttgtatttattgtaatgaaataattattttttttatttttatcatatctactttttatttaagtatatttattccattttataaatacacatgtctttcctaccatgattttatttaattttctcttatactatactactaaataattgctagtatcttttaagaaaaattgctagtatcttatttgctttcctctatctttctttcatcaataaaaaattgctagtatcttatttgcttttctttatctttcttatatttattgggaaataaaagtgaattatatatttttcagactaaattacgtctgatactccagtttggtctaaaccacaaacatattggatcaagtgta

SEQ ID NO: 31254 - DNA, 528 bp, Medicago truncatula
  Intron number 2 from transcript Medtr7g009440.1 (locus Med tr7g009440) derived from phytozome v7.0 (chr-ID MtChr7; po s 1670053 to 1670580 reverse strand)
cacttaaagttcataatcagaaactacaaggagaggtaaagaaatattagttaccttatactctctcttttctaatttaaatgtgcttttataaaaaaattgtgtttctatctatttgatattttcaaagttcaatgtatcattaacttttttgtttttaatgaaaaatgttaaagttagtttgttagattaatattttaatctatcatcttgatttgaatacaagagctcaaattcttcccttagcttaaatcagttgagttattcaactccctacgtgtcattaactattattgttttacctaaaattttactcaagagagagaagtgatttgagacattgaatatgaaagtatgattggataaatacaatttttttctcctttgtaattgatatagataaattgatacttttgtgctggaagaaaatttgactttattacaatttgaacatctttttattgtttgagttttgtgcttttttatatttaatgcattatgattctataggtactattgacattataa

SEQ ID NO: 31255 - DNA, 708 bp, Medicago truncatula
  Intron number 1 from transcript Medtr5g072260.1 (locus Med tr5g072260) derived from phytozome v7.0 (chr-ID MtChr5; po s 25752359 to 25753066 reverse strand)
gactcaatcaaagcttattcaaaaaaaattccgttagcatcgaataattattggttagattatacttaatttataaagaactcaaatttatattttttatttgcaattaatttttattggtaattattatgtttgagtcttgactgtgagtttgaatgataaaaaaactgtttttttatggcaatgacgaagttagagcacgtatggtgtgtaagattacacacataaccgtaatcgaaataacttgcttatctaacaagctaacgaattaacaaactaattcaacaattagcttaaccaatcaaagcttaacatatcctccccaaactaaacttatcacaaatgcgtttaaatgtgcaaattaaaactgagagacaagcttataatgtgcaaatgaaaactgttaaacgcatttgtgataagtttagtttgggagaggatatattaaccaattggtcttccaatgaacaatacacaagtttaacggctccttcctaagttaagtcacgcagaaaatgaacctaaaatctacgtgtatattcattccatgcatcataaggtttttcatttttgaacaactttatatgaaatgttatcacaatgaatggtggtgatgttagcccggttgggctttgactttcgtaaaccaaacatgggcggttccaccgtgtagcgacctcgggcggtcgcccgggctcgatcgataat

SEQ ID NO: 31256 - DNA, 817 bp, Medicago truncatula
  Intron number 2 from transcript Medtr5g049170.1 (locus Med tr5g049170) derived from phytozome v7.0 (chr-ID MtChr5; po s 21003159 to 21003975)
cctgaggtgagtttagctcctgagactctgatatcatctcaaaatttagatttatatctaagagtaatgttagtaacacgcattttaacacacactttctgacacattttaacactctggaaagtagatgactatgagtgactagtgagttacagttcatttggtaccattgtttaggtcgtatcacaatgaattttatctgatattctacattttttcaagatgttaacatttaaccattgaaaccattttaaatttgttaaaattctaattctagattgtgaaacaatcaacattaaatctttaaattcttcttatgatgatgttgaaacattataatgtaaataaacgaagcatgccaaatgtaataaatttcatccatgtaaatgacaatatattttaggtttaatagcagttttcgccccttaactttcacaaagttgcgattttaaccccctaagaaaaaaaaactacaaaacaaccccctaagttttgaaactgtaacagttttggtccccaaggccaatttttggtagaaaaaacaaaaaaataacacgtggcacctcacttagggtgccacgtcagcgtagatcgagtcaaaattggtcctggaggccaaaacttccacaaatgcaaaacttagggggcggttttgtagttttttttcttaaggggccaaaatcacaactttggaaaagttagggaggctaaaactgctattaagtcttatttatatgaaatgtaataattaaatgttgagactgtatatatgatcctgataggtacaaattgagattgcagtaacagaagggaaaga

SEQ ID NO: 31257 - DNA, 749 bp, Medicago truncatula
  Intron number 1 from transcript Medtr6g014310.1 (locus Med tr6g014310) derived from phytozome v7.0 (chr-ID MtChr6; po s 3277989 to 3278737 reverse strand)
cggtccaaccgatcggaccgaccagtccgaaccaggttttaaaactatgcttttaactaatcaatttacattacctttaaaaaaaatgaatcaatttacattaattattaaatttatcattttgactatattggagatgatataacgattagagcaaattcttaatgaaaagaagagttaaatacagttttggactttgtacaaacaaaaaaaaaatatacagttttggactgtacccaaaaaagatatacggttatggacttttgttcccttattttactaaattcataattttggtcttcttatatttttctcattatttcggtcctctcacttttaaaaactttttttgagagcaaaaacttagaaatataattcaccttttaaagtttaatttggatgacatgacactttattgatttaccttttatcattcactttggatgatatgacacttcatcaaatgacgtaaatattagtacgatttgaccataaagtaaattgatctccacccttataagaatgatgttattatatgtcattccagttatttttaattattaaaataatacctctaaaaaaacttattaacataatagaaaaaatatgtttgaattagaacgactctatagggaaaatatatatgaattagacaataatagaaattttttccattatataatagatcatagatgtgtaacattacatactcagtttttttttcttaattttctaacccactttaacat

SEQ ID NO: 31258 - DNA, 930 bp, Medicago truncatula
  Intron number 1 from transcript Medtr4g089750.1 (locus Med tr4g089750) derived from phytozome v7.0 (chr-ID MtChr4; po s 18770662 to 18771591)
caacgtgttttatcgcttcccttttctgacaactggtaatttcttcacttcttttgataccccatttttaaagttttgatttttatgtctgtttgagcttttttagttaatgggttgctctcaaattaatagtttattcatgaattcattcggtttgagtttatgaatatgaattgactaagaccctgtttggataaacattttgaaagttttgatttttatatccatttgagatttttcaattaagggattgtcctcaaaattcacgagttcattcagtctgagtttatgaatatgaattgaccagaccctttttggataaacaacttaattaagttgtgcttataaaccttgaagcacggacgctagacacaacaccgattataatttaagaaaatgaattaattgaatgaaattacttgtgttggtattatgtcagtgtcagacactggtggcaatgacattcgatcagttatgttggtgctataaagcttataaactgttttatattgcagcaaaatatggctgatgcagtcaaaatagtggcattacgatagcaattgcggctgcagactgaaatttaaaacaataagcccttatcatataaatgctcatgtataaactatatttagaacaaacaagagataaaataaagttaaactgtttttataagctatcgtggaaaacttatagaaataaactgaaaaacaacttatcgtggagagctaacttatctcagtgaagttcaaataggtcaatccaaatacgtcgtaagtcaataaagtctgcattaatgaaattggttttgttaatttttagctgtgttttgattatgattgaactgtgtctgttattagtttatgttgactgatatacaagtttgaaagttttgcaggtttgtatttttactgggtcaattcaatttgcaga

SEQ ID NO: 31259 - DNA, 628 bp, Medicago truncatula
  Intron number 1 from transcript Medtr6g088940.1 (locus Med tr6g088940) derived from phytozome v7.0 (chr-ID MtChr6; po s 18048363 to 18048990)
tctatttgagtgggacggctttctcaaaaaggcaagtgattcatatctctttttctatattaatatgattttgattccaatataaaattgaaacataattttaataattctttttagtctttttaataaaattttctgcattcagtattagtctctgctcaatttaaatttgtttaatttatgtttaaacttttgagtttttcaacaattttttggtagatgtattaaacatattactaaatgtttctctgaaaaaattgtcacaaaatttgatttcaacgtccatattttgttacttatatctttaacttttgtcgttttgaaaaatttatatttaattcttttcatgttaataaattctaaattttagtaaatgaacctttcatagtgttttaagtttgtctcaaaaaaatcgttcaaaaatttatttaagaatttaagaataattaaacaaactttgttgtagtagggactaaaaaacctattaaaattatgtaaggactaaacttataagttcttaattttatagggaccaaaacatattttagcctattaataaatccgatttaatattattcattaatttcttatttattttcattttttttttggtcagaagtttgggaat

SEQ ID NO: 31260 - DNA, 532 bp, Medicago truncatula
  Intron number 1 from transcript Medtr5g040690.1 (locus Med tr5g040690) derived from phytozome v7.0 (chr-ID MtChr5; po s 17389917 to 17390448)
agcacgccatccaatttgaaagactttacaggttctcttttgtaattatctatttggtctttctttaaaagaaaatttattgttactccttctccttgatattcaaatattatgcatatagcttgtaacaccgtgaagcctaatatattcaaataatatatgaaactatagttgctacgtagtcgtataggtagacacacttaatcgaagtgcgtaaacaaatgattgtgttcattgtcttgcgatttattatttctttaatcttctgttactagttgccgttctaaaaataaatatgagatttgatatagaaaatagatgcgtaaataatacggaataaattatgacattttatgctaaaaaaatataaatttcctttgcaacaccacactatgcattgtaacacctacaatgcctacaattacaatacttccgcgcgcatccacgaattaaaaccgtggaatatatgttattaatcgatagtatttccaataatttgtgttttgtttctcttctctgatcagtctaacac

SEQ ID NO: 31261 - DNA, 649 bp, Medicago truncatula
  Intron number 1 from transcript Medtr4g100890.1 (locus Med tr4g100890) derived from phytozome v7.0 (chr-ID MtChr4; po s 21688602 to 21689250 reverse strand)
actggaaaaaagtgaaaattcaacatgagagacaaatggcttgactccaactcgagcaaataaaaaacaccgctggatttaacgataacatggatgctatgtatgaattttacaacctccttggttattctgtaacttatcccacatacaacaaggacacgatgttttggtagcgaggctaagttaagaatgttttctttatggttcttgagatattgagatgaagtgacatttctcagtatagattatcttcaattttcattttcttctacttgagagaaacaaggattgatcaaaacaaatgtaagtctttgttgtcgccaatcttgtatttttttttcgattaaaatgtgaagtgattatttctattgtttctttcgttgcattaattttattggtctcttatattattatcattattttatcaggtgagtcaatcatcttcaactcaaactatctccaacatctttgaatggagacgatgattgtttaacaatttaatcttatttactgttgaagatggcttactttatagaattaattacttgcttcttttattttaagaatattgattagtacttagggtgtttttggtgtggataaacttaattgtaaacagtttctctatttgtttattttcttgtagctt

SEQ ID NO: 31262 - DNA, 714 bp, Medicago truncatula
  Intron number 1 from transcript Medtr5g005520.1 (locus Med tr5g005520) derived from phytozome v7.0 (chr-ID MtChr5; po s 209501 to 210214)
agctttctaaaaccaaactttattgcccttgcaaggtatcattcattctatttctgcatgcaccaccatattcatctttcattttcatttcatctcatctgcattttccacattaatctatcactatagtatatggaactctgcaactgtttttctctaattcaatttctttatttctcaaattcatttccttctttctaatatactatttttactatcagtagtaaaaaaatgtaatatataatttctgatatctttgttttgatgtaagcatatctttgtcattctaaatttataccagaatattccaccttatatgccctttgcttataattcaaggtcaaatcttagttactttctttattctcattctctgtgtaaattaatccatacatgcttatccggaatgtcaatttacattcttgtccatacattattttcctctttcctttttggatgttttcttactttacatttattttctgtaaaacaagtttgaaagttactcctcattacaaacaattgttttcaattattttttagtttggtccactttaacatcacagtgttgcatatgtagtatactttgctgtttgtgtttgaatttaaagtaaatctgttggtgaactattttaggacctttaataccgattcttatgtgttgtcacgtttactgtaggaataaggggattttttttgttgctattgatctaa

SEQ ID NO: 31263 - DNA, 630 bp, Medicago truncatula
  Intron number 3 from transcript Medtr4g121880.1 (locus Med tr4g121880) derived from phytozome v7.0 (chr-ID MtChr4; po s 28720885 to 28721514)
gaaccattgcaggtacttcaaaacaatgattttaattcgggtaaatgctcattgtgtgtgtgtgtgtgtgtgtgtgtgtgtgagagagagttgatatgcagaatttatctgaatttaatagaatttataattgagaagtaggagaaagtttggtttattgtatctgactacctgtacatgaaacgtgataacttcaatgcttagttatttgaattgatatagagtcaattggtctccatcctggtacctgattggagtatacgccgtagccatagtccatagatttttcttctgtttcacttttaatattactttttccctatgtaaaaccggtgctataaaattactgcaatttgcgggttgaatttgaaagagaccaattctataacttctagtctcacacagcaacaactgcataaatgtcatttacctctattattttctacattgcttattattgaagttttgaggaaatgtattttttttttttgggagctagatttcaaaataactttgatatcatgcactgattctccatttttaaatttattctctaccaatgggtggaattgctgtgataacttgtactaatgaaaccatttactttataaggtgagagttgctgacgtt

SEQ ID NO: 31264 - DNA, 780 bp, Medicago truncatula
  Intron number 2 from transcript Medtr7g015510.1 (locus Med tr7g015510) derived from phytozome v7.0 (chr-ID MtChr7; po s 3929673 to 3930452)
actctatcagaccaagcacgtccaacacaggatcggtttgtttccctttctcataaaatatcattagttttatttttttaatctgtatttgggaattgtcttcaatattattgcaatcggtgttgatttataggcacctaactgatatacgctacacatttgagaattgtatataggactaaaactttctcttttgattttattacatttttgaaatttgctttcaatacacatgattttattgcatatttggatttttcttattgttattatttgaaatgctaggttatgtcactccattgaactgaacatcatgtttggattaggcatagagaactgaattgcatatttgaatttttcttattgtttttcttatttttttattgcatatttggatatttcttattgttattacttcacatgtcatgataaattcttaaattcattaattatatgatgatgaatattttgagcacctagtagaagcggtttcttgaactacactttgcctaccatattcccactagctactccaatgccaatgaatatgatgagcaagttgcttggttctgtcactccatgtgatgtactgatagacacaaatttatcttgtatgaggacatgcttttagagaataaaattattttttccctgtatatcgagtctttttctgcatttgtttggctcaacttttttattcaattcaactggattttttttgtaagcataaatcagagataaaaagctctgatttttttttgtttttgaaatcaacaggaa

SEQ ID NO: 31265 - DNA, 840 bp, Medicago truncatula
  Intron number 2 from transcript Medtr4g080060.1 (locus Med tr4g080060) derived from phytozome v7.0 (chr-ID MtChr4; po s 16323580 to 16324419 reverse strand)
actctgttagtggtctggtatcttcatttcgtgatgcagctggaaatcttggattgtatatggaacatacaatcactaaatatgatttttcatgtctttttggtggcccaagtgagattggtaattgagttatgttatatggacaacctaaaacggttgttgtgtatgcacaccttatgggtttatccagatattagtctggcattgaagctgacaaaaaaatgtcaataaagaaaaagtagatggaccgtatatatatttggttgtccgacaactttaggttgtccaaataatatttccgttggttattcatctattcaatgaaggtttctgtttgttttgtaagaatctcctgtagtattgctactgtgtatatagtgattgtccattgtatgagagtgattttggcagagaaggggacccccacccgaagagtgattttgataattttcaaaatctcaagtataggcaaatctttcagttccagtgttacacttactcctctgccaaacttagtatagtgcttgtccattgtatgagagtgattcagcaaactgagtcattatagtataggcaaatcgatcagttctagtgttatttactctgggttggaatgcatgttccaactttaattcaaattggcttttagtgcttgtttgataaatcgactaatatcagcacccaaaagctttaaatagcatggaatgagaacaataaaaagttcagtgttttcctacatgttaaatgctgagatgtctgataattgatcctgcacgttttcctacattctcttattttgatcttgttgagtattacaagcaacatttgtatatcttgtag

SEQ ID NO: 31266 - DNA, 636 bp, Medicago truncatula
  Intron number 1 from transcript Medtr4g080060.1 (locus Med tr4g080060) derived from phytozome v7.0 (chr-ID MtChr4; po s 16324423 to 16325058 reverse strand)
ttgcccctctttcctttttggttctggatttgcaggtgagctgttttggggtttaccgtcaatgctaacatgatcaaattagcaggtagatctttgttgagtgttttcctcaaaagtacagagaatgaaaacttgttaaatcagtacagagaatgaaaacttgtttattcaaaatcaaatccatcaatctgatttattagcgtaatttatttttgttttactatccttgtggtatgaaatatgggggtttgacccacatagttaataggaaatattttagcggtggattagcgtcttggagttggatataatcaaatggattaaattgattacttaccaagaaatgtgcatgtgattagaaataccgctgcgcgctgggaagacctagtagttttcttttgaaaactttagatgtattagtttttcccttaatttctgtataagtttttctggcaaccactttacatttccatcgcaatataattagtgtgattacacgcttagttaagtcatggtactgagttgcttaaaagttcacctttttgttctctgtttggttcgcagttagctgtttatgattttgttactagccaatgaatataaccagcagggaccttgtcatgaatgactaggggc

SEQ ID NO: 31267 - DNA, 837 bp, Medicago truncatula
  Intron number 1 from transcript Medtr5g022760.1 (locus Med tr5g022760) derived from phytozome v7.0 (chr-ID MtChr5; po s 8893530 to 8894366 reverse strand)
gcaggtttgtttctgttgcgattcactatagtatttatgttaatacgatttataatacatacgatttcaatgatttgtacagtttactatagtttgttagagatgattatgtttgtagtgttgttgagttggtttttcatgtgtttttaatgtttttttttttatgaaattgaattcattgatggtatcatgcataataatgattgtagtgaatttcagtaggttaggatcagtatgtattgcatgttatgttaaactaaatcaacagtggatacgcctttaccttatgcataatactgttacgaaccactgacatggacacgtcgacactagtaaaaatttgaaaaaaggaattatttgaatgtaatcacatgatatgttggctatgaagcacggacacaaacacactgacatggacacggacaccagatacggtgacaccgataaatttttgaggaaatgacataattcaatctaatcacaaaagtgtcggtgttgtgtcaccaggacacgccttcaatcagaagtgtccgtgcaacagattgtgtcggtggtatagagttttagggtcacttttcgtattcttctcactgtacaatttggaaaatgcaagtacctttttggtctgaagttatggaaaatacacacagggagctgtagtattgatgtaggaataatattgaatcaaattgctgtgtctttgtgaccagatggattgtgaaatgctgtcatttttcactttgttatatttgattttgctgtgcacttttctttatttttattttttgtttgtatgcacatcgatattgctattgttttaagtgtcaattatagggt

SEQ ID NO: 31268 - DNA, 523 bp, Medicago truncatula
  Intron number 1 from transcript Medtr7g043380.1 (locus Med tr7g043380) derived from phytozome v7.0 (chr-ID MtChr7; po s 10714101 to 10714623)
gtcttggggtcccttatttcgtttcacaaatcgtaataatatttcttatgcatttcacacttctttttttctatagctagtttgtgatgtaaattgaaaacatataaacacaattttcatggcatagctctttagggaagttcatttgaatgaatatcaaaactaatgaaaacaactttttcttctttgtttttttaaaaaatatgatagtattaattttttcaatctatgtacttatttaaaaggttggagtagcaatgaaaacaaattaaagacatagaaacatgaaattcatctataatttcgttaccaaggttttttttttttttttttaggaaacgttgctaagtattcttctctatttttcgttgttaattcaactttttctaaaagaaatgatttgatgagatacttgttacgttttagtttttatttaaaaatatatttgttttcatggcgtcaaaattaatgatacataaattttgcaggctggtttagttctaggaccatctttgaagttttc

SEQ ID NO: 31269 - DNA, 881 bp, Medicago truncatula; identical to SEQ ID NO: 29307
  Intron number 1 from transcript Medtr4g028590.1 (locus Med tr4g028590) derived from phytozome v7.0 (chr-ID MtChr4; po s 6608235 to 6609115)

SEQ ID NO: 31270 - DNA, 765 bp, Medicago truncatula
  Intron number 1 from transcript Medtr5g046890.1 (locus Med tr5g046890) derived from phytozome v7.0 (chr-ID MtChr5; po s 19741985 to 19742749)
tcatcactggttatcttggtgctggaaaatccacggtaacccatttacctttttccatcaaaattaacaccctgttaattttccctttctataatttctaattgggtagcttaaagttgtgtcttttttcaatttcattttcttttttgttattgggtcatgtacctatagcttgttgaaataatagtgtttcaatgtttttttttttttttttttttttgttaaatgaagatgttagtaatgtttaaatatgattttaatctttacagttatagcgtttttggttttagttcgtgtaagtattttttattttatttggatttggtttctgcaaattctaaattccgttgcttttagtccttgacgtcagcttattgggtattggacatgtcgtgattatattgagttaaatataacgttaagaactaataaaaacaacaatttttgaatttgctgagactaaatgtaaacaaaatatttgtctataagttcgagctcaactggaaaatgccgaaattgttaggttgaataccatgacctgggatccctaacttgtctgtctatcagctaaaaataaaatctaaaaaaatcttacggggactaaatccaaaaaacactataattggagggactaaaatcttatttaaaccttgtaactgttatactggaagtgtgttcgaaccctcggccaatgattttgtgatatggaattgtgaattggttgttttgaatttcagttagtgaatcatatattgaactctcaac

SEQ ID NO: 31271 - DNA, 615 bp, Medicago truncatula
  Intron number 1 from transcript Medtr5g014220.2 (locus Med tr5g014220) derived from phytozome v7.0 (chr-ID MtChr5; po s 4502342 to 4502956)
atacaaattcgtgggccattttcttttcagccaaggtattattatttcaacatacatacatagatgaagaaatgcttcttactttctcatatgcatgttcattctctctttctttttggagaaatcacttgtttttgtttctatgttttttttttgttctttggattatgatacgtgcatgtcatgataagtttgcaactttgtcttcttgtggtgttattggagttttctccacaagatctcttaactgggtttttcttactttgttattctgtctcaaaaagttatttactttgcttcaaattagatctttagtttagagtttaccaattaaaggacagttttttttattatcttttgtttatgaaatgcatgatctgaattcaaaaaacatgttagtattctacattatctatttttattttaccatgtgaataaagttaatttttttaatcactagagtttctggtttttattattttttttagttttttgtcttatgtattattagattaaagtatagttagtagcttctttaatcaagtttgtaatttgtgatctcatataatggatcttgcagaagaacagattggtattgatctgttacttgtgtag

SEQ ID NO: 31272 - DNA, 686 bp, Medicago truncatula
  Intron number 1 from transcript Medtr5g083140.1 (locus Med tr5g083140) derived from phytozome v7.0 (chr-ID MtChr5; po s 31497745 to 31498430 reverse strand)
ggtgagtttagcctctatttttgttaacaaaaagtacagattttaatcacatggtgtagtagtaatagcagtagtgtcagtgtcaccatagtttaaaattgtctgaaaacagttttagaggtttctgccatccgtaaccacaattctagccacatttttccgcaatataaaggtttgcatcgtaaccacaataacaaattaaaaccatgtacgtcatgatccgtgatattttgaaaaatttatgttaaatgcgatttagacaatcagttgtcgtctcaaatacatgaaaaaccttaatatggtggtctagatcgatgttgtggaccttttttcaatgttagtttgtttattagagaatatggttattgagaaagcatcgggggtgatgaaattgagggtgatgcagttgatgaaattgaagattttcctatcacgctgtcagataatgacaccattttctagtaaaaggtcattctggattcacaccgattagatcaaaaacccaaaagtatcccttgagattaaatagaaaacataactttagatgcgctgactttccactcgggtttggttcttgtccccttgtaattttattttttatttctttttgctttaaaaaaaaaaaaaaaaagtagatgattgtctttacttataatagttttgtttgatgcatgtataggaggtgc

SEQ ID NO: 31273 - DNA, 475 bp, Medicago truncatula
  Intron number 2 from transcript Medtr5g082660.1 (locus Med tr5g082660) derived from phytozome v7.0 (chr-ID MtChr5; po s 31148875 to 31149349 reverse strand)
ttgttgaacttcttgcaactttggactctattcatgtaagtttctttgtagaattaaaaaaaaaaatttgttttattgcttttcaatttgaaatcggtgcagtgcattgtagggtagggtttaatatttacagtgttttttaatagttatagtcgcattcaagtatgttaccattatgaaactcgttgctagtcttaaaatccaataacaaacccaaaagttaattgttggcatgcttctttgtcatcttggaagaatgtttaccgtatacacaatgcataatatatgaaaggtacgaggttcaaatcccagccacctaaaaaaaaggagattcaaataatctaataatattcgattttgtgaagtttttagtatttttatattagttttcaattttaatttgaattgttttagttatgaacacccctagtagcaaggttcatgtacgttctcttgagtattttaatttttaggt

SEQ ID NO: 31274 - DNA, 840 bp, Medicago truncatula
  Intron number 1 from transcript Medtr4g024730.1 (locus Med tr4g024730) derived from phytozome v7.0 (chr-ID MtChr4; po s 5704753 to 5705592)
aagctttgcagaaggttttgtccgctaggcatttggtgagtccaagaatctcaacacttttacagaaaaaattactatttacatttcaaacattttccagtccatataacaatcttcaatttcctggtatctattgtgtctggaagtttctctttgttgattactagatagtaggacctgttatcacctcaatacaggccttggtatttaacacgaatataataatagtactgttagtgctccatcttactcatttcatagtacctttcaactggttaatccttcctaatcctaatacaacatttggtacctgtcagtgttttcgttgttttttgaaaaattacaatatattgtctttatgaagtagttaatgtgcattttaagattcatgagttattgaaaatagaatgtttttattactgttgaatgagagaaaacaaaggcatagtgttgtaaaactgtgtttcaacagcacatcagagtctattttaagattattcatgaattattgaatattaaatgtttttataataagcttatataataaatataaagatcctactatatttttaacaattagaatgatgtgctggattttgatgatactaaatgcatcaggtattaaagtttctagtcttttagcaatcaccttattatgttggatggccatggttataaactgatgttggattcataatatattgttcggtaccatctattgctctcttatatttactttactgtgacaaaaaatggaagcttctgatagaattaacatcatatcgtcttttgattctgaaagcagacatatcaaaatcaacacaacaagcaaataagctg

SEQ ID NO: 31275 - DNA, 473 bp, Medicago truncatula
  Intron number 1 from transcript Medtr5g029450.1 (locus Med tr5g029450) derived from phytozome v7.0 (chr-ID MtChr5; po s 12272073 to 12272545)
ccttcactgcccccgtttccactacaacttacgaggtacttacttatcttctttcattctaaacttagtaataagcatttacgtgaaaatggttttggttgaattgattttagttcaaaattagttttagataaacatgaattatgattgtatatatttactgaaaatgagttgaaccatcaatttgagggtggaaatcatgtttggaggcaaaagctacaagttcaaactttaagttagaatgaattattgaggcaaagtcatttctaatccagaaccaaacatgtcaaaatcaattatacaccttcataatcaattttatctcaaagaaatggaaacaaacatgtactaagttcttgtaacagatacaattttattttatttttgctttttgtaatttgatcttttggcatttgagtttgatttataactgatggtaactaacaagtataacaaaacgcagttttctgata

SEQ ID NO: 31276 - DNA, 416 bp, Medicago truncatula
  Intron number 1 from transcript Medtr4g042590.1 (locus Med tr4g042590) derived from phytozome v7.0 (chr-ID MtChr4; po s 10222150 to 10222565 reverse strand)
gcatcagaaatcttgtctcctcactgctgcctcaggtaagcctttcgattctctctcttctccaatttgatgcttgtttttgttaatgggttgatgacaatattgattttcctcaatttattaggcttgtttaatccccaattttaatttccccaatattgattttgcaagggataaatcatgaaatactgttttgatttccccaatttgatatgcttgctgttaaattcattgcaaaactaagggaccctttttcatgttatgtataaaggtttaattttttttttccagttttgaattcaaattgaaattagggtatgcttgttttgatgttatctttgttcatcacttttcttgtcaatttgtttcattttcttttaggtggagctagcaacaatttttaaggttgggaggga

SEQ ID NO: 31277 - DNA, 457 bp, Medicago truncatula
  Intron number 3 from transcript Medtr5g018870.1 (locus Med tr5g018870) derived from phytozome v7.0 (chr-ID MtChr5; po s 6971934 to 6972390 reverse strand)
ggtatgaatcttgctgatctttgtcaaattattgattaatttattttggatgatcaacatgccttggaaaaaaattgatgatttatatgctatgattcttcattgttgttgcattttgagcgtgatgacttttgatgtattatagccaagtatggtaggtaaacagtatgctttgtttgaagagaaaataataattgaaaggggaagttaagtaataattgaataccatggttttatctgaagacaaatacagtatgtagttttgtttgttggactctgttacaatagatcgtcaatgtaaatttgaactgaagttgtgtaattaaataagttgcctgatcttcggtttccccgtgaaataattcataattctatgaatcatttttttttggttaccgaatcatatgattttgcatgattgtaatttgtaacttttaaaatatttgtatctggacag

SEQ ID NO: 31278 - DNA, 703 bp, Medicago truncatula
  Intron number 1 from transcript Medtr5g018870.1 (locus Med tr5g018870) derived from phytozome v7.0 (chr-ID MtChr5; po s 6972703 to 6973405 reverse strand)
cgtagctgctgcgaagaaggagaaatttgaaagttcgtctcattctcttctctttccctcagttgttccattttctttgaatctcatcttctttatggtattcaatttttctgtttagaattgaaatcacttttttcatatcacagtgttgttactgaaatggatgaagtttcgatctttatcatgatttattttctgggtttgttgagaaaatttatttggattttaggaacatgtgtaatttgatttatgatattaggttttatcagtttatatttgatatcgatgtttagatcccttaatttagagcttgattaagctttttaaataagtcgatacaaacatggttttaggggccgtttggattggtttattttttagctcatgcaaaataacctatgcaaataaataagttcttatttattattcataagattgtcaaagtttatgaaaaacagcttatgaagatacaatttttgtaacataaaagcttatttatttgtataagctattttccataaagctaaaaaaataagtcaattcaaatgggtccttagttttggtgtatttgaacattggttttatgattcatagttgaacttgaatgttcagatcctttatacagaaaaagataatttttttaatttgtatttttgtgaatgtgacaggcgagaggtttgaagaagcatttgaagaggctcaa

SEQ ID NO: 31279 - DNA, 716 bp, Medicago truncatula
  Intron number 1 from transcript Medtr7g083980.1 (locus Med tr7g083980) derived from phytozome v7.0 (chr-ID MtChr7; po s 18074900 to 18075615)
tgggggaggggagcagaagttggcttaagccatttgtggttttttttcttcctaacattgaaacattgttattacgtgaggctgtttgaaaaatgctgcttatgttgtttgatgaaatgcaccaaagttactgtgggtgatatactttcagttccattctctgtctttttgcatactttcaacgatttctttttgcaccaaagccatttcttttttcatactttcaacgatttgaacatgggagtctggatttcaagcttatgtggagccacacgtgatcatttggaatttattctgtaaggccattgttggagtttggataagagaagaatgctgaaaaggctcttcaaactctgcagatgttgcaatgtaaatctggaaagggaatgatatactgtgtctggtttgtcttcatgagagctactcattattgtgttcatgttgctgctgcatagaaaaattgttgcaagtggcctttggatgtagttggatatattttaattcttttgtttcgagttgggtacaaattgtgatactgccatgtacatattgtaaaaacattgcacctgttttcgtgaaatactagtttatgctatttggtttcttcaggtaatattggttatatatgtgaaattaaggtaactttttaaacttagttgcttactatattatttccaaggtctcttttatcagacattatacaataacaacacctc

SEQ ID NO: 31280 - DNA, 920 bp, Medicago truncatula
  Intron number 1 from transcript Medtr4g078780.1 (locus Med tr4g078780) derived from phytozome v7.0 (chr-ID MtChr4; po s 15497849 to 15498768 reverse strand)
ctgacattatcgatccatctttctccataaatcaggttcacttttcaatcagatcttcttgatcccaataattaaccgcttcttacatattaacacatcaatttgttgcaaattttaatatagtcatttttaattcatgtgtttagtttttacaattcactgtggtaatttaatttatattattctatgcttctcgttttttcattttatgaatttgcactgtccagtataacgtatttatttgtatcgtgcaccagatatgacactgacacgttgatatgactgttcataccggtagtaatttggacatacatacattcaatccgaagtatccatgttacattgtttagtagcaagatttttaaattgaatttggtgaatgcaatcgtgatttgtgtcccaatgtcaaggcttttggaatctttgtgatttgttgggattacatttgctgctgcatcaacagattctgtatgcaattttcggtattatcaaaccttgtttagtggttaggatagtgtaatgttgtagtttaaaaacatgttttgtttaattaggggtatgcttggtttggcttatttgagttcacttattggcataagcacttgtgtgagactgatttcaaaaacttaagaaaacagcttatgacatgatcataagctatttttataagttttcaaagatagcttatggaaacagcttatgtcttctacaaaaataatttaactttattttatattttgttatagaattagattatacataagcacttatcatgataagcgcttatattataagctggcctagatagatttgacttataaaatatttaatttggcattgatttttgtaacttgtagctgaaaatttcattttttttgttcgcgctactattcagagaaactgaattgccttcggtttat

SEQ ID NO: 31281 - DNA, 481 bp, Medicago truncatula
  Intron number 1 from transcript Medtr6g013320.1 (locus Med tr6g013320) derived from phytozome v7.0 (chr-ID MtChr6; po s 2792170 to 2792650 reverse strand)
ccaggtattcttgtttttatttctcgtaaaatttgagttaagcctaactcaacctaaaaagaactggcatgtgtgcagatttgaaagcctatcacactatcttcttaacaaagtttacaccattcgagtggtgagtggtgtaggtcatatgtttaaattctataaaatgttagcaagattaaactcaaagtacaaattttataataataataatgataatatttatatttacttaagtagacttaatagacttttccgatggcttgcttgcatcctaagctaaataggtttctaaaaaaccattggtcttgtctatataaaacaaagtctggcctaagcctattgttctctagaccatagacctttgtctgtcggtctgacctattttcatttctaatcataacatagcgtcaaaagcatgaatccatcctaaaatgacagtgagagttttgattatttttgtgatacatcgatgctagga

SEQ ID NO: 31282 - DNA, 346 bp, Medicago truncatula
  Intron number 2 from transcript Medtr5g085170.1 (locus Med tr5g085170) derived from phytozome v7.0 (chr-ID MtChr5; po s 32522178 to 32522523)
tggtggtttgtccattcgacaacttttgaactctggttggtgcccgcagacaatcattcttcatcttttttttttccaacatggttttgcactcgtactcgatttttcttagttgttttcgtattgaatgcttgtttgttaggatttattagagaaggctccatttatgtttctttattactctgtattacctgtttgagtttacctacacttttgtatggacttactagatcaggtcttatgcttcaatctctgtatttctttattttttaatcaactcatggaaaataaagtaaataaatttgtacaacctcttctattgtcgtagtagattttatagcgtgtt

SEQ ID NO: 31283 - DNA, 725 bp, Medicago truncatula
  Intron number 3 from transcript Medtr5g023820.1 (locus Med tr5g023820) derived from phytozome v7.0 (chr-ID MtChr5; po s 9400371 to 9401095 reverse strand)
ggaggattatttcaagaatcgcattaaagaagcaggttggtcaagaactgctctagagggccttagctttcctaccttatcttatctttggagcaaagtagcaatttaactaaggtgtatttggaagagaaaattagtgaagtggctgccttgtcataggggaataaacttattggtctggtggttataatgtttcgtttttttaaagaattttggggggtttaaaaagtggatgttaaaattatctacttcataaaggttcttagttccactcaaatttgaatcatctagagcacttcttgtcttatttcactgctttgatttcaaaggttcttagttctcattctttgggagaatttctccttatttctttgtttgggagtctttatgagttgtttttttttctttctaaaagactagtggtaataattgattcacttggttcaaacaatcacttgttaggtgaaatgggttgatatttttaagtagaaaaatgtggttgtttgagcgtgaaggattttaagtttatttagcagtgctcttttatcgaagtatacatggtatctattaatggaaggggagtctcaatgggaaagggtgttagtagcaaaatatgataatggtgtggtctctaactcagtaatttcaacaactattaaagataacatgactaatttcgtgtggtggagagatgtttgtggtttaggtggtgttccgaggtgaga

SEQ ID NO: 31284 - DNA, 865 bp, Medicago truncatula
  Intron number 1 from transcript Medtr5g077350.1 (locus Med tr5g077350) derived from phytozome v7.0 (chr-ID MtChr5; po s 28501494 to 28502358)
agaagactttgtagcttgactttgtgaaagaacatgtgagtttattatattttctctttttgattaatttgttacaataattgttaatatattttcatatttattctagttttttttatgtatatatttttttataatttttgtataattattaattatttttattattaaaatcatttagatttttttcataatttgatcatgtatgatgagtgtgatagagatgagtttgataggatgaattttatgcatgaaaatgttgtatgttccaagaattttttctatagtttgttaattattatgttgtttgtacatcgtaatttgaattttggttagatctacagcatgtggataattatttggtcctagattgagtgcggtttgtcttattagcatgagagagacacaatgataacaaacatatataccctttttcaattataatttttttcttctgataattcatttggatatctctcatatctgcaaatttcaatattaggttatggttgataaaagtttttttttttttttttttgagagatggttggtaaaagattttaaatatgtgttaggttttcccttttcatatgttgttgcatcaacaaaacaagatccaatttatggaagatatttttttcacatttaacacatccttctgttgttagtaccttttttggaagggattgattagttgtggattagtatgaaattagtttattgttagaaggatgttaaagtaaaattagtttaagattaagattggttagttataggaaagtttctgttgagtttgacttaattctgtgttgttgtcgtgggccctgcagaaaattcagggacggccttaaagtttagagggagt

SEQ ID NO: 31285 - DNA, 932 bp, Medicago truncatula
  Intron number 2 from transcript Medtr5g077350.1 (locus Med tr5g077350) derived from phytozome v7.0 (chr-ID MtChr5; po s 28502751 to 28503682)
tccttctcctttcgagagatctttcactgcagtcagtcctatctgcagccaagttggagatggcatggatacaaactagatatcgagattcatataactgaaggagaccttttatcatttccctagtttttattttattttgctttttccatctaatgagtatccatgacagaacttgaacaattatgaatcgccgattggtggacaatgatgtgtccccattcgccataggacgtctttatgtttctagtaataatgtaatgcggtatttaaagtagcttgactgttgaatggagactttgagctggctgtgtgtacacacagttatgagacttgaattgaattcagtttctttataacttactgagaatctgactggtatatttagcttaccacaggatatatttaggccttcttctatcatgctttaatttaattcggatctcgttgatgtaaatattagcaatgtttatcatgtatctgtaatcacagagtgaccatattctagtattagtctggtgtactcttgtattcttccaattttgttttctatggtgctgttcgaacacaaaacaagtattattcctgtgctgataactcaggttctatccagttcttcgtttgcaagtttttggaatcttaggaagactggtttactaactcttcctctgttacaggctcatgggagatgatactaattctagttcgaacttgtcttcatcgaatttctgttattttttgtggtttgaatttgattgactgttgtctgtgtgagttgaatgtaaattgtgcaggttttgaagcatatgtgctaggaaggagccttctaaacatttgtgtttcaatactgaatgatttcttatgatatatatttttcctatattttatgacatgtaatattgataaatgtttcattttattgatgtaggtac

SEQ ID NO: 31286 - DNA, 1049 bp, Medicago truncatula
  Intron number 2 from transcript Medtr5g087280.1 (locus Med tr5g087280) derived from phytozome v7.0 (chr-ID MtChr5; po s 33676685 to 33677733)
gagaaaggtcaaagatattcaagagtttactcaaggtgagtgtattttagttttaatcttagtttgttgttgtttttggttgagtttgtgttagttgagatatgtattattgagtaagaaggtgtgtccaatgttcgaacaaccgacacgacacggacaccggtggttgcattcaattattatgtatcaagttattattggtgtcagtatcgtttgcgtctgtttcaatgtagcattgataggatactaatgttggaaaattgacacagaattaattaaataaatagaaataataatcaagaaatatagcagcaattatagatataatcctcagtaaaataaagaagaaagaaaagcttattgggctgaggcgtgcaattgcactgggcttaagagcatttcgccaccacaggtcaatgacctgatgcagttggcctcaaagctagtgctctccaggatacaacagccacttttcactaacactgcacgtgaaccagcaagggcacaggaaccactattggatgctcatgggaacttaattgttatttggtattagtgactaagtgatggaagaatcaattatacttcagtactatatcactgtattttttgtaagcaacataacaaaaggtaaagataatttgtttttcgtccttttcaggaaaactcatctcccatatatatagccaattaaaatataataacgttgcaaaactgtatgccctattagtgtgcagctaaataacttggtcaaaagaaaacggtttagaataataataatttaataattaactttaaaataaattccaaataaaatacaacaactaacacaggtggttacattcaatcactttcatttgagtcagtgttattcacacgacatggacccatgtggctatattcaatcacttctacttttataaaattatcactggtgtcggttttgttcgtgttagtgtagtgtctggtgtttgacaatgaaagtactaactttttgatgtggtggtgttgttgttttgcttgcattgcagtgcctcaggcatttagga

SEQ ID NO: 31287 - DNA, 670 bp, Medicago truncatula
  Intron number 2 from transcript Medtr5g013760.1 (locus Med tr5g013760) derived from phytozome v7.0 (chr-ID MtChr5; po s 4217329 to 4217998)
cttctttccaccacttgggtttattttttgagaaggtatatgtttctatcatttttatttagaaattaggaattgacattctcaacaatggaaacttcctttgaacagttatagtttagttatataatgacagcatgtatgaaggtagatagtaattttaaaaactgtgtggtttgttttgttctctatttgttgatattgatatgtttctttgcattttaaagaacttatgtttgaagcatttgacatgaagtgatttgattgattttttatttgtatgccatgacttgctagcaagattataaaaactatagtattggtttgattgatttagaatttgaaattgtctcaactccttttgcattcttcattgcctaaatgtgtgtttaagtaattgttttgttcacatgtctaaattgagcaagtaatttttatatgtaaaatatggccaattaattgattttagaacaagtagcagcaggtctcttactagaaccaggcaggggtgcaaaagttgctatagtataatttagcttcatgtaatgattaagaatggtaattgaaatgatgaccatgctattatacattttaaaaatataaaatctaaattgcagctaagttttctaatgtcacgtacagtcgaagagagtctgagcagcttgaagttaca

SEQ ID NO: 31288 - DNA, 533 bp, Medicago truncatula; identical to SEQ ID NO: 31031
  Intron number 1 from transcript Medtr4g032570.1 (locus Med tr4g032570) derived from phytozome v7.0 (chr-ID MtChr4; po s 7869896 to 7870428 reverse strand)

SEQ ID NO: 31289 - DNA, 532 bp, Medicago truncatula
  Intron number 2 from transcript Medtr5g025600.1 (locus Med tr5g025600) derived from phytozome v7.0 (chr-ID MtChr5; po s 10242458 to 10242989)
ccccaggtatgattcttaattttcaatactagctctttagttaattgattataatatatatatatatatatatatatatatatatatatatatatatatatatatatatatatatatatatatatatatatatatatctttgctattgttatgaaaaattttatgctactttaggcttttgagttggctcaagttactttagttgttggtgtctttaaaactaattcatactcccccggtcacatttataagcaaaatattgcatttttagattcattgaataatttatgcatctgactatattaaccatgtatcatcatgttttttgtcctcaataacattatcaaaaataacttttcatttgtactttgacttgttgtctactatatttgaaacttgttatttttgtagtttatttaaacctattcaactgatacattgcatgtttgaaagtttttcttcttttttgtctaactaaagtgatatgcatgaaggccactaaactaactactctgctttataccagggccgt

SEQ ID NO: 31290 - DNA, 522 bp, Medicago truncatula
  Intron number 1 from transcript Medtr5g012260.1 (locus Med tr5g012260) derived from phytozome v7.0 (chr-ID MtChr5; po s 3455488 to 3456009)
caccgatcccaaggaccattgcattcgtgatttctgttagtgtatttttttttgttctttttttttcattttggttagggtttttcgtgtttcctaattctatgtgacgatcgttcacggtctttttggttggtggttttttagttgatataatttttataaatcaaaagaataagttaattttgcaaagataaaaaattatggaaattaacatgaaactggtcacgtgcataaaaaacaaaatataattttaaaatttgaattaatattaaatagttaaattagttgtaaaaaatgttaaaataaaattagaaattagagaaaattgtttaaatataatcaaaattgatatgagtatttttgaaaaaaaaaaaattaatggaacataaataatacaaatcagttgaactttttggatagataaaaaaaataaaaatttacaaagaactctcttccagagaacttctaatttcttttagaagagttggatgattgtttataacacctgtgtacagtttacca

SEQ ID NO: 31291 - DNA, 349 bp, Medicago truncatula
  Intron number 1 from transcript Medtr4g155810.1 (locus Med tr4g155810) derived from phytozome v7.0 (chr-ID MtChr4; po s 38513518 to 38513866)
agtgtgagtcactcaattattttgattaccatctcatttctatttctaatgaaattgatgctagaattacttatgtttgaaactatatatatggttggatcaatccattctcatgttttccagtttctatatctaacactaaagatgttcaactcaacctacctttttcttttatagatcacttgagccaaacatcttctcaggatccctccaatttgtgcaacatatttggtctttttatgctctaattttgtgcaacattgtctgtatttattttattcctttttccattaattcaattgctatattttcaggatccctccaagaacggtgttttggcgatccaaac

SEQ ID NO: 31292 - DNA, 735 bp, Medicago truncatula
  Intron number 5 from transcript Medtr5g094820.1 (locus Med tr5g094820) derived from phytozome v7.0 (chr-ID MtChr5; po s 37561042 to 37561776 reverse strand)
ctgggtctccagaggtaacctattatgccatatttcttttcggaagttatctttatgagcagtttaatattacaaaactagcaggccaatttgctggaagttaaagataatgcatatatgctgctgacttaaggaataggcaccaacttaaagtgataaaccaaaaaattgaataacccatcaggtcattgcagaaaaagaagctttgagaattgagaagtagttttatgtttttgaactcaattgacgctatatattttgaaaatacaatatttgatttctaagaatatgactttaatcttcaatgtgttaagatgatgcctaataaatttggattatttccacaccaccttaaacacacaccaaactaaacaaacaaagaaacaaagatcccttcaatgtgtaagttttttatttggtgtgatttaagccatgttagctcagaatgattcagttctattggaatgactgaacacgcatcattccttcaatttttatatcacttcctgcttattccacttgtgtttctatttttagatgttgaaaaagattttaccatcataaatgttaatttaagggtactcatactcattctgcttgtgttgatttggagtggagtatcataaagttgaacctttcaattattaagaaaagagattctattacaactacattgtttaaaatactctttatatttgatattaattttcttattttttgtgtttgaaggtagag

SEQ ID NO: 31293 - DNA, 588 bp, Medicago truncatula
  Intron number 2 from transcript Medtr5g006410.1 (locus Med tr5g006410) derived from phytozome v7.0 (chr-ID MtChr5; po s 686866 to 687453)
ctcggtttcatcatcatttctcaacacaacacaaggtcattcttttcttcttagtttccaatacattactatctattaatcaattaatttcgagtttatttgccactaatattacatcaattatatcattagctgtttaagttcctcatttcacacacactgcttaaacggtgtgttatcatctaccacgacacgactaatcataattcatccctcacccacccagtattattatcataattcttcattaaattaatccttacatatttgttttaggcactcatatttcatataataagttatctactattttctcctttttctgatcatctatttgttttttcgttttgattaaggtgatgctaagaaaatattgatataaaccatttcttttttgctgaatttgattgaattttttgtgttttgataacctttgatttccatttgccaagaaaaaagagtagcttttttgtttttctatatatgttgagaaatgtttcgaattcctttggttgtgttgggagattttagcttttgattgttatgcttatagattttcttgtttctccgttttttgcagttagtgag

SEQ ID NO: 31294 - DNA, 1051 bp, Medicago truncatula
  Intron number 2 from transcript Medtr7g047710.1 (locus Med tr7g047710) derived from phytozome v7.0 (chr-ID MtChr7; po s 12038365 to 12039415)
ctttctcccactacgatcgcgttctcagaaaaattgtaatctctctctctctctctctacatttgcattatgcatcattgttgtctttgtttgtgtgtatgtttatgtttttttatttttcaattttgggaatttgggtatcttctgttttcattaaaatgttcaatttttgttgtttttgttgttgttagccgggacacttctaatggaaaggggtatcgatactgacactgtcaccaacacatgtgattacattgaatcatgtcatttgctcaaattatttatcggtgtctatgtcagtgtatgtgctcggtcaggtatctatgtatgtgtttgtgcttcataagtttgaattgcctggcttggaacatgttgaaagacattttgattaattaagaaaaagtttattagttgtaatttaattgaatccaattataactacaattactatgagtattactttaataactgtaaatacccgatagttcaaattttgaccctgagttaggtaaagtttgaccgatgattgtttcagttagaaattgaatatggtactcccattatatattttttatatggtttttggctctggtgttgtatgctgttgtatttctttattagtgaaactaatactttagttactgaatgttaaatacaaaacagaccaaatatttgcatcacagtgtgattcaaatgaatacttgtgcctttaaggacagtagtgcaaaatgggactatggagcaattcttgtatggcataatcatatcgacaaaggcagaagaaatttaattttcataattaatcaccagaaagtataaataagttttacttatactttcaatcatataaatattgtacatctgtgaaatatgattggacgtactgatagtgtattgttataaacttgtattactttctagtcaattgtttaacagactattctgcattttgtgtctaacatatttatatttcttggtggatggtatttgacaatcttcttgtgtatctgtggtagggctgtaacttggctgctcaaagagataataataa

SEQ ID NO: 31295 - DNA, 893 bp, Medicago truncatula
  Intron number 1 from transcript Medtr5g021620.1 (locus Med tr5g021620) derived from phytozome v7.0 (chr-ID MtChr5; po s 8293552 to 8294444)
agtagtagggtcttgttctagtgttttagaatatttgcttatttttagatgtttttgtgacattttcgggagattttgatgtaatatatttcattcgcgcttttgcacactttttttgacattttgattagtttattggtttttaattttgcgtaatttttggttttattatgcgtatgttaattactaatgattgaatgattatgaatgtttgaataaatgatgaaaatgatagaatggatgtatgaaggaatgaagaaaattagaaaaaattgagtttctgctgttctgttattttgcacagacacaacgtgagttaacctacgcatgtgttaattccagcctaagataagtcactcaagtgattaacacatgcgcgagtcaactcacgcatggttatacacatgcgtgatttcactcacgctggaagcattttcggaagtgcagatgggagtgagcaaaatgtgatggaagaagagcatttttctaataagcaattcaaccattctatgaagaccaagaatgggaatggatctttaaaaaaaaatgggaatggagtcttattcatggaccaatatttattttatttgtatcaattctttttatgaaggaaattgagtcattttagaatataatggttctgaaggtgcaggtcaaaatgatttagtaatatttgatttgatatgatgagatgcatgtttggttaatgcatatttttttatgaattctttgaaacaaaagaagtttgaataagttgtttagaaggtttctaaatccactttttgaaagtatgtctcacaacgaaaaagtatttacacgttagcttttaaaaaaaaacgttcattgtgatttagatatggatttatattcttgtaggttgggcggagcaagat

SEQ ID NO: 31296 - DNA, 365 bp, Medicago truncatula
  Intron number 2 from transcript Medtr5g015490.3 (locus Med tr5g015490) derived from phytozome v7.0 (chr-ID MtChr5; po s 5165152 to 5165516)
tccgatccattcaatttcttctttaattttcccaggtcagtattcatcattttttcttcaatatttaaaaaaaaaaactcaaaatttgtaaattttaagctgaaaatcaaatttccaagagaaaaaaaaacaaaatttgttaatgttggtggttgattctttaaaatcaagattcaattttattttttttaaatggcaaatcaagaatcattttttttttttttttgtagcaaggcttgatctaattgcattgccattgaaacaatacaattcataatttgtttcacctaatttgatgatttttcacaattttgttaccttttcctgcagacaaataatctgagctgtggttgctggagattcct

SEQ ID NO: 31297 - DNA, 551 bp, Medicago truncatula
  Intron number 3 from transcript Medtr5g015490.3 (locus Med tr5g015490) derived from phytozome v7.0 (chr-ID MtChr5; po s 5165590 to 5166140)
tttggtaatcaagatgagattttttaaatgtttctattgtagtttattttgattttgtttataattagacttaacttttgtcctcaatttcacacattgttgcaattttttgtcccaatacaccaaaaattgttatttttgtcccaaaaaatggtgatttttggccccaaaagttataacttttaacgccctatttagattcataattggatagaaattagaggaagaacaaggcctagaaaaactgtaagagaaactattgaaaaagatttagagtttaatgagttggatagaaatatatggtatatgatagaatattatggcgttgttttaatccatgtagccgatcccacttagtgggataagtcctggttgttgttgtttagattcaaaattatggctaaaaatcacaattttttgagtaaaaatatctgagtttagaccaaaattgcaacagtataggaacggggggtcaaaagtggatttaagtcttataattattgaagaatgacgtttgtaggtcaataaagtcagacattttgtggatagac

SEQ ID NO: 31298 - DNA, 1038 bp, Medicago truncatula
  Intron number 2 from transcript Medtr5g085330.1 (locus Med tr5g085330) derived from phytozome v7.0 (chr-ID MtChr5; po s 32593844 to 32594881)
catctgcattcgggccgtttttccaccttggacaggtaaatatttttaggttacttcatctttgctcattaatgtgctcatatttgatgttgttccccccttgcttgtaaatacgttcgctaaattgatggctattatctgaaataagctttataggaattttagtggttttcttgattaccatactttgttttgtggatatcgggtatgtaggacgacaacctctgcatgttctgatgagcaaaatttgaaattaaaaatgaagccctatgggaaatgatatggtggatgaatgttaaggaacattaagttacatcatggcacttcgtagttacatgattcaagactatgtcatgccaaaacaggccctactcaatgggaataaggcttattgatgttcaaatactatgttattactcaattattcatattcatattctattaataagactgggtttgtactggcagtactagtgcctgacctgatttcaagtataaataggaatattagtttatgctattgtattacattgaaaccaatcaatcacatattcattaccattatccatttttctcccatttattggtcacttacttcgcattcgaaccctgcaagttcagcagttttcactaaggtctcttgtgaatgtgtgggaattgggatataacacaacatttgattgttaaccacagaaataaatgttcgaagatatgaaagttgtttggggtaaaatcataactgtaagcacttccaattagccataacaagaaacctaaattaaataaccttgggagttatgtatccagataagattagtgcattacaaagtgttatactatcttttctctagttttccaattgtgaacaaccgactttgcatgctcatgtgtgattgaatgacatttatccctcgttaaattcttgtattacttcatttcaccgagtaaaagtgaataatttcatatactcatttttttggatcattcaaattatgaattgcagatacaacaagtcatacaacgattgtttccatttgg

SEQ ID NO: 31299 - DNA, 544 bp, Medicago truncatula
  Intron number 1 from transcript Medtr5g048300.1 (locus Med tr5g048300) derived from phytozome v7.0 (chr-ID MtChr5; po s 20415848 to 20416391)
ttgctgctattgagcttcctgatcaaaatcacaaggtgtgtcactctatgaactcattagtttaactgtgattatactttttaatctcttaattaccacttgactaacatgcattataatctttgaatgtatttaaatcataaacacattttgattctctaatgtgttttgttagtcaaccagtccataaaattacaaacaaacgagagatttgaagatgtatttgtaatttggattcactaactataacggccattggttgttacttaaactacaattttgtttttcaaaccggaatatatagaaaaatgttatttgaacaatcatttttttataacttataaaacaactaaagatatgcaaggcgatgtgattttttaataattttttgtttgctttggtttttatgtctatacccaaattatcttatatatttttagttgttacaaaagttgttccaaaatagtttttcaaataacaggtctcaatatacagagtcggttttaattttaatatttggtccattttttcagctcttgggaaa

SEQ ID NO: 31300 - DNA, 608 bp, Medicago truncatula
  Intron number 2 from transcript Medtr5g020880.1 (locus Med tr5g020880) derived from phytozome v7.0 (chr-ID MtChr5; po s 7898949 to 7899556)
aataggtgggatgaacccaatacatcttgcactataatgtgactttttaagcgataattatggtagacatcttcttgagtggtattatgttttctttcaaataaaatgagagaattttggttttggttattgtaatttccttgattttcattgattaaaatttaaaatcacttttttcctttggcattcattttaggaatcaattaaaaaaaattagttgagttgataatggagttgtattctaacatggaaccacatattagtgggatagaacatccagcacatatgacagtagtgtgtcgtactcaaaatcgagtgtattatgtgcttacagtataaaaaaaatgacttagttttctctttggtaccatattactttacactatttatcctaagtggtgggaaagcagaccaagtatatagatcatgcgctaagcatattcaaggtgttgtaactagatcagtattaaacttaaattctttgggcttaatccgagatataatgactattttatgacagtctacaatcccgcaagaaatggttgaatcaagtatattgaactttttgtttatgttttagaactaatgtagtagtgttctactcggtt

SEQ ID NO: 31301 - DNA, 192 bp, Medicago truncatula
  Intron number 2 from transcript Medtr5g032450.1 (locus Med tr5g032450) derived from phytozome v7.0 (chr-ID MtChr5; po s 13146989 to 13147180)
cctatgtaagtataatttaattattattttacttatttaatgttagaattaaaattttatgttagcatatatttaatgtttgatttacttattatttatttaacggtgttgtttgttgttttttgtttttgtatttcagtttcgaagaaaacataaggtgaaagatatctcgcacgggaagaagctgagcct

SEQ ID NO: 31302 - DNA, 725 bp, Medicago truncatula
  Intron number 2 from transcript Medtr4g095430.1 (locus Med tr4g095430) derived from phytozome v7.0 (chr-ID MtChr4; po s 19847096 to 19847820)
gggttatatgctataacatgcttcattcttttacgtgaactgctatgataatttctgttttgattaactcttttgagataccttgttggggcctgcgtgccgaattgatttatgacttatgaactaatattccgctgctatgttaagatattatgtggaagttaaattattatttaactgtttttggattacgtttctatgtgatatcccgtttatggtttttactctgataaatgtttaagaaatttgtatattggaaaaacggggtgttacaacgaccgacggtagacggaaaactgatgatgacgatgtgggagttttgttttgaagtggaatgaagaagaagaagaaaagggttcaacacgtgttttctctgattctctcacatgttttttcctttcagctttatttgatttttttaaaaaaaggtgtgccacatgacattaccctaattgagcaatgttatataacattaaaagcccaatgatacacaaatgagatctgagttgtagttgttgaagtggttaatggagttgcagccatgaatttagaaattggagttggaactaattgtatgtttaaatttgattacgagtaatgtgttagatatatatgattcgtatgtgtgccgaatatgattatgaatttatgatgcatttttaattgttgaaattgaaatagatattgtcctttcgattagtttagtctaatagtttcaagagctt

SEQ ID NO: 31303 - DNA, 891 bp, Medicago truncatula
  Intron number 1 from transcript Medtr7g009360.1 (locus Med tr7g009360) derived from phytozome v7.0 (chr-ID MtChr7; po s 1638152 to 1639042)
tccttcccattagtcctcgtttctcttccatcgttagtttctctctctaatttccatttatcattttttatagatatgtttatatagattatagagcatatgttttgcattgatatgcgctttcttttgttttcaataagcctaatagtaaaactaacataaattgttgcgcaattacaacttgatgttaaaagattgtagaaatatttgatatagtagtgaggcatggtttcaaacttgtaattcccacttcaatataccatggcatggtttcgaacttataattcccacttcttggtatttaatgtgagtttcaacgataaaaacttgcatgtgcgcgagcacactaagttctccaacttatatgagttatacttacaagaatcatgtaatttatcgacaaattataaaaatttcagagaaaagttattaatgaaaaaaaatgtctataattcgctcatttcaaacatctatatacgaaattggatacatatttaaatatttttctgtttctatatatttgtcactttcaaatttcttagtagattttttttaggaaagaggaaattttgtcggtagttgtatttttattgcatccatttttctaatactgaacttagcatccaaatcggtgagatctttgagtcatttttcataatgctttaaaccacttgaatgaaaagaaaatgaaatctaaatattgctcaaaccgaaccacaaaccgtttcggttcacacatcaaacggttgaaatgtccgattcggtttagttttttaaatatcgatcacatcttattttactcttgttaaaatatattaaacaccatcatttatatggttttttttcttgactagcattgttcaaatatgtgtgaacaggtacaagataaaa

SEQ ID NO: 31304 - DNA, 857 bp, Medicago truncatula
  Intron number 1 from transcript Medtr5g106510.1 (locus Med tr5g106510) derived from phytozome v7.0 (chr-ID MtChr5; po s 42838450 to 42839306)
agactcagagctacgccaccagatcaaccattgcggtacaccaccaaatcaaccattgtggttacattccacttaagtagcataacaatggtcaattaatttaattaataattttatctactttcaaataaaaaataattcaacatcttttaaataatatttcaaatattgacttatttgtttcaaacagatagaattcattagatcactatgacatatttttatcaaacatgcactcatttgatatcaaacactacttgcattgacatgataaaagtatcaaactaattgcataagatattttttatggttaggttaaaatatcatactaattgcatttgtatgataaaagtagggtatgtttctttgaaacgaatttggtgatagaatgttcgattgctcatgcataaaaaaattcaaattacactacttgcattgacatgataaaaagtgtggtaaatttctaacaaattaatagaatgttcatgcataaaaaattcaaaattactctatagaatttagtgatgaccgcaatatgtaatgcaacatctgtaacgatcgaaatcgagacaatcttaacgcgaccgcgatcgaaacagcggccattgtttaataccttgaatctaaagtaatttttatgatactagctagacaaacaaaaaaagtttcagattttttttaaataatcttttaaaaaatcccaaaattgttttatttgaatggaaacgtatgataaattcattagtaaaaatagatcattgtctgtggattgataaaaaagaaaataaataaataaatacacttatttgaagaaagacgcagaaaacctcggaagatcaatctccaacgaaatttcc

SEQ ID NO: 31305 - DNA, 221 bp, Medicago truncatula
  Intron number 1 from transcript Medtr5g032640.1 (locus Med tr5g032640) derived from phytozome v7.0 (chr-ID MtChr5; po s 13248848 to 13249068)
acaaagggagagaaagcagagccattttcaactgtgtaatttgaacatgtgtttgaattgtgtaattttgtgtttttatgtaattgatgaagagagtttgtgttgttttaatgtgttgatgaagagtgggtcttgttgttgttgattgatgattattagttttgtttaaaaaaaatctgtttgttttttctttcttttcctgggtttggtgttgatgagtt

SEQ ID NO: 31306 - DNA, 584 bp, Medicago truncatula
  Intron number 2 from transcript Medtr5g038520.1 (locus Med tr5g038520) derived from phytozome v7.0 (chr-ID MtChr5; po s 16273725 to 16274308)
attgtcctcgtattacttatcctttgcatgcatgttttatataaattatagtttttctttgaatatctatgcgtaatatttcatgtcattattgggaatgttcttcaatcctgatttgaatagattagctcatggcttatacgtctagagttgttttttgaaatacttcgatggtgaaagaagccttattggttctctgcctcgatgcatggacaccccatcacgacttgggcattctacttaacatgcttatcagtggtggaacagttggatatgcttcctaccctgtagcgtaggttcaatctattgaggacatagtacctttgcttgattttctttgaggagaataaactagcacgagggtaatctccattgtttttatgcccccgttgtcttgagctttagataagtatctgaatattttttaagtataaaggaaacaaagttgtggcaacattatatttttgttttttttgagggacaacagtattatattttgttaaccaaatagtttcttctaatatttctttaaattagtcactatgtaatatttcttaatcatattagattttcctcaactataa

SEQ ID NO: 31307 - DNA, 830 bp, Medicago truncatula
  Intron number 1 from transcript Medtr7g081140.1 (locus Med tr7g081140) derived from phytozome v7.0 (chr-ID MtChr7; po s 17485348 to 17486177)
ttacactgttaataccactgttagatctaatccaggtatccctttttgaaagtaacaaaaacaactataaactacatcaattcattgttaaattacatttttatatccactgttacatttttaattaaaaagaaatgaaaaaaaatcaatttcatttaaattacattattaatttttcttattttaaagtatctctattgaattaagctgtacttcatatttttaaattaactcttctgctagaaaaagttaacaaaatataaaaatagaaaaaattgtcactatttttttttagctaacaatttaaaagaccaaacttagaaaccaatttttttttttttttttgtctctaatttcctttgataacacaactttccctcttcaaatatcgattcgtaacttattataacttaatatacacgtctatctatttttctcgataaaaataatggaagaaatacaactttattcaatcatctaaaaaagagtagttatttgattgggtagagagagcaagattagttattcgattttttttaagctaaaaattttgtgagaccaaaatttggtatctcctttatatataattagcgaaaagatggacactcttcgatggttaaaatttacattgcttcaaccaaattatgtggtctcatgaatttaatgggatgtgaatttttgggttagaaagtgtgtgtcaatctcttacttaactagaaaccaaattatatgtcatttttgtttgtttttactattattattttcttcatcatgtaatgatattgatacatatgtgaccaaaattatgtaaacagcaggccaaaagaaag

SEQ ID NO: 31308 - DNA, 858 bp, Medicago truncatula
  Intron number 1 from transcript Medtr7g026130.1 (locus Med tr7g026130) derived from phytozome v7.0 (chr-ID MtChr7; po s 6630871 to 6631728)
gaattctcaaggcctcaactcttccctcttaactggtttttaaacaactccctctaattattattattatttagtcaaactgagtagtatgtgttagatctaatcaaaaactgtatatgtgtaagaaagaagcaaatcaatgaccctgtgaactcaaaatttcaattgaaacgacttaaatcgatgttgatttttctatgtcagggttatataaacaaaccaagtattatagttttgattatatgaccccaacaaggaaaaaacctaaacgaatcgatttaaaattttgaagtttagatttttagggctaaaatttgatctatactcgttcgtatatcgatttggtgttatttaagattcgtcacttgagatccgatcgagcaattatattttaatataattgattttactttttacaatatttgcagcgttctattgaagaaaaaaatattgtgtttaaatatatttttgataattatataccttagtatttctattgtagtttctgtcattgttttaatgtatacactaaggattataaaccaaagcaagagatgaagataacttatccaattgttttatagaaatattatgatactccattgttcatattgtagtttacaaatttttcagttttgatataaacttaaaaaaaaattatgatagttcatattgtcattgttttaataattatctgatttttcaataaatttttctgttgtagtttttgtcattgttttatagaaatatcataatactccctagtttatacaatataatgaacatctattagtaaattttagaatttgtaaacttagcatgttcgattgacttataacaaatattgtttaggtggag

SEQ ID NO: 31309 - DNA, 918 bp, Medicago truncatula
  Intron number 2 from transcript Medtr4g067020.2 (locus Med tr4g067020) derived from phytozome v7.0 (chr-ID MtChr4; po s 12896876 to 12897793)
gaaatgtgagtatagccctctctcgatttctttctgtctatctaatcttttctattcctttgtactattcatgacttgttgtagttattgcatttgtacttttggctttatttgtataatcacttagttcttatgttctttcctccacccatgctgccaaaaaaattaacctgtacggaaagcatataattttgttttctacggttcaccttgcctgcatatttttggtttatattcctgaaatccgaaggaagtgtgtttgattaatgtaattgagttcattttatcattcaaatctgtatattaaggcgaaatgcgagagaatgaaaagattgtatactatatcagttaaagacctgaaattttggtccatccttgttaagttctcactacaaggctgttatcaaccttcagaacggtaaacactggctatctggctgtaatcaactctatgttctgctatcagagaaattgtgtttgattatacaaaagaccaagcactaaggactgatttatactgatattgattaaataagaaaattcagcatacaccacaatacaattcaacccaaatatttcaagatattttccatatattcttatagttaatagcagaactttcaccttttttttttatctctgtgattgtgaatgacgagagagtttttgggaatgctttacaagttatcatttctgaatcatacttccactttcatattgttaaactattaatgtctaagttattctatgctttttgcatagaactgtataacgaactgcttgacaaacttctttatggctattctataattccatggtacttatcataaaaaacatgttcttcaaaaataaaataatatttgatattttcaataatcagcaggctagcaagtttcgccatcggagaaaaaattccgt

SEQ ID NO: 31310 - DNA, 536 bp, Medicago truncatula
  Intron number 1 from transcript Medtr5g100940.1 (locus Med tr5g100940) derived from phytozome v7.0 (chr-ID MtChr5; po s 40376302 to 40376837)
gtagattataacaaatgtaatcacacctcttattaattagatatatttttaagaatatagtaattatttatagtatttttatattttaagcatagttgtactttttctcactattttatgcagagttagcatgtccctaccaactttgtctcaattttaaatatgaagataaagtactacataatatcaaaattatgaatcaaatcaaactaaaaaagtcaaataatatctaaaaaacgtatttatgtgtaaaccctgttaaaacattttaaataaaatgtatcccgtgcttggcacggggcgttacactagtacccaacaaaatgtagtctatttgtgatgaagtggagagcctttgtagaaactttatatgagaaactgcatcaaacgtgaagaaatgtcattttatctcctagaatactatatgtaaatctaaggaggagatggtggtggtctagggttctgcaatttgagaagggttaacattagttctttgtctagtggaagcctccccattgcatttccttcaataacat

SEQ ID NO: 31311 - DNA, 951 bp, Medicago truncatula
  Intron number 1 from transcript Medtr5g013970.1 (locus Med tr5g013970) derived from phytozome v7.0 (chr-ID MtChr5; po s 4331868 to 4332818)
ccccttcaatcctaattaagcagtttctgttccaggttttgtcttctgaaccaaaacgcccctagtaaacatgcataccagacatatggacggccttagctagtgcttaatgatgttggaccatgcattgatcagggtaaactcaatgttaaagcatgcacctgccagcatgagcacatatgcattgttgggcacagtgattatgactgtgcgtgccatctcttatgagttctcagatccttttcactagaatattctgaaattgactccttattgctaaaggttttctaaatgtttcaaaaatgtaatagaagcacccccggattcctgacaataacgaggcaggttgactgtttatctactgtatttcttgttactcattttcgatgacagcctcttaggttatgcgtgacaggaattgtaaatgaatattgaagagaaaaaggcagaaagaatggtgtctgtatttagaagtattaagtacacaagtccttttacaaggggcttccccttatcttactgtgaaaatatcaattttattcatttacccaaaaatgatttcctattattatttcatttatgtaattacatgtccattgttttttgttgacagattttaattacctatccttccttctacttttaactgcttaaaactgtctgactagcctcttacagtttttcttcttcttgagtatactcttcaaatcttactctctaaagtgtgtgatcatgtcgtgacattctgcttctttcttgcttattttatctttatgcaataaaatatgcagtccttttgatataaatatttccgtagagtgttttgacaagaagtaacggttttgagttatattgtttgtctttttatttttagttttttattttataatgtctttgccggattatcttcttgtaggctgttggtccagagttaaccttttataacacatc

SEQ ID NO: 31312 - DNA, 908 bp, Medicago truncatula
  Intron number 1 from transcript Medtr6g018070.1 (locus Med tr6g018070) derived from phytozome v7.0 (chr-ID MtChr6; po s 4515482 to 4516389 reverse strand)
ttgtaatcttcaggttcaaacgagccggtagaggtgtaagaatcaaatcaattatttgataattctaagaattcaatctaatcaaattaattacatttgatatttcccatgttcggttattgattttaggtcatttaaaaccgattaccagactattgctcaatttttttgttaatattttacactgaattagtagcgctatcttaaatcgactacttttatttgttcgggttaattagtccgaaacactttctattcaaccaaattttaaggcccaaaaatttggggcctaaagcccttgctttgggcttgggtcggccctgtttagaggtctgtatgcttataatactaagtgaaggtgctgttttgttatcaacatatcatgcatatttggttagaaaaattctcagaaacccagtaggtttttcttcttttctagttttctttgtagttatgacttatgagcttaatctcatatttttttgagctgtaatattcccatatttgtgtcaattaccaacttgaaatgtgaataagtttgtaccatcatatgtagttatccaccaatggactgacttatggtcaattggatcagtacaataaccttgcatcggcatagcacagcttcgttgaattggaagtctaaatgcatatggaactcaagctccataattatctatctgtcgcttggtttttctagaataatacacaaaaccatacatttttttctatcatcgttgatttgtatttgggcgggataaactgatgaatgatttttctcatcaatggatgatgtttaaaatatcaagtgtttagctgctattgtaaaaatattttgcgaataaactgacgattttttttcttccttcagagctatattgggcgggttgtactggcaaactgcctct

SEQ ID NO: 31313 - DNA, 302 bp, Medicago truncatula
  Intron number 2 from transcript Medtr5g026650.1 (locus Med tr5g026650) derived from phytozome v7.0 (chr-ID MtChr5; po s 10764860 to 10765161 reverse strand)
tgtaattaataacatagaagcgatcactcctggtatgatactgctttaggattttaggctgattttgatttaattattttttcggttattcttctataacaaatgtgtcgaaagaagtcaaagcttcatgagttctagttacattattcttagttgtgttttttcttgcttgggactttgtttaaaataacatctaataaatttcacgaggtagattccttttcttttgcataataaattgattgttatattctctcacatttataggtgaggcacttatcaacttcaggacaacaattggt

SEQ ID NO: 31314 - DNA, 835 bp, Medicago truncatula
  Intron number 2 from transcript Medtr5g049690.1 (locus Med tr5g049690) derived from phytozome v7.0 (chr-ID MtChr5; po s 21323997 to 21324831 reverse strand)
tggaagtttggtcgattgtcattctaccatcagtttgatgaatggtttgaggagacaagacctttggtttctaactgacatgtgtaaaggctattgtttgatgaatggttcgattagatcagggccattgacgtgtcgttggaagggagagttgcatatgaagggttgtataggataacgccacgcgacctttgagaggttttctgaaacgagtataaatagttcaaacgttgtttggagtattactgggtttcgttttctcataaacttagaaatttttcttccaaagttcgttttttcgacgaagcgtttttcggaccttcatctctcttttctgatcaaccatccactacaacaagtaagattctgatgatcctcctcttcatgctttatttctgttagttttctgttttagaaactgtagaaatgcatggtttttagggtagtagttactctgactcggtggattcagccgtttgttatgatggtttccaccgtgcgtcatgagttttaggatgctgtctgttttctgtatgtgtttagaagaacattggcgacatgctttagtttcttctctaagctttaagttctgcccgcctctgcccgtcaaaacgttggggaccaaaaatttaatacaatttaagttggggctaatgttggaaacacacctaattatagggaccttaaacataattaaccctttttattattattattattattattattattattattattttctttctgtttcttatcatttattattttcttattattattattattttatttattatttattttatttttctttatgcaattaagagtctgg

SEQ ID NO: 31315 - DNA, 490 bp, Medicago truncatula
  Intron number 1 from transcript Medtr5g098960.1 (locus Med tr5g098960) derived from phytozome v7.0 (chr-ID MtChr5; po s 39532234 to 39532723)
cagaaagaaaaggtataatttttgttcaattaatgtttataatttccatttccaaaccctataaaaaaaatcattgcttttgcagagttcttttctcatatgagtgaattatgaagttagtaaggtacccttttgtgaaaaaagttaaatttaactatattggtgataattggtaaacaaaaaaaacattggtgataataaaaatgttgtttttgtttttgttggtggtcttactttttgttgttgaaggttgtttcctagaattttcattcaatcttatgagtgagttggttttgtttattgtcacgtgatataattttgtgtcccacgtttttgtcacttatgaaagatgataacagcaagattgacaagatcttattttttcagcatatttttatgggtcttggatactatcatttgatgaattttgcacgcttcttcttttgacttgttaggtggcattatttcttagggttgtttatcttcatct

SEQ ID NO: 31316 - DNA, 705 bp, Medicago truncatula
  Intron number 3 from transcript Medtr7g009880.1 (locus Med tr7g009880) derived from phytozome v7.0 (chr-ID MtChr7; po s 1965227 to 1965931)
gacctggaagtctcaagagctaccgtaagtaaagtttcttatgagattaatttttcctttcctttttcttcacattatctttttttggtgtaataaataaagattatagattgatttctccaacttgggacttgaaaaaaaatggtatcaacatctaaatagaagaaagaaataattgtctcaacagaaaagtaaatcatgtgggttatgttaacacttgatagtgtagttgaaaattatttaagcaagagtttagttatttttaccacttgcatataaaacaaattatttttaccactatttttttttttaaataaaaattatttttaccacttggaatagactttatttgatttatttaacactaacacactgaatactaatcatttgggctagatctaatggtataaagatggctgacaaatattttttaagaaaaaaatataactactctaaaaaagatattttatgaacaaaaaaacattttttgttgaatttttttaatgtttttttataatgaacaaaatattcttcttggtccattacattgaccatagtcaaaatcgtttcagtaaaagctgattctgttgaactgtcttgaatgtgatgatgatgtgttaaagaaaaaaaaaactcacttctgcttttttttcactttcaataaataacaatttatttgtctcttggcaatgtgaaatgaccaga

SEQ ID NO: 31317 - DNA, 736 bp, Medicago truncatula
  Intron number 1 from transcript Medtr4g096390.1 (locus Med tr4g096390) derived from phytozome v7.0 (chr-ID MtChr4; po s 20282470 to 20283205)
tttccctcacactcgccgcgacgatttcctctcaggtagttgttatcgctcttttactcaatttctctattttatttaattcatacaccaacgccatgttgttgttatgggttttggctgttttagtgtataggcgattgtgttttggcctagcagcagtgccctgtttttgctgttcaaaaagtatttagttaggtctttaatttttattctaaaaattggtttcttaaattacaaatgaaagtaatttgttgttctgattgattttagttttcatccttttcaatttccaaatgttatagtgaatttatatataggattagatcaataatatataaattttagtaagtttgggtttattttgtgtgtgaagattcactttgtttttttggtacattacaatatgaattgaaaggttaaaagttcagtaattgatttttgttttcagcgttttcagttttcaatttcgaaatcgacactattatgatgagataataattttctgtatcattatattaataatgtaatatgaatttttagcaatttttgggtgaacatattcaaatttgattccataaagtattaatgtattatcaatttttgttaatcttttttagataaatttaattgcacccatcattatagcattattgtgatgaaacgaagtagaaaaaatgaaccaaaaggagaggatttcagttagattcacgacgacagaggatttcatagacgaagg

SEQ ID NO: 31318 - DNA, 521 bp, Medicago truncatula
  Intron number 2 from transcript Medtr4g096390.1 (locus Med tr4g096390) derived from phytozome v7.0 (chr-ID MtChr4; po s 20283276 to 20283796)
ttcccaaagtgattgggaaaaacaaactcacttttttttatctcattctcttcttacttttaatttcattttattctgtaataatgataacgagattgtttctatctacactttataggttctacaaatatggttcaaagaagaaaaaccatgagccttggattatgatttgaggttgtaatttgagaaaatggtttaagactctatttgttgtgtaatttccatcaatgctctcactactcaaagacaaaactccaattctcataatcacgaaaccaaaaggcatcattccttctcaaattaattttttcttctcactcagaataatcatgcatcttctcattcaatcttattcattattctcatgtgaatcagttcatcttcatctttgcgtaatctgtaaatccatattactttttgctttcttttcaattgaaattttcagtttctgagtagctattgattccaattatttcatttctttatcttgcagaaaaattgccaaatccaggaggaaaatc

SEQ ID NO: 31319 - DNA, 863 bp, Medicago truncatula
  Intron number 1 from transcript Medtr5g021690.1 (locus Med tr5g021690) derived from phytozome v7.0 (chr-ID MtChr5; po s 8335973 to 8336835)
aagaagaaagggtcgaagagataagcaaaaaacaggtctgtaaaattcaagaatagttcaacgaattcatcaaatattggattctagattttataatacaatcactctctccactcggaccaaaggcaactttttccgcatagatataaaaaaaaattccaagtgaaatatctacaccttctgtatccaaactcaaatttacacttttagggtctccttgatttaagaaaatgttctgttttcttttgtacttacaaaattgtcaccttgtttttactttgtattgggagttccacatttgaatgcgatatggcttaaaataacatatatttaaaacaatgaaaacaaaaaatattttccaaagtaaacaagcccttagattttcttattagaataagcattgtgaaggtttttcagtaagaatcgcctttgggttaaatttttttacaagttttgaaaggtttatttgatttagtatgctaaagtcaaactaaaagataaaatttggaaatgggaggtatatgtaattcactcttaattatatgctcatcttaggtactttttcatgcctataaatacagaatgcctgtggtcttaagtcttgtacggttctagcgcaggaaaatgtctcagcgaatgattgtaatagaatgtatttaatcaaactattataagtattattatagtttctgtagcaggaaattttgaaacctgaagatgattttcataagtagcaaaattattttactaaatagtgacattgtttccatcgatgtttagaggattttgcctctttagggaaatgaacatgtgttccctctctggtttgcaggaggatatagaaaacagaatagaagttgctg

SEQ ID NO: 31320 - DNA, 928 bp, Medicago truncatula
  Intron number 3 from transcript Medtr7g022650.1 (locus Med tr7g022650) derived from phytozome v7.0 (chr-ID MtChr7; po s 5702454 to 5703381 reverse strand)
actaaagttgctgtcaaaaacctcttgaataacaagtatgtgttttttcaaattatgttttatttttgtgtagttgaatttgatatgaatttggtgttgactagttaatttgactctatcttgttttctatgtaaagtttgtgttcaaagtttgcgttttgcttattcttggttaaagacaacaaagatgatgatgataaatatgatgatgatgttgttaatgaatttcttgaattttttatgttattttagacttttatatgtgtttaatccctgtaaataggggtcatttaaaattggtccctgtatttgttaatcctgatattatacccctgaactatttaatcatttaaaatttggtccctctcccacttaattactaccacattagtaatttgctgacgtggatctgttgattggccagttgggtgggtgagttagaaaataggcgtgggaatggacaaaaatacccttctcatcttagactatttcaaatagaccaatatactcctccttccatattcttcctatcttttattcttcatcaacaacaccagcttcactcatccatctctttattctcttcccttcttcctcgtcctcatccagtggcggatcttgagtaaatttattgggggtgccaaaccaccatgaaatatatgtaaatcagtttcaagaaatagataaaaataatcacctgctgtagtggtttatattgtttgaaagcaccaagcggatgtaggttcgaatccctgctagcggtttttttgaataaaaaatgtaaattcgagagaaaaatgtcaaaaaagatggcgcgagtgtcgaactcgcgaccgctggggggaccatacgactagcttaccgctgcgacgaatgaaaacttgctgaaatattatgcataatatggtatatgttaaaaacccagggg

SEQ ID NO: 31321 - DNA, 726 bp, Medicago truncatula
  Intron number 2 from transcript Medtr7g022010.1 (locus Med tr7g022010) derived from phytozome v7.0 (chr-ID MtChr7; po s 5374317 to 5375042 reverse strand)
gaaggtaaggaataacatgattatccaaaatcaagatgcggaagttgagaggcgtgtgaaaaaaggtaaaactgatggtgcggagctggttgaatctcaaaattattatgggatttggatatgatataagacagaggtgaaagaaggcattattcaaactagtgcaaatctgcaattcctgtatgaatactccagtctgcattttgtttccacatgcatgaaaggataatactggggtgtgtaggagttgaggtgtagatcagaagcacatatgtaaggactgtttggacaagtaaataaagaaaacaaagtgcgtatgaatagaggtgaatgtaggttatggagctgtggagcggaaattgtgtagacctgtcaagaacgagcagtagtgacattagactgtgagcttttattcaagaatgaatgaattttaagatactgtgaagaagttagtacaatgacataaataacatatgaatgttggaaagttgcttaaatttatgaattactgtcaagagagcatattttgcaatgaatgtagtagtagttgaatagaagtggttctttaatcttggtgtgttgtgggcaagttttaaagatcttacttaagatgatcaaattatagttgagtttatgttggaatggttaaagtttagatggtattagtattcaacttggtatggtagttggtctgtgtttttgtgtcaagggaaaatctcattagtg

SEQ ID NO: 31322 - DNA, 938 bp, Medicago truncatula
  Intron number 1 from transcript Medtr5g101320.1 (locus Med tr5g101320) derived from phytozome v7.0 (chr-ID MtChr5; po s 40553594 to 40554531 reverse strand)
ccgacgtcttgcgggctaaagttcttgtattggaggtaatccactttgtccaatactttagaagaaaccaagtacaaattaaattggaatttgcacttgcaagttgcaatatctgaaatactgtgttttatataatctgatgtgttttattttgccaatttttctttatcttatctcttcaaaaaacaagatttggaattatagacctttagttttgttgaaacctctcacttaggtaggttgtttggtagttatattgcagataacctagaatacaagaccttcgtaaaatttaaattgcagactcaaatgaaattatgaattgattttcttgatagttgtttgtttgttcttgctggttcacatcctgatcttatagtgacctcccatttgcctttccttaaggtcattgaagccattttatatgatctttggtttgctttatttgatttctatctctgataatgtttttccttggtgatttatatgcatagtgagtggtaactttttaacacattttttcaaaagactcttgagaaaacttttccttttacttttgattttcaaaaggtcatattttcaagttcgtcactgaaaggtgccattagtttgagcatctaattcactatcctcccacctttaaagtagaaattgttaaagagaccttgagcatcttcagaatcaaactacaaccaaacacctcgcggaatgtggccatgtgcctctttgatttcagatgcttaatcagttttctctatttactcaatttttagttaggctttattttgagtctttcaccactcacttaaagttaaattcttatgtgagtgaagtactgaaccctcaatgaactggtgttgatggttgatgttatggcttcacagtttacactcaaccttattttcctccattattcgtgtagtccacctttgttaaca

SEQ ID NO: 31323 - DNA, 668 bp, Medicago truncatula
  Intron number 2 from transcript Medtr6g102110.1 (locus Med tr6g102110) derived from phytozome v7.0 (chr-ID MtChr6; po s 22649296 to 22649963)
caatcttcttgtagaaggtaaatcatcgaccacaggtaagactttatcgtaccaaggaatgttccatgaaatttttttttggggtgggagggtggggggatgttgaccactttactaccatccaaattgaagggaatcttaatgggatggtaggcataccttaaaggttggtatttagaattttggtctataagataattcattagccaaaaaagagaagaagaaaaatctatgttgggtagaatcaagtcaattaactattaatttgatattcgagtctcagctaagcatgaatcttttagaagaataagaactctaactttaacgggaataagtttttattagactttatttatttttcggttgaatttctaaattagagtttcttttatctgaaaaaccgtagggttgagatcaataaaaccattatattctttcaatcatgtgaagctataaagtgtaaaaaaaaaaaaagtcagcagttgtttatttatttattttgtgaaaggtaaaaagctagtggttgttgttgttttaaatattttaatttttccaattaaagcttatagttgaaggtaacaaaatttccataaaattggtgagtcttttcatgtagtacaatttacaatacagggttggaagaatagaagatcttcttagtggagtgg

SEQ ID NO: 31324 - DNA, 343 bp, Medicago truncatula
  Intron number 3 from transcript Medtr6g102110.1 (locus Med tr6g102110) derived from phytozome v7.0 (chr-ID MtChr6; po s 22650211 to 22650553)
actttctagtattagtgcattgactgaactcaagggtaagattgatttctcttcaatccttgatttgatgaaaatttagttagtgtgcttaatttggaccaacctaaaatcctctatagtcaattgataaattttcttttttaatctaaccattatgggttgtaacctctaaagccaatactaatacgtctcgtattcgtatcgtgtcaggtatcagggcttcataggttgtaaaaacaaaattttctttaaatctaaaattgtctccgtttgagcttagaatatattcttctcatttcaatgtctcaaattctaacaaatattgaattacaggttttaaagc

SEQ ID NO: 31325 - DNA, 374 bp, Medicago truncatula
  Intron number 3 from transcript Medtr4g157140.2 (locus Med tr4g157140) derived from phytozome v7.0 (chr-ID MtChr4; po s 39109191 to 39109564 reverse strand)
ttaccctgcttcttttattgaaaaggttagcgtggttttcagcatccgattctactattacgctcatagaatttgaaaatgtttattgagttaatttccatgtcgattatttatgacggttgtgacattcttaatgtttttaaccaaatatttcataaaatcatcagcaatattgtagcataaaaagtcaaatatgaagaaaaaaactatccaattgacacgttcttaatctctagtagttaagatgggagttctgacattttttaaagtttaaatcggttatttaagaaaaaaaactaacttttccgtcttattgttttttgcatctaaatcctgcagccccaacttgaaagtggtgacaaaagtaagtttca

SEQ ID NO: 31326 - DNA, 724 bp, Medicago truncatula
  Intron number 2 from transcript Medtr6g035960.1 (locus Med tr6g035960) derived from phytozome v7.0 (chr-ID MtChr6; po s 7771955 to 7772678 reverse strand)
accttttctctgaagttcgcattgaagcatttctggtaatcatttatccctttcttctaacccgtaaattactacctagctagatagctgttaaaatagggtactcaagagttgttgagctggaagctaaattgttatcgagcaatttagtcgtctaaatttatgaattgacattataagtatcgagcaatatagtcttttgaatttatcaaataggaaaagcatccttcaattgaaacttatagtcaaattagttcatgtcacaaaaataatcattctttgaagaagagtgtaaataatttttcaatttaaaagataattttgcaatttcgtaaaaccagatagtaaattgtcaagccttgcaatattaaagatcaaacttgtgattcatttaacctaaattataaggtaacacttctcatgtagtggttcttacattatttaatattaatcatgaagatcccttgcaacgttatatgaatgtatagaaattgacaggaaacagaggtgtaaaattgtgctgtgactagtgaaagactttttttgaatggataaactacgaataggtggattactaaagatcccgtgcgcgattgcatagtataagcaaatgttttgttagaatagatggacgatagataaacaaatatatagaatatatttcttcatgtgtgttggtaggttgtcgttaatggtttgatgtaactgctggtggtgtaggagg

SEQ ID NO: 31327 - DNA, 613 bp, Medicago truncatula
  Intron number 1 from transcript Medtr5g014490.1 (locus Med tr5g014490) derived from phytozome v7.0 (chr-ID MtChr5; po s 4644467 to 4645079 reverse strand)
actgttgtggttgtgctggagttcactgctggcaagtttctctcttaaatctcacttcaatcttctttatgcaaatgttattggaaaaaaaaaaaaaatcaaagttttacatttaaaagagataaaatccgaaaaaagatgtgttacaagttggttttgtaaagatgtgttagatccaatataaaagtgtaataagagggcttaactttcatacctcaaagtcactcacattcagaaaaaacacaatttttatgctgtttgtaagtatacttccgacgaaaaaccaatgttttttttttttttttatgtcggagagtatacttctgaatcatgtgtagttttttagaaacgcggggttggtaaagttaggtcctaatatgatagatatcatagtctattcattcgggccattcgtcaaattatctacacattaagcctaatagtgcttagcgtgagtgggtgtattgggaaagtaaaaacctaatacatgcgtatgtgtgttttcatgtcctagttgcatgggttcaaacttttgattttttggctgcaggggcaactttatgcaaagggcttaacagaggattggggacactgttagctggattattggcat

SEQ ID NO: 31328 - DNA, 370 bp, Medicago truncatula
  Intron number 2 from transcript Medtr6g046280.1 (locus Med tr6g046280) derived from phytozome v7.0 (chr-ID MtChr6; po s 9621792 to 9622161)
tgaactggagttaactgaagcagaacttcactttagtaatcaaacaaatccctagcttttttcatgttttttttttttggtaactatatatagttctttgtagcaccgacacttcagatacaaggcttgtcctgtgtctgacaaagatacctgcacaacaccgtcatatgttgttaaattgaatcacttttcttttctcagattattatttgtgtctacatttttgtgtcggtatagtgtccaatatctatgtctgagttactgcttcatatatctggttttcctaaactaatgtatgatgatttttgacttggttgatggaactctaaatgcagggaataattattcacactggaagaaggaagtgcat

SEQ ID NO: 31329 - DNA, 336 bp, Medicago truncatula
  Intron number 5 from transcript Medtr7g084240.1 (locus Med tr7g084240) derived from phytozome v7.0 (chr-ID MtChr7; po s 18162244 to 18162579 reverse strand)
gaaggtagtcaagttctttacctttgtttatgagaaatcattattcaatactaattactaagtgcaaaatgctctacgttgtttttcttgattttcaattttgacaattaatatttcaaccatggagttgttgtctgtatctggttccccaaaatatattggtaatcaaagtaattgttgaagttgtgggaattcagataaaaggaaaatagaagataataactctgaatgttgtgtcaacaagatgatgccaataccgtagatttagagcataaactcatatgcatgtttatatattaacttcaactcttgtgttattttcagtgtagtacttgg

SEQ ID NO: 31330 - DNA, 796 bp, Medicago truncatula
  Intron number 1 from transcript Medtr5g037830.1 (locus Med tr5g037830) derived from phytozome v7.0 (chr-ID MtChr5; po s 15938541 to 15939336 reverse strand)
gcattgcttttgtgtggtcaggtacaaaggtgaccttccgtacatgtccttaaggaagtctaaccaattgattgattattgtcaattcataattgattaattaaataactaatctaacaagaccatcatatcgggtcttaatatttggaccgaagtttggtcaggaacagttgcccccctccccctaacccctcgctgtctttatgacgcgagatccttgtttcttgattgaaaattggaggtcgtcctttgatgcacgcagaaagtccttggatgataacaatcatcgtagaaacggcccctcttgtgcacttactaacgcttgaaaagttctaagagggggaaggtcttgcattgaatatgtgcgagctaaaaagacccttcttctagacttactaaggcatggttacacttaactacacttacattcttgagaagcattttgagacgttgattcgagaaacgatttcagatgttgattcatgtttcaaacgttggttattcttgtttcatccttgagagatttataaagcaagaatttgcaagaccctttattcagtacttgctttttcccaatttctacccaatcctttgttccttttgctgatttatggggaaagttctgcatcttacttattttcttcatagttttatcattatatttaaataggaaaggtaacttctctttttacctccatgtaacaagtcaaatttcaaatatttatgattcttaatgatatttcattgtgaataaaataaacttattgctcattattactaatcgaaatttcaggtc

SEQ ID NO: 31331 - DNA, 691 bp, Medicago truncatula
  Intron number 2 from transcript Medtr4g109700.1 (locus Med tr4g109700) derived from phytozome v7.0 (chr-ID MtChr4; po s 24622671 to 24623361 reverse strand)
agaagcttttgctgaaaacggtgtgttttgtttggattttctcgtcgatagggtagttgatgtttatgtgattgctctgatccctttcttcaagaaagtgacttgaaaagaccaaaatcttggccttgtggttccacatgttgagtctacattatatgtgttgttttttcaaggatacttttgaattattgggtaagttccatgtttcatatgttatgttggtcatttttatggattgttgcatcatttcgtgacttgtaggttttgtatgttgatatctttgttgtaaaaggaggatttggagggacattcaaataattcattattcatatttcaccattttttttccttcattttaccttcaagttcatctatgcacttcgaagctttttcaataacctgagtcgatgttttttcattgttctcaagtttcaagctttttgtcgtcgtaacctcattcctttgttggttaatacatgcttgctttcattttctattttgctttattacaccttccaatttataaatgtttagaaaaagggatttctacagtggtggaaatttgtttagcagttttggatggtggtttctgctacatttttttgcggttgtacttcctttttctatttggatgcagtattttatctataccttagggtttacttgatgttgtcctcaggggttctctgac

SEQ ID NO: 31332 - DNA, 600 bp, Medicago truncatula
  Intron number 1 from transcript Medtr5g098770.1 (locus Med tr5g098770) derived from phytozome v7.0 (chr-ID MtChr5; po s 39432395 to 39432994)
gtgcttttttattgtgtttagaggtttaaattttcatttccgttagaccgttgtcatatgattagtgaccattttccacgttgttaacgagttcagatctgctccagtacctttatgctccagtttcctagttcgctgcctagatgtttgacacgtgccaaaacaaaatccaacggctgagaataaactttgaaaaacagtaattgttaaaaagaaaaacatgaaacacgctcacgtttcctctgctctcttctccatcccaaccgattcttaaatttttttccaactcttgactattctcaatgttatgatacagtgttgaaagaattgaatccaatcacatttcattctcttcccaaattgccattccattgtcctcctttggtttgaatgctgaaattggtgtttttaaaatctattgctgaaatttgtgctcttttgataacctgagcaatagctgaaatttgtgctcttttgataacctgagcaataaggtgggaggagtggagagcactaacggcagtgcgacggagatgttacagagtagcgtttgggctgttgtataaaatatagtcctttgtttttccttctctcagttaa

SEQ ID NO: 31333 - DNA, 511 bp, Medicago truncatula
  Intron number 1 from transcript Medtr5g078230.1 (locus Med tr5g078230) derived from phytozome v7.0 (chr-ID MtChr5; po s 28972835 to 28973345)
gttcgccactacaagttcaacgtacgtgcattatttacaattctggtgttattattattagtcatagttttattatcagggataaaaaaaacaagataatgctatattaatattcaagtttaatttattaacttgatgaagttagagaaaataaatacgacatcaaattgcatatatgcttagaaaaacatgcatgcatacaagaatcctagggatatttttgttttggtttctctttactattttttatctatttgtctgtataaaaatatcattaactttttttcaaaaaaaattatactaatatgtaccaaaccattgttctgttaagtttgtctaccaattgtcatcttcaaattgtattaatttttgagcaatgcaaggcactcaagtttggtagatgttacatgtcatgcacttagactttatttttgttcttgttgactcctatatctacttcatgaccattaaggttgataatgttttattattattgttaattcaggtggtg

SEQ ID NO: 31334 - DNA, 670 bp, Medicago truncatula
  Intron number 2 from transcript Medtr7g027240.1 (locus Med tr7g027240) derived from phytozome v7.0 (chr-ID MtChr7; po s 7144923 to 7145592)
cttgtgctaaaggtattagtttaacatcagcttctagagtgatttttttggattccgaatgaaatccttgagatatatacaaagtcaagtcaaattgataacaatggagatcacattatgccatcattcttatttctggacactgttctcgcttcttttgatttcttgtatcttgcaatattatttcagctcctggatgtgttttaatgatgtgttaccttcaaacttatcttcgaacttatttgaataaccgtagactaatggtgaaggaaatagatccttcaatgttgtaacatgttattatttaattatattttaatgtcattatgtaggcaaatatctttataataattatattagctatttatcaattgtgaggcttaattgattaatgatcgaattaggtaataaggatattagatttcttttagataattaattaattaatatggactcaatatgagtggatgtctggatgactcataacggaataatgagaaaccttaatgaccatcacattataagagaccatggtccccaacatactctacacgaaaaaacctctcttctccccttgaagagaacatgaggcaaaaaagtactgaaatttgtgaatctaaagatttatcttttatgtttttggaaacattgtttggaaaattgcagaaac

SEQ ID NO: 31335 - DNA, 803 bp, Medicago truncatula
  Intron number 2 from transcript Medtr5g096070.1 (locus Med tr5g096070) derived from phytozome v7.0 (chr-ID MtChr5; po s 38149347 to 38150149)
agtggctcttgtgacagagggggaaattgctcgctgtaagaagccacggaattatgaagctcttgataccatgcaaagatatatagcgtccttgaatttcaaaattgcatctctgattctcactatttgataaccgagtgttacaatctaaatatctagattctatcacgtaggagttacaataaccggaactaactaaccggggaatggatgcagtctgcgacactgcatgacccggttgtttattctcacaagaatatgcggaatattagaaacagcagtccttaaagacgtgaataaaaaagtgacaagataatattccttttgtgattcaatttttctttgatttaatcaattaattcagtgatcctatgcaaacaggaataatgccaaacaacaaagcccccagtttctgtagtcatgaatggtgatatctcttaacagaataaaacagaacactgaacctctgagaggttcagtgttctgttttattctgttaagagatatcaccattcatgactacagaaaattttcctagtttgtaatttttatttttgaataattttcttgctttcatacaggtcagaaaattgtaacttttttctgtttgaataaaattcttcttcatcatccaaaattcttgagacaaatgtatatggattaaagattgggacatttgtgcaaactttattgtgttgtcttttttactagtctcttttctgttttagtgtttgtttattacttatctcttttttgttttagtgtttatctttaatattatatattcttgaattttgaaggta

SEQ ID NO: 31336 - DNA, 344 bp, Medicago truncatula
  Intron number 2 from transcript Medtr5g040950.3 (locus Med tr5g040950) derived from phytozome v7.0 (chr-ID MtChr5; po s 17511692 to 17512035 reverse strand)
gattctggaagttaatcttgtgagtttttttgttaatttgtgcaaaaattgaattattattattattatcccattcctggtgtttaatcatcttccttttgttttttctctttattggggatctccaagttatcctatacataaattggcatgctttgctgcataatgagaaatagaatcaatcaaatagtatttgcaatgctctctctggatttatggtttaaaatgaaatataaaattaatcaatatgtttttttttttgttgatatggtttaagtttgaggtttagtttgatatccctgtttacagagcctttggattcttatacgcctcaagaatcattt

SEQ ID NO: 31337 - DNA, 603 bp, Medicago truncatula
  Intron number 1 from transcript Medtr4g064720.1 (locus Med tr4g064720) derived from phytozome v7.0 (chr-ID MtChr4; po s 12491579 to 12492181)
aggtcagttgtgataatatagcattatggttaagacttaagatctaatcaaattataccactgtctttctgaaaagtattatttttttgaattcaaagagtcattatgtatctatttgttgtttctattctctttccctgtttctaaactaacgtaagttgattttttccccttgtttaactactgttatagaaaaataaagaaaacaatggattatgactcaagcttaatgttttcacttcgtaactatatttgtatatcttattgtgttttgtattattacaaatattatattgggtttgtctaacatgtgcaacattgcacatgttaaaacaactaatagtagtaactttttcttgaaaaacaacaattatttattcaaaaaatttatatttaatattaaatgtacaagttccaatacaaagtttctattttaaacttcttatcatgtgcaaatttgcacatgatagaaaaacccatatttatattaggacatcatcatattatgttatttaacctgttgaaacttcattgaattagcttattttttccattaatttgaaaacaggcacattttataaaatctaggcattctaacactgc

SEQ ID NO: 31338 - DNA, 630 bp, Medicago truncatula
  Intron number 4 from transcript Medtr5g006120.4 (locus Med tr5g006120) derived from phytozome v7.0 (chr-ID MtChr5; po s 537185 to 537814)
gaaatcatcttcacaagaaagggaaccgagtcaaggtatattgttgattttgatcctattgttttctgcctctatttatgttaaatgaaaaaaaaatcaacagtgtggaaaagaaactaaggaagaaaaaagacacaagattaaagaaccaaactaagtgaagaaagttagtgttgttgattatagggttaataggtctttacccccctgtaatataggtcatttatggttttccccctgtaaaatatttttttttgatttacccccttgtgaaatatttttgttttgatttacccctctaataggccaaacaaaaacgaaaatttcttaaaaaaaaaaagaaattggtttagggggtaaatcaaaacaatttttttttacaggggggtaaataaaaaaaaatattttactgggggaaaaactgaaaatgacctatattacaggggggtaaagacctattaacccttgattatattattgtttattctatttcttctttttccttgcgcacttgtttattttctgtacattttacccctccactgtactgcagattattgaagcatgccttgtctccgttctaacatcagttatttcatttggcttgccgcttctacgaaaatgcagtcc

SEQ ID NO: 31339 - DNA, 1030 bp, Medicago truncatula
  Intron number 1 from transcript Medtr5g017450.1 (locus Med tr5g017450) derived from phytozome v7.0 (chr-ID MtChr5; po s 6247729 to 6248758)
atttctctagctttgttcgtcagcttaatacttatgtaagttgtttatttccctctctccttttagttcttcataaacatgattcattcttgcatattttgcagcctttgattagtttaagaaaattttcaactgccaatgttttttttagaaaacagaagtcactttttacaagcaatttttgaggttcataacatggtaatttgtttgtttatgctttactttttccacaaactagcacgtacaaaagacatgtgttgttcctgggagcaagtcttctatgaacacaattctaaatcaaaatatttagatatactaacatgatgttagaatgtttaaatattttgatttgaggttgtatctatagaagacttgttcagtacacatatatgaaaagattgaaaaacttctagccaagtagaataccataggagagtattggccatcctatttactatttttcaaaatatcaaacttttagagttcaactttgatacaccgaaaatgaattctcttggtagatcacaatcaattatgtgtgatgttagatgtgattaagtcattcgttttcaacaatcttacgaatatgtttgattatataaatattcgttaatgaatttaaattaaatgtattaagttttcaacttgtgcgtattgatattgtataacttttttacacatgcatcaattaaatcacaccaccatataagcatttgtagaggtattatataaattgtcctaaaaaaattatattataatgtgatttgattaaattcacatgtaaacgaattttatagcgtcaacgatagtgcttagataatttagagattaatatttaaaaattaatgattgtagtataaattttggtgttcaatggttaacttttggaaagatgtttttttttttttttttccctcaaatactagcacgttttattttctaagttttatcttaacactttggcaatgagaaaatgctaattaccatggtttttgaatttgcagggattccgaaagctggtgccagacaa

SEQ ID NO: 31340 - DNA, 978 bp, Medicago truncatula
  Intron number 1 from transcript Medtr5g082520.1 (locus Med tr5g082520) derived from phytozome v7.0 (chr-ID MtChr5; po s 31081299 to 31082276)
ttgtaattaacttgtgtttacatacctgaataatatttcttttattttatggattaaagctaaactttataatagttgttaaggatactgcagcatgggaaatggtttgaagtttatattcctcacttattcattttaaataatgactttttagtcatttagattaagatacttgtgataaaaaaaacaaaagctaaactttatgtatcttgcaaaaaaaattatctttttttagctaaattttttgttgttaaatagcaattcataagatgaataaatgaagaattggggctgcgaaatttgcttcgactattgttagtggttaatttttgttggggattattagcaatatagggattggactttgtgtctcattcttaaactcatacttcgtcccactaataccattggactacacatttgagaaatctaaaaatgaatcttgcacttaaatattgagaaagtacttaatattcaccgctcatgatgccactaactctatcacaaagagactcacaccactaaaagtgatatcattcattttctcttgcacttaaattaatatgttgcaaacacttacaaaatcttctatttgtagaagagaatgctattagttttcattcatgagtgtgacataatactgttagagggaaaattgtctcaaatcttacttttttctttgcctgtgtttttgaaacatcattgccctagcattttaattgtttttttttaaagagtctaacgacgaacccacatactaaatacagaggagtacaagcttggctggaagttatgacatggggaagagactctctagtatgaagtgttgaaagcgaaatatggtagagagaatcttcacatgaataatgttgtggctgagcaagtttattcaagtttatggatggctttggttgaggatagagagaatcttcacatgaataaggcaatcaaggaggttaggtttaaggcaggggcggt

SEQ ID NO: 31341 - DNA, 683 bp, Medicago truncatula
  Intron number 1 from transcript Medtr5g019340.1 (locus Med tr5g019340) derived from phytozome v7.0 (chr-ID MtChr5; po s 7190418 to 7191100 reverse strand)
tcttacccttcacttcaattctagctgaaacccaggtatatttttttttagccaaccccatttatatatagattatagatgcataaaatattgtttttactaaatatagatacataaaaattgaaactaattttgggattttttttgtaatttatattcatacattccttttgtgtcttctcaattgaagtattggctttatggatgaaattgagcatgttcttgtggattttttaaactttacattttctcagatttttgagagttgagacttgttggtgattaattgacaaaaaccattgcttgtagccttctaattttgaaatttggtttagtgtatggtattgcttagttcacttttggaggaggcaaaaattgatttttgaggtgtataattgatttttacatgtctggatgttttcaaatagaattgattctaacttgaagctagaatttgaaacttttgcctctacacattgatttttggtctttaagttattattcgacctacttttacatgattgtatctaaacttaagccacattacattcaattcaactcaattttatgcataatcaactttacagaatcaattcatttaaaatcagtttttgtcactgcagaaccaaacacactaaccattttggtgcttcttagctctctattgggactgtgaaattggg

SEQ ID NO: 31342 - DNA, 555 bp, Medicago truncatula
  Intron number 3 from transcript Medtr7g009900.1 (locus Med tr7g009900) derived from phytozome v7.0 (chr-ID MtChr7; po s 1972379 to 1972933 reverse strand)
tgagatctgccgtgaggtacatattttctatgtgttttcttaattgttcatgaattctataaatttgacttccatctttgatttatatgtatttataagtttagttactcggtagtttttttttaactatttggaaatttttaagtcggccagtgagctaaaacaatttgtaatttgttaattatttgaaagagttgtgctatttacagcgagagatttcttcctaaatgactcgcgaaatttcagtcaaccaattaaatcttggtaatagccgaaaatcacggaaagtaaagcgtggaactttttaaaacttaaaacggcgtaagttgaagtctcacacgtgatgttgtcgtgaaatagtttctcgtttaacattgcgatattcgtgattaggtcctctagttaaaaaaacaaaaaatcaagtaggtccttaaattcttaaacatgaaaatgctccatgagcactatttaacatgactcaatatacaaagctatgctctctttatgaatgggtgtgcaggttttctctccaaactttgcagtgactgaaccacc

SEQ ID NO: 31343 - DNA, 992 bp, Medicago truncatula
  Intron number 1 from transcript Medtr5g036470.1 (locus Med tr5g036470) derived from phytozome v7.0 (chr-ID MtChr5; po s 15194270 to 15195261)
gcttccatctttgaatctggttggcaggttctctctctcttccttctattttattcaactttcgaccacccattaacgcaaattaacgccagtttttatttttatttttattttgctcttttcatcagaaatttattatcttttttcaaaccccatgatttttttgtatgttttagatttcagggtttattgtcagatttaatttaagtatttattgttaggttttttttcttcattttttggtaaacttgatgagaatataaatggacatttgaattaggaatgagaaataggatttgttgtgatttggactatagattttgtttattctatgagtgttttgatgctactgtcaacaatgttgggttgctgctctatttgtaatgatatcaactagattcttttttgtagatcagtgttattactatagtttttgaaatcatgggatttttattttttaatttttgttgttccattcattcatgtattgtgaaatttgtgaaaattggaagttgatggttggatctttgatataataagttgtttgaattgacagtgagtttgatagaagcatgatgtgccactgattttcggcaaaaactaaactttataactttaacaaaatcatgatgctaatgtgattccgccaaactaatcgtcaatccaaacatgcacatagttttgagctaatatggattttaagatgcttataggataacagttattgaaatatttgacattgggaatgcgcgaaaagtgaaaaacaagggcttcagtgatttcatttatcatgttttggacatgatttcttgtgctttgatgtgattttggttttcagattcttgtgagattgcatgcttacacaattgtacaatatttacaaagacagaattgatggctgttccttttattgaaattctctgattttatttttccttttacttttttgtgctgcagtacttaatcacacattttagtgattttcaattggc

SEQ ID NO: 31344 - DNA, 880 bp, Medicago truncatula
  Intron number 1 from transcript Medtr4g107340.1 (locus Med tr4g107340) derived from phytozome v7.0 (chr-ID MtChr4; po s 23421567 to 23422446)
actcccctctggttagtaaccctaaaacttcgttcaaatctcgtttgctttaatttattactcttttcttttgctcctatgttttcaatataggatactaatccacaatgtcaaatacctaaaacctatgacatgaaaatggggacttattttcatgcatatcagctgtttgttgaaaagtttgtttaaatgttgtatcattcaattgaagaatcagaaacaattctctaaaacaggagagataacagaactaagcgaacataaattattgtatgtagacctgttactgataatagaactagagataatgcatattgggacgatgccatagattatgttgaaagcttagttccaatattttgaaagtaagttacttgttcgaatttatgttcatctgtgtatgttgttttataagaatcgattgtgtgaatattctattgcattattgcttaggctaatttaattatctacatcgtgtggcttatattgaaaaaatctatataattactagtatatataactatacaaacatgttgggatatatgttatgtggtaacgtttgcactgtatgacatcatttctggacaaaatttggaatatctcttttttcacaagaacatgactgtttcatttttagagatagaaaaacatattttttgttgtggtagttacacacaatcacgattggagattttaaggtttttagatatcaacctcctgttaagaaagtgagaaatggacttaggatagggtttatggtagtgaaccgcaatttgaagccattcactaaacactaaccgacctgagggaaagaccttcatttatttccgtctgctgtatatcatttaaacatgttaggtaggatcaaatttgatatatt

SEQ ID NO: 31345 - DNA, 1029 bp, Medicago truncatula
  Intron number 2 from transcript Medtr4g080490.1 (locus Med tr4g080490) derived from phytozome v7.0 (chr-ID MtChr4; po s 16539000 to 16540028)
aaaagtcagatcaagaggtatatgattcttgtcttggttttttctgttttggtttcgtgatttgaggttatattgttgaattttgccatgtaaatatttgaagaatttttcaactttatagcttttttcttttatttgtgttggatattatcttagacaatcaaacacaatttttatggaagtttatgtagtgtaatagtctagagtgttgtgacgtgtataaagtcatgatactgaagattgtttgtgagaaaattgtgataaacgattctgaatcgcttttgcattcacagttagttctacaagtatttatagagtttggcatgggttaactaaccgagtcccagatatggccaactagctgaagtgtataactttctactataactgtaatgactaactaatagctgtcaggaggtaaacaactaggacttaacatcgatgctatgctactgcatatagggtaatagtaggacgaaatcaacaattctagaaaggaacatttatctcttgaagttgacatcattagtaatttatgaaaatggaagcaattgaatgtaatcagatgtgtcagtgcttgacacggacatgtgtctgacattgaactcgacttccatccgaagtgttggtgctacgtgttgaaaggagttatttttgtcatcaaggatgttagctgcaaaatatccttccaaaatctttgcacattagctagcaccggaagtctctcatggatgaaggaattagagttttcaagtgaagactcgaagagaatgattcagtagactctaagtgaatgatctcaacaactgcttggtctattgttatacaagatcttaacttcttatatacaatattagagtatatatattttttttacttggatgtatgaatttgctttgtagggtttttgactgagaattgcattcttctggataaagaaatcattttctctttcccgcatttacctatgttttgtagttttgaaacattacttatcagtattctatgtttctgcagacaaggtcaagg

SEQ ID NO: 31346 - DNA, 375 bp, Medicago truncatula
  Intron number 1 from transcript Medtr5g022320.1 (locus Med tr5g022320) derived from phytozome v7.0 (chr-ID MtChr5; po s 8685313 to 8685687)
ttaggtaaacctacaatttttttgtctctttgagatttgttgattttttttgtttgatataaacaaacaaaagaatcaacaaatcgagaaaatgatctctttatcacaactttcccgtagataaagatttgatacggtccaccacctctaagcaaaatatatcatatcgtagttagtcaaattagatgagacactttcttgtctttcttccctttggataaagaattaaaaactgcatgtttttatataataaaaaaatggcatatagattaaaacaaaattctagttaattaaagactaaaaacatattgaattcaaagctaaatctaaatcttttggtgatttgtaggacggtggaagagtttgagaaagggc

SEQ ID NO: 31347 - DNA, 1060 bp, Medicago truncatula
  Intron number 2 from transcript Medtr5g075150.1 (locus Med tr5g075150) derived from phytozome v7.0 (chr-ID MtChr5; po s 27322744 to 27323803)
gccgaggaagtggtggccgaggaagtgaggttgtggtttgtgttttggtaaatagagatgaacttgcaaactgatttaaatttatctgggaagaggatgagggatagaaagaggaaaactaaaagagttgccagataagaagaatgagagaaccggttctataccattatgtgacaatggtacctgatttcccatcgattacattttcactccatttttaagttttttttttcactcttttatatgtattttttatatattagttttacacaactatctttttgctaaatatcattggatggacatagaagtgtaaataatttttacattaacattgaatatttataaaactctagatcatttccgattttccccctataaaatatattttttgatttactccctgtaattttattttttttggaataccccctaacaggtaataataaaacaattgttttttttttgcagaaattttatgttttttttatgacaataaatcaagtatacacataatatgtatttaatgaaataaagtgtttagcaaaagttagagaaataaattgatcaaattttcaatacataattctcatctttgatatttttacatgtacatttccgtaaaatttaaagcatattataatacactaattacaatttaatggataaactatacacaacacaaatattttttacgaatcaataagtttttttgttgacaagatgaattaatgagttagaagatgtttttcactaatcatatccaacaataattttttttttgaagaagctaaaatagaatatatttaagataaaaaaacctactcttatatcaaacaatgaatcacttcaaaatgaattagttaaaaggaaagatcaaatttattgttattgtagtacaaaaaaaaaaaaaaaaaggaaaaagaacgtgtgatagtgtgaccttgtttagattttttgacttattgactggtgctagactttttaggtaaatgtcgtacaaaattctgaagatatttatttagtaacaaagaaggaaagtcagattctttattagcta

SEQ ID NO: 31348 - DNA, 415 bp, Medicago truncatula
  Intron number 2 from transcript Medtr4g079120.1 (locus Med tr4g079120) derived from phytozome v7.0 (chr-ID MtChr4; po s 15756743 to 15757157)
gtcaccggaggtgccccaaataagctctccaagatgtatgcattttccgctattctattgcacttaattgtatacatattttgtttttttaattatataatgtatgttttaattcaaactagggtctagtattgtaagtggatcactgagatttagcgactaaaataaacgtgtatttatctaaattttagttttaattttcattttgtattttttttataaggacgaatttgtgcaaaaaaagatccaaacaaaataaattacagattcttttcgatttttgtttgctgcatatggtatggtagatgatataaattttcgttgtttttttttttttttttttttttatgaatttgattgtttttattgttttgatgcagcaaagttgttcggctcaacatcgcacaggtcttga

SEQ ID NO: 31349 - DNA, 817 bp, Medicago truncatula
  Intron number 3 from transcript Medtr4g024840.1 (locus Med tr4g024840) derived from phytozome v7.0 (chr-ID MtChr4; po s 5772262 to 5773078 reverse strand)
tctgtgctactaaagtaccctacccagagttgcaggttagttgtgatagttacaatctcctttgcaagtaagttatttttcttcctcatatttgccccatgcttaactctttacttgtgtctgaaatcaaaacatcaccaatgtccatatagctagctagtttgactcagtatcttttgaactcctgcttctattagaatgggaaagctttctgtttttatgtgatggtttctaggacatatttggttttgatattattacctataactcaagtgggcttgtcctgaataatcttattatataaggatacctttatttttcaagattcagtaaggatgagatgagaactaaattgattagtaatttgtgtgtaatcactatttatttatggtgagtcaatgcctatttttacaattaaatatacacacacacatgattagatacctgaaaataatattattaaaatatatattgctacaaatttactacgaaattgttatgaacttgcggctattgttttacttcaaaattattgcggcaatatcctaactaaatagctaggaagtatagacttttgtacagtacagtatattgctacatattagtcaaaaagtagctatgattttttaaatattagttaccaattacctaggaattattttaatagataatttgctgtcaaatccatgctacggccaatatgacagctaattcccaactaattagtgtctactggtgtttgctatgagttagctactaatttcctcttatttatttcgtagcaaatcactgattttcttgtagtggtttgttctaa

SEQ ID NO: 31350 - DNA, 930 bp, Medicago truncatula
  Intron number 1 from transcript Medtr5g045370.1 (locus Med tr5g045370) derived from phytozome v7.0 (chr-ID MtChr5; po s 18968064 to 18968993)
atttgttgctgttgtaattattggatatttcaaaagtattttagttcaagagttattgttatcaataatgagtttttgctcaattttactgtgcttgatcgtttccactatatgcttttatgaaagaatattttcagtaattttatttaacaattccttcaaaaggaaattgtatattgtaaccaaaaaaaaaggaaattgtatatgtgcttcatactgagtcgagtcaaacacatttataatgttcctatttattagccaattttaaggcattatttttctgaacccaacggttacatattgccaacaaaacaattttgactcacgtactaaatgaatgttacacgttttgacttggttttgtgcagtataaatacaaaacaattatctcctttaacaggctaatttgttagtagttcaacgttttctttttacatagaagaaacacctctttactttttatgctcaagttttacatgaaaagatttttatgagtctgatacacaacttattttttctcatctaaaatattgagtttttgggttacatctcctgatatctttgacataaatttgagttgttctgtcaccttcagttatgattcataacggggaagaactgttgtatcctgtgagaatatgcgcttatgaggcggataaaatcttcaaggacagtgacaatgtcacgcctcaggttacataatagtattttgttttgcaggttacatgagttgttgatagaagatgttgatagagttgtatcggtgtctagttatacaaaatttcaatgacagctaagtttatttatatcattttttctttatatttgatttatgtgtaaatatttacttcgattattatttagagataattattataagtaaatttttcaacagttgctgccagcgcttgctgtataagttcaagattc

SEQ ID NO: 31351 - DNA, 501 bp, Medicago truncatula
  Intron number 1 from transcript Medtr7g025500.1 (locus Med tr7g025500) derived from phytozome v7.0 (chr-ID MtChr7; po s 6255377 to 6255877)
tccaggttcgtttggagattgctccttctttcttcttatctaatttcttaatttcattactattctgttgatatgagcaaaattgtgaaatttcacctaaacaaaacatgatagagccacttcgaaaaaaacttcctgttagatgataatgaaaatgttgataatgttaatcaccttcacattggtatacatgtatttcatccatgaaattcggattctagcaagtctaaaatgattgagttaagagattttactattgtgaaggtttctagagataaatcttctacacattttactactaatttccctgcataaatatttggtctttgaattcagtggcagaaactctatcatcaatagatctatctattttactatctgctcggtaccaaatgcatactatgtctctgagtttgattgtgtttttttattttatttttaactgaaagtaatattgaatttgcagatcttcaagtatctttttaccgtaacggttccgac

SEQ ID NO: 31352 - DNA, 975 bp, Medicago truncatula
  Intron number 1 from transcript Medtr5g078030.1 (locus Med tr5g078030) derived from phytozome v7.0 (chr-ID MtChr5; po s 28880498 to 28881472)
cctaaggtatagcttcatgattttcttttaactgcaatatgtttgtcgcacaacggcattcaatgaaattacaaagtttctctgaatgaattgtttgtggaaatttgtttgacggtttgtttttttccctctaagttattgataatatcaaaactattaattagatgtgatggacaatctaacaactgaacaataattaaattgcaggcttgcaaggaattagttattttttatgtgttagttgtttaatggttacaatatacatatctaagtagtttcttgtcaaatgattctttttgcggtatgccttagttttgcccctttatcgttttgtgtctgtattttgttcacagaattctcagcactcctgatttatcagtagcttgaacttcaaagcaggaacaggtgagcttgcatgctagtaacttagtaccttcagtccatgtgattatgagagtagccaattcgattcaaaaagtatggtctgattgtgctgaaaataatttaaatgctccagtatgtaatttatatgaatttcgttaggctgaattagttactgtaattatggtcttgttcagttctgcatttcaacgttctaagaggatctctctttcgcgggtgacggtaattatgtcatctcaaattgtagtctttgggttttgttgataggtgaaatgaaatgttaagtggtcgcaaaatatatgcaattttttccgtcacctacgtacatgtataattgttcttgggtttggtatctatgttttctctctttctctatgcagcttgatgacagtagatggcataatgatatgtttgcaaagaaaccatagccttgcggcttacatgcattgacggtcacttgttaatgacgacgacattttatatgatttttctctcttttgtcttgtttagtgaaatgagttacacaagttttacctttcttatttaacctgtcatgttgaatctgcagttact

SEQ ID NO: 31353 - DNA, 833 bp, Medicago truncatula
  Intron number 1 from transcript Medtr5g094540.1 (locus Med tr5g094540) derived from phytozome v7.0 (chr-ID MtChr5; po s 37411583 to 37412415)
tgatttgggagtacgattttgtgttcattctccgctagtgtgttgtatcttcaagggttttaaggtttactttgttgttagttggtagcaagaccaagtcttgaaattaaagcatgttgtgtctatgacctctaagaatgatgtccttgataataaagagatggatccttgacgttcttttcatggggccttgagctcaagtcgtagaaggatcatttaaacacctttaaacttggggccgtcgagaaaaatgatttatagatccttaagattggaggtcgtgaagaattattaatgtcttttaaggttagacttgagaataatgatcaaggcctttgaggttggaggtcgtgaagaatggttgtaggcatttgaggttggaggccgtgaaaaatgattgtaggcctttgaggttggaggtcatgaatgataaatggtcaatctaatccttaaattaccaccttttcaccaatttgatgcctaaacaattaaaatcaattaaaaaagaagaagataaaattatgattttgtccttgtatttttattggaattacgaaaatgccactgttgtcatttttatatcaagatttgtgtgtttgtttatcatttctgatttagttatatagtagtgacggccaaatagacaagcaatgtatagattaaggacatgaggggtgttatggacacctctttttaacacttattcttttatttgatgaatcttttatttgatgaaatttacatgaatacttcactttaaaaatgtgtcgcagcactgacatccacatcaattaaaagaaaaagtgttagaaggattagggatattttagttg

SEQ ID NO: 31354 - DNA, 563 bp, Medicago truncatula
  Intron number 1 from transcript Medtr5g090790.1 (locus Med tr5g090790) derived from phytozome v7.0 (chr-ID MtChr5; po s 35486061 to 35486623 reverse strand)
attcaaagaatccattcaattctgaccgtaagccttttcctctttctttttgatcaaatgattactctgcaaattcattgaatagaataaatatcaatggagtataactcattctgattctacaatactaaaatgaagatcaaagtaaaatgactacgtgctcgtttggattgacttatttgagcttatctatgtgtgagtctgtttaggagaacttatggaaatagcgtatgacatgtccataagttgttttcagcttatttccataagcttttcataagctatcctggaaagcttatatatgaaaacagtttaattttatttgatcttttcttatagaaataatttatacacaagcacttatttgataatcgcttatgctataagtgcttagttaagttgtttaactaagcacggatttattaatctataggataaacttgattgccttcagttttccatgatcatacattcacattctttagcaaagattgtttttttaatctattaacttcttcaaaattttccttctgaacagcatttgaagcagttatctttggctc

SEQ ID NO: 31355 - DNA, 385 bp, Medicago truncatula
  Intron number 5 from transcript Medtr4g107920.1 (locus Med tr4g107920) derived from phytozome v7.0 (chr-ID MtChr4; po s 23692118 to 23692502 reverse strand)
caaagtgagtgttcattaattactgttgcatgttcaagatatgatttgtttttgttggaggcaattaagctgttcaattcttataatgaacataacgataagcttttgtttctgtattctctggcagtcaataccctgaaatttctaggatcatactttcacatttgttgtctacttacttatccaacatattttcgtgtcaaaatgaaaattgaaacttatcaccaacacattgaaataaaagtttccatatattcccgattatagagtttttcttcccgtgttaagttctcagtatcccttctcagttataacttataggacattacttcttagttagctttatgataaatgaacattcaaacactagcatcgagcagggacg

SEQ ID NO: 31356 - DNA, 880 bp, Medicago truncatula
  Intron number 1 from transcript Medtr4g107700.1 (locus Med tr4g107700) derived from phytozome v7.0 (chr-ID MtChr4; po s 23584133 to 23585012 reverse strand)
gttgagagtgagagggagacaaacaattcacgcgggtaatagatgaattttttccttttttaatttaattgaccaattttttttattttaatcttttattaccaagtttgcacatttttttttaaataaaacatgccacatcagcagggatatgaagagtgtgcaacataaagcttgtcaacatatcattttccttgctaaaatcgtagaagccgcactctctgtggtaggtttgatacaatattattagcctgtttggtttgacttatttttgagtttttgcaaaacaatttatgcaaataaataagcttttatatattattcataagtttgtaatttatgtaaaaagaaaaaaaaaaatttataaagatacaatttttgttaacaaaaacttataaattaacgtaaaaacttatttatttacataagttataaaaataatccaattcaaacggatctactaagctctttgaatgcacccataaagtcaactcactaattcaaaacccggaccagctagattatattataaataataaatcataccgtaacataattaaaatggttgaacatacaaaataattgaccgtcttattttactacatatgcccttgtgactattatcaattaatgacaaaaactatgatcatctttgatcgactctttatcttactctcaaaacataagtgttttacttatactcaactaaccaattagaatatcatatgtatactcatactttgttctatatttatcttaaatcacaagtgtctcttacttaacttactaaccttacattacaaggtcctttttcttatctcttgtacaatgaaaattgaacacagggcggtttcaccgcccgacgatcccggacggtcgt

SEQ ID NO: 31357 - DNA, 464 bp, Medicago truncatula
  Intron number 1 from transcript Medtr4g108960.1 (locus Med tr4g108960) derived from phytozome v7.0 (chr-ID MtChr4; po s 24277139 to 24277602)
ctattcctcctacccattcaattttactcaaggtagtaagttaattatgttgttagtgttaaagccacaaaaataaaacaccaatttaatttatcttttagtctttgaattttgttgttgtttatatttgacttttttttatagcttgtcacataaaattacaatcttcaaccataaatataagactctcttgagatttttctttctttgtttttatgggacaaactttcaaatttatggaatatgtaataaatattatgatagaaataaaaactaattctcactcataaacttaaaaaaaataccaattttcaacaaatttaatagtgctattaactttcatattctcataacttagtcaatgaaatcttatatttagggacttctaaatggaaaatcaagactaattaagttattgtttgatatgtatttatttatatgatatgatatgaagggtgtattac

SEQ ID NO: 31358 - DNA, 569 bp, Medicago truncatula
  Intron number 4 from transcript Medtr6g076870.1 (locus Med tr6g076870) derived from phytozome v7.0 (chr-ID MtChr6; po s 14957586 to 14958154)
tattcggtgcgaggtatagaagccacaatgattcctcttatcttgtggtgtttcttataaagcttcttctgagcaggagtatgtattcttctgtctatagcagctccttcttcatccaaatccagatcatcaactccatcttccagtatgtcccataactcttcatccaatcccatgataaagctgtacatattagttttccaccatgaaaactcttctggatctccattaaactttggagcttttccagagtctgttttcttgtcagcagtatcatagtcatgcttgacacttgtgtattttgtagtaactgattcctcatctccagacatgtttttctaatagatcttgaactgtaacacggttaagtgctgtgataacagagcctgctctgataccaattgaaggtgaaaaacacaagaaggggggggggttgaattgtgttttctttttctcttaaaaaattacttcttctgataaaacttcagaagcagtttgattgcttctgatgaaatgattagagtcagattgcagcggaaaagaacagagcagagaaaagaaagacaaag

SEQ ID NO: 31359 - DNA, 799 bp, Medicago truncatula
  Intron number 2 from transcript Medtr6g046390.1 (locus Med tr6g046390) derived from phytozome v7.0 (chr-ID MtChr6; po s 9709687 to 9710485 reverse strand)
gggaattggttgacgaagaatgaatttgtgttatttaatgttatgtaatttaatttggcaaccctgtgcggtgccttcctgaacttattttgaggcgatgttctaatgtcgtcttttggatatttaaatgaatcttttaatttatttacttgtagaaattttcttttttgaagatatcaaagtgttgttttatgttggtaagacttagcctttttcaggtgttttgttgacggcggcttcatattctttgtcgttgctttatgatattcttaggcttctattgcgtttaaacattcttttccgaaattattttgatcctctttagactttcttgtttttaggtcaaatttttcctgcctttatgtagatcactacaaaatttcattgaattccttattttcggagattttgcttatggagaaattgtttatcacttggtgacttgtagtcgtgattcgcctttttcgtaatttcttctataaacgtgtcggagattcgccgatgaacttttctttggacgcaccggcgactttattgtcagcacgtatttttctgcatcgatgaacttttctttggacgcaccggcgactttattgtcagcacagatttttctacgctgatgagctttttctttggatgcaccggcgactatattgtcagcacggatttttctgcgcagatgaacttttatttggacgcaccggcgactttattatcagcacggatttttctgcgccgatgaacttttctctaaaggtttctcttttcttttgtttcttctttaggggtttgctgcaaa

SEQ ID NO: 31360 - DNA, 708 bp, Medicago truncatula
  Intron number 1 from transcript Medtr5g041090.1 (locus Med tr5g041090) derived from phytozome v7.0 (chr-ID MtChr5; po s 17587534 to 17588241 reverse strand)
aacgctaggcatcttagtttcggagagcttcacaggttctttctcatgattctcattgttgcttcatccaaaactttgtcttcgtttgatcataatgtgcttgtcttttaagatatgtacttgtagtagttgtcattggattttgtttagggtttttgaaattatcgatcagtgcctaataaagcaaattttcagaaataattggagtaacatatggaaatctatgaagtgcatgcacacgacagacatacacacctacaattacacgttaacacaagtaacaatttgataaaataaattgattgaatataattacatatgtcagcgtcatgtcagtgtcgtgtcaaacacatgttaggtatccaataagccttcactcagaagcatagttacatattacatgtttggtagtatgagaatataaagcttcaatacacatctgtttgtagtgcccgtattacctaattttatccaataaatgtctttccaactactcaatacgatctctgctccggcactcaaaatctcttaatatttaaatagtaagtatcaatagcaagttgcaacaaactagtgccactgaccacgaaatttttttatattaccttttctttcattttgtttatcgatgttagtttgcaagagatattttctttctctaaacttgaaagagattttctgcaaactctatttgcaccaccggaggtt

SEQ ID NO: 31361 - DNA, 749 bp, Medicago truncatula
  Intron number 2 from transcript Medtr4g136150.1 (locus Med tr4g136150) derived from phytozome v7.0 (chr-ID MtChr4; po s 33187114 to 33187862 reverse strand)
gaatttgacatctccaatgtaagtgatactgccttattgtgcgaattgcatgattttagtgcatgatctttcattttgattttcgctatttgtaatttatgttttgtactttctgttttaacattgtgcctttaaacttatctgttttgcagtttctgcttgatccttaatgattgaaacttcttatgaagactttatgtgcatgattactgttcttgatgtgccactttttttttttgaaattattcagaacttcatttcagtttttaagtagtggaatatctcaaaccagctgataaaaaaaacactttcgaaattatgttgacagtagtgcatatgagtatgatttcttgcaatcctgtgatgttattgattttttttatgatctttgagttatattattttgctaatatttggcaactttctaaaaaaaattagttaataatttgtttttctttattggagcttctcttattcttttagtgcatcttcatttttgctttttctatttgagaggaagtagaaaactaatagtctcaaatacgtctatgttcagccccaaattgaaatttgaaatatccttgcattaatgagtgtatcttaggtaatatacacgtttgcaagactcgctgtgattttaacatgaaaccgatgtatgtttttgttttgttttggagtgctgatgcattttgctcttttccgtatcggttgcaggtctctgagttttttgggtgttggctgcctttcat

SEQ ID NO: 31362 - DNA, 689 bp, Medicago truncatula
  Intron number 1 from transcript Medtr4g136150.1 (locus Med tr4g136150) derived from phytozome v7.0 (chr-ID MtChr4; po s 33187919 to 33188607 reverse strand)
gtggttgcctgcagtggctcgaatcctactctagagtgagttgtttccttctttatgcatttatttatatttaatcactttttttttttttttttttttttttttttaagtttttagctttagtttcttctacttttacatgtttgattgaatgcctcattgatttcactttcaacactcatgcccttttcgtgttacaaatgtgtgttttagaatttagatttaggcttgaaatcgtctctgatcctattattctgctcccacgatacaaaaggctattcaacaccatacttgaaattgtcttgaactgttcttaaagaatttgatgtattttagtttgcatattttataaaggtgtttgctaaaaagttcatgttatatgcatgcatatttgatttactttaaagtaatttattttgattcatatacctttgctctgtgactgagaccatagtattgttacacaaatatttgctgagttaacattgtgcttttcaatctctaattgtactctaattttcatggaaaaagtaaatttaaattgaaacaaagatgcttatgatgttaaaatgtatccatccaatttatgtatattgccttcattttcgtttcttaattgtcttcacaaaagtattttggattcctaacaacctttgatattaactttgtccttcttgcagttcaaagta

SEQ ID NO: 31363 - DNA, 672 bp, Medicago truncatula
  Intron number 1 from transcript Medtr7g005490.1 (locus Med tr7g005490) derived from phytozome v7.0 (chr-ID MtChr7; po s 468512 to 469183 reverse strand)
agtagagcgaacgttcaacaactccacaaagttccgtgagacattgttactggaccctgtaaaggaagtcttacacatactacagtaacaggtacttttggttagttttaattcaagttagttgcaatagttacttacggttagcaatagcaatttatggtttgttataagccatttacggtgtatagtttggaaaacaacttgtttttcaagtaacatgtgtatataaacctttgtatagtgtgactcaaatacaatatacatgaaatcataatttcacaaacctcttcttttattcttcttatttttctcattctctctaaatcacacaacacactgaaaacccctaaaactgttttctgttattgttgcttgtgcaacaatttcatagctgcgctaacactttttgatctctataaggtgaaattgttagtcgtcataggaatcaacattttatgactattgtcaatattgttcacttaatattttatcatattttccaatttgtaattttatttatattttgttataattttttttttttacatgattctacgtagttaaagctcaattaacaacattaaaagaaaataaatgatatattagggaaataagaaaaggaactaacatgcgtgtctgtctttttgttttgttttacagagcacgacatca

SEQ ID NO: 31364 - DNA, 816 bp, Medicago truncatula
  Intron number 1 from transcript Medtr7g008980.1 (locus Med tr7g008980) derived from phytozome v7.0 (chr-ID MtChr7; po s 1456585 to 1457400 reverse strand)
aaaaaacaactgacaagggctggattcagattgaggtgaccggtgaattctatcatttggagaaagataaggtgtggacaagcatcaatcacatctcttaaaacaaaacaccatagaagagaaagaacgaatggaaaaataggtggaaaaggttcataaactttgaacaagtgagactaataccttatgcaaagtgtatcaacattcttctcacaaagaagaaaaagaatagcattgttgattacatgtttaaatatccaccctgacaagagtgttggttcgtcaagctcgagatgttaaacacgcgtttcttgggagacaacccacaagtctagtcttttaattatttcaaaaattcaatcaatttttaaatttctactgagtcctaggtatatacattatgatgactttttgtaatgctgattttgaaattcgttttaccttttgaattgcatcagtttctttttagttcttccaatccattaaaagttttttttttgaagaagcaatccaataaaagttgatttcaaagctcaagtacttgttcctaacaccagggctgaagtcaaccttagttacggatgtttgaaagcattgtgattgaggggaatgcaaagaaagagacattcatcaaactacatatcttttttttctctattaccaaactagaaagactttgagcctatatatattgaactttttttagcctagaaagagaccttagttacggcacatagaatattgattttacttctgttttttcttcttttcggtgggattctcctcagcattgcaactctggcagttgctcagaat

SEQ ID NO: 31365 - DNA, 384 bp, Medicago truncatula
  Intron number 1 from transcript Medtr5g097620.1 (locus Med tr5g097620) derived from phytozome v7.0 (chr-ID MtChr5; po s 38913534 to 38913917 reverse strand)
ggtgtcaacaatttcaaccaaggtatcaatcttattattaatatctttttttaaaacttcatatcttaaaaagaatttgttttgtgtacaatttatgtgatcacatgagtgaagaacaatatatttaaaaaccaaaagctcatattaaaataaaattatagatttgaattttgaaagttcatagcaaatcgatcaaaatacgaaaaatgacctgaaaaagaaaaggtaaagaacgaaaccactacatgaaagtaagttaaagaatgttgaggatctctaatagatttgtttttattgttattattattattattattatgactttaagttaatatttgtttcacatgtcaaatgcagagtgttaccagaggaataacagtgttg

SEQ ID NO: 31366 - DNA, 414 bp, Medicago truncatula
  Intron number 2 from transcript Medtr4g141640.1 (locus Med tr4g141640) derived from phytozome v7.0 (chr-ID MtChr4; po s 35015429 to 35015842)
taatttcgtttcgtgatcacaccttcgctgttccggtatgttctggtttcattccattcttttgcctttcttttatgccttccattggttttgcaattgttggtcttaatgcatatgattttgctgttctggttatgtttcttgttgattctatttagatagttggtcttcgtgtattctatttcatttttcttgattttatgttagtttccttatgattcagaatgtttcattaagaagccacttttcaatccatttcagtcacaataagagaattcaaaacctttcccgatttgattttagtttccttgtgattcaaatatacttcaattcgttctatattatacttttaacactttattttctgtttgtcccatagaactactatactgtcggcacatcaatcgccgctgc

SEQ ID NO: 31367 - DNA, 333 bp, Medicago truncatula
  Intron number 1 from transcript Medtr4g136900.1 (locus Med tr4g136900) derived from phytozome v7.0 (chr-ID MtChr4; po s 33564414 to 33564746 reverse strand)
gctgccgttgcaaatcccgcggatcgtatccttcttcgttttttcttcaattattttgaacttgttattatttttttttatctattttcatcaaccgttgattagatccaactgatttcgtttttttgtgttgtttgtgttgaattttttttgcttgaaattttttattgaaattaattttattgagctgaatctaggttttgggatttggtttttttgttgaattttattgttttgtgtttcatgtgaacttcaattttgcgttttgttgttttccttcactttattgtttctacagaagcagctgaattgttgcagaagttctcattagaa

SEQ ID NO: 31368 - DNA, 932 bp, Medicago truncatula
  Intron number 2 from transcript Medtr5g010060.1 (locus Med tr5g010060) derived from phytozome v7.0 (chr-ID MtChr5; po s 2394264 to 2395195)
cgtcaaaccctgctatctctgatttgcctctggtattctcattatttcctttttcatagattcgattgtaataatttgctgattttacagttttaagttaattagttctaattaacggttttgatttatgaatttgcatctagcgttttctttttgattttcgaatttattgttctaggttaataagttttaatcggtttggattttttgaatttgaaagtagcgttttcttttttaattattttactttagttttcacatcaacacactcgctcgagttcctgattgtggcttattactcttgaaaaactgaacagattcatggaaaattgagcagcagtcgagtgaaccatggcttgttgaccagattatcatatgtttttctctccattgaaacaaaaaattggataaacaacttagttagcagcttatagcttaagtacttatcatgataagtgcttatgtatagctataaactatttctataacaagatataaaacaaagttaaattgtttttcgtataagctataagttgttttcataagctatcatggagagctaatgaaaataagctaaaaataacttatgaatatgtcataagctgttttcataagttcttctaaacagtctctcaagtgcttacaccagtagataagctcaaataagacaatccgaacacactggtctcttatgagacctaaggcagcaaaagccaattgtaatgatttgctaattcaccattttagactgaggtttataagttctaatcaagagtttgaaatttgcaagtagcattttgattttgatttatttcaccttaatttttattggcttgtttttctattcacatacgcacattcctgattgtagcttattactcctaaaaaattgaacagattcaaagaaaatcgagcaacagtcgagtgaatca

SEQ ID NO: 31369 - DNA, 611 bp, Medicago truncatula
  Intron number 1 from transcript Medtr4g079350.1 (locus Med tr4g079350) derived from phytozome v7.0 (chr-ID MtChr4; po s 15896668 to 15897278)
tgcacttcatattgctgctaaacaaggggatttaggtattatggcttttctgtagtttttcaattgcttgttcttttgtgttttgtgaaaggagtaatgagtggaatctcgatattttaaattgcggttgaagtcatgttgcggtctttgatattgtagagaatcttagtcaaaagctgctgatgcagcctcaattatgattgcgaagacatcgaaaatcttgatgttgcaatccaaattgcagtcaaagagttttttaaaagaaaaccttgagtagatttttatgacaccaagttgctcattttgtgctttttttttttttatgtgtgtgattttcaaatgaaatctcagttctgttgttattggatatgcctcgtaatttactgataagtggataggttgctcttgccttgtaaagtgaaccgtagtaattaaacacaagttgcaatttgtaatcctaaacttgaataatagaaatgtgttgcaaggcacaattatccgaactctaatcatatcttgtttgtttttgtttgcatcttcgtatctattttattttgaaccagggtttctgttctaacagtttctttgttgtagatattgtaaagatccta

SEQ ID NO: 31370 - DNA, 783 bp, Medicago truncatula
  Intron number 1 from transcript Medtr4g149520.1 (locus Med tr4g149520) derived from phytozome v7.0 (chr-ID MtChr4; po s 37193744 to 37194526)
tggatctggaaggaagcaacagctagctgcattaggtatatttttctgtgagaatgattgttcttgttgattgtatttgttatttagttcataatctatttgactatttgtgctttgatttcagtacatagagtatatcgcaattcaaatatcggactgatatcttgttgagttgagattcatggtgttatgttttgtttttattactgttatgatcatgattatacactaatgataggaggtggatgatggctgtgttttcatattgcgaaaatatattttataacgaactcttttgttttcctgtttctttttccatttctacacacattactggtggaagattttcttttgatttcatccttgactattttgttctatctaggttcatgtttacacaagttagattactgacactatgatttggttctgtatattccatggttactggttggtcataaattctactttgaaaatctaagtaaatataattgaaataggcggatttcgggggatgtattgaaacgggttgccatcagcataatttctgatgttggcctcatgtgccgacttcattaaatgcactccaggcttgcatttatggatttaaaattcaagaaaaaatggacactgttttgcatctttccccttttccaatcatgcaacttgttttactgctttgattgtaaattgtggtagtaataataatgaataatacctttattttttgcataaaatatgtggactattaacatcctggttcatcatttcataggtgactgg

SEQ ID NO: 31371 - DNA, 546 bp, Medicago truncatula
  Intron number 1 from transcript Medtr5g074690.2 (locus Med tr5g074690) derived from phytozome v7.0 (chr-ID MtChr5; po s 27000245 to 27000790)
ttattattattttttatttttttattctttcataatttgggtatatacgtaggttttatctattgtttgtttgtctctgttaacatgtttttgtggtacaacaacaacaataacaacaggaatttacagagtacacaaactttgatgagtgtttgcaatatattgaggattacatgatcaaacatggaccgtttgatggtcttcttggattctcacaggttcgttcattagcttcctaattcatttttttaatttaatctaattgcttaaaaactgatgttgaaattgcacatctaaacttttatgtttgattagatttataattggatctgaatctgatgaagtgtttgaatttgacaaaatagggggcgatattatcaggcggactgccaggtcttcaggagaaggtatgtaaaaaactgacttttaattcatctgtcgttagtccacgttgctttgcttcaaattggtgcatttatattttaagttgtgtaaatttttatatgtgtagggtgtggcactcacgaaagttcccaaagtgaaatt

SEQ ID NO: 31372 - DNA, 818 bp, Medicago truncatula
  Intron number 1 from transcript Medtr7g011090.1 (locus Med tr7g011090) derived from phytozome v7.0 (chr-ID MtChr7; po s 2579907 to 2580724 reverse strand)
cttttgagaaattagataaggtatttttttttgttgcttaacacacccctccctattttccaccttcatgaatgaattcctaggtttgaaatagttgtgtaacggttgtggttgcggtcatcgatattgtggagaatcaaattcggatgcggcctctatcgcagtcacattgcgattttgataacataaaaaaccattatgtcgcgattggattcctatgttttatttatagaaaaaaaatctaggatgagagggtttgtagatcacgagaccgagccagagaaaaccttgatatcactgagaatcacggtcaaatgcggctgcattggggtttcaacgacaacaaaaactgtaatgttgaccccagatcgcggctgctgacctttatttaaaaccccctagattcctatgtttttttatagaaaataatttaaggatgagggggtagcaaatcgtggacaaaggcaggtgtacgtgtggttgcaatgtcatgacagagacgtcaaaaacctatatattgcagccgcaattgcagttacaggccacaatttagaattatgatttagctaccaaagtttaaggcagagaaaacctttagaccctaatagcatattaattatgtgtatcattgctgcaaagtttcttctctttgatttcaccatgatacatttcacattctctaagctaggatttcttggccttattgccatgccattctttggtaaacattaatcaatttaccatctttatattttgtttcaatgtgtatttatgtctctgtaggttggacaaggtacatatagcagtgttttccaagc

SEQ ID NO: 31373 - DNA, 1027 bp, Medicago truncatula
  Intron number 2 from transcript Medtr4g069690.1 (locus Med tr4g069690) derived from phytozome v7.0 (chr-ID MtChr4; po s 13358979 to 13360005 reverse strand)
aactttcctgcaccacaagtattgttcttgatttcttttttagtttaatttcattatattgatctgggaattgtttatatgatgtgtttaattaatgggtattgatctaaattttaatggagttgacatactgtgagatatgtggaaatagatgcaaaatgttagggatcctatgtacataatatttctaggtgtatttggattgacttatttgagattatctattgacataagcatttgtgagattgtgtgggagaatttgtggaaacagcttatgacatgtccataagttgttttcagcttgtttccattaactctccaaaatagcttataaaaaattgtatagcttatgtaaaacaatttgactttatcatatcttttattaaagcaatagcttaaacataagcacttatatgagaagcgtttatagcataagcatttaattaagttgtttatctaaataggtagctattcagatacttggataaaatcaaaaggtgtgcataagtcttaggtctaactcaatcctagaaaataaacttgtaaggggaagagatggccgccacttagggtctgtttagattgacttatttgaattatctacttgcataaacactagtgagacagtgtgggagagcttacgaaacagcttatgacatttccataagctcttttcaacttaatttccataagttctccatgataacttatgaaagcagtttggttttgttttatctatgttttagcttatatatacacatttatatgaaaacacatatgctataagcacttaattaatctgtttatccaaacagaacattataaccactattcagaacatagaccattcaatccaaggctcttaacaattagtcttttttcgggcgagttgtaaattgtaatggattctgaattttgaagcatcttttcaatgcatgagacttaggacatgcatagaagttgaagtgaatccgctgaaatatgctaactgagttaacattgacattgaatctacaggaactaatag

SEQ ID NO: 31374 - DNA, 329 bp, Medicago truncatula
  Intron number 1 from transcript Medtr5g039180.1 (locus Med tr5g039180) derived from phytozome v7.0 (chr-ID MtChr5; po s 16572540 to 16572868)
gttggtggggcctttattatttttttgttagtattataatttgccgttcgcgatcaatttgctggaagttttatcgtgatgtttagcatcactatatattgatcgtgtcacaatattcattgcttttatcatgcatcaaattttggttgaaaagaagaccataagaaattatttttcttctttaatttgaataggttagttttttataaccttaaaagaatttgaattgttttggtcaacagaagagaaagaactagaattgtaataaccttatcataatatgaatgtgactatggtgcaatttcttgaacatatttgattgtgtagga

SEQ ID NO: 31375 - DNA, 896 bp, Medicago truncatula
  Intron number 2 from transcript Medtr5g037420.1 (locus Med tr5g037420) derived from phytozome v7.0 (chr-ID MtChr5; po s 15724454 to 15725349 reverse strand)
ctacaaagtgtcgttctgaattggaaaccattaaggtctgaaaagtgtttctttacatagctagaattttacgatgtagagaattcttctagtagctcttctctgcagcatcctgtcatctttttctatacacactttcactaatatttcggattagtttagaaaatctcccttgtacattatttttgtgtggatgactgaatgttattagattgtattgatttgtcggaacaaattcatccccaataatattttttttttttgtatttgtgtatgtggattcaaaattataaatttgcaaaattcctaatcatctatttgctaagtttcatttgtgtagagttaaatagatcaatctttcttaataaaatgcgtttatggtaaaaactaaaaagagaaaggcaaagaacaaacatgtttttatttatgtgttttacagaacatgtgtatgcttgcatgtacaattgtaatgtttgtagctattttgctctacgttagagagaaagggagaagaggtccaaaatggatcggttcgaccgatacagttgatgaactggcaggaaataatttgatccatcctattaaataagctttactagttcttcatgataaaatcttcagaagtaataagatgagagaagccagtattcagtccagaattgttagcatgtagctgaagtagtattgatgctatttcaaaaataacctgacttgaagagttaatcttttcgatcaggggttaaagaatgttatgtcccgatttctatgcatatataatgtgatttatagtatgtggtctgcatgatcttcttgtatttctggttcttgagaaaagctcaaatattttaagttcttctgcaggaaaagtggcttccaactctcagaaatcttgtggc

SEQ ID NO: 31376 - DNA, 612 bp, Medicago truncatula
  Intron number 1 from transcript Medtr4g158620.1 (locus Med tr4g158620) derived from phytozome v7.0 (chr-ID MtChr4; po s 39884239 to 39884850)
gatatgtcatggcgacaccgagagcccactatcacacaaagacgttgatgttggtggtggcatcatagagggtacttccgattctcgcattcttttttactgagcggtttcattatgttgcgaagcggaaaaaaatcaaagaacaaaattaggaatatggcaatggcaaattgtacacatttggagctttcaatacaatttatcctttgcaactttggtataccagattgcacatgatcggttctttttcaatatttttcttttcttttgaatagtacgtatcaactattacttttgattatagttttacattttttaatttttcttcaacaattgtaattatttctagaattctatttactgcagatgcttttttaatgcctttcatacattctgtttctattttaggggatacggttattaaaaataaacttctcccgttagaaagattgtataagaaaatagtgatgataaggaacacagagataaacggtacaaaaaattaaatgatttattggtagaaaataaacagttaaatgatttcactttttcattttctagaattttgttatggtttattggtttgaactttggatttcttcatgcagacaa

SEQ ID NO: 31377 - DNA, 551 bp, Medicago truncatula
  Intron number 2 from transcript Medtr4g158620.1 (locus Med tr4g158620) derived from phytozome v7.0 (chr-ID MtChr4; po s 39884884 to 39885434)
cgacggtgcccgaatccatttcacacttacaatttgctatttttttaataaaaaggggtttcaatttgctattgatggtgagtttttttttctatagcagtgaaggattcatggtaaagtgatgctaagtcaacatttacaccagtttgcaaccacaaatgccttgcagattggaggtttcttgataatcataaaggaaatttttgttgtgataatgattgggtgagaaaaatgtaaaactaatagtactccttatatccttctatgaaatggttttttttttttttaaggaaatatacttccataaattttgtttcctctataaacttgatgtgtgcataatttgattaatttttgatattttgtaccatcatgaattgttaatccaaattgcacacttttattatttatgacagtttctcaaagtaacttctaataactctaagtaactgatttatgacaggttctctatctatatttgccaattgctaatgagaattgaggattgaacagttctattgtttttcttttcaagacaaagaatcaagaaa

SEQ ID NO: 31378 - DNA, 934 bp, Medicago truncatula
  Intron number 1 from transcript Medtr4g130100.1 (locus Med tr4g130100) derived from phytozome v7.0 (chr-ID MtChr4; po s 31125285 to 31126218 reverse strand)
cttgtttcattgcaactctttgtgtgtagtgaaaggtatctacaggagatagatcaatgtatatgattatttgatggttcattgcaaagttattgactaaaccattgtttatttgcataacctaattaatcatcttgtcaaagcttttataattaaaaaggaaaaggtgggaaagccttttatactatttataatcaattgcaatggatatatggatgccacttgaaaaaaaatatgatgaaattatcacactgttaagaaataaatgatatttgatgtcaaaatctctcccaagccgaatacacttgtaagctcaagaagttggtttattgaagatataatattagttgaatgaataatttaaacatccattgcctttttgctggcatcttgaagcatatagagtgtactaagcatatgattcttagcatatattctatcaaaacaaatgattcttagtatacatggatatgccacacaaaagaagaagcatacatagacttgagttttttttttattttttaaggaagacttgagaattttatattaactacaaattatgtacgatattaattgttttgcacttgtagtataattttttaacatgcattcaattaaatcacattataacatcactttattatcgagacggatcaaatatattttgaggtttaaataaatcttactataatagttgtaccaaaaaaaaaaaaaatcttactataatagggtttttagaaaaacacaggacttattaaaaaaaataagtttgttaagttcaatgtttgaaccttgattaggaaggatattaggcccttatattggccgtctaagttggacagacaattatagttaatttacgtgttatatatatttattgattaagttaaattgttttaggtcattattggtccaaaatttggaggtattataa

SEQ ID NO: 31379 - DNA, 739 bp, Medicago truncatula
  Intron number 2 from transcript Medtr6g005520.1 (locus Med tr6g005520) derived from phytozome v7.0 (chr-ID MtChr6; po s 364977 to 365715)
ctggccctaattgtgagcctaacattgtttttcaggtgaattagttagtttatttacttctcctacattttcttgcaatatgtgtgatgtgtaatcactagaagcactagaatataattcaatatatacacacacgtgtgtgtcaagtaaataaatgttttagaatttaattcatcagctttttacatttataaactaatcatcatggccggcccaaggccaaggcaataagacaagggttttgagcctaaaaaatatgaaaaatgctcttctcccaacaagatttgttcactcccaatcaaactttcaaaaatacttttggtgtgagttaagtcacatatatgttaaactcagtgtgacttaactcacgcagcgtgacttaagtcacattgaaaattcacactgagttctggcgtgagttaactcacgcaggttataaactcaacgtgagttaagtcacgcgggttataaaccatatgagttaactcacgcaagatattttgggaagtttggttggtaccataccctttagatttgccaatacagataaacaaaaatactattttttccttgcattcggaggggttggtacgatgatgttggttttatatcttgaagtatgttcatcttcaagattccaaattcaattatctctgtgtcaatttgggtgaataaatttaacttcttaaaaaaaaattaataattaacctgtcgtgttcataaaaatacatgcagctgg

SEQ ID NO: 31380 - DNA, 762 bp, Medicago truncatula
  Intron number 2 from transcript Medtr7g022320.1 (locus Med tr7g022320) derived from phytozome v7.0 (chr-ID MtChr7; po s 5550109 to 5550870)
gtcttgttggtactgtttgtaattgttaacatgttactggttttagtgtatttttctttgtttatggtagtcagtttctgttttaaggctaagttattgatgttctgatgttatgtaatgatttatcaatgaattcatgttacttcttgttgtttaagctgaatattttgtctgaaatctgcaaaatttctgaaaaatgaaatacatttgaagttcttaaatctgaaaatccacttgaagatgatgatgatatgtatgaaattgtaatttgatgtttttatttttatttttaatatatattattttataaatggtggtttagtgttggacagttgtgtgatgtgcagtatctgccatttttttttttgaaaggatgtgcaatctctgtaatatgaaatagtgtgcggtacttttcccactttaccatgttattcatatcacaatcattgatatatgtacacattgaacatctaaactagacttcaagagctagcatacacacatacacttgttagtttggtttctcgttcacaaaaactttgttagtctgatttcatgtgacaaacttgacaaaatctaaatttcatttgcactaattggtttaattaaatggtcacaagcaccataattaattcacacaaaaatgttagttaaaaattaatgttgactcttatataaaaatgtatgtattacaattacattgaatctaatgttttgttatagcctcatgcacattcatggttttgagtgagaaggaagatc

SEQ ID NO: 31381 - DNA, 565 bp, Medicago truncatula
  Intron number 2 from transcript Medtr5g009920.1 (locus Med tr5g009920) derived from phytozome v7.0 (chr-ID MtChr5; po s 2294286 to 2294850)
tcggtgacttaagcacaggttttgcttcagttaggaaaatctccctgttactttaataattacaattttaatttaagattaccaataccaatattattacaaatgaaaatgtcaactctgttagtttgttatttctgctgtagttgcggtcatttatttaggtcttgtttggatatacactttaattaagcgcttatagcataatgctcatcatatacatggattggatatgtataagtgttatttatataacaagtcaatttgttttcataaaagctgtaaagttctttttataagctatcctgaagagtttatggaagtaagctcaaaacagcttatggacatgtcataaaattgtttccataagttctccaaaacagtctcactagtgtcgattaagtcaatacaaacagaccctaatgaggaaactgttgtatacttttgccattataagtaagactattttgatttgactatattgatattcaaagactaatattgttctcttattgttttatgctctatcacaggcatttttgctgatatttttctctgaactgggaga

SEQ ID NO: 31382 - DNA, 512 bp, Medicago truncatula
  Intron number 2 from transcript Medtr5g046290.1 (locus Med tr5g046290) derived from phytozome v7.0 (chr-ID MtChr5; po s 19457610 to 19458121 reverse strand)
ctcaagtcagtggttctgttgtaatttgttatgggatggggctgattctctaattttggtggttgaggatattatacctttttttgtcaaatagttatgtaaagcacatgttacttttaattacatccagcaaaatgttagcagtagaatttgtccacaaaaaaagtatagcagtagaatattttttgaaatttgtttacttttttttccgtctaatttcaatccaagaataactaattcctaatacattaaactatggagcctatttcattaagaaaatttaaactcatgaattttatttagggtttttctaacctatgcaagattgcacaggataaggggtatttaatgctctacttttatagggttctccacatcttattaatgactccactttcttgaaaattgaattttttttccttctctactttgaaattatttttcacggtttattcttcttcctcctcaccttttcaggttttattcttgtttcttctctccactgccactaa

SEQ ID NO: 31383 - DNA, 596 bp, Medicago truncatula
  Intron number 1 from transcript Medtr5g046290.1 (locus Med tr5g046290) derived from phytozome v7.0 (chr-ID MtChr5; po s 19458180 to 19458775 reverse strand)
caaatttaacgttcttcctttattttcagttataaattttgattaattcttttgttttgctagatgcacatttttgctttacttttccacttaagttttcccattgtatagttttggaagatccttaaatgcacaaatttgctttcttattcacaactaagtttatgaacattccacatggattttgatatcagcaccgtatgtatattttaaacattcaaatttatatctttataaaatgaaacgttattctttattgatatgaatactagacttttatacattctgctttgatatgatgtacaattttgaaaatatactattatgcattgcatttgtaaacttttctctcaaaaagatgaaatcatagattgtcctagatgtggctaaatatttcgaatggtctgctcccatgaggttcgagtagttcaagcttcgatgattcaagattttttgggtgcgcttctttggttctttgggtacctctgtagtttgccgggaggttgctttctacaggacacatgcatatttttttaaatatgtggcagttccagatgacagtgtgtgtttagtttttgcaggtcattttttgggtt

SEQ ID NO: 31384 - DNA, 756 bp, Medicago truncatula
  Intron number 1 from transcript Medtr4g152330.1 (locus Med tr4g152330) derived from phytozome v7.0 (chr-ID MtChr4; po s 37728416 to 37729171)
cttttattgttcttcaagcattgcaaatataagaggtgagattttgttaaaacattacaggatcatatctttctgaattctttatgtattaaacctttgaaaaattatatttttcatcttttttctcataccctctttctctttctttgagaattttgggttttgaagttttttttatttgttttggagaaagatggtgtttgaatttaggtcagaattttgctttgtttgatatattatttataattatatatatttgtattaaaaaaaccatttttttgactcatggtattgctgaatttgagattgaattcagattacaacatgtttatgttgttcatagttgtcttctcctttgaaaaattgggtttttgtacttgatctattgatattgagggctttttgaataaatttcccttgagctagaatttttttatcaaaattttgcagatgaatttgaatttcatgatttctatggattttttttttttttttgtttcaattttcttcattgtttttctttgcttgaaaatggtttcaattgtgttaggtatttggtaggtaaggggagtttttagttgaatatttatgcaaccattttctgcttagtttttgcgtctatctctttgaattttgcaattgaataatatatatagcttttatattgtaacagagtttaaaatattaaaattttcccctccttttttggtgccatgtttaatgtaattttttccttaaattattttccagattaag

SEQ ID NO: 31385 - DNA, 933 bp, Medicago truncatula
  Intron number 2 from transcript Medtr4g133850.1 (locus Med tr4g133850) derived from phytozome v7.0 (chr-ID MtChr4; po s 32149410 to 32150342)
tgtttttgtgggtttattgttgtaaggtgtggcaggtctgtgtcgtgctttctgctttgtctgtattattgtggtgagagccactgattctagttattctttggctcttttttgtttgtatgtttctgcaatcgcacttcttgttgaataaaaaaaaaatcagcattaattttttttagggcaaagttgttcaatcaggtataaaaaagtgtatttctactaaaaataagttgtatgcgtgcatctatatcatatacggatggaaaagttcttattcttgttatttttttcatgtaatttttttaactcaaattttcaacagaattaacattagtaatttggaaataagcttctttgacagaataaatgtaatcagaactccatttccaagcatcttctatgttatctgtaatgaaatgttagtcaataaatctctactaactcatcttatcattgaaaacgatttattttccaccaccaacaatcacctatgactatacttttagatgaggtacattcatctgattaaaatattcagttggggaaccagatcaattttctacccacttgtccaccaagtgaactagtgaatcaaatttagcgatgttaatattcatcaaacggttgattcaggcactgctgttaagaaattcatatgcctgtgaaatgaagttagcatctctacaatctacaaaaccaaaatgtttattccatttgctattttttctttatgagtccgtggacgaagtggtaaatggtaatcaccatcttaaactcacaaacacaacagcgagttcaaattcggggtgaagttgttcaacttatcaatatgtatatttttatgttgagctaggccttaagaactattcaattcgctcttttttttttttgatgccatgctctttttttttttttttttggtagatagacgaa

SEQ ID NO: 31386 - DNA, 637 bp, Medicago truncatula
  Intron number 1 from transcript Medtr4g149590.2 (locus Med tr4g149590) derived from phytozome v7.0 (chr-ID MtChr4; po s 37221715 to 37222351)
gagaggagaggaggacagcatctccggccgaagcagtaagtttcgtgtctttcgtaggttctgatatattcttatcagttattgtacctatttgttttctttaactactttggccatacgagtttactctgtccaatttaagcttttttttgctttaagagaattttcagctttaattaagtgattataacttaagatgaaaataagttgttttcgaaaactatctgagaaaacgtatgaatataagctgaaattaatttatcaacttgtcctaagttgtttcaataataataagttatctcaatcaatcttacaagtgtgtaagtgttcatggctctccagatgtaaacttaaacaagtcaatcaaaataggctatgaattgtctatttatctacgagaaggggcactacactagtaattcgatgttcggctgagagacatttaaagaccgactaaaaaattgttctacacagaaatcaaactcgggaatagggagggagggagggagggaggttattatatttagttgataaataatgtaatgttataattctttcaaatatgtataaaaaggatggggcacattccaaaaagtgtcttatgtatctttatttactttcaagatcaattacttaa

SEQ ID NO: 31387 - DNA, 418 bp, Medicago truncatula
  Intron number 1 from transcript Medtr5g083930.1 (locus Med tr5g083930) derived from phytozome v7.0 (chr-ID MtChr5; po s 31900047 to 31900464)
tttagatgtacttgatattaagttgtaattaattttttttcttttggctttctggttccgattctggcatattgggtttttttttttagttcagacagaaaagaaagtagtgattaattttatttttcgaaacaagtagtgactacatataaaattgattttatgatgtttatgagtttgatttgttagttcttcatctgtgtttttattggtagttttgcccaatttgacatgaggctctcgaaactaggctaagtactttggtgtatatattactactttggtgtctatatacttgtatgtctaatctttttctttggcatatcttatgccgttattaaattgggttaaacatgaatgaattattgttactgatggtatattgatgtatacaaatgtaggtgttacccattggaac

SEQ ID NO: 31388 - DNA, 1060 bp, Medicago truncatula
  Intron number 1 from transcript Medtr4g133970.1 (locus Med tr4g133970) derived from phytozome v7.0 (chr-ID MtChr4; po s 32212774 to 32213833 reverse strand)
tattcattccaaattctctgatactaattttcaaggtaaccccacttctcaatttcttcattaatctattaaaaatcttaacttttaatttttggcttcacttagatggattttaactgttctctttattttgggattgattgattttaatatatgaattttttgtggtattatgctatgaattggagagaaaaaaatatatatataattaaattttttgaaggttttttattggaaggaagctttttaagcaatttgggagtaatttacaagctggttgtaaaatcatggtcatggctgatttggtttaacactttatcctgattttctgtttgcatatatatggcatatatgatgattatgaaacttcaattaccataactatatgaattatgtcatttgtttttgttaaaagtattggtcaccctcacatattttatttttgaaagaaacctactctttttaaagttgtttgtagttattattggcaggcctagcaagtggtatgttaaatatttcagagtggtgagtatttaatgattatagttggttagttttgggtgtcaaagttgttgtttgtgtcatctgatttgtgtatctacaacttagtttatgtaaaagtacaaaatttatacttgcttatcttagtgactttgacagaatcacagtagactaccgtattacaaaagttacaatttagagtttgaaaagataaccgtgccaccgtggtttcgccgaacacattgtcaatccaaacatgtgctcaatactttggaagaatacttttttttgtttgctttaaaattatgcactcaaaagcttgaacctagccggtttatattagcatggtcttggtagatggcagaattgatcagttccatgcttcttggagtaaatattttggaccaaataaagtacttttttttgttcattaatttcaccaaaagtcatttgttatatgtaatcagtctcatgtctggtgtccgtgcttgtgtcgataattcatagctaactagtttgtacagattttcagagttataccagaccatcagttgttttg

SEQ ID NO: 31389 - DNA, 946 bp, Medicago truncatula
  Intron number 1 from transcript Medtr6g013780.1 (locus Med tr6g013780) derived from phytozome v7.0 (chr-ID MtChr6; po s 3028336 to 3029281 reverse strand)
gctgctgtgtgtttgattttgaatcctatacatgactttttgtgtgaaatatggtatatcttctgtttgaaccgttagatctttgatctaacgatcactgtgctttctgcattttacactatcttttatgcttttttctggaccctttgatctttgatcaaatggctgtgatgtgatcttgagggcttgatctggacctctggattcatccaacggtccagattaaatcctgctgagttttttttttttaactgcgtttaaaataccttttttacactttcttggtgttttatgcttctaaaaaattttctaaaaatatttccctatcattttaatttttcctctaagtattagaatttatttgcttatttttgcatttatttcctttacttcgttctttaatttttgctcattaaaattccatatatgttcttgatgcatttttacatattgtgattgataaattctcatgtttttacccctttttattgcatattcatttggtgcatttttcatcatttccattatatttttccttgtttcactaacattttgttccttatgtgacttcactcatagcatttcactatctcctccactttctttagcttagcatttatttttgcaaattttaattcattcggtgatgtaatttgttatcattggtttgtagcttggcaaagaggccatagaatgtatttaggcaatttttgtaatatggactatggacactatggcgcaccggcacgcacacactcaccctagatgtatgcctaggattgcatgtgtagatgtatggctaggattgcatggttagatgaatgcttaggtttaaacacttagagaaaatccaattttttccaaaaaatatgcaaacaagttcgcttcaaatatttttcataaaaatggagtcaaaactccaacaatttttcaccttttattttct

SEQ ID NO: 31390 - DNA, 840 bp, Medicago truncatula
  Intron number 2 from transcript Medtr5g075340.1 (locus Med tr5g075340) derived from phytozome v7.0 (chr-ID MtChr5; po s 27424122 to 27424961)
ctcccaaagctgtgtttccttctgtaagtgctttcattacacttttctgattttttttttttttttttgctgtgaatttcatgtttcattggtattattatctgctttcagctttattgtgtttttgttcattttagttaattgttgatgttaatgaataattttatgtggtcacaagttagtattgcttgatattgtagttaggttcatatatgatttatagtttgatagattaatgtatttaaaatgtatggatgatttacttgaaaatttcatcccacaatcgtaagatccgtgatgttgtatgagacaaagtgttgggatgtaaaaaaccaacacgaaagtgaattaagcatatcagagatgaggatgttgcgttggatgtgtggtaagactagacaaaatagaataaaataaaattagaaatgacaacattagagagagagagagagagagagagagagagagagagagagagtagcacttattgtataaaagatgggggaaactaggcttaagtagtttgattatgtagagagaagacccgtggactttgtaggaaggggagcacatcagatggagggtagaggaagacctagaaaaactataagagaaactactaagaaagatctacagattaatgagttagataggaacatgatatatgatagaatattatgacgtcgtttgatccatgtaaccgaccccacttagtgggatatggtttggttgatgttgtgtgtgtgtgtatttatttaacttttattgttttatttcctgttttacttgtattagttgttttcagcgttattattattttgttctttttgtcgttgctga

SEQ ID NO: 31391 - DNA, 379 bp, Medicago truncatula
  Intron number 2 from transcript Medtr5g078260.1 (locus Med tr5g078260) derived from phytozome v7.0 (chr-ID MtChr5; po s 29005333 to 29005711 reverse strand)
ttgccctcggagctacaaggttggtggtgttccttttgttttgttttattttcttaatacccttaagttgaatctttctgtccaaggttttaactaatagtcaaagtcgcgtcatgtgtgttaatattgcaaaaatcgtgatcagatacgactgatacaaccacaatggtggttgtgttgccgttgcgaagaaagacataaaaaattatgatgatgcggtcatgttttcggtcggaaaccgtcttttaaaacactgctctaaatatcgtgtcaaatccttccatgtttgacaagtaaatttggtttgtactttatgttaacaaataattttgttatcttgaaaaagctttgattctacatttgtggtgtgcatgtagag

SEQ ID NO: 31392 - DNA, 1014 bp, Medicago truncatula
  Intron number 1 from transcript Medtr5g034140.1 (locus Med tr5g034140) derived from phytozome v7.0 (chr-ID MtChr5; po s 13978445 to 13979458 reverse strand)
ggttttcggtaagattcaccaatttgatagtttatcccaattttaatttttggagaagtggtgtgattcaaaagccaaggactttttagaaagacaaaaataaaaagaggaatagagttgatgcagcaaaaatggctttgtgttggaataggagaaatcaatttggaaagaagaaagaaaaaaattgaaaacgtaactgagagagaagaaaggaaggcgaaaggaagaaaggtgcatacggaacatttgagttgcttcaaataaatatcagccactggatttcatctaatggttgtgatttaatcctctcaccctctcatttaaaaagtcctctcatttaaaatgccctatatatatatatatatatatgacatatcaagtgagaggagtagttacaatgagaggatgacaggaattaatttggaccattggaacaaaatcaacgcttcagatttaattgctctttaaaaagggtcatgcactacaacctccaccacctttcatcctctcattataactactcctctctcttgatatgccataattttatttaaaatttcataaaaattactgtttataatttatatgcattaggataataagatgatagaatggtgtaaacactagttctcatataaaggacaatatcaatacatacatacatacaaaaatttacattgtaattaacggtggttttgatgtgttgcaatgtttaatcattaatgtatgatagttggtcgttttagtattgttgcaaaacaagctcgcgacactaagatctaagacgattatatctctgtgtctttctatttaaaaattattgtatttttttcttcatgccaacaaaatcaaacacatctttttgttcgcactgtagtaacattgggcacttttttcgtcttgcaaacttgtaaaattggatcaagagaaattggacacaaatgagaaacataagcgtttgggaaataaatctattcttattcataagaaatatttggtaaaggaaacggttga

SEQ ID NO: 31393 - DNA, 830 bp, Medicago truncatula
  Intron number 1 from transcript Medtr5g097470.1 (locus Med tr5g097470) derived from phytozome v7.0 (chr-ID MtChr5; po s 38833614 to 38834443 reverse strand)
aaccaattcacgtgaagaatgcaattacttattttaaggaaattaaaagagattatttacttttttaaaagggtgtgagataggttttttgttgatatactctccctctgtatctgattataagattttttataaataaatttttgtcactaattttaaagattatcaataaaatttcacacgggagcccctaatatggacccttatttttagggtctacccatagtcctttgtaaatgacctgcaatagcgggtaattacacttccactccagtataaatttggtacaattcacctttctgttattttgccatccgtttcaagtctaacatgaagaacaacttccacacagaatgtaacaaccacataatgcttcaacctctttgttaaaaactcaaagattgagcttgttgtgaattagatgattagcttgttttgattgcaaaagctcactcgcattaaagattcatatggaggccatccatgtaaattgagaagtgtgtttacccactattacaagtcatttagcaaggaccatgggtggaccctaaaaaaaagggtccatatcccaaatttcacatgcaataatgatttttttagaaaaatgatcatatttaccattgaaaaacgtaaatacattttattccgcgatattacaaattatagagatgtaaaaattgtggtttgcaagtccctatcatcttaattgagagaaagacaattcaaagatggagactctatcaaagttatggaatcctaatttaaaatttgcatatatttcatacaaatttgttgggattttagatctcagataagatcggttgaggatc

SEQ ID NO: 31394 - DNA, 697 bp, Medicago truncatula
  Intron number 2 from transcript Medtr4g107540.1 (locus Med tr4g107540) derived from phytozome v7.0 (chr-ID MtChr4; po s 23512184 to 23512880 reverse strand)
atcaaatcaaagaaataaaaacaaaactcaaagtggtaagattatttttattttttactctttttattgcattaacgtttgaaaattatgaacattgtttttttatgaaattttgattttgattaaagctaaaaatataaatgtttattgctttcaagttataatagaccaaactaatcatgattatctttttcaatgacaccaaaaatataacaaaaaatataatctaaattttttgggttaaatatgtttttagtcctacctttgaagaacagttcttacatttcattaaatatttttaaaatcctcatattttatctccgttattaaaattagtctctgttgttaattatctaacggaatgttgatgtgacggctagtggaatcccgattattttaggattaaatatgttcttttctccctacattttgcttgtcttcgaagaatagtccttacacatgagttgaattaaaaacagggacaaaaagtggtggaaaacatttgataatcaaaacttgctgacataatcaagttttttttttttggttacaaatcaagttttgtcaattatgaaaataaattaaatatatttaacacgtaatcatatcattggattattatacaaaaaattaaatcattggattaagtttgattaactaattggcatgaatgtataaacggtgcagactataaacg

SEQ ID NO: 31395 - DNA, 431 bp, Medicago truncatula
  Intron number 1 from transcript Medtr4g103910.1 (locus Med tr4g103910) derived from phytozome v7.0 (chr-ID MtChr4; po s 22519131 to 22519561)
gtttattgtgttggtctccaaccccttcattcgaggtagcttcttgttcttcatcccattcaatatggtttcagttctttcatgcttttctttcggattaattttgttttcataattggtaatttagcacatgcatgagcttgtgtgtagtttatttttcaacttggattgaaatggggaatctgatgtttactgccagaaactcttgatcttcctgcggataatggtgaaaattccaaggcaaaactgtttcctgcggatttttctaaagatttaggttccatattcaatatcaaaagaataaaaataaagaaattcataatcttacaattttaaaatttaaagaagaaaagaatctaaagaaatgcagctgtaaatccgcaggaatatctgtaggtaaatctgcaggtcaaacgaaaatctgcaggtaa

SEQ ID NO: 31396 - DNA, 796 bp, Medicago truncatula
  Intron number 2 from transcript Medtr4g141220.1 (locus Med tr4g141220) derived from phytozome v7.0 (chr-ID MtChr4; po s 34825675 to 34826470 reverse strand)
ttcgtaatttcattcttcatacacttcagctgcaggtaatctcttagtcttatattactgatagcatgttcttggaacataactaaatttgatacaacttcgtgtatttacatgtctgagatgctgcgtatgttcaatttttaattgattgtgttgagctgatgtgcttattctttgtgttatgtctttacaaacttatttcattcattggtcattacaattcaaagtctcactaatctaactctatctgcttgtaaatatttgggtgaatacagtactgcctccgtctctaagtataggaccctcttgagttttttgttgtccctttttataaaaaaatctttcaaatattcaactgcattaattatttctttaccaacatactctaaataatgttacatctttttctgcaatctctgataaataccttgatgaaaacattaactaatttctcagtcttgaagaataaacttgtaaaacaataacaattgtcaacaaatttaataccaaaatcaactttcttaattcccgtgatttactcaatggggtcctatgaggatgctgaaaaagcttttgtatgacacttactattaatgttaattgtctatgaatagaatagtgtcccaggcccctcagctattcattattaaaggaaataacacttttcattagtaatctttcattgtgggtacttctttggctaagacctatatgtattgtcatgtggtagctctgttgtttatgatacacttgagcattgaacaaacatatacaatttcagagctgggagaaaaca

SEQ ID NO: 31397 - DNA, 704 bp, Medicago truncatula; identical to SEQ ID NO: 30731
  Intron number 1 from transcript Medtr4g087230.1 (locus Med tr4g087230) derived from phytozome v7.0 (chr-ID MtChr4; po s 18316782 to 18317485)

SEQ ID NO: 31398 - DNA, 756 bp, Medicago truncatula
  Intron number 3 from transcript Medtr5g009110.1 (locus Med tr5g009110) derived from phytozome v7.0 (chr-ID MtChr5; po s 1916604 to 1917359 reverse strand)
cacttacaggacgtaattcagaaggcaaactgatactgtttgatgttagtttaccacattttgttcagaattagtttgtagttgacccattggtactaagtttttctgcatctattgatgattagaactatgtatatcttttaaaaaaaaaaaaactatgtatatacatatcgggctgtacaatgatgtattttctatttgtgcaaaaattgatacttactccaaagaaattattttcccatataacccatatcacagatggactcacttttgatgcactgatattttcacccttatgtatgtacatttggtagctgtagaggcaacttcacttatgtccatggccatgcttccttcacattctcttcttgatttttttttcctgctatgattacaagttttcctgaatgttacaatccaaaaactcaaaaagcaaaaaattaaacttaaaaaattatgacacataaggacgctgcaaaaaaattctcacttctacgaataacacaaggatctctatcttgtaacttgcaaacaacaacaacaaagccttatcccactcaatggggtcgggtacatggatcaaattacgccataatgttggatcataaactatatttggatcaagctcattaacctctaaatctttcctaatattttctcttatagttttcagcactatattaaacaatcaatgatattatggaaaaaagaatgactatagatagaggcaaaccttccttcttacaaaccctttag

SEQ ID NO: 31399 - DNA, 552 bp, Medicago truncatula
  Intron number 1 from transcript Medtr7g045660.1 (locus Med tr7g045660) derived from phytozome v7.0 (chr-ID MtChr7; po s 10994916 to 10995467 reverse strand)
gtcttggggtcccttatttcgtttcacaaatcgtaataataattcttatgcatttcacacttcttttttttctctagctagtttgagatgtaaattgaaaacatataaacacaattttcatggcatagctctttagggaagttcatttgaatgaatatcaaaactaatgaaaacaattttttcttctttgtttttttaaaaaatatgatagtattaattttttcaatctatttacttatttaaaaggttggagtagcaatgaaaacaaattaaagacatagaaacatgaaattcatctataatttcgttaccaaggtttttttttttaggaaacgttgctaagtattacacacaacaaaaattagaacaacgtcaaattattcttctctatttttcgttgttaattcaactttttctaaaagaaatgatttgatgagatacttgttacattttagtttttatttaaaaatatatttgttttcatggcgtcgaaattaatgatacataaattttgcaggctggtttagttctaggaccatctttgaagttttc

SEQ ID NO: 31400 - DNA, 739 bp, Medicago truncatula
  Intron number 1 from transcript Medtr4g031900.1 (locus Med tr4g031900) derived from phytozome v7.0 (chr-ID MtChr4; po s 7498160 to 7498898)
ctcagctctttggcaatcctctgaaagctagtagggttaagattgaatttatttcaatactttacaattccaatgttcatacattgccacacactgtttgtaggatgccacaagattctgtcattacttatgttttgaaataataacaggttgatcaattgtagtaatcagaaagactgacatagattcttaacaaccaaaactgtttgtgtattgttaatttgtgtttcttatatttctttggaaaaagaaaaataaactagtggtttttatataatttatgatttgttttcaggtggaagattttgaatccctgatccaggtccaacattctttaaagtcgtagtcatttttgtggaatcgatcaagcaatagacgaactgcatagatagtcaaattcattttcaagatgaacccaagaaacttttattttgtcgtttgtttatgtttttattttattgaataactttatgtggaaatcatatattagtttataagataatgaaatttggtttatggattatttcatatttataattgagaattttattgaatattatacacaacaaccaatgaattttgtcatatagcaatgtggataacttatccaataattctaaatgaacaaataaaatgcattcacattggcctagagagacaaggcaaatcttgaaatagtactctcctaatcaatagttattgtacttctggaagtgtgattattttacaggcaataagg

SEQ ID NO: 31401 - DNA, 963 bp, Medicago truncatula
  Intron number 1 from transcript Medtr4g137560.1 (locus Med tr4g137560) derived from phytozome v7.0 (chr-ID MtChr4; po s 33900640 to 33901602)
atcatacccgcagccccactctcgctgtcaaggtaatgtttttacgttttttacgatcacccttttcgttttaatttcgtgggtcgttcttcaattttgatcacagttttcgtggttttagtgttatttttttagctgacattgttcttcaattatgataatttgatgggttgatttgttgaataatgtatttgtatgatatgatttactatttttttgacgacgtaattagtaatatggagtataaaactaaaattacttatcagatttagcattgattttgaaagattttttgatgatcacaaaatggaatagatgatttgattttttgtttgcctaattgcttattttagatgatagaattgtaatgtgttgtcttaatatcttttgttgatcaacaatttgtttttgtgatattttacataatgcattcttaattgtccgtggtgttatagtaatttgacctattttgttttgtttttgcatatattaattgatgagcgaaatttgcttttgttatatgtctatttctggagctgagcagcgtaggtttgatcagttatgtgtatgatatccataaattgagctttactctgtattctctgctgtcgagttcagtcttttgaggggatgagtaatttttttctctagttgttttgattgtagaaaatgtaaacatcacagaatatatcgttcacatcgttcacatacatgtggattcgatttagtccgtggaaatcagaaaatgtttacacattggttttgagagcaatatcctttgtgtgctgaggtgttaccgtacgaaaatggaaaatcgtttatcttagttgcctaagtcatgaatcactttcatgataacttcaaatgaaaatgttttagtggagatttaattacaatcttctgataacaatttgttaaaattggtctattgcttgtaatgttttctttaggtaacatcaccat

SEQ ID NO: 31402 - DNA, 649 bp, Medicago truncatula
  Intron number 1 from transcript Medtr5g105250.1 (locus Med tr5g105250) derived from phytozome v7.0 (chr-ID MtChr5; po s 42270912 to 42271560)
gcaaaaaaggccgaatattgttcagaaaaaagacggtgaactagcgtggtttgatttaagtaacaagacgattggtgttgcaacaaggttttctttttgtaaaacattattccataaaaaagcattcttccaattggaggaataaatagttgaattattttgtttcttcttgttttcactcatgagttatgccttcatgttatcgactataacaaattaagaaaccatttaatagtatgagctatatatgctttatgattttagtttgaaagtttactactctttttttattatgtttctatttcaattgtatgaacgctcttttgccaattttaggtaggaatggcttatatttgagaagcttgattgtctaattaaatagcaataaatctttgtttaaatttggatttaacagttaacaatactccatcaatgacattggttcaatttctgatgtttagtgtgaattgatattgctaatcagatttcttttactgctgttgaatcattttatatccatatttggatgagaaaaatatgtgatttgatgggacatcttaaggcatactcagagtaatatggttggtataggctgctcaaagaggatggctcacctgataaaaatgctattagaatttcagcaacgatc

SEQ ID NO: 31403 - DNA, 230 bp, Medicago truncatula
  Intron number 1 from transcript Medtr6g062710.1 (locus Med tr6g062710) derived from phytozome v7.0 (chr-ID MtChr6; po s 11628413 to 11628642)
tcccttatcgtaattcttctttctcttaatcatctcttcctctcctttctctaactatctatataatattctttgtttgtctcttttcacatcaaccaccgtaaaaattaaggttttctttttagttattttttcatgttgaaatttatacttatttattcaatttagttttgattctgattaattgtttttagttgttttttagatcaatcattttgttgtaatcattc

SEQ ID NO: 31404 - DNA, 1042 bp, Medicago truncatula
  Intron number 1 from transcript Medtr4g042570.1 (locus Med tr4g042570) derived from phytozome v7.0 (chr-ID MtChr4; po s 10217401 to 10218442 reverse strand)
gcatcagaaatcttgtctcctcactgctgcctcaggtaagcctttcgattctctctcttctccaatttgatgcttgttttttgttaatgggttgatgacaatattgattttcctcaatttattaggcttgtttaatccccaattttaatttccccaatattgattttgcaagggataaatcatgaaatactgttttgatttccccaatttgatatgcttgctgttaaattcattgcaaaactaagggaccctttttcatgttatgtataaaggtttaatttttttttttccagttttgaattcaaattgaaattagggtatgcttgttttgatgttatctttgttcatcacttttcttgtcaatttgtttcattttcttttaggtggagctagcaacaatttttaaggttggggagggattttgtatttagtaaggtttgtctcatattttcttatcacgctgtgattgaattgtgttttggggaataaatgaaacatcccaaataaaatctagaagatcattcaagatgctttaactaatattggataattagatttacataacttcaacaaggaagttttagcacacttgtctagttaattaagtacaagtacacaaaaggtagaatatgatttacaatgctgcaactagtaagtcttagtacacttgtctaattacttaagtgtatgtacaccaaaaagaatactacatcagttttgcaaaatggtaagcatcttcaagtaaacatccgtatcactcagccttttccttaccctttgatatctactcctctgaaaatttaaaaactaataaagggtgagactacgtctcagtgaattccttaactaacaataagcactttactaacttcttagaatcctttaaccaaatcaaataggatatagcatgagtaatatatatatatatatatttctttgtgcaaatcaacatataagaatgaattagtattacacggaggaaataatcttgttaattttaattgcagatacccgtaagtgtgagtgtacttggggataatct

SEQ ID NO: 31405 - DNA, 860 bp, Medicago truncatula
  Intron number 1 from transcript Medtr5g024100.1 (locus Med tr5g024100) derived from phytozome v7.0 (chr-ID MtChr5; po s 9539378 to 9540237 reverse strand)
tgatactgtccaaaagattgtttttgatacaacaggtacatataatatataatataaaatatttttaagtcaaagagttaaacatatacttaaaatttatgcaaaatgaatttcctgcagttagttatcttatcacagttgttgataaaggttgaatagttgaaattttgagtttttgattggtcaaagtcgtgatgtaagccatttgatcttcatgaatggcttagatagactgattgcaatgaccgaatccacattgaaagttgtggaaaacgagttccttgcaattagtgatctcagtttataaagatcgaatgattgagattacgagtttttgttggtcaaagtcatgatgcgagtcattcgatatctattaacaaaatacatgactttgataacattattaaacagaatgttgttctattgtcaacaattctgctcttgcaaacaaggtttggagctgacttttagaacttcacaccatgtgtccattctcttttcttaaataaaacaaaggctgggtctaatgccatcataacaaatttgtttgatggtgtaaactttggcaataaaatgcaaatatgcatttacgagccatttcaaaacagcaatcacaagtgcaacaatatgaattgtacaatgaagtgttctatgcttttaaaaaagttaaattgatcaccttcttgcgcaatatctcatttcatctttcattggtattcttgaatgaagtatgctaaacttaataactgttatagtgcatgcataaccagttgaccagcatcagtacactaagataaagtcacattgtcttcattctgttggaaggtgagttcttactcacacggtttcacatttttgcc

SEQ ID NO: 31406 - DNA, 784 bp, Medicago truncatula
  Intron number 2 from transcript Medtr5g083150.1 (locus Med tr5g083150) derived from phytozome v7.0 (chr-ID MtChr5; po s 31503513 to 31504296 reverse strand)
tcatcaataagtctggtggattgatctactataaggttacggttactcgccactgtggatttcaaatcctttttattttgtttcctgaatgatatatatcttacgctaaattggtatctttctgtgatgactgttttgggttgttatttgttattcaggtcacattgtataacgagtttcagtcaataagttttattaaagacgaccaacatacattttttttttatccgactggtttctcagtatatattagtggtgttaagttatgtctcttaaaagatttcagtatatataagaaatttgaatcattatatcctaataagcaattaggatatgacttcgttttgcaagatggaaataatgacgatttaatcttcctaaattttgtattaaacaatagtaattttagttatattggcagacttgcagcaactcttttatttatatctgcaaagctaaaaaaagacttgaaaaaactctatggaagatcattaaacgagaccttgattaacattagcattttgacaaatcataatggcatcatctaatccatatatgttaactagaattaatcccatctaatgcgacggagcttttgctagtgttgcactttttcttctttaattgaaaactatgatttgaattatggtttataatggaacattaaggcgtaatttgatccatgtagccaaacccagttcagtgggataaggcttggttgttgttgttgttgtaattgaacactatgatttataatttgttaaactttttgatatttaggatt

SEQ ID NO: 31407 - DNA, 901 bp, Medicago truncatula
  Intron number 1 from transcript Medtr5g033480.1 (locus Med tr5g033480) derived from phytozome v7.0 (chr-ID MtChr5; po s 13646813 to 13647713)
tattgaagggaagagaatacgaggaaaaaaaaatcgtaggcggcgagagagagatcagaagggggcagcacactttaaaactgaatttaatcctaaccattaatttgatcttatggctattatgtactcctctcatctcttattttagctactctcacttgatcaatcccatatattaattgatatcgtttagctggtaacaaaagttgtgcaatatagttagttacccatctatatactttgcctggtattgattttaagtaaaaataatcatattcggtgataaaaagtagaagtaaatctcaactactttcaccatatttaatgacatcattcctgaaattacatgcatataatgtatattttattttctatggaacaagttgtcatggagggtagtttagaaaatactgttgctttttttattacattaagaaatataattgcagctaactaaaagtcttaattagggtgactttaggtatttttgcttaaaattgagaccggatgaagtaatggtgtatttgtttaggtttctagatttaccatttatttctattaatttgtatcacagacagtgaccattagcaattcactagattaaatttaatttacagaaagaaaagcatgtagaactcgaatcacttgaatataatatacgacagctcccaggtataggagctaaaataattcgttatggctgcgtatgtatttagatgagatattttatagaagactagtagctttgcaactactatgtatggaagataacaattgtagaaacctggatttcagttaagtgcttgtttattggttgtggttcaatttcatacgtatgatgaattatctgtttttgtcagatgggattccaatttgcaggcaaagctgtttattctgcagt

SEQ ID NO: 31408 - DNA, 746 bp, Medicago truncatula
  Intron number 1 from transcript Medtr5g077360.1 (locus Med tr5g077360) derived from phytozome v7.0 (chr-ID MtChr5; po s 28504696 to 28505441)
gtcaaatgtacggttgaaaagttattctttacctcacatagttaaagttcaataatgttctaaagtcactgatcataagtcaaagggagtggtttgaagtactactgccgaaggaaatgttttgcataaacaagtttaacctattacctagtcaatatttttctatctgtaaggaaatcatataggtaacttctttataggattatcctatgtaacctgccacctttttgcaatctcgaatccccatttcctgacatgattttcttgtcataggtttccatatagatttctttgataaagattttcatatagatttccttatttgtacattttcatttttctcatgaaatagcaaaggcaaagaattgcttctaagttaggctatccacaatataagaaatacttaacccataaagtttaatcttgcggctaagaatttcatcaaagtaaagtaacgttttggttttttaataccaaagaaactcataattcatcattgctcacaaatagtttatattacaaatatgagaagcattatatatccattatttctacatcaccatttatcaatattttctatttcttccccaaaggacacaaccataaaataacaaacaactataatcattcataatgccaagagttgtaccttggaaactcctaagtttcatttattttgtttttactttattatcttttttctatctctagcatattcaccgtaacaaacaatttcccttatacta

SEQ ID NO: 31409 - DNA, 499 bp, Medicago truncatula
  Intron number 1 from transcript Medtr7g010250.1 (locus Med tr7g010250) derived from phytozome v7.0 (chr-ID MtChr7; po s 2185782 to 2186280 reverse strand)
gttgacaggtcagaactcatgttcctcttcatttcttgaaacaaattgttttttcttttattttgtacatataacataattcttcatgatatttgggagatcttatgcatgaattctattggtagttagcttttgtcctttggaatggtgtaataaagcatgtattgatatttcaaaaacaatcagaaagggatttatgtccatgactcgggagcgcaattgtaccaactgcagttttgaaatatgttcggtaaatgtatgactgatatttcaagctaaaatgtattagaatgggatcagtaaagtctgatcaatgattattctagttcgaattcgaacaaaacaaaactttgtgtttggctttatcggtcttttttcatcaacttatttctttatcacataaagacttcataatttatgaaaatgaaaatcccttccaaaaaaaaacttatgacattgaaaatgttcagttcattctaatattcgtagctatactatc

SEQ ID NO: 31410 - DNA, 1022 bp, Medicago truncatula
  Intron number 4 from transcript Medtr5g086290.1 (locus Med tr5g086290) derived from phytozome v7.0 (chr-ID MtChr5; po s 33083645 to 33084666)
gcacgtgagttgcattttattgatttatatatatatatatatatatatatatatatatatatattgacagaatctattgacattaggtgtcaacaaattcgttgacactaaattttaatcgtctattttatttgaccaaatagttgtatttatccacgtaaaatctcacatgaacaaatttttaccgacaatacactgtatctttttttcctcaaatccctagttttgtgtctctctctcagccctcgggttaatttgtatttcctcttgtttcaaaaaacattaattattgtattcaatcaataaaaatttggaattgaaaacatggtgcatcatgatactcctctttattctttgcttgaaaatttgttattctttatctacggctctattccctatttgttaatttctcgtatcaataacagctcatgagtacaatttatgctaatattatggaaaatatcgcaattgcagaaaaagataatgaatttaggggtatttcgatggtttgctatgagaatattatgtttaaattgatttggatatattagtttgtaaatcattaaaaataattacacatttggattgcttccaattctaagtgtttgttacatacgggaattaggattttcatatgtttttagtggtcagctcttatctcggtttggctttcgtgcatttgggtggttttgaaagatcgaattaacaagatatttaataataaggcaatatctgtttcttatttagcataaacaacgtggttttaatataagtttctttttggtttgttcaaaaaaagaacgacaatcctatacatgagagaaatgatgagttagtttagaaactattatgagtctttgataaaataaaatagaaggttaaaatttggtgtcaacggatcttgactcatatatataactttaattattaaaaaaatataattttcacaccaaaacttatttgtgtatgatttgtcaattatatcgtgcattgacgttaggtggttccaatattatacaacg

SEQ ID NO: 31411 - DNA, 749 bp, Medicago truncatula
  Intron number 2 from transcript Medtr4g160770.1 (locus Med tr4g160770) derived from phytozome v7.0 (chr-ID MtChr4; po s 40863656 to 40864404)
tgcaaggtacattcactctctcttcttcaattcaactacttctctttagtgtgaaatgaacttagttttgtagtacaactgatttcttaagtttgagctgtttgaaccaaaacaactgttttatttattttttatatgcaaaactgtttgtgtgataaccaggattttaaatagcaattgcattaacagttgcagttgcagccgtatcgtgattcttgatactgactcgaatcgcgatcaaatgctgtcatgattgtggtttccttgcagtttcaacaacataaaaaactgttatgccgcggcccagatcgcagtcataaacctttatttaaaaccctgattataccttctaataaaaccaagtttttagagtcgaaatcaattttgattgaaaataactaaaattctagatttttactatggattatctttgaggcgagacaaaattaatttaatctgagcactcaattaatcttgcatatttgtttccaaaaagataataatcttgcatatttcatatttgagtattcaagctgaacatatgtactaagttagttgataaaatggtctgggaagtatcaaaattttcacccctcatacagttggtgaaatccctgcttatgtatacaatataacacttgcaaattgaaatcttgtgtcatctccatccttccaatttcaatttcattgacttattcttctattccatctcagggtttggtaatagaccgaatccgaggttctttacc

SEQ ID NO: 31412 - DNA, 635 bp, Medicago truncatula
  Intron number 1 from transcript Medtr7g083480.1 (locus Med tr7g083480) derived from phytozome v7.0 (chr-ID MtChr7; po s 17838741 to 17839375 reverse strand)
tcaattgcacgaatttgagcccaagtaaatctcaagtaagtcattttcttcctatttacatgcaatgtaggttgtttagggctttattttacttaattttgagcaaaatgttagttttaggtttggttaaaaaattgcaaattaagcatgatttagatgttttaatgtattgttgttgctggaattgttgattagagtaagtataggtacaccgtagttgtttagatgttcaaataacactaattgtgttagtaatttagaatgcacttaaggtgtttcatgaaatgcctaagtgggatattcttgctttttttgttatttttttttcaaattggttaaattttataatgtatatatgttataatgattctaagtttaaatttttgtttttttagcaaatttgattagtttggacataatgatagaataaccatatatgcctagaaaaacttcaattgtttagttttattagtttggatttttgtcttataatgtatatatctatcaaatatcaatcaaaaccatatatgcctagaatatgtatcatttacatcattatacctttatgttcctttgaaatgcctaaatacattgtccatttatttaaaatttttttattgtgtttttgcacagat

SEQ ID NO: 31413 - DNA, 961 bp, Medicago truncatula
  Intron number 1 from transcript Medtr5g014070.1 (locus Med tr5g014070) derived from phytozome v7.0 (chr-ID MtChr5; po s 4436371 to 4437331 reverse strand)
acatcaagaacaacaacaacaaggtaggtcgtatatatactcttattttatcttcttttgttttcaaatggtgtagtgattagaaatttacatattttcagataacttagtaactaaaaatttacctcttagacttcgcacctcacgataattgttcttgtcttactaaaactgtctaagtgtgtgtttgagaaggcttttggaagctagaaacaactttccaatgcactattcacacttcccaatgcataaaaaacgtgaaaaagtagaagctccaatttggagctttagccaaaacgtggtttaagtttgttgtatcgcataaacaaacaaactataaaaccaagtgagttagggaccatggtttggtagtttgtatgagtttaattattattattattattactattattggtattattattttttatgtttcaaatttcctttgtttttagaaaggggctccatcgtgtatatgggtgaccaacatggctagttttacataaatttagagtaacatttttaaaaaaaataaataaaccatcggacatattattttcatgttaattatctctacatttcctaaaaaatatatatacatagtataatgataaaacgaaactaaagtattttaataattgccctaattctctatgatattgggatttttttaagggaattctctaagatattagtattattatatagaaaggtttttgaccacgtaacaaaataatgctctaacgtacaattaaaagcaaattttttattttggtttgaaacataatatcttaagggtttttgaccacgtaacaaaataatgctttaacgtaaaattaaaaacaaattttttattttggtttgaaacataatatctaaaactttttagtagaattatatgtacaaaaagaatttgttttgttcataagccttactttcataacccataagcagggggaaa

SEQ ID NO: 31414 - DNA, 720 bp, Medicago truncatula
  Intron number 1 from transcript Medtr5g045220.1 (locus Med tr5g045220) derived from phytozome v7.0 (chr-ID MtChr5; po s 18906664 to 18907383)
tgggagctttctccactatcgggtcttatagtagagtaggctctgatctagggatttttttgataactctagatctttgttggattattttacactttgagattttgtccacgtgtcggacttggagatttttatgcttatgcatttttgagatcatgtgacatgtatgcttgatgtatatgattttgtatccgctgcgactgatgagattttatatgcatgcatgttggttttcgatctttggattttcgattcgtgaaagtaacctctatttcttgaatattttattattcacatgttttattgctttaatagaaataaggcgttacaataaacacctaaagaaaaagacacacaataatgtacataattatctcctaagtggtccctatctgactcagatatgataaggtaccactgtaattattctacaacataataactagaagataattatgatattgcagatagggaccacttagaagataattatgtacattattgtgtatctttttctttaggtgtttatctttattagctgtcgagaaagggacatgtgaacaatttgtgagccccttttctctataaataagagcctcgtttctcatttgtaatcaatgaatattgaagttcaatactactaagtatttcattcctataaaaacttgtttttttatagaagtagatcttgagacaagactctggaggagctagatcctt

SEQ ID NO: 31415 - DNA, 697 bp, Medicago truncatula
  Intron number 2 from transcript Medtr6g076600.1 (locus Med tr6g076600) derived from phytozome v7.0 (chr-ID MtChr6; po s 14777933 to 14778629 reverse strand)
ccttttgtgaaacgagtaagtgctaatgttaccatgaataaatcatgtaacatgtgagatataatgctgaaacctccatctgctatctccatatgttctgatagggaatgcttatgtgtcattgccatttgttttggttgtttgcatatttgatatttgcacactgcattttggttcttccatgcatgccctttctatcttacccagcttgttctgcattttcactttagcaataaggtcatattcgtagaccttattccaattattatatgatcaaactttgttcatatatgatagttgagttgcttttctaatgcttattgattagcctaatttatacaaatatgatcattactattggtgactatttacattcagaagaaatggcaccccttatttcaaatttaagtctgagaattttgtctttattctgacctggttatatttaaaaaatagagaatattaagtttgttgcttctttgtcaatacatctatgttggacgatatgtgattgtttggctgctagctttataaaatgagaactattcctgtagtttcttggatcgtgccatattctgttattttgtatccatttcatatgcatcgacagagttgatatttataatattttatttaataaaaaataaattgtgctttgtcaggctccaaaagttacttttaagaagcctattggcag

SEQ ID NO: 31416 - DNA, 673 bp, Medicago truncatula
  Intron number 1 from transcript Medtr5g076740.1 (locus Med tr5g076740) derived from phytozome v7.0 (chr-ID MtChr5; po s 28124553 to 28125225)
caattgttatatgtatgcctgcttgtttaaacttccatagaaaattgtcatctttgtggttgttttatttcttgaagctatggactaactgttgtttcctttcttcattaaattagtgtttaattaattttcctttggtcaaaacaagatgaatgaaatcattaaatctatttgcaaccttaatcagtattgaatgcacattagttataatgtattcaaaactatttttgttttgaatttacacacctaacttttgggttgattttatgtataaatgtttatttatttgctgtaataaatcaaagaataagaaggtgtcttatggatcaaggggtccaatctaaattatttcttgctgtcttcatctagttttttgtcgtgttaatgatacgaagggaacatgcagcaattctttatgtaatttttcttggtgggaaatgggcattcaaatggaaaatttttggccgaatttggcatgcagttatttggtttataagggaatgtcgtaatagtaatattctctaatggtgatttatttttagttatgtttggtctaattgagatcgatcaatgtctattttccgattggtgtgtcgacccaattggctgtgtagggtttaatctgatattttctcttgcttggagttctggatctttctgtccatttttcagc

SEQ ID NO: 31417 - DNA, 785 bp, Medicago truncatula
  Intron number 1 from transcript Medtr7g011340.1 (locus Med tr7g011340) derived from phytozome v7.0 (chr-ID MtChr7; po s 2722567 to 2723351)
aataccaagtgaagattctttgttaaaaatcttaggtaatttcatctttatcaatttcaacttttttcttcatgttctttgttgcttagtttcttatgtgaagtttgtaatttagatttttttcacctctccagtttataaatttgtaaataggggtatgtaaattggagttgagaacccaattgataaattggagttgtaaaaaaattggggttttttttgttacaaaaaaaaaagggtttatacgtgagaaaaaaattggtgaacttcagtttctttatcatttctatatgtatgtgtgtctgttgtgcattctgttcctattattcattaattatgcattgttctatctaagtttagtgtttcattgctaaggttatttgactataattttactacttacttgcttagttataatatatggtctaactgtgctatctctatgcaatggggcagtgatttttaatatgacccataggtgaaaaagtgttaaatttagcatgttcagcttattccccaagtgaaaaagcgtttaacttaatcattattattattatttagtgagttttggttgattttgaatttgaatatcaatgattgggtttgaatttgagtagtgatgcatttgatattactcttttatctctttttctctgtttgttgtaatgcttaagttttagccaagttttaggttttaagacttcatatttacatgattccacttataggccaatgtagtttagttggagtcaattagattgaaacattttctatttcataggctg

SEQ ID NO: 31418 - DNA, 576 bp, Medicago truncatula
  Intron number 3 from transcript Medtr4g159370.1 (locus Med tr4g159370) derived from phytozome v7.0 (chr-ID MtChr4; po s 40206643 to 40207218)
ctgccggagcattcttggaatcgacattgattctggtaagattcatatctactctgatctctattgcagaagggtattcttcaatttaaaagttagcttctctctttttatgttactgtctgatgaggcctatatatgtgctaaaggtaacatatttctgatttgtgtgctcaaaatgagacattaaatttgcaaatgaatctttaaaatgccgaagaacaataactagctatatgttacttaaaccaactcatgctattagcaaagtctccttgtaagctgtaatactacaaagctgtatgaacaggtggctagtatgcattatactatgcgaaaaatcagggtagattgacacactcaacctcaaaaaacacttcatctcatatttaagatgcacacttatttgttccgactcttgaaccctattggatgcttatcagaatatgtagttttcaattcttttaatactgctagtaatttggcaacagagttggtcctcatttttaaaatcccaaattgtttagtttcaattgtttattcttttgcttttctgtgttatgctagatcgagtggaag

SEQ ID NO: 31419 - DNA, 999 bp, Medicago truncatula
  Intron number 1 from transcript Medtr5g016850.1 (locus Med tr5g016850) derived from phytozome v7.0 (chr-ID MtChr5; po s 5986951 to 5987949)
tttcaaggttgggtttgatttgaattttttttttttttttttaatcttgtttatatgagcatgtgatttgaactatctccctgtttgattttttgatcaattgattgattgactgataaatatttgtctataaaattattttttgcgtgtgattttgatgttttagaaaatgagggagtttgtgaaaataaatttaatattcttatatttacacatatattttatatgttctaaatttcatgcacacttatccttaggtcccgttcgaattgacttatttttgaacttatgtaaataaataaacttttatgtattattcataatcttataaatgtattttatgaaaaatagcttatgaatatacaatatttgttagtgagaaattatgaattaatataaaagcttatttatttgcataagctatttttcataagttcaaaaagaagtcaatccaaacagcctcttatactcattcggatctattctatgtgtataggtaattaacaacaataatacaatttttttttaggaaacaaaaatattttgtttaaactcacattcacatcattcagatcttttttttgaactcatatttttttaaaatagcaaaaaaacaatttattttgtttaaaaaaagacttttttttttactaaatataaaaaaatatatatatttttagatacttgatatcattgtgaacgctatgatagtatcatatgtccatggtagtattgatatatggttgttgttatggagtgcatgtaggaaagaagctataaaatatggccaaccaataccgtttaggaaaccagcataatgaagaaattaaagaagcccatattgtaatgcagtatatctaagactttttggatcgaatatttgcattatcaatgaaggatcgagaaatgaaggatcgagaagtgtgccgtccatcctgactatcggaggataaactggagctagacttactgaacctgctggaggatctaattatcaaa

SEQ ID NO: 31420 - DNA, 702 bp, Medicago truncatula
  Intron number 3 from transcript Medtr5g007450.1 (locus Med tr5g007450) derived from phytozome v7.0 (chr-ID MtChr5; po s 1119108 to 1119809)
caaagtccatagaggtaacatataatcttttgagttgcgttatttgaataaccatttgtatgacaactttttggacaaccataaatttacaaagagagagctatttacacaaaaaccaaatcaataaagagagaaagttgtcacaaaagttgttaaaaaatggttgtacaaatatcatttctctgaagaagaaaaaatcaaataagttatgtgtctgtcaatagtcgattcttgaatagacttaatacatcggtaagatatcggtaaatgaaaggagggaaaagcaggaaaagaaaatgaggctagaatgttatttttaggtgttttggatggcaggttcaggatagtgggcatggaaaagtacctaccagtccacaagaaaaattctctctaaggtgaggtgaaaagggagagaacatactgtgatacaaaggctccatttttgttctttttttttcacctagtcattagaaattgttcaatgcacaaactaagagagaaaaagacctcgtcttctcccccctctaaaccaatggaaggagaaacaccattattattcccttttgctttatttccattttctctatgtatccatatgattcattaatataaaatatgtattaaatggctcattcaactgtaacttcaactgtctttacattagtttgatcagatctagctttaacgcagtgcaggaagtta

SEQ ID NO: 31421 - DNA, 582 bp, Medicago truncatula
  Intron number 2 from transcript Medtr4g080750.1 (locus Med tr4g080750) derived from phytozome v7.0 (chr-ID MtChr4; po s 16637217 to 16637798)
cattgttgcggtggttcgagctgcttgcacctaaggtattatctccgatgaaagtttctgataagttgttgcaattgtatggtttcatctgttttataatatcgtgtatattttctattgaagcttacctatcttccttattttttcaatctttgaaatggtttgaatttaagatgtatactattctattattaggaattggtccctcaagcttgcaagtatttgaactttttattcaatatatctctggactcttagataggtaatatagattttgatatattcaaaaccaattgttgaagaagctacattgcaaattattcatttcttacgtttgattttaaatgtgactgcttttatccattttttgtatcaaagtgagcttaaaatctaatgaaagataataaaggaacattgaattcactttctttttgattttttctttgaaatttcatgcttttatgttaatttttttaaaacgatgcttttatgttaataaactttaagaaattttttattatattattttgcttttgaattaaaacaggtgattcaatcccagttgtataagattgctctggc

SEQ ID NO: 31422 - DNA, 888 bp, Medicago truncatula
  Intron number 1 from transcript Medtr4g115700.1 (locus Med tr4g115700) derived from phytozome v7.0 (chr-ID MtChr4; po s 26845331 to 26846218 reverse strand)
aacagcggaactgaaagaacgactcatcaaacaaggttgcttgctggcattttctcatgttttgtgattctttcttcactccacttctttactttctaatatattattaaggatattcatgtttataatttaaatagttatatttttttcagttagccttgcaagagtttcagtttagtggaaattttgctgggtttaattggtcactagtgcattttttcgaaagtttcttaaaagttaaggagtgggaaccatggttttatgttagatttattttgagtgaaactgtcaatgcacattttagttggctgattcagatagtagctttcttacggtgattttcgtaacttatattaccacgggaaggatgtctcttaaaagtaaaccaaaaaaaaagaaggatgtctcttaatatctttccatgtaaatttggattaatggaatctagttgaggaaataaagattagtgattacatcatctcttgagggaatctatttatccctttgaagtttgttggaggaatagttagtattgagtattgagttactattttccctaagattttcctttatataaatcaagtttccttgaatcgtaattgaactaatgacaaaacctcataatagattgacaattcttatttatttatttattcagttaacaaaagtagaaacacgtttaagcaataccatagctaatacaacagtgttctcttgaagttataaggatattctagatttttttttccacatatatatgtttctatcgaattctaaaatcaaatatttatgagtattatatcttacaataatgttttttttttgttctgcaaatatggtcctaaatattaattccttattgcttaacacttgcaggcaccacttcaa

SEQ ID NO: 31423 - DNA, 880 bp, Medicago truncatula
  Intron number 1 from transcript Medtr5g088510.1 (locus Med tr5g088510) derived from phytozome v7.0 (chr-ID MtChr5; po s 34309117 to 34309996)
tttgcttgaacttgaagctcctattaagatttgtggtatgattttatgcttaccctttttttgaccccccattttgtttttgtttttttaggttttagaatggttttttcagttgttttgtgattttgggtgtgcttaatttgttgcaagtttggagattttgattttagggttttttccgaaggttttagggtatgtttaatttgattcattgttagggattgaaaaagaaaatgtcgattatttttaatttttttaatgttcatacttttgggtatgcttaatctgttgcaagtttggaaactttttattttaggatgtatttgatttgattgttagggattgaagaagaaaatgtggtttaacttaaaatacatttttagggtttaaacattttttaaatattcatgttttttaggtatcctaaattttttggataccttttttttttattttttatatctttttattttacagccaccccaatttgatatattttattttttgggtttaaattactttttgtttttaatgttgatgtttttgggtgtgcttaatttgttgcaagttagaaccttttgaattttagggtatatttggttgtttggtagggattgaataataaaatgtgggttactcttttagtttttagggcatataaagtttggaggtttgtgacaaaaactatgtttattaacttctctttaagtgtttattgtttttgctttgtctttagacttagattgttgctaaggttatttttaaatgtgtgttgtggttgaattgaatgtactattttattagtctggtatagttaaaattgaaattgctctttgaattttcaggtgacattcacgggcagtacagtgatttgttaaga

SEQ ID NO: 31424 - DNA, 755 bp, Medicago truncatula
  Intron number 2 from transcript Medtr7g045530.1 (locus Med tr7g045530) derived from phytozome v7.0 (chr-ID MtChr7; po s 10903173 to 10903927 reverse strand)
ttgattttgaattgtttctcaaggttagtttttgttaacttggtttaataccatcctttctaaaagccaactttttgtatttgttctttttgccttttggtaattctgatctaaaactttctagtaattttctaggaattttgttaacaagtttacctttttactttctagtaattttctttttgtgatctatctcaatcttgatatctatctaatttcaatatatatgaaatggaaaggaaagttacgaaattagtgttagctcgtattttcctttccttcttttgttgatctagaactatgaagcactgactcggacatgacactaacactgacacgttgaaactagtaataatttgagaaaacaaaagcaactaagtgtaactacatgtgtcggtgtagacactagacacgccttcgatttgaagtgtaagtgattcgtaggaatatatgcatacatacactttttctttacatttgacacaaaaagaagagggctaattagaaaagcacatttttctctgcatgttttctgtagaatgttttgaactgcaaccatatttttcagctcttcaatcattttctttaatgctaaacaccataagggaagtaaaatttggaactggctcaccttaaaacacttaatgcatgagaaaccatcaaaatttaagtgtttgatttgagtgatatcaaataatggttgctatataatgatgacaggtatacttgaaactgcaaacttttgcaagttctag

SEQ ID NO: 31425 - DNA, 647 bp, Medicago truncatula
  Intron number 1 from transcript Medtr7g045530.1 (locus Med tr7g045530) derived from phytozome v7.0 (chr-ID MtChr7; po s 10904073 to 10904719 reverse strand)
ttacacaagttgagcttcgcagcttaaaatcacaagtaaatttatcatcttattgttgttgagaatgaatcatgttttttactttttgtattgattctccaaaaaagattagattttgattgttttcattgtaattcagctcctgggtcatgatcattttttaagatattgttgatcatcctattgcttggtttgcaagatattgttgttgagattgaatcatatttttttacttcttgtgttgattttccaaaaaagattagattttgattgttttcattgcaattcagcttcttggtcatgatcattttttaagatattgttgatcatcctattgcttggtttgcaagatattgttgttgagattggatcatatctttttactttttatgttgattctacaaaaaaagactagattttgattcttttcattgaaattcagcttcttgatcatgatcattttttaagatattttttatcatactattgtttggtttgctttgcaagatattgatgttgagattgaatcatgttttttttttttccttttttgtattgattttccaagaaagattggatttttattcttttcaatgcaattgagcttctgagccatgatcattttttatggttgttgattgcagttc

SEQ ID NO: 31426 - DNA, 756 bp, Medicago truncatula
  Intron number 1 from transcript Medtr5g032370.1 (locus Med tr5g032370) derived from phytozome v7.0 (chr-ID MtChr5; po s 13098219 to 13098974 reverse strand)
cgcttcttttccaagtaagtattgttttccatctcaatttgttgtttttttagttttctcaacatgggtttgttaaaaagatttaacattgttgttcattttagagttagatacatgggaatttgaatttgaatttattagaaattctagcaataagtttcagtgtagtttagtttcacttttgaagtaggtaaaattgattctagagatgtataattgattttgacatgtttggatgttccgagtataattgattttgtttctataattcattcaaacttgaagctagaatttggagcttttacctccgcaactgattttaattctcaaatgtatactttaagccacttttacatgaatatatccaaacacagaccacttcatatattataactcacttttagtttattcagatgaagttttcttgtatcagaagtacttttttattttattatttatctgagactgttttggagagcgtatgatatattcataatctgttttcaacttatttttgcaacatcttcaagatagcttatgaaaacaacttacaaaaagagttggattttattttatcttttgttatagaaatagcttatacataagcacttctatgataactgttatgctgcaagcgcttatttaagttgtttatgcttatatgaccacaagttaatttatagtctctaggtgtatttttaatgtctcacttgatatttgaaattccttttaggcccacaagctagtagtgcttcc

SEQ ID NO: 31427 - DNA, 616 bp, Medicago truncatula
  Intron number 1 from transcript Medtr5g091290.1 (locus Med tr5g091290) derived from phytozome v7.0 (chr-ID MtChr5; po s 35712689 to 35713304)
ttctgcgtttgttcttccacgattgctttgttaatgtactcatttttttcttctctctcacttacattcaattacattttatataacacacacacacacatatatatatatatagatagataaacaaaagtcgatgtatgtcatttaaattttaaacgagatgcatgaacttttattgactcaaatgtatcttataaatatgacaaaataaagcaacataaatatagaatgatttcccactaacggtttggtttacctactttgaatttttttaaaaatgcttttgtttctgtcaatataatttattaacaatattgacttatggtttcttagtctggtatagtgatgacatgctagtttaattaattgggatgaataatctaacctctttgatgctacttgcttttgcttaaaaaattaatgtgatcataggattggatattgtgtacaactcgttttctttaatacaaatttaattataaaaaaatatgaatatttttaatataaaatgtaccaaatatgactattattatgagattgagagagtattatatattttctaaggactatacaattcattggcaaatttgaattgaataaataaaccattgcaggg

SEQ ID NO: 31428 - DNA, 789 bp, Medicago truncatula
  Intron number 2 from transcript Medtr5g026770.2 (locus Med tr5g026770) derived from phytozome v7.0 (chr-ID MtChr5; po s 10839171 to 10839959 reverse strand)
agagtcttaggtggccaactgatatcttttttcaggtaattttctctttaattaataatatttgagtgtgatttttattcattcttattataatttcaaaattctcgttctggagttggatctagcagaagggttagactcctacaatgtaacaaaccgtcaaatctttatcggaagaggtgctagcattacctcttacgaaaaaatggatttcaggaattatggtgtgagtttgtattttatttattttatggtcagggtttgaaaggctggtttttaattatatcagcacttattattttaagagtatacataaaaatgaaattgtattgaaaaatttaaaatcagttacacctaactcctgaaaaggcctttaaggtaaggtacttttgtttaaggccgccatcatatttttaattaggtttcttgtgtttcctaaatattcaatcatgcataatgcatgtgctttggtaaggtcagttggtgaactagaacttacatgaaaggggaagttaaataatgatccaatgttttatactatattgtcaaaataaaaatctaccacaaaatgatgaccttttgttttgaaaaaatccaccacaagatgatgttttttaccttttggtttgaatgaaattttaattgaattttatagtaatatgttctccccttgatgaacttactatcctataaattatgttcaaagtttcttttagttactaacaccaagatcaaaagtattttatgtaatttctaacttatgttgtattcaattgaaacagagaaggt

SEQ ID NO: 31429 - DNA, 610 bp, Medicago truncatula
  Intron number 3 from transcript Medtr4g029130.1 (locus Med tr4g029130) derived from phytozome v7.0 (chr-ID MtChr4; po s 6893317 to 6893926)
tctacttgtgatattataggttttcttctctccatctctctccaccttcttcactctcccttttgctatcaaaagtatttttgaatgtcttgtaggactatctatcctacttatagacatttttaatatgaatatatatttaaataagaaatttcattactagaaactctcaattttcctggggaattaccagcggattttagaatattccacagaacactggtttcctgcggattttgactgggattttggttcacagctaataccatcttgggtagttgtttccctatgattttaagatccgaagaaaagaagaatcccaggaaaagggaaaattatagggtcatacaatattataaatatataaattcaaaatcttataaatttcccgtaaaaaaaaaaaaattacaaatttcatcatattagaataaaccgcatgaaaatcgcaggaaaaacatgagtttctagtattggtttagctatatttgtcggaccatttatcctagttagtataattaataaggttcatttttgggtcgtgcccatagtagacatccccttttctaacaaagtagcgttcttttttacttaatgactctttatagttaca

SEQ ID NO: 31430 - DNA, 785 bp, Medicago truncatula
  Intron number 1 from transcript Medtr4g104140.1 (locus Med tr4g104140) derived from phytozome v7.0 (chr-ID MtChr4; po s 22644132 to 22644916)
tcttgtgcttattgggttggagacaacaggaacaggtacgtatcttgtttgatcttaatttatactatggctccctcaactgtttttttttttaatgggatctttttcatgtagcttttgatgttaagctttatagaaataaagaaaaaaaaattagttaaagacttaaagtccttataatacaaaagttgcttgttttaatctcgcactaaacgaattttggtttggtcatatgtaaaacttacacaaaagttagagttaaataatctagtttttatgaacaagttttatttttttcatgtaaaatatatcttttgtttttatctatctaaatatgaaactactattcatgagcttgtaaagtaactgaattcatgtaaaaaaaactgttaatttttttttacttataaaaatactcttttttattttcatcctttcaatatatgctttttcccatataaaacaaatggtctttttcaataaccttttaatggaaccacgtgcattatttgtcacctaatatttccaaatgaccttgcattagatacaatatggatctctcacaacactaggactaaaaatagcgattttagattttggaagaataacattttctttttcgccaagataaaatataagatttaaacgtgttataaacaaaaaaaaaaagtattcaacccaaaattttataattaacaaaatgaaaatttatcaactttataacaatcacaaacataacttgtgttattattttcatcaattgcaacagcgcaatcactaggagt

SEQ ID NO: 31431 - DNA, 998 bp, Medicago truncatula
  Intron number 2 from transcript Medtr7g010580.1 (locus Med tr7g010580) derived from phytozome v7.0 (chr-ID MtChr7; po s 2326934 to 2327931 reverse strand)
catttacagaattagtgcctttaggccttgtcattgtaagttgtaaaagtatatctatttcatattttaatcatcttctgctgtattttatcactgatatacttgaggaaagaaaaagtatgctataaaggggttgaactcatttaatgagcttcagttaaggtctaattatttgggaaaacccgagtttgaattctgactagaacaatccttgattaaaccttacttacctcccgactgaacttcgaattttcaagatccactttcctgaagaattcatttattagcagggccggcccaagaccaaagcaagtgaagcaagggttttaggccccaaattttcggcccttaaaaataggcctccaatttaaataatatataaattcgttccatgtcattgaccgaaagcagtcaatagcacagtggtagaaggcatctttattgtagttgtaggtcacaaaattgacaatcatttcattacaaagttcactttttgacggaaatgcttcattttttattgacagtattcattatacgtactttttttttgttacaattcattatacgtacttaataagtcaagaaacactataattttttttttataatcatcgttataatttataattaatttaattcgtcttctaaattaaatgactcgaccaaaaaaaataatattatttttaaaaggcatatctaaattttcgctttaggcctcaacatatgttgggccggccctgtgtattagtatattggtctttgtgtacagcaaaagtctgttttgatcaacttatctgagtgtatttgctagtataaacactttcgacttatttccataagatctttagaatagcttaaagaaacaacttacatcttatatgaaaaacggtttgactttattttatcttttgttatagaaatagttatacagtagacttgtttgctaatcaatttgtattacaggttgtgcttctcatattattttgtcccttcaatat

SEQ ID NO: 31432 - DNA, 291 bp, Medicago truncatula
  Intron number 3 from transcript Medtr5g045120.1 (locus Med tr5g045120) derived from phytozome v7.0 (chr-ID MtChr5; po s 18821918 to 18822208 reverse strand)
cacttcctgtagtaagttatttcgattaaagtttgaatttttatgtgatttgttttattggtactaattatttttagttttggtgtttgaaatcatgcctcgcaaaacctccagtctcatgttctttctcctttatcagtacatctatatgatatgattttctacattttcctttatgaaaatatgtttgctattttgatgtgttagtttcttttgttccagtaaaagattcttcaatatacaaaaatgttgatggtctctagtgaaattgcaggaggttaagactgaaca

SEQ ID NO: 31433 - DNA, 298 bp, Medicago truncatula
  Intron number 3 from transcript Medtr5g035250.1 (locus Med tr5g035250) derived from phytozome v7.0 (chr-ID MtChr5; po s 14554136 to 14554433 reverse strand)
gacatttactctggtcactatttactttgcggtacccacttcgcttctctaactctccttgtattgtagtagttttgcatttttttttcttcatctttttggggggtagggtggaatttggtctagtcagattattgaaattctgttcttatatgttcatacgctccatagaagaaactgattaacctaatcatcgactttgtttatttatgttatcatttcaatcttctctaagtgacttcctctcttaatttgaatttcagctcgcatcttgtttttccttctatagaagttgctt

SEQ ID NO: 31434 - DNA, 696 bp, Medicago truncatula
  Intron number 1 from transcript Medtr5g035250.1 (locus Med tr5g035250) derived from phytozome v7.0 (chr-ID MtChr5; po s 14555346 to 14556041 reverse strand)
tcaaccttcttaaatcttaatttcacttttcaactgtaagtgcttctactcctctgtttttcatattcatcaagttttcagcttttttgaattttcatcaaactcatcttaagtaagcaaattgggttcaactggcttatcatattttacatattagatggttttgaatattctagacagccttaatttttgcaaaattctgttttttttttttgttgttttttcttttcttctaattttgtgccataagttttgtaaagagcttaatcaattgataatttagggcagcctttgaattaaattctctttatttggattactagctatattatagccctgtttggacaaacaacttaatttgcagcttatggcataaatagttatcatgataagtgcttatgtagaagctatttctataacaagtgataaataaagttaaattgattccgtataaagctataagttgttctcataagatatcctgtagaacttatgaaaatatgtttaaaacagtttataaacatgtcataagctggtttttaaatttttccaaacggcctcacgattgtttatatcataaataagttcaaataagtcaatccaagtaggtctatatatttctcaaaccatgtattaggaactcatgaatttcagctttaattaacaggattctcaaggtcacatttggcttctatc

SEQ ID NO: 31435 - DNA, 820 bp, Medicago truncatula
  Intron number 2 from transcript Medtr4g096900.1 (locus Med tr4g096900) derived from phytozome v7.0 (chr-ID MtChr4; po s 20551949 to 20552768 reverse strand)
gttgctactgcccttgctaaacaggtttgttttttattcgcatatagaaaattttgatgaatgtgtttgtgaatgggtatcttgtattcaaatgtgagtggttagtctcacaccggttgaggatgagccaaactaatgatatagaataaagataattcatatggctaatgatcttaggttttgggtggaaatgtagtgttttggtctttgtagttcatgattggttaccttattgttgctccctatgttttggggactctctaacaagcggtatcagagcgggagtagatctttatataaaaaatctttctagtaatggagtcgttggttagtaatggcggtgagagtacggtgatgtgagagacttacaattgttgggaagattgttagaattcatgtgagtggttagccttatattgactaggaaatgatcaaatgacaattatataaaaaaatgtgagtgtgaccttggtggcacttccatgagcctaaaacaatggggcggaccatcgcattggactaagagcaaccacacaagtgggactttgaactcacacttgacacatcaacaaacctgtatacacccaacaatgacaaaagcagaggccaatatttaaagcaatgcatgattaggtgcatgtattcttacaatgaaattctgtatacacgcagaagaccagtaaattttttggcattattgttatgtattcacatccatgactttatgcacacataacttttaggatttattgcaccgcctttgcttagttaatatgtctgtgtaggatagggaggaagtgcagcatcacatatctgtctt

SEQ ID NO: 31436 - DNA, 876 bp, Medicago truncatula
  Intron number 1 from transcript Medtr7g081060.1 (locus Med tr7g081060) derived from phytozome v7.0 (chr-ID MtChr7; po s 17431814 to 17432689 reverse strand)
cccgcgtgaaaaatttgtcacgggcaccggggcaggtacctaaacaagtatttacatgtataatacatgggtatttgactactcattatttgttgaatatggacacggatttgatgatacccgttcccatgggtatccatatccgttaataaattaagtaaattacgaaaacatccttgtgtgtgtctcaaataaattaactaaattactaaaatattcttgagatctcaaaaaacccttgtttaatttattgtacaattgtatgacatattttctcttatgtcacaactttatattcctcttccctttatattcctcttcttcttcaaaactcaactgttacaaataaataagatagatgacgtgtggagtaatttggtctaaattttttttaaaaatataatgttttggtttagcatttttttccttccaattttaacattcacttaactatattttacaatttgatcgttcatattgctattcagcgcggaaaacagatagattagtgtccgtctttacaacaacaataatatatactccatatgtcttaaaataatagttgtctaagatttatgcaagatttttaaacaaataattacttgtattgatttcaaaggtaaatttagtatcattaaccgctcaaagaatgattatttgatttttaaatatttttactaataataatgaatactcgaagaaatatgatcaataatcaaatccagtggatacttgacttcttaaacaatttctgaggtattcttaactaacttgattcgatgggtgtgtgaattcttaaacaacttttgagttttgtcaactgatttgtagtgttttgatacatgtttctctatttctatttttgcagtcttctga

SEQ ID NO: 31437 - DNA, 1054 bp, Medicago truncatula
  Intron number 1 from transcript Medtr5g089220.2 (locus Med tr5g089220) derived from phytozome v7.0 (chr-ID MtChr5; po s 34639861 to 34640914 reverse strand)
atctctgaaataagaggaagtaaaggtagtttcatgatcctatatatatactgctactgttcggatttctagatcacttcactataggtttgacactttcgtatggagtaaattaactaattgactaggttagtaggttatatgcaaattagtgttatgtcatttatttgcatatttgtatactgaccgtttctgtgtattctgtgcctttctgtgtatatgatattccattttatacatgtttaaattgatatgctgattatgttattttggtgaaccccttcccatcctaaatttttaatcaatatgattgattgaacaaagatcgtcggccttagccagatttgatttgaattttatttgctattggattctattttttttaatgtctgttctaaactaaactttgaaaaacatttgattagagtgtttaggattatctctgtctcagtaaaatttacggtgaaaagggttcaactgtgtctcaggaaaatttatggtgaaaagggttcaatttgtcgttcagaaatgtagattggaagccaagagctttgtgccctaaacttttgtgtttggtattctattacaaaatagaaatacttgttcttaaagataccaatgattttcaacttctattaggaacttcataccttggttttaggcatgcttaaggaaaatagtgttagcaaattaacttggttatattttatgtttctagtgatgaaaacagcagtctttgttttttttttttttttttgaggaacagtctgtgcttttgttggggggaaatattattattattagtacatttttttagcttttatttatgatgtaaaattacatgcttaattggaagatgtttttagaataaaaaaatttgtgggctaaggttttggactttgaagactctgcatcacaatttcattgtgtagtttttttttgttttttttgtttcttcttttagttatcttcttaattacacatttataaggtaacatctcaactttacttgttcacaggggtaacttgacacttgttctacttccaagttctg

SEQ ID NO: 31438 - DNA, 1045 bp, Medicago truncatula
  Intron number 1 from transcript Medtr7g083910.1 (locus Med tr7g083910) derived from phytozome v7.0 (chr-ID MtChr7; po s 18037056 to 18038100 reverse strand)
tcactttttttcggacgattaatctcttttctaaggttctctcttattcccttcattgtgtttttgtttcatggtaatgtagagaatttacagttttcatttttttagccattttgattatattaaaaaaaaattaattgtttggttttggattagtttgattatatgattgttaaaaaatgtgtatttaccttttttgctatgcttgcgtgtatgtagttcagcagcaattggggcttaatgaattcatatgttgaaatttgatttttttggaacccttttgattataaagaaaaaaattgagagattgtttggttttgactttttagttgtgtttgagtatggtttaacagcaatttggggcttaatgaattcaaatgttgatgattttagcttctttgttgacgaaatttgattgtttttttttaaaaccttttgattatttaagaagaaaatttagagtttgtttggttgggttagtttagttatggattgtaagaaaatgtgtttttttacctttttggttatgtttgagtgtggttcaacatcaatttacagtttaatgaattcaaatgttgatgattttagcttctgtgtataaaatttgatttgtttacccttttaaaagagaaaaactgagagattgttttattttgggttggtttaatcatattacaacaacatcaaccaagccttatcccactaagtggggtcggctacatggatcaaattacgccataatgtttggtttaataatcatattgttgttataaaacgtgttattacctttttggttatgtttgagtatggttccaaacacaaattgaagtttaatgaattcaatttgaattacttatcatttgttgtatttgaattcagtggagtggagtttgatagtggtaatctaaattattgttctgttttttcgttttagtcttgtgtgttgagttggtatggaacagtcaaactgaggatggaagtgatgttttatgatgatataataatttttttttgtagtttggagcgtttccggtgttcgttgttg

SEQ ID NO: 31439 - DNA, 664 bp, Medicago truncatula
  Intron number 1 from transcript Medtr4g041310.1 (locus Med tr4g041310) derived from phytozome v7.0 (chr-ID MtChr4; po s 9728596 to 9729259 reverse strand)
tacatttaaatcttggtaagtctttttaatcttagtaatttaatttgtaacttcaatcactctgttctcctccccgttaacattaggaactgttagttgttctataaggcacaaacactttacagattaggcatgtaattacactgaattatgtgatttttttaaattgtatgtcaatgtttatgtcgtgtccggtgtccgcacattagtacttgtttggatctatttgatgtaaaattggttctagacacaaaagtaattttaatatgtatgatgttattagatatattagatttaactttatctttagaatttctgtactcaaacttaatttttactcttaatttttttcgaaatctatcattcatgaatttgtatcaaacaataaattattttgcattcaacttacttttaactaaaataaattttacaaaatcaattcatttaagtgtttgtttggataacactcccaaattacaatgaatcaaaagttgcagatttggaatttctaaaaatttcagcggaaaagcattaaaatttcaccgttgaactaaacatacactaaaatcaatgatgtcaaaccatgatgaagaattttctttatttacttgatattaaatattatcagtaaaaattatataactcctttgtttataatgcaggt

SEQ ID NO: 31440 - DNA, 719 bp, Medicago truncatula
  Intron number 1 from transcript Medtr6g009120.1 (locus Med tr6g009120) derived from phytozome v7.0 (chr-ID MtChr6; po s 1411599 to 1412317 reverse strand)
cctcaaggtgaatggatagtgatttagtgggtgtagaagtgaatactaaaatgtactagtaaaactataacacatgtaaaaacgaggatggtaaaaaaagataatgtgttttatattcatgtgaaaagaatgaaatttgtctccattgaattgaaatttggagctccaatatcatatattcttgcctttgttcaattttctagtcattcttgtatcctcattaaagtgcaatgcttgctaatttgtgaacacacttgtacgatagttttgaggatcatgtcatggtagctgatgaaagtagtagttagttgcaacaactatcattaataaataccagtttggcttaaatgcaattttgatatctttttttcaaaattgttaactttgatacccttttctaaaaggtaaatttttaggtacttggagtttggttggatattgtaggcataatttgtttaacatttgatttattttaatataaattattataaacatgtgacatttcatttaatgattggatgaagagtacataaacaaccaaacttcttggatactattgtgttaacctttataaaaccagttttttgatcccctatttaaaaaatcaacggaaaatatttggttcctctcttttggtactagagaggaccaaatgcctaacttgtacatagtaattgaattctaagacttgtacatatgtgggcagattgcattccact

SEQ ID NO: 31441 - DNA, 667 bp, Medicago truncatula
  Intron number 1 from transcript Medtr4g095440.1 (locus Med tr4g095440) derived from phytozome v7.0 (chr-ID MtChr4; po s 19859407 to 19860073)
accgtgacgacgaaggtaattcatccttcccactttttccgtttttctctttcgcgcaattcgatctactctcttccgtgctcattttctagatccaatgcttaatttttgtttctaatgggaaatgcggtacggttcgcgtagatcacgatgcttggattgaattggatttgattactgcgttttttaattgttgtcggtttatagaaatttgagttgatctaatcaataatcatgtaatttgaaatgcagtttattattaataacgtggaattgcttgtgtgaatttggacaagttgattaatagctaattttgatattttatagcttcttttcacatttttgtcacgattagtgcgttttttgaatcatttgatatgattctggtttgtagtgatttgtagaagattgttttgatctagctatgtaatctgaaatgcagttcattagcttgtttgaatttgaacaagtttatggtgactagatagttggttaatagaatatttagatattttatagtttcttttgaaacttcggggactcaagctggtttattgtgattagtcctaaatacatatattataatgtccatatttgtggattaattctggtttttaatttttgtttaacagataattactccccttttttggggattgaaaagggg

SEQ ID NO: 31442 - DNA, 1018 bp, Medicago truncatula
  Intron number 2 from transcript Medtr7g015020.1 (locus Med tr7g015020) derived from phytozome v7.0 (chr-ID MtChr7; po s 3685076 to 3686093)
gtgtcggttgcttcctacaaaacatttcggctgttgtaagtctataattctgaactcttctgtctgccctatgctaatctacaactttgctggggtttctatgttccttaatctaaggatttgtttgacttgcttaaaaatgaggggctggataagacaaaaaaaattgtttgaaaatttatatttagtcaacttcttgacccaatgcaacgggtttggattgcttgcagttagcaatccacgcattcatgcggtcaaccaatcaataactttggatgacggtccaaatttcaatgcaaattttgatttttttttttttttttatatctaaaataccaagcttgaaatctgaaccgtggtgactgtgtcagattgtgacagcaggcaacccaaatcccaatgcaaccctacccttcgttctctctcatctatgtgtgtttgtgcatgtttaatttgcatattgtattatattaggattaggatgtttacacactgcaatgttgaacactcccgagtataaaggataatgtcataagttccacattatttaatttgagttctgcatcatacataaaatgcatgtctgtgcatatttaatttgtatattgtattatattaggattaggatgtttatacactgcaatgttgaacactctcgagtataaaggataatgtcttaagttccccagtatttcatttgagttgtgcatcataaataaaaaaatgtacaaaacaaagaatagtcttatagagtaactatttatcttgtgtggctctactcatattttccttcaatatgcatcgacgcaccttaagtatcttgttgtaaatacatttattttaattaccaagtgcgtttatattttctacagaacattttgaagagtattttagtcttaaagcaattttttcagaatgacgtgtcttcattattagtgactagaactatactccaccatataactttttcccaatccaccttgaatttcagtattcatcaatattccatagaagggaa

SEQ ID NO: 31443 - DNA, 779 bp, Medicago truncatula
  Intron number 1 from transcript Medtr4g028880.1 (locus Med tr4g028880) derived from phytozome v7.0 (chr-ID MtChr4; po s 6743763 to 6744541 reverse strand)
tggcggttccaactatatacggcgccttttgtttgtattctcagtttcatcggtctttgttcgtcttgagcggggatttggttgtttaataaaatttgctgttttaaaaaaaaaaaggttatcgacactatgaaagtgactttcatcaatccatccacttccaccgtaaacttaaagataggtaactaaaaataccttaattgacctaacttcaaaaattgccacatatacttgtttaggataaataataaattgaaattttttaattttgatttttcatatcacttttgtttttcttttataatatttttactgataaaacatcaaaactgataggctatgctactctagctactattaaactaagaatgcaaaagaagaagaaaatataaaactttataagtttattcatgaagcagccaagaggcattgttatagcttttatacttagggttggtagcaagggcttaacctgataaaacataataaaagcataagaaataaaaataagtccaaaagtttattggggtggtctatgaatgatgtaaacataattgatgataggttatcttacgttatttttagcatgtttttcagtcaaattcaataggttttatcagcagaactgaggagtattagaacaattgtctataattttgggtcatttgtaatgttttatatatttgagtctgtaattctattattcccgaaacatagcaattcaaaggtgtttttgatatgaagaacatcaaaaagtcttatagacattgggaagatca

SEQ ID NO: 31444 - DNA, 685 bp, Medicago truncatula
  Intron number 1 from transcript Medtr4g064860.1 (locus Med tr4g064860) derived from phytozome v7.0 (chr-ID MtChr4; po s 12573882 to 12574566 reverse strand)
ctttttgttttactggtgagttttgaaactaaaagtttgtgtttttttgtttgtttgtggttttctcgcgtaacttcaatccaatgtctaagatatagaataatacatcttcaatttgaatctgattttggacttatgtatttctctttggataattagattttagtaattgtgtatagaaaaggtaaagggatgtcaatttcaagtgttatcagatagcatttgtggatttcagtaactgagttacctttttgttttactggtgagttattatttgatactttgcagtagtagtttgctgcaaggtatcaaataataagagctatagtattgattttcctgttagcataatgcggtgtagcatatagaggaagtgagttattatttgataccttgcagtagtttgttcttgaagtattttgaatatagcataatgtggtaagaaattacattcctgggtattatggatatttgatttgaggtaagcaaactctattttatgtttcagtttctagaatctagtgatttgaattattaagtgattatataaataagtgatttgattgttaagtgattatataaataagtgatttgattatttaagatgttttttttgtacaaattatttaagctgttttgattgttaagtgattatataaataagtgatttgagtagttgtattcc

SEQ ID NO: 31445 - DNA, 780 bp, Medicago truncatula
  Intron number 1 from transcript Medtr7g067930.1 (locus Med tr7g067930) derived from phytozome v7.0 (chr-ID MtChr7; po s 13811532 to 13812311)
aggtatggctcatagtaacaaatgcgaaaactccgtttgctacaacgaagagataatatagcctatgaggtacgactcatagtaacaaattgagaaaaaaaaaactccgttcgccacaaccaagagatgatgtggtccaaatgcacagtaaaatttgtagttaatgatatgaaactttaagtcaagaattattcgaataatatttgaaaaacttatatttttcaataatggaaccaatgaaaaaaataaaataaaaattaagtaccctccaacatgaatactaacatagcatacgcatattaacatgaaagttatgtttagaatgaattagctatgaatcattatttcattgggcattttaccaatcgttggaaatgaggaattttagttatggaacttcggtttagtttagccgaaactagttgttatcagaaaaaaaaatcagagacatacttagataagtatgtcaaagtataagttataccagaatacgatatattggatatatgattgtgattattattatgattatggtgattatgcttatgattaaagttatgagtatgactatgttatgatataatcaaaatagtatttcagacggcgattttagttatcccctgatcgctcagttatgcataatgaaatcatataaacccgaaatgagttgagtttagtaacaaatggcgatcctaggttccccgagattgcctacagcctaggataggtggaactcactgagacattttgtctcaccccaatccattttatttatttcag

SEQ ID NO: 31446 - DNA, 635 bp, Medicago truncatula
  Intron number 1 from transcript Medtr5g040620.1 (locus Med tr5g040620) derived from phytozome v7.0 (chr-ID MtChr5; po s 17363491 to 17364125 reverse strand)
gaaaaatatcaagcacgttccccaacaggttccaggtaaaacatcattgtcttttatgttgaaaaaggttttttttggctatgtagtagcaccgacacttctgatcaaacgtgtctgacctatgaagcatggacacatacgctacacttacacagacaagttgacactgatatttgagaaaatgacatgatttaatgtaattatgtgtgtcggtgtcggacactgatgcacctttgtgacaagaagtgtcagtgctatggagtgtttgagacactatacactgacatagcattgtcagacgtggttagattcaattgttcttatttactcaaattagtatgagtgtctatgtgacggtgtcctgttggtgttggtgcttcatagaattttgttgatagatttcggtgttatttggttggtttcatagaattttgttggtcgtttttcttgaaacactatttttgaaattttgtttgtgtagcaccacttccgagtgaaggtgtttataatttccaacatgtattgtgtccgatacttttgttgattttttttttttttgttctttgcacaaactcttggaggacactttaatttttagttttcttgaagttaaggttcttgtcatttcttgtagg

SEQ ID NO: 31447 - DNA, 955 bp, Medicago truncatula
  Intron number 1 from transcript Medtr5g005820.1 (locus Med tr5g005820) derived from phytozome v7.0 (chr-ID MtChr5; po s 351746 to 352700)
agcaagaggcaaagacagcagtagtagtactggtggtagtatactgagggaggaaattgagacatatgagtaattaagagttcagaaggtattcactccaccacaccaaacatcagagcaaaaaaattaataaatttaaaactcatgagattacctttctgcttctctgtctgtctctatattatatcctacatcccatttacaccaactcgtacctccataaatgctactacaccctctcattaccgtaagcaataactgcacacacttctattaccattccttttcacctcttctcaggcttcaccatcaccacctcctaactaataatcttatatcatattcaaactcatttttcatgtgttttttcattctcttttaggacaacctcttaaaccatagcagttccataattcccttcccacacccccacccacttgttttttagtttcttatactacatgacccacttacatatatgttccaatcgcaacgtctctctgctgcttccaccatgatcaatctttctcttataataaggtaccattttgtatgaatatgtcattttctgaaatagtgttaggatctcaataacatcaaaacttcttatcgaatgtgtgttccagtgtctgacaagtgtcacaaaattttattgatattggcgtgttggtgtccatattgtgtattgtttgtgtgcttcttcacaggttatatataatcataataatgacaaccctttcactgtttcaaaatataatatacgtcacactctttccctctttactttgtatttgtcttttctaacttcacttctttcattctttttcgggataaagccttgaaacctgaatgagtcctatcattatgttaatttgttcagtctttcttctgtgactctgtgaatatgatgctctttttagctttccaaagctgtgatagtaagaaaaaagcggtt

SEQ ID NO: 31448 - DNA, 672 bp, Medicago truncatula
  Intron number 2 from transcript Medtr5g073570.2 (locus Med tr5g073570) derived from phytozome v7.0 (chr-ID MtChr5; po s 26454515 to 26455186)
tactcatcatcatcattgcttgaagatttggactggtaaattactaaatctttgttctttttgtgttagtgattaatttttttattttttttggaaattgagataaattgaaaaaaaaaaaaaaaggaaatttcgatctgggtaatttttcttttttctagatttgttatcctttaactgagagttattttttattttttgcaaaaaagataaagttttttccatttatgtgtttttaaccttatttagattgtgttaaaaatgtaaagctgcaaaaatatcattgtattataattgctgtgtttaatttgatgcttagatagattgcagtatcctcagaaattaaatattctaaaagattgtgtaatttgaactagtaattttcatgcctttgagtttaatttttcaggaattcattaaatttcaagaattttgtatattgtgttgttataattttagctattcagtcttatctttatgagggatttgattagttgatgaattctttaaatgtgaagaatttttgtgtaatgtgttgtttgaattattcattcttgtgtacttgagaatttaatttctcagtaatatactttaaatgtgaaattttttgtattcagttattgattcccagccactaaccaatgttgcaaaatcttgtttttttgcaggaaa

SEQ ID NO: 31449 - DNA, 420 bp, Medicago truncatula
  Intron number 3 from transcript Medtr5g073570.2 (locus Med tr5g073570) derived from phytozome v7.0 (chr-ID MtChr5; po s 26455460 to 26455879)
cagactgagagggttttcacattcattgctgataagtaagcatcatcctttgttttctatgtttggtttcataatttcattggagatacaattgagagtctgaattgccgtttgcctccaaacctagatttgattagaagtaataaaatgtagctttttggtacgaacagtcttcaattttgtgcaatcttctaatttcattgatgtagtgcttatctcgcattcaattatactgctatagcattttgagtgtctcacactatatgccattgactactagaaatccgaacttcttgttaactaagtttgttgttcattaactcgatgtttgacagaatttgccatattttacttatgttgtatttttttctttctcttttgcaagtgcgggctcgctacaaaacttacgccttcaaagat

SEQ ID NO: 31450 - DNA, 1049 bp, Medicago truncatula
  Intron number 1 from transcript Medtr5g091860.1 (locus Med tr5g091860) derived from phytozome v7.0 (chr-ID MtChr5; po s 35994424 to 35995472)
tcatagttggtggattttatcttttgtttgcttgggtaatggttaatttctttatgttttgttttgataggaagaatgtttgttttggtagtaatatgttttatttttccttgtttaaaaagagatatagtatgaaatataaataattagtgataaaatataatattttggttcgatttacaggtgatttgttttaaatgttctgaaaccgatattcaaacaatagtgatcaaatttgattagtgtgtgtggttcaggttatacatacatgagcataaaaaaacaccaatttagtttatttgcattgaatgtttgcattctacgagttattggtttgattcttacacctcatcataaacaatatagcatataatatttatttattttcctctttgtattaaagggtatacaaaacatttttcaaatgagataacaagattttagttttcaaatgaatggttgattccatatttacaaggaagtgagaagaattcacagaacacttggataggtcattttctttccaaaaaaaaaaaaaactaggataggacgtttggtgcccccattcaattaattcatttctaaaatcgacattgttttttggtgagattcgcaagtggcacgccacgtaattgtacaagttccacatgcatttgactttagcaaacattatcaatcttggattagatcacgtgtttgttctcattagtttgatactccataatttagaatctgtttctgtggtgcagtatctgtttaggaggaaatgaattaagtgaaaatctctctttaagatgtaataataattgagaaaaactgaaattgtttcaattgagattcatttctaaaatatgtttttaatcaatataaaaatacgagatttcaattttagtcctgcataattttaatagtaattttaatccgtacgaaatgattgttaagaggtgacaactagggtaccatgaaaaaatggtgggtaatttattctaaccaataaatattcactttttaaagtggtatccataaactatcttgaccccaccaataaa

SEQ ID NO: 31451 - DNA, 646 bp, Medicago truncatula
  Intron number 4 from transcript Medtr4g141030.1 (locus Med tr4g141030) derived from phytozome v7.0 (chr-ID MtChr4; po s 34721334 to 34721979)
actttctcaagcaggtgtgtgttttctatttgcacaagttgtttttttacctttgtttggcttacaatctggaggttatgtgattattgttgctaatcttatatacttaaataaatgaattgaagtgatggtagtttagagatgagaaatgtttaaaatcatctggatcaaatggaacggcttaaccggttgaaacggaaactagttagtttgatcctttacattgtagttgggttgaacagaaattgaactagaattgaattgaattggttttcaaatcctagttccatccctgtctttgatccttcataatagtttcgcgtatagtttttctaggtctacccctacctccagtggtttgactctcctccatctgatctactctccttgctacataatccacggatcttccaaaccacttaagtctagtttctgcaatcttttgtactatatttatttatttgtattccgatacaatcgtggttgaactgatcaaatcaattgaaccatgatctggtagtctcaccggtccgatttggtccaattattgaaatattgatagacccaacttatttgagtatgtaattttttcaaactgctaaccatgtgatgtgaaattgatctcaggcagatacgggcaatcctg

SEQ ID NO: 31452 - DNA, 460 bp, Medicago truncatula
  Intron number 2 from transcript Medtr5g085230.1 (locus Med tr5g085230) derived from phytozome v7.0 (chr-ID MtChr5; po s 32560933 to 32561392 reverse strand)
ttataagtttaatagttggaagttccgtgttaaaggttgttcttagatacatgtttttgaaaaacatatgggttgagtgtgcactttcagacaatttgtgtggaaatttttaactgggactaaaaatgttgatggaaaaattttatagggactaaaaatattgatgaaaatttttataggaattaaaaagtgtgattttattttgtaaggaataaaaacaaaattctgaatattaattaacccttatatatatatatatatatatatatatatatatatatatatatatatatatatatatccattaaacatcaatcaatgttcacattctcttctcttgtgtgtgagtgtgtgagtgagtgtttggtttgagggaataatggggtttttggtggtttttttgttttgattgaacttgatttcagttacggaaggaaattttgacattgattttcctcaa

SEQ ID NO: 31453 - DNA, 734 bp, Medicago truncatula
  Intron number 2 from transcript Medtr6g009630.1 (locus Med tr6g009630) derived from phytozome v7.0 (chr-ID MtChr6; po s 1673249 to 1673982 reverse strand)
ggttcaccaagtgctgattcgtaagttttctttgttactgtcattattttaatttgaaattttgatttttttttacctattttgtgtttcacactttttggatttgccctaattttgtgtttcactgttgaatttgaattcatatataccttttcacttgtaatgttcaattgttgttgaatttcattagggttatatttgatttgagtttaaattgcttgtgtagtttttttttttttttttttaaactcgatatcctgctcttgatcagactaatccgaggggaccatcccaggggatcaaccgggagggtttatttttttctttctatttgaaaattcggtatccggctctagatcggactaatccgaggggccaaatcatattgatttgcattatttttgtgtatgaaacttactagccaagtaatacgagtaatgttgaaattaacataatttggattaaagaactatgtgtttgcatgtatctgtggactagtatttttgaacctgcaatattatgaactcttgttagtttgttgatattttggatatctgaaattttcgtcgggctttgaagaactatgtctttgcatgtatttgtggactaagatttttgaaccctggaataattatgagttttgattttgatattggagaaatagatgtcttgtttgttgttgatatttcagatatctgaaattgtcattgcattttgtctatgaagctctgaaa

SEQ ID NO: 31454 - DNA, 880 bp, Medicago truncatula
  Intron number 2 from transcript Medtr4g096820.1 (locus Med tr4g096820) derived from phytozome v7.0 (chr-ID MtChr4; po s 20506959 to 20507838 reverse strand)
gttgctactgccctagctaaacaggttattttatttatttttaaaattattgacgaatatttttgtttgatttagtgatgatgatgttgaatgtgtatttgcgaagtttacataactgttttcgttagtattgagtgtgtaacttcttaccaaaaaattatgcatgagacacgaaagacatgtgattcattctcacggctcgtgttctcaagtacgagtgaagtgaaattactatggtgtaatggaatctgtgcggctgcagcaccatgctgcacagggacaaacccacttatagggttgtgtaggcaccaaccctcactatattttgagaaaactccattgttagggtttgatagttttttttggggattttgcgtatgagttctatagtatgactgcaaatttaaatatgttgtcctgacttttcaaaaaatttgggttcgtccctgattactacagctgtagaggatccaatttcaatttaataatgcaccacaaactagggaaatggtaaatgcttattcaatttttcatcacgaatagaatgacatgtttgatcttatgcataccttgcttgtgaagacactacaatatgacgacatgtgttagctgtaatgaactagcaatgtcgattgatatatgttgttccattagaacataatatcttttatttctttatctttgatgttctagatttaaatatgtggtaatgtgattgtcactgctttatctattacaataaatatttggtttgactaaatctatatgttcacgtagacttcaatcttcatatttaccacttttaggatttatactggttttcattagttcaaatgtttgtgtaggatacagaagaagtgcagcatcacatatctgtctt

SEQ ID NO: 31455 - DNA, 901 bp, Medicago truncatula
  Intron number 1 from transcript Medtr7g070800.1 (locus Med tr7g070800) derived from phytozome v7.0 (chr-ID MtChr7; po s 14411013 to 14411913 reverse strand)
agctatctacttgggacataaaattaataacagtgatacttttctcactactatcgaatcaaattttgctgtttaaaaaaaaatggttgtactctttatgtggatagattttggtttatgttgcatttatgtgactatatggatgaactttttacccgatattctataggataagtttgatgaacctgatctttttacaaaagcagtgatgagaaggaatatatgctgaagaatgggagtgtaaagtaattgatactcatagcaaagattttataccatatgtattttattaaagtgattaagtgataggaatcctttagaaaagatatttactcaaaaaaagtgtgttttgatttgatcatcttgttcaaaggttaaagtaattaacgtgtgtagataacaaagttttttccttaaaaaaaaaaactttttttgcctaaaaagattggtttctgaaaatttgaatgctattatagttgcatgtcattccaaagtagtgataaaatcagaatatgcaaatggatttgctgctgtaattgcatcacgcagtttaaatctctaatgtccaatctcaaaataacggttgggattgtttaaaactgattttattattgtgtagttcgattcgtaagatctcaaaataacagtcgagattgtttacaacgtgcaaatgcaagctactcttgcgaatccggatccggtagaaatattatggaagattaaaatattatggaagattagatctttaggttgtactattgagttcttgtgatgtttataaaaagattaagatgtagaagtggaagtggaatatatacatgtcacattagcttgtgagataattcttctttgtcaatcctgaacaggtttgcaggaggtacagacaatactatcagcagat

SEQ ID NO: 31456 - DNA, 799 bp, Medicago truncatula
  Intron number 2 from transcript Medtr5g084610.1 (locus Med tr5g084610) derived from phytozome v7.0 (chr-ID MtChr5; po s 32222613 to 32223411)
atatttacattagggactgtgaggttaacattattttagtttgccttcactttgtagtttgtttgcatttttttttcttgaataaccattttatttaatgaatgtgcactttatttatgtcaaaacattctcaaccaaagacaacaaatggatgtcaccagggaacatagaaaggggaccgaaactagcagatagaggtgcataatctattgactgactcacataattcattttttggactatttacagataattgtttctatcaagtgaagtgactaatgttgatttaaatttattttactttcagattttgttgatcattttggattaacgatcaagtgatgaatttgatttaacgacataagttgagacaactgcttcttctaattcaattacatggaagtaattggtatcatacaaagtttatacggttagacatgttatcatacatatacgactatattattattgatatgccttatgtgatgatcataaatttatctccatttacttacaaaatttatgctttttgtaataaaaaaatccaaactgaacataaaaccgaataattgtattattcttgaacaaacttaattagaatcaaatgtttttatataaaaaatgtctaaaattttcactgaataattgatgaattgagaaaatgcttggttgtatggctctgtagcaaagcatccgaacaacgatttgagagataggttagtaggatagttctatggtcatgtccgtgtccatgagggagggagggagggagggagggagggagggagggagcgagaga

SEQ ID NO: 31457 - DNA, 814 bp, Medicago truncatula
  Intron number 2 from transcript Medtr4g073450.1 (locus Med tr4g073450) derived from phytozome v7.0 (chr-ID MtChr4; po s 14545204 to 14546017 reverse strand)
acagatttcagtcagaggctgggattaggacagcagttattgattcatgacgaacaactatatatacttgttgccttgcttaaagactatagtactacttagtttcttttcattttgcaacttatttctatgtgtgaacgctttactactctgtgtgataattattgatctttcagctagctctaatttacaaactatgatagcatgagttaatgtttcaactaaattataataatcctataaggtaccttaattgatgaagggccttgtgtgatgtgcatgctattatgaacttcatcctattaaaacgatgaaaaaatggtatttatctattatgaacttcatcctattaaaatgatgaaaaacagtatttccaaaatcattgaatttgtcggtatcgacagccaatttgaatctgacgagtttcgcctttaacgtgatggaaatgattatgcagagcccttttcggcctttggcaggtttaatagtttggcaattcataattgtacggttaaggatacacatatcctaaatatatcaagcaagacacttgtcattttagctatgcataatgattcatccgactttgccaaaattgagttatctggtccgagtctttgtacctttacttttaccggtattcctgatcagaaaatatgtggaagcggtctttcttctgtgaaacatgtaaatattgctgcaaacattcatttacattgggacgagcctccaatggttctattgatttggttgctaggccttgccaatgtaaagtcattgacattctcttcaaatactcttcagatttccgtgg

SEQ ID NO: 31458 - DNA, 807 bp, Medicago truncatula
  Intron number 2 from transcript Medtr6g038910.1 (locus Med tr6g038910) derived from phytozome v7.0 (chr-ID MtChr6; po s 8498564 to 8499370 reverse strand)
acaggtttcctcttgcctaggttgcttagtcatggctaaccaatcaaattctggattgttttaaatctagctatttagttatttagctatatgagccaattttgcttgctggtctagtttaatgtgttctcgtcaatacaatttctatgcgttagctatgatttaatttcatttctaattgaactaggaacaaaaacggcaaatcttgcatgtgctcactctttttttctcttataaataatgtgatattaaaaattcaaataattctatatattattacgtttagtattaccatcactttttgtatggattagagttgtcgtttgtgaaaaagcctatttcacaagggcaacaatctctgaaaaaattgccaggagtaaaatcctcacaaacccctcacaaatgatctttttgaaaagtttgcatttgtcaggggcatcccatgtcgaaatcccaagcaaacatactccttattacgcacgaattcaccgtattcttcttctttgctgcaactttgctctatttcgtggttttttttttccaacaatacccatttctcaagtctttaatttttctggtatgttcaaagattctgtatttgttattcgattcatggatttttaggttgtgggtgtgttttaaatttaatattttgtccccaaaattagtggcttgtgtagattagattagatgatgattttggtgtctatggaaagtttttttttttttttataatgatattgctgttatttttgtgggaaaaaaattgtaggttgctctttggctgggatagaatccatacttgat

SEQ ID NO: 31459 - DNA, 669 bp, Medicago truncatula
  Intron number 4 from transcript Medtr7g022460.1 (locus Med tr7g022460) derived from phytozome v7.0 (chr-ID MtChr7; po s 5611593 to 5612261)
ttgctgatagaattcaacaggtaatagatctgtgtaatattcatcggacattagtttttgattttacatttgttatgattgtaatttaggagtgaaattaagattttaagtaagtaattgatatttttcttattttatcgtcatataaagcgtatcgaattatgattaatcaaagcatatttccatgattcccggtccgcgacagcaataaatcggtctcaaaagtccctgcaacgacatcgcaaccacaattgtgggcacatttgccgattttaccacaatataaaagttgatcacaatttaaaaccatgatattgtttatattactcttccttgaaatcaatgctcatgtaatatctttgtgctggtcaattttcaatttttatcaaactattcagtgctttttgattggaataggatgattttgttaatgatttttcaataaatgcatgattttgtttatgatctttcttttcaataaagtaattcaacaactagattgaaaaagaacgaggacaaaaccagaactagtatttttttttatttttttttgaggtactttgttccagaacttgaaggctgtatattattattaaatctgtactaataacaatttttggttttcttgttccagtcactcggtccaagagtccgtagctttcgatccgt

SEQ ID NO: 31460 - DNA, 527 bp, Medicago truncatula
  Intron number 2 from transcript Medtr5g107090.1 (locus Med tr5g107090) derived from phytozome v7.0 (chr-ID MtChr5; po s 43204948 to 43205474 reverse strand)
aattttaaggtgcattttcttttccctcctcattcagtgtcatgatacctgaagactaaatgaggtatcattttaaattcagaaattcaaacatatgaactggaaaggtatcacgaggataaacaaacatctttaaacttacgggtctatttgattttactttcatctgtaattacaaaaaaatgtcaccttgttctcaatttgtttcctatttcataagttttgtataggaatcaattaaacaactatttcttgtttccccctgtttcctatgtaaattattgtaaatagaaatggaaacagatcaaagaggtcttaaatttgtaattttcattggagatcctatggttaagcacattttgagattatttgatgtgagatccattgcacttatctgcatggtctaggtcctgagtcaggacctactaattcttgtcaaatgcttattaggtaacggggtgatttggttactagaatacttaaactgtgtgcgttgaacattatatgttttgtaatctatgcagctt

SEQ ID NO: 31461 - DNA, 987 bp, Medicago truncatula
  Intron number 1 from transcript Medtr6g080690.1 (locus Med tr6g080690) derived from phytozome v7.0 (chr-ID MtChr6; po s 16223523 to 16224509 reverse strand)
aacttcttgttcaagctcacttggattgtttgaaggtctttaatctctctctctctctctctctctctctctctatatatatatatatatatatatatatatataagtgaagaatactaatttgtttacaatttatatcaattttttttaatgggcaatttatatcaaattaactaatatattagttttttttagatatactagtacaatttattgaattcattcttaactatctgcctccaattgatagatgttcaatgtgaatgtgatatagatatatagtattgttttcttttccttctcttatgaaaaaaaaaaatttgttttgttaacttttgttaacactcattgttttgtaaatgtgttgaatattaaataatgaaaaaaaataacaaaaagattatcctttggattgaattctatataccaaatatagtgatgagatcatataatatgaagtctaaatatatacaattcggtaatgcataacctttttttaatatgtaactatataaaagttgtaattttttttagggtttataaaagtggtgatgatatgaatttaagagtccaatttgttcaaagagagaaatcataacttataaatgaagatttactcctcaaattcaacctctttaattttatgaattaacttatgtaattttattaattaattaacctatatagttgataaccaagagtttgtttaacaattaaagcatgaacaagatatataaaatattgctcatcaagactcttaagcataaaaattaaccttttggtgcacaatatatctaaacacaacatataatgattcataatataagagctcatttatttagtaataaataaaagacctcatttattgatcattttttctacaagtctttgtattttttcatttgatttaagcatgtgagacatttgaaatattttctctctatgtttttaggttggtgacatttctaacttggagatagagaaatc

SEQ ID NO: 31462 - DNA, 1030 bp, Medicago truncatula
  Intron number 1 from transcript Medtr6g009990.1 (locus Med tr6g009990) derived from phytozome v7.0 (chr-ID MtChr6; po s 1855489 to 1856518 reverse strand)
ttttcgtttcataccaaagttgattcctttttcaggtaacgattcaaacccaattatcttttttcattatttttgccaatttctgcatattcttctgcatttgcttgtttttgtggtgtgtgttcagttaattttctattattttatttgaaattttcatgctttatggttgattttgattgcaatttacaaaagcattgatgtgttttgcatgatgtttatgtttttttgtttcaatattatgttttttttttttttttttttgcttatgtttatgtttttttggttgatgtttttgttcatagttatcattataatcactatgtagatttataaggtattttgattgatgattatgattatgggcttgtctggattggtttgtttgagcttgtctagtggcataaacatctgtgagactgtttgagataacttatgaaaacggcttatgacatttttcataagctgttttcggcttattttcataagttgttcaagattgcttatgaaaacagcttatagattatacaaaaataatttaactttattttatcttttgttatagacatagcttataaattacttatcatgataaccgcttatgctctaaacttcaaattaagctgtttatccaaacagggtgtaaatgcttgtatggacttaatccaaatttgattgcagacccctttttttacagtatgtttgtgaatgcggtgagagacagtaaacatgcggtgtgtgtgaagcacctagtcatatccatataatagtagagactcgattccgcacatgtgtagtttaacttgattcatctgttagatctatttggctatcgtgtgctctgaagttctctgaattacgattgattgttctttttatctatccgtgagtttgtcttcatgctttgttggatgcagaaaacttgtatgtttgtttgttatatgaaattattcaaaaataacaagctaaataatgttataatttggaaacttttttatgcaggaaattgttctatcagttacagttctaa

SEQ ID NO: 31463 - DNA, 777 bp, Medicago truncatula
  Intron number 1 from transcript Medtr5g012670.1 (locus Med tr5g012670) derived from phytozome v7.0 (chr-ID MtChr5; po s 3689971 to 3690747)
gaaggtaaaactcggtgtaattatatcttacgtttttttgtagcatcgataatgcaatgtgatgtgatctcacctttgactctttggaactttaaagtagtataaaggaaaaatagaaaattgaacaaggactgattcatctaccaattaagaagtgtactagtttatttacgaggaaattatcaattaggctgttggttttggactttagagagaatctatatagtacctagttagttaggcagtattctctgctggtagtagtagtataccaagccaaaaggatgatgacccacaagttacaagatttggggtacttcaatgttaaccaatcaattttccaaaggctactctattggtaaaaatgaccgttggaaaaaccactatctattggccaatattaactcataaaatatatcacaacgataatatatagtataatgcagccaaatacctctcactataaaatacacaaagtgcctctcatttgttcttcctttttacttacacacattgtatattatactatactattccacaaatattttaatcaccatgctcccaagatatatagtataaatacaatacaacatatcaaacagtttcttcttccaaacattctattcttatttgtttgtgttcaattctcaactctctctatatatatatataatggatacacctactcttttacattctttgcaattgcttttggttttcacttgcatgttgttaaatgcaggaatagtaacacttgctgcacgccttcatcatcat

SEQ ID NO: 31464 - DNA, 519 bp, Medicago truncatula
  Intron number 1 from transcript Medtr4g160100.1 (locus Med tr4g160100) derived from phytozome v7.0 (chr-ID MtChr4; po s 40512281 to 40512799 reverse strand)
gtagcgtttgggctcagagtgctaatttccctcaggtactttcatcaatcgatcgatcttctatttattttcttcattttttctttttctttctcgattcatcgcttcattaattaatttcttacttttgtgagtttcattcttttgtttatcaattattctagattttccgatctctgttactgcgattgtaaattaaccttacattcattattaaggatccgcatgcaaatcaagttctttacttaggatccgattcagcagagaagataatttgacttgacttgaattgaattgaatgaaactgttgctctttttctgataattaacaaattatttaattaattaattaagtggaacctatgtcgttttgattatacattgtgcctaaacagtatacaatttttgttgtgaagtgtaataaacgcagatctgttttgaaattagttgatttgttcttatttgtaatttgttggtgtttgttttgtttttattattagttcaagcctgaggagataa

SEQ ID NO: 31465 - DNA, 308 bp, Medicago truncatula
  Intron number 1 from transcript Medtr7g089300.1 (locus Med tr7g089300) derived from phytozome v7.0 (chr-ID MtChr7; po s 19589101 to 19589408 reverse strand)
caaacaacgtttttccaccacaattcgctgttctggtacttcttaaacctcttttccttcatgggttttcacttaattactatagagttacaatctttaattcccccatttcaatttcacccttcagtttttcacaattcacaaaagccccttgtagggttaactctatttttttcaattttttttttttactatttacaatttcatagataagaatatgattatatagtcttatatgcaacttgggttttttctgattttgatttgtttcagctttgactcctgaattgaagaccacattggataag

SEQ ID NO: 31466 - DNA, 878 bp, Medicago truncatula
  Intron number 1 from transcript Medtr4g156300.1 (locus Med tr4g156300) derived from phytozome v7.0 (chr-ID MtChr4; po s 38718447 to 38719324)
ggatagggccttggaagttggaacagtttggtttggttttcttctctctcgccctcttttcctctgaagcattctcttgatttatatagtattcagtgcttaataatataaaatagagttggagtgtggttataatctgtattagctttctaaattccggcttgtgaactgaagtatatgtttaatggttaggtgcatctttagagggccgtagttatattattaataagctacttttaacatacatacgtgattctaaaaatacacgatatgaaaaaatatctgcttgataaagttatggcataatgttgtgtaaaaataggaaattggaggaaggtatgatctatctttcatgatttagtaaacaaaaataaataatttttttagataaagaatatcagtttttactttttagtatgtatgcttatttgagttatttattaaagagaaaccatgtacttagacaaagtcgttaactgtgaaatgtaagagatcagtattaaatgactggaaaatattaattataaatgaattcaagcagcagtcactcaataagaaataattttggaaacaatgggtaatggagcatgaaaaagaaatttaacaaatagcatgcgaaataaagacaaataatttggtcgaaatcattgaccctcaagttttatgtgcaagtaggacctggtatgcagcatgtcttaacagaatgtgccactggttatattgttgagaaaattaatcatctgcggagtacccgatttcatattctttgggcagagttgttgggatgtgtggcagttattatatatgaatttttctttttaaatctattctatatcaagaaagggggagccttggcgcaacggtaaagttgttgtcac

SEQ ID NO: 31467 - DNA, 520 bp, Medicago truncatula
  Intron number 2 from transcript Medtr4g156300.1 (locus Med tr4g156300) derived from phytozome v7.0 (chr-ID MtChr4; po s 38719290 to 38719809)
ggggagccttggcgcaacggtaaagttgttgtcacgtgactgaaagttcacgggttcaagtcctggaaacaacctcttgtgtaaaagacagggtaaggctgtgtacaatacaccaaaaatgttgggaccccgtcccagaccctgcgtatgcgggagctttagtgcactgtgctgccctgttttttaatctattatatatcaagttaagagggtcttcagtaaacctgtttctagttgatgaaaccatgcttgcaatttcttgccggttttgttgtaagattcagtgtccattttttatttatttaggtcaatgtccgtgcattttgttataaatagtttgagttggttgatctcgactccatcattgcctgtttttgttcagaattgtgtataacgttttttgtatgttatttcaagagcatgatattctttgaacattttcatgagtttgtgtatattatttcaatagcgtgatattctttgaacatttccatgattacaaaacgtctttttatgatag

SEQ ID NO: 31468 - DNA, 679 bp, Medicago truncatula
  Intron number 1 from transcript Medtr7g077870.3 (locus Med tr7g077870) derived from phytozome v7.0 (chr-ID MtChr7; po s 16542391 to 16543069)
attgttttgttcaagcaagtgatcctttcactttttctcttctttctctaatttatgtaacataaataatttatttttaagacatgatcttacacatttgcatactcgttcacttattaaattgttaggtatgatacattttcattataagcactaaaattactttctaaatattttggaggcattttgtgtagtgaagtatgatgaaactcaaatgtggaatatatagttataattgatagacagtggaaacaatttttacactgtcaatatatatgaattaaacaatgattcaattagtatactataataaaaaattaatatgatataaaaatctatctaattagtttaaaacaagacaacacacatacccctagacatattttaactaaaatattttgaaaattggacttttccaaaaaaaaaaaaaaaattgtttgaaaattgtcagcaatctgttaaataagaccaactggttgatttatttattatttgttttgaacaaaactcaacaaacaatcatgcttagttaacttctttagtaacaagtgatgaaaacaaatttttttcttaaaaaagaattgatgaaaatgacaaataattagttaaatgaattccttaaaattaaaattattatctctaataattttgtccatgcatattgtttttatttttaggg

SEQ ID NO: 31469 - DNA, 416 bp, Medicago truncatula
  Intron number 2 from transcript Medtr7g077870.3 (locus Med tr7g077870) derived from phytozome v7.0 (chr-ID MtChr7; po s 16543225 to 16543640)
ttcttgctgtggcagcaagagattccgtggtggcggtaagtatacattctttaagtcaaaacttttctttaagggcttacttcaagcttaaaaatagagtatttcgtaatcatttttaattcattgattgaatgtgtaaaatacgtaatctatacaaacgaaaaagaaaaaaaaaactttaatgttggtcatacttagagacaaatttcatgttttcttttcttgtatgttatatcgttaattaatccaaatttttagtagatttatacactagaaaaggacttatatggtcataaggtttagatttaggtacacaaaaaatgattaaaaaaacaaaatatatagtgttccgaaataatttgtatattgaacacatttcagcttggtggacttagttggactgttcaattgggaag

SEQ ID NO: 31470 - DNA, 439 bp, Medicago truncatula
  Intron number 2 from transcript Medtr5g049840.1 (locus Med tr5g049840) derived from phytozome v7.0 (chr-ID MtChr5; po s 21422523 to 21422961 reverse strand)
ttacatcatccggttgttgagaagtttaagacttagtaagtttgcattatgatttcacaatacagtgttagagtaacctatttttcacaatccaatttgattgttttttgaccatgtttcttgaattgttgtcgtgaccttaacacttctcaagctcagagtcaaagcttcagtcttaagtaagagttcgacttcttctcaacgtacttcgtacaacgatttttccaaactgtctcaggttaggcctattgctgaatttataaacttagtcaatgtctgcttttttatgcacaaacatgctttaagtttttttacgcataaattaaaaaatacatattacattattctttattttaggtgcataatttgtgttaggaaacatattgcatcattatttggaaaacaactaaattcaatcttaaccagtttggattgtatt

SEQ ID NO: 31471 - DNA, 443 bp, Medicago truncatula
  Intron number 2 from transcript Medtr7g025720.1 (locus Med tr7g025720) derived from phytozome v7.0 (chr-ID MtChr7; po s 6373425 to 6373867 reverse strand)
gcaaggtcctgatacattactttccttctcttcattgactttatacgttcgtgaatttgattgttacttgattatatttctataaatcttgggtatttaaaattgaaattatgtaggttatatagaatcatccgcaaagttagtctaacacaatgttttgtcaattttgtgtatgttttgttgttttttgggttgactatgttttctgtgtaggatttttctgaattacttgagtttactaacaatcaatgatttctttctgctactatctaggactagaaagaactcttactcatatatccaattatatccaattgtattgaacaatagcaaaccatgacacaaggtctgtaacattcattattttgtccatatgaagttgagtttttatgtatccaattgatgcttagatctgcttctattatgatatcagatcattcaca

SEQ ID NO: 31472 - DNA, 121 bp, Medicago truncatula
  Intron number 2 from transcript Medtr7g025450.1 (locus Med tr7g025450) derived from phytozome v7.0 (chr-ID MtChr7; po s 6237673 to 6237793)
caggtatgtttgtttatttcactttcattatgtaattgtttcattctaattattattttttcttccctttttttgagtttgtatagaagtttttttttttttttttataaaattgcctcac

SEQ ID NO: 31473 - DNA, 471 bp, Medicago truncatula
  Intron number 1 from transcript Medtr5g007190.1 (locus Med tr5g007190) derived from phytozome v7.0 (chr-ID MtChr5; po s 1007265 to 1007735)
gttttgtggatcaaacataactggtatgtttctttctttctatcacttcttagcttgctcattggtttcttcactttcaaggattcaaccttataagattatgttttgtttagataagatatgtatattatatgatccactttatcttatccataaagttaatcttattagattatgtttttgtaacttttaagttgcatacatgctttaatatcctacctttattaacataatagtattgtgtattaacatgcttagtgttgtgttttgtggtaatagtaatagtaattgtagtaatagtcaaaagttgtatagaatatgtcatggaaaataaccaacaatggcatgtgctatcactatttgaattaagcttttatattaaagcatctttggtcaaatggtcaaacactcaagagttgaatttgaattcttgcagagctccaattcaacttgttgaattaaattcaattt

SEQ ID NO: 31474 - DNA, 710 bp, Medicago truncatula
  Intron number 2 from transcript Medtr5g007190.1 (locus Med tr5g007190) derived from phytozome v7.0 (chr-ID MtChr5; po s 1007816 to 1008525)
taagcttgttctctaacaaacaatttgagtttgtatgaatgaatcatccttaacattatccatagcaagatattattttcaactttgttacaacctaacctataatgcttttgtgatatgatttttctatctttgtcaattaaatctaatacttcctttatttggttcgtaagtaagggtatgtttggacggaggcttttggaggagtttattcttcttttctgaattaagaaagctatacaaagtttttagaattgaattaagtgagaccgaatgttacatgatcatgtattatgttattctttcaaaaacagacttagcccaaaatatagacttagcccttcaaaaccctttatacaagcataccctaaatctcaaatacttgaatcgagaatgttgcatgaagaagttagaacaatggtttattgaaacaacttgattttaacgacggaaaggcgaacaaatgaatgtatgcagcagacctaataaggtgcatttcagaaagctgactaatgagtaatacgtaattcagtcaagtaattcggttctaggcttaatgttacttttaaggaattagtttcctttacatttacatttgttatatatatactgaatttagaattattttcattttaaggtgcaactcagaagttgattttgatttgaataatatttcaggaacattcttggaagtgtttgtccttctgaag

SEQ ID NO: 31475 - DNA, 857 bp, Medicago truncatula
  Intron number 1 from transcript Medtr5g022050.1 (locus Med tr5g022050) derived from phytozome v7.0 (chr-ID MtChr5; po s 8553802 to 8554658 reverse strand)
gagaaggaaaatgttatttctctaaaaaaatagcatcaagaatctttcaagacacagctgacaaattttaattgcatgatttatttattcactttctatttttctgccacacttccttgaattgtggcaaatagtacattatgattggatgctatttattcttgaagaattcttgatgttatttttctagagatataacattgttggatggaaaaataattgacaggtatacaccgtttacattttcgattcgcgaaataaagaaagacatttggagaaaatggaaagtgacatatatgtcttcatgcaaagctttccgtataatacttaaaattgctgtatatatgcagtccatattagcttaatttgatcaattttgattgtgatttagaaagatggaaatccgagtgatcacagctttgatacgaattcttgtagtaatatttttgttactataattaagtgtaattggctaatgtaaagtttcaatccaaatttatagacatttaagttttttttatttttttaagagaaagataattcatttcatcattaaccacaagaaacataggaaatgtaatataagtgtaatgggggagagcaccaagagatgatttagaaaactaccaatccgaaaccattagatcaaatgagttgcgtattttatatataacattaaactcattcatggtaatcaatgtgagattaaccatatatactcgaacacatgctctctatccattaaatccaatagaattcacgaacaaaggttcaattaaatccttaaactgaaaaaagttcccacatctctatgcattttctattttatacccttttttttgcaccactaactctag

SEQ ID NO: 31476 - DNA, 736 bp, Medicago truncatula
  Intron number 1 from transcript Medtr4g137720.1 (locus Med tr4g137720) derived from phytozome v7.0 (chr-ID MtChr4; po s 33992598 to 33993333)
gtttttcttcctctcttcttattccacactctctggtacacattctattaagatcttatcactgtcacaaccatttttttgtttctgggctgtttttctttaagcttcaaattatttacatttttttaaaattttgtacctttttatgtattattgaatttcaattaggcggggtgtgttgaaatttaattataataaatgggttttatttgattttgtaatgtgttggatcttgaatctctatgtggagttttctatattggtttttctgtataaattttgatcttttattcatcggttgttgcatcttaaggacgtaggatagtggttcggctttgtttgtttctttctcaatttattttgattttaatgctctgactcataattgatttgcatgtcttttagtaataataacagtgttgcaaattatatatgacatttggtttttatgtgctttgtcaatcactcatatcactggtttcttcttctcatggtttatgtggatcttcaaactctttcttcacccactttgttggtgaattgcattaaaaagttttatattcatttaatttgaattccatgttatttctttttcctcttatgttaaacaagagtcaattatttgcttgttttttatatatttttttggttgtttggtgtttttttttttacttgttttggttgttttcaattctagaaaagaaaatatcttatatggtctgatttttattgcagt

SEQ ID NO: 31477 - DNA, 804 bp, Medicago truncatula
  Intron number 2 from transcript Medtr6g061810.1 (locus Med tr6g061810) derived from phytozome v7.0 (chr-ID MtChr6; po s 11165951 to 11166754 reverse strand)
ctcagtgcaaagaagacaggaaagctcaattgcaggtttagcctgtcttttatcttgcatatatattatttaattaacttaacctaggctcctctcgtgtttctccatttcttcaatttggagagataaaaacacataaaatcttggaaaaagtaaaatataattaatgatggtgggacccatttagtggtaggacctaccatctattttttgtgtctatctctctccaacttacaaaactccatttattttgccaaatgaagaggatcttcacccccttagataaccccgctccttcgtcgtgggaccatgtagctaggaagtcgactgggtgagtttgtttatccttcctgtctcgggtgttttcttgaatagttatagaaggccataggcgcgagatgtaccttgtggggaatattccacttagtctgtgttatggacttcctcctgtttttcagcaacatgctttgatttttcgaaagctctctttagtgattggctgctaattttttttttgccatgctttctggacaatttactggatagaaaaattctgtttattaataatgaaaaagaatttttcaactggaaattgtcttgcatatttataaaacaatgaaagtgccaaaataattgttttcatctttatttaatggataatggatcatctttagctatagctagtattttttttttttttttttaagtaattgcattttatctttattcatcacaatgactttataaattaaatgtttaactattctagatataattgtaaaagaaattttgcttttcaggcgc

SEQ ID NO: 31478 - DNA, 648 bp, Medicago truncatula
  Intron number 3 from transcript Medtr6g077950.1 (locus Med tr6g077950) derived from phytozome v7.0 (chr-ID MtChr6; po s 15725108 to 15725755 reverse strand)
attatttttattacagagtaagtgattttcgatctgctactcatcttgttactacttctatatcaagacttgtctaatgtgcaaaagcaaaatagtattgcttcgtgcacaagcttatttgccaccattggatcaataaatctcaccatatttcatttaatttaatactgagccttattgatccaatggtaaaaaccacgttgtgcatggtgcaagacttaagtccccgcaccatagacttggccctatactaatatgtgctgcagctgcaacaatagtacatttgttatagttttgataattttaactacaaccacttaatgtgtttttgactatcacatttttttgatacattccagaatttgttataaaatataactattcacacttgtcatatttcagaaagaactgaattccattataaggactattcttcaaagctatattcaaagtggtttgagaaatatctatcaacttaatcatctgactttaccacttttgattcgtttccattgttgaactgcaggaacatttgttaatagtgagtgaactactcaaagccaacttatacgagtttcataagttattgcagtcaattaccattcaatattaggaagcacttcagtatttacataaccttggactaat

SEQ ID NO: 31479 - DNA, 579 bp, Medicago truncatula
  Intron number 1 from transcript Medtr5g067800.1 (locus Med tr5g067800) derived from phytozome v7.0 (chr-ID MtChr5; po s 24121017 to 24121595)
gggtttctttcaggtttgggccaattattttagttttttttttttttttatgggaatttttttatggtgaaatgatattgtcttaacaaagattttaagatccaaagaacattttgtttacaaattacagattaatatttaacttttttaagggtaacaagtagggttcgaactttgaaattcaagatataagcctaataactataaatcatctttaaaaaaaaaaaaagtataaataatggttgtaaaaacaatcaagttgaaaatttatgcatcttaaaatattttttattaactacagttttgtctccctaattcttttatttattactagtacattttacaacaatttcaaaacaagtgagatttaatgaaattcttcacttagatgtgggctaccatttagtatgtattataaattttgtattttagactttgaatgatctctacacttatgctgaggacatatatcattcaggaattaagacttattacaattagaactatttatgaaggaaaatattaagcattattttccctaataaaattttcatggaaatcaattacagctaatcaacc

SEQ ID NO: 31480 - DNA, 1012 bp, Medicago truncatula
  Intron number 1 from transcript Medtr5g102240.1 (locus Med tr5g102240) derived from phytozome v7.0 (chr-ID MtChr5; po s 40946793 to 40947804)
tgtgcaaattgtggagtatgtaccgtgtacctgctcaatatgttccaccgtagactaacttttttgaaccatcagattaagcacatcactaatgttatcgtgttgcctttcacactatatttattccctttctcttgtttgactttttcttacttctatttcaacaacatatttattccaatttatttatttatttatggcaaaattacactataaattctgtcataaatcctttgtattaaaattttgtttaaattgaaaattcattattttaataaagtttaaattcattactattatttaataacgtttaaatttgtttttggtcattgcatatttttttcatagcaattttgatatatatcttaaatcattagtttcaaccatcaaaacaatcttgttatatatctcaaattatgattagtttgtgtcaaattataaattttcatatttgattatcaaaactataatgaattatttttcctattatctcttgatatagactatgtttttgtaacacattagtccttttttcattttttttattataaaaatgctgaaataatagtttttttttttgttgaaaggatgctgaaataatagttttattaataaccttatttgttaaaatatttttaattaaaaagataaagaaattcataagtcatatgaatatcttcatcatcttcctccttgattaaaaaaaagtacacttaaatacacatctaaattaaacatctctactttgatcttcttataatctcaaaatccctaaaactcaatttaccacaaatagttcaagtaatttagatgctaacaatggtttgaagagaaacccataattttcaattatcataacagaatcttcagataaactcaattataaaactagatacagttagattaaatgaccaatcatcataattagggtttcggaacaagaacgattgaaattagataatatagaatctatgtagtgaacgaaggtgggtagagttgtctcggttcgttg

SEQ ID NO: 31481 - DNA, 572 bp, Medicago truncatula
  Intron number 1 from transcript Medtr5g104350.1 (locus Med tr5g104350) derived from phytozome v7.0 (chr-ID MtChr5; po s 41845323 to 41845894)
caaggtataagggagttatctcaacatgtcctaaacttattgctagtctcttagcactaacaagttcctgtaagtaaaatggtctcgattcatttatctacgttactaaaaaaatataaaaaataaacaaacaattcaacttgaataaaaaaaaccacgatagaatatataaatctctatgaaaccgtaatcttctaacattattaaagacttgtttttttttttcttcatgatttgtaacaaagttataatgtcatggaacaaaaaacgtacttacataaacaaagcatttgttgaaaaggcagaaacataacatacctttgtttgaatacaaaaggtatcgaaatgattaatggttttattcaagtttgattatctgttttatattttgtactttttttttgtgtaatatagagaaatgaatcaagaccattttacttgcaaggagtaagaggaacttgttagtgctaaaaagactatcaataagcttaggaaatgctgaaataactccgttacaccttacatccattctaatctccaatccaattggtatactttttcaagtaattcca

SEQ ID NO: 31482 - DNA, 555 bp, Medicago truncatula
  Intron number 1 from transcript Medtr6g036150.1 (locus Med tr6g036150) derived from phytozome v7.0 (chr-ID MtChr6; po s 7895006 to 7895560 reverse strand)
tcttatcacaaagattcgtgttcaaccatatcaaggttagcctgtagataaatcaatgaattgtgtatttcgaggatcctaaatattttgcttttgttgacaaaaaatctacattttattgtcagtatattttgaggatggctcccctatgtatacatattcaactgtctgattcaaaattggccatcctgatactcaactcatatggacatatacttcacctcattataccattttacaggttagtttaacaatgaaaatgtggcttttgaatattctcttccatctttcaaattatttaacaaggaaaaaatcttgagattcatctattgggttgacttgaattttcctaaccatcattccaaatgttattgactacaaactaatgcaattctaacatgagactaaataattttagttaatattgttcttcgattggatagaaaaacaagcttggaaaaaaaaacaaaagagccaactatttctcccgtacatatgtacctagaaaatgtttcattataatgatattttcaggagagaaatatttggccaagg

SEQ ID NO: 31483 - DNA, 440 bp, Medicago truncatula; identical to SEQ ID NO: 29766
  Intron number 1 from transcript Medtr4g110500.1 (locus Med tr4g110500) derived from phytozome v7.0 (chr-ID MtChr4; po s 25044816 to 25045255 reverse strand)

SEQ ID NO: 31484 - DNA, 980 bp, Medicago truncatula
  Intron number 1 from transcript Medtr7g027490.1 (locus Med tr7g027490) derived from phytozome v7.0 (chr-ID MtChr7; po s 7290626 to 7291605 reverse strand)
atagcaacttaagggtacaagtaagcaaaagaatcagcaccaagcctatttggaccaaagactatatcctcaaataaatccttagtattataataaagtttcattgtaaggcccatggcccaagtctgtactaggtcatagtgtctaaacctacctatataaggtgaattgtctctactgttatgggggaatgaatttgccgttttattattatctttctctttgttttgttttgttttttctttcaatcattagcatagctttgaattctgaactgattcccagacgtaaatctatcaaaagtagtgttcatatatataaatttcaaactcctgtgtaaaagtagtgttcatagataaaaaatttgtagccagcattttttattttatttgaggcggccagcaacttacgagcttcaattttttttaagctatctttttataaaactttaatttctttcatcgttgttttattttatgtttttaataaaatattatggttgttttatggttcttacatagattaaatttcacaaacaagaatattttaagttgaagtattttttctctaaaaaaaaaagttgaagtattttttgattagatataattttaggtaggggtttattagtcaattcataaaattagcttttttctctcttctctttctcttaaatcaaacaatacgtaaaatctatcatatttctcatatctttctctctcacatatttttctcttcacaacttctcttgagaaccaaacacatccaatgttccagcttttcaaattattttttcatcattttaatttataaaatattgtcaataaaagaaagaggagataatggaaacgtacggtacccattcttggatacgttgccaccttttaccatcaactttgtttcaaaaattagtagtttaaccgacaattgttaccacaattacaaaagccacgaccaatattggtgctcttgcgttacttgct

SEQ ID NO: 31485 - DNA, 549 bp, Medicago truncatula
  Intron number 1 from transcript Medtr5g040250.1 (locus Med tr5g040250) derived from phytozome v7.0 (chr-ID MtChr5; po s 17169053 to 17169601)
cttcaaccctaatctaagttcagtacacgggctaggtatgtcatctcccaattgcaaaaaaccagtaagtgtaacaacccgtttttcgctaggattattttatttatttatttattatatctgcgtaattacttgtttgtgtgtttgatttgggattagtagattttgaggcgagaaaaggtattttagtcattttttaggttaaggatattttggtcatatgagtactaagggtagattagtaatcttagaatggatcttattttagtattttagcaagaatagtgaaaatgatgatgttgttgataaatgatgaattcatgatttatgtaataagaatgttgttaagtacatcttgttgatgagaattcatgaatttgaagattataattgtgaagtttaagagtttttggtgaaaaatgagtgtggtgatgaaaatttggtgatttgatattatgagctcgtgtttgatttaatttaatgttattttgatgtatgttaactgtttgtgtagtttgtacaacatttttgggtcaattgggatcaaaa

SEQ ID NO: 31486 - DNA, 854 bp, Medicago truncatula
  Intron number 3 from transcript Medtr7g045860.1 (locus Med tr7g045860) derived from phytozome v7.0 (chr-ID MtChr7; po s 11076256 to 11077109 reverse strand)
tacctccctttcaattcttcgttctcttagacgaggttgaaacgaaaaacaactcctttgaatcttcagtttaaatttactgatcacttgtagcttctggtgatgatatagcttctgatgaaatcttgcttctgatggtcttctgcttctgatggacttttgcttctgatgacgtcattacttcagatgcacttgttacttcagaagcacttcttagcttcagacgcagttttcttcagatgctttggattcctttgctctccattgttcttccaagacctattgaaatttattgactttgcctatggtcctgtacacttgaacaattattagcaataaccaattgacaatttttaataccttgttatcatcaaaattcattaaggtttattgtgaaacacattttgttccaacaggcccttcgcacaacgcctctaatttggaggggcctcacaatttgttaaaaaataaataaaaattcacctaccgataaaattcgtcactaaatgtcatatttttttattttaaagaaaataaaaatatcacatttttcataggtacaagtttgaaagacaacaattttgttgtaaattatgcattgtttatagataaatgtctatttatatgtaggtaaaagccatgtttaaactgttcttcaaaaaacaaaaacatgcttgaatcattccgcatataacatttgactagaacgtttgtcattataagtgttgatgaattttgtgtttcaattcgttttatatgaaaattatcaagaatataacgggtcctccgaaatgtcaagacggccttgtattttatttatgtattgaattagagtacccttatactattttata

SEQ ID NO: 31487 - DNA, 686 bp, Medicago truncatula
  Intron number 4 from transcript Medtr4g142620.1 (locus Med tr4g142620) derived from phytozome v7.0 (chr-ID MtChr4; po s 35548604 to 35549289 reverse strand)
gaaggttcttaagattttacggtaacgtgtttgctttgactccttgatgaccacttatttgcattatttagtttttttttttaggatttttatttttacttttttaatgtatttgtcgtttttcttgttcaatgcattgctaactaattgtcgataacggttttcgctatttaaagcaaagagagaaatagatgcaatgcgatgataaatagacaagggtgtcatagaaaaaggacagtcgatatcatcaactaaaactattttttttttttaccacaacaaaagaaaattatcgatttcctaggttcgtgcaaaacaacttcaaacgagcaaaataagaacttgaaatgtggcaggttttctgaatttggttggttaatatgcattttgtcgtgtaacagcacatttcaaacaagctgtaaggtttccatggcttcttctacatgtaaatgcagagtttatgatcaaccgttttaatttaaaataattataacaattttgtttgatttctttccggaaaagtagatatggaagtaaaggttattatttcataggaattgcatactattattaaggccattctcaaaaatcaaccatgctattttcttttgtgatttttcattgacctttattttttactgcatcaattagctggttaaattggatatttttctgaattagatctc

SEQ ID NO: 31488 - DNA, 461 bp, Medicago truncatula
  Intron number 1 from transcript Medtr7g035320.1 (locus Med tr7g035320) derived from phytozome v7.0 (chr-ID MtChr7; po s 8633748 to 8634208)
attatactaagccatagtaagttgtttggtttgaaaaaatgtcttgttgttttctttttctatatttacttttaattatataacagtcatgtttttttactcaatttccttttcatgtttttaaaggagacaatgtgaaagcaattcaaagttcaaaccacatttagatgatttgatgagagtctgaaactgagagacagagtgaagagaatgaataaccaaacttatttcttacagaatataagtgatttcttatatacatatatcagggtgtttttatggtttttacatgttggaaatgcgtatttatctgtgacctgccaatatagctagccaagtccaaatattgtgcatgcatgcatgtacatttaggtcaaaattattatttctttcttgtcaaaggtatccttcatgcaaaatcagtccattactgatatttgtgcagtcatggcatagatttt

SEQ ID NO: 31489 - DNA, 505 bp, Medicago truncatula; identical to SEQ ID NO: 28699
  Intron number 1 from transcript Medtr4g041810.2 (locus Med tr4g041810) derived from phytozome v7.0 (chr-ID MtChr4; po s 9978110 to 9978614 reverse strand)

SEQ ID NO: 31490 - DNA, 310 bp, Medicago truncatula
  Intron number 3 from transcript Medtr5g081350.1 (locus Med tr5g081350) derived from phytozome v7.0 (chr-ID MtChr5; po s 30543042 to 30543351 reverse strand)
ctccgataccagcggagtgtaagctgacctcacttgttcttcagtatttgatgtatatgttatataatattaattaatgtatgctgtgaatatcaacctctgatatcttcttctgaagttcactgtgtgtatattatattggcattcaaataccatctttttgggaagtaaatgatttctagtattcaaagttgatacgtatctgaatattcataatcactcttctctcttgctgctttatattttgatatatatgtttctcacttttctttactacactgtgttgctaaaactcctattatctttgcag

SEQ ID NO: 31491 - DNA, 1026 bp, Medicago truncatula; identical to SEQ ID NO: 30872
  Intron number 3 from transcript Medtr6g010580.1 (locus Med tr6g010580) derived from phytozome v7.0 (chr-ID MtChr6; po s 2121866 to 2122891 reverse strand)

SEQ ID NO: 31492 - DNA, 1007 bp, Medicago truncatula
  Intron number 2 from transcript Medtr7g046160.1 (locus Med tr7g046160) derived from phytozome v7.0 (chr-ID MtChr7; po s 11271045 to 11272051)
gtgcagtttctgttgtgcggttttctgtgatcgtggtaaggttcagttttgttggttttgcaatcttgctcggtcttcccttgaatgcagcctcataactagaatctatttgggtgggtagttttttcatttgggttagttctcctattgttggtgtttttggtgtattcctctttggggtcttctgcatttatacggtacctgtgtattttcgcatcggtccattgcgtcttgcagggactgtttttaataatattggctggttcaaaaaaaataaaaagcggtgcagcatagaagaatttgaacaaatcgctatatattgattgacaacactgatggtaatttttctgtaggtagtcattccacccccaatatcaggtctatgcctcccacaattgcatattcctgagctttacctccaaggccttactaagtcccttggacgaacacctacttccatttcccaaaaaacccataatttctagtttggtcacctccaaacctatgtaacttataaaagtcatagttatttttcatgtggcatttattgtttttgtatgtggtaattattatttggtattaatagggtctatgttctacagaatttattggattataggttttttccttgggagtttaggcaaagggaggatatttcttggttggggttgtgtctgttatttgaaggaggagattctttgtcaggggaaaactctgtctgttgattttgtagttaggtctgatttatgagtaaaccatattacatcagtagtatataaccagtgttctgtatgtttgattcttgagtcttaaatgtttatgagtaaaagaaggatggtaggagcaaaggagggacgtggaaatggtagaaaataagacaagcatacaatgaaaataaatagttgtctaattgatgatgatgatgatgaagagtattacttgtgaatgtgatacacaaagctattaaagcaacaaatctgaccaattgttttgtttttccagctagt

SEQ ID NO: 31493 - DNA, 664 bp, Medicago truncatula
  Intron number 1 from transcript Medtr5g087630.1 (locus Med tr5g087630) derived from phytozome v7.0 (chr-ID MtChr5; po s 33858715 to 33859378 reverse strand)
tgaagtgtgggggaccaagaagtgtttctgttcctgttcactaatttttttactactttgtatgatgatgatgatgtggaaaccactttaatttacttctactgtgtacagataaagcttttttgtccgttaccaatcctcttgttttttcttcaaaaaagagtgtcatttcctcagtggaatttaagaatcttgcctaataattctgttttaggatgttaggtttttcattgttcagttctgtcatttcactcatttggctcttgtgcaaaagaaatactattagaagaagtactcaagagttaaaaatgttttatctaaatatttaattgtattttaataacatacttatttaataaaataacttgtttttatgagacacccccattacatcaaaatgaagcttaaagactaaagaggaacaatgagattgaagaatgatcaaagagaaagaactatggtgacttatgttagcaaaaaaaaatcgacataagagttagcttttttgtaaatatgcttcaacgagacatttagaaagatggataagacaaagattgtcgattaagaatggttgaagagccgcaatatgagttgaagtgcactgaataaggatgcccttttgatatattcaggcgggcgggagtatcagtgaagaagaaggcgc

SEQ ID NO: 31494 - DNA, 579 bp, Medicago truncatula
  Intron number 1 from transcript Medtr5g101860.1 (locus Med tr5g101860) derived from phytozome v7.0 (chr-ID MtChr5; po s 40786828 to 40787406 reverse strand)
aagttccagactttcatcttctgcttttcttcgtaagcatcttcatctagctccattatgttctatcataatcgttttgtttattgtttctaatattcacataattccattaaatttataagtctttttgcttttaggtgttacttaattgcttaataacttaattattcagtttcataatctttgcttctgaattttaattagatcataagttactccatgcttttaggtgttactagtacatcacatgcatcaagtttttttttttttttttttgttcaaatcttcattcattaattttccatctaagaggaaaatattatgtatgtaatatttacttgtgtttccttgttttttgattcctttccctcccacaaaattgagtaacatgctgaatttgttttctcataaatgcaaaatctctataactagttttttcacaatgatttgatttgattttgttgtttaatttttttattttttttatgatttctacattcagaccagcttagtgtgtttataagaactaatatgttaggatgttcataactaactttatatgattattgtggtaaatag

SEQ ID NO: 31495 - DNA, 866 bp, Medicago truncatula
  Intron number 2 from transcript Medtr4g128590.1 (locus Med tr4g128590) derived from phytozome v7.0 (chr-ID MtChr4; po s 30308835 to 30309700)
acaagggccaattggtatgtattgttgaattatggaaaaaaaatgtttttactatgaatttagcatcatgatacgaaaatactgctcaagttgaaaggataatttttaagaccagcgatgctgtatggaacagagagttgggcagtgaagaaccaacacgggaataagataagtgtagtggagatgatgatgttgtgttggatgtgtgataagactagatgtgataggattagaaacgacaacattagagatagagagttgggatagcacctatagtagaaaaagttggggaaaattggcttaggacttgggtggtttggacatgtagagagagaacatgtagattatgtagtaaggagagtagatgagatggaggatcgtcagatcactagaggcagaggaaaacctagaaaaactatcagagaaactattcataaagacctagagattaatgagttagatcaaaataaggtttatgatagaacattgtagcgtaatttgatccatgtagccgacgccactcagtgggacaatgcttggttgattgattggtttgttgttgttgtatgcaacattgatatatgatttgtttgcaaatgcccaagactaagagcctatttggtttgcgaatccgtgttttgttttgtttttattacatgttttgcaaaactgtatgcgttctgactttgcttcttgtttccgaagatttgtcaaggaaatggtgaaaacttgcaatttaaagtataagcaggaaatgaaaatagaaatggtttctcaaaccaaccaggtcctaacattctcaccatgacttatgttttaaccgtcaatgtatctgatgttcaggccggcaattcaattcagctctg

SEQ ID NO: 31496 - DNA, 727 bp, Medicago truncatula
  Intron number 3 from transcript Medtr4g160270.1 (locus Med tr4g160270) derived from phytozome v7.0 (chr-ID MtChr4; po s 40587188 to 40587914)
acagtgttcctcaaaaggttatattttcttttattttggggtaaattttcggttatctgaaataatctctacgttatctcaatcataattttctcctttatatatcttttacctaaacattaaaacaaaagttaattattgaacagaaaaaccaaacatgatattgccaaggccattaactgagctgatgtatcgccacaatcccatgtttatgcagaaatttccaagtgatgtatatgacattattaaagtgcactgatccaattaaaacaatgcctatgctgcaaaaaccaaatttataccaattacgctgatcttatataatcttaaaatcgtatgatagaacttgttcgtttaaaatgtattcatgaatgtggcaaaccaacgttcttcggctgataaaggtgctcatatttaatgtttgaccgtactttgagcataactaacttccataaaaggaacctatcggctatcggacggaaacaaaaaataaaatgtattaataaaatgttattatgacagacgagagatatgcagttttagttcaattgaaattacgcacctcaaaagatcttacaacataactttgttgaggtccacaattttctgatagaaaggttctgttaaagttgctggaattctagacacaattatttcaatatatgtaatttatttctctctttgtttaacagattattgctaacaaagatagtccaagagggataca

SEQ ID NO: 31497 - DNA, 332 bp, Medicago truncatula
  Intron number 4 from transcript Medtr4g163300.1 (locus Med tr4g163300) derived from phytozome v7.0 (chr-ID MtChr4; po s 41382811 to 41383142 reverse strand)
ctcgtaacgtgtaagtaacgttaattaacgggctcttcatgctcttgtttaggagtttttgtgaatttcagactattttctctttggcatgtaaagttagagataaattattcaaaagtttaaatgtctgttttatattgttattcatcattgtttgcttacattcttaatcaaccatgtttggatttatcacctttatttttgagcaagatcaaatatctaatctgctataaacaaaatttcttctataggtaatgttattgcatttgattggctttatatgtttgtcactaataattctgttttctggttatacagagatctttctaaga

SEQ ID NO: 31498 - DNA, 951 bp, Medicago truncatula
  Intron number 2 from transcript Medtr7g011060.1 (locus Med tr7g011060) derived from phytozome v7.0 (chr-ID MtChr7; po s 2559907 to 2560857)
gaaagtgacgtttggatttccaaaacactttacaggtactttgcaatatgttcttctaactaacatccttttttctttttagtctaaattttttatacaaataagtgtcaaccatgcattggattaatttcaaccaaggcatcaataccccccactaacctatttaatttgtcacaagttttgaatatttttatttatgttttgtattagattatattgaataaactatagttagttcataactaaactatggttaggtagttaagagtttgttacactaactcatccttataaataactctcatcattgtattttcttattatcttttattaaatctagttcattctactataaatctgtatggatatctcccacatgaatactcttatgctctctttcttgctgatcactgtgacctttatccctcggatcgttgttgtaaccttaatagcaattaaacaaaaaaatggatacataggatcgaacttgacgaacccatttacggcttatcaaaataaacatcagccacacgttaatggtggatcgatactagcaagcactatgatgaaagttttcccattcaattattttattgtgggttcaggaagatgaaaagataaaaatgggtttattagaaataatgtagtaggagaggagagatacatgtgttttttaaatggacttttttaatcttatccatttattttagatctaatggttaagaagtattctcaccattctcatataaagaagacattttcactagatatgtccatatatatatatatatatagtcttccatgtatgaattaattctgatgaatattaatatccacattcgaagatctatatgataagtcgcaactaattttaattcgtttatacttcatactgttattatactctaaattttgcaattttttcttgaattaaattactcttttcaaagg

SEQ ID NO: 31499 - DNA, 960 bp, Medicago truncatula
  Intron number 1 from transcript Medtr5g020750.1 (locus Med tr5g020750) derived from phytozome v7.0 (chr-ID MtChr5; po s 7845621 to 7846580)
tagtcgccatcgccaaactctcactcacccactctgtaagtcatttctcttctctactctttagattcatacatcattgaaattatcacactacaattttcattgtttcggtacttttttcttttcatttcttcttgattcaatattagttacgcctttaaatcgcgttatttttcagatcataactagttaaaaaggtgtttttggcatctaatgatgatcacgactttgtgcatgtttaatatcactgtgcccctttctcgttgtgattctgacaaactcattgtgatactgaagacacacttaattgaattactttggctctttttatatgatcattatctgtgtatatcaaatttgttaatagctcttttgcagcatctaattaatggtccgttttaatcggcttatttttttaactcatgcataacaacttatgcaaataactaagtttttatgtattattcataagtttgtcaaagttgtttgagaaaaaacagtttacaaagatacaattttcataagtgagaacttatgaattaacattatttatttacataagctaaaaaataagtcaatccaattcaggccctaagttgtgtttatcaaaaaataattaaattgtattttttatataccaatatctgtatacaattgtattctttacagattcatggttctttattagctatatttcaattctatacagattcatgagtgaattgataaaattttgattttgattggatattgtgtatctcaataaagtaaccaatgttgcgccactcacggatattttgctagttaagtttgtatataaaaaaagaaagatgaaatgtattcttctgactactgttttaactgcaatatatagtgcggtgatttagacttatagcctcttctatatgtatttatgtgtgagatttttatgctcttgtaggtattgtttgcaaagttaat

SEQ ID NO: 31500 - DNA, 863 bp, Medicago truncatula
  Intron number 4 from transcript Medtr5g020750.1 (locus Med tr5g020750) derived from phytozome v7.0 (chr-ID MtChr5; po s 7847544 to 7848406)
agttggacaagacaagtggacttataaaggtgtcatttcctatttgctacttaaattcgccttcttccattccataagcttgattcaatagctagatataaagtaatttcttgcaaggggatagtattgtcatttaccattttttcactctctgttgggactttttcaactttgaagctaaaatgtttaaaactcctacatgttctttaggaaaaaaaatccatgattatgaagggccaactgcctttgcaagcttcactacttaacatgtcagaattcttaggagcaaacttttttgtattaaatattagtattggcttattaggaaaatgacaagatccactttggctagagataagagtcctaaatagagtttacaaaacttacatgatcctcatttcacctaccggttttgtggagttgtgttagacctaaaacgtcagatgatatcaaaacctatagtagatccgtagatggaccattgtataaaccgtgcacgaagcccaatagtatgaaagggaagaatttgatattcaagtggaatcacacagaataagttataatgcagccctcaaaatgcatttcagatgatatgagtgctataactgtttacaaacacgtgttgtttgatattgaaaacttttaactgtagcatccgtgaatactcaataatggattatgattgcatgttattgtgctttaggttttaatctgtgaatcatctgctgccttgctatacatagataataatatgcaacagtttctagtattgagtttttttatctgtctttaccgaagcataactaactcatgggctaaataccttaggttgatcgtattctttactcatcggttgtctaccc

SEQ ID NO: 31501 - DNA, 591 bp, Medicago truncatula
  Intron number 1 from transcript Medtr6g101930.3 (locus Med tr6g101930) derived from phytozome v7.0 (chr-ID MtChr6; po s 22497971 to 22498561)
aacgctataaagtgcattcacagcagcagtttgcagtgttacattcgagactgattcaaaataaatcggttgatgctattaattctcgttcaagtggtgtgtcagaattttgtgtcatagtttcaaatattagaaatatgctaaaaaattaactatgtaaacataaaaactacctaaacagaaggattagctacttggataattgtctacctagataaaattcataagcaataaatatgaacgaaattcaacaaagagatttcagaaaaattccaagagtagaatgaaagaattaccttagttaatcatgaacgaaatccaagtttatcttcaaccaattcatcatatttctcgtttttaaatatccatgtgagtgtcgtatccgtagttcaaacaaaaatttgatcttactttaaatagatcctgctaacatacagtaaatcgatattccgaattagttgtcttttgcaaaagaaaaaaaagaaaaagaaaataaagtaaaaaactgttgatagataacaaccacaacattatctacattaacataaaataaaagattccattacaatcatcatagatccaacaaaaaac

SEQ ID NO: 31502 - DNA, 653 bp, Medicago truncatula
  Intron number 1 from transcript Medtr4g041620.1 (locus Med tr4g041620) derived from phytozome v7.0 (chr-ID MtChr4; po s 9897924 to 9898576 reverse strand)
tttttcgtgtctttattttagtttcattagggtaataaccacgttattagtatagtgccattattataaaaaaaaagaaaaaaagtttagtgctattattgaatagaagaatattgaggactaatacaaggtccgagtaagactacatagttatgttgatttagtctcagtcctaagtcctaagttctcaattatgaaaccgcgttcattatattaactttatttttagcatcttatttatgaataccctctctctcataccatgaaattattgaattctctcaacaataatttctatggcttttcaccataaacacttgtttatttctttatattttttcctttcttttattcttcttcctatcataaacacactttcaactgtttcaatttctcatacttcaaattcaaaccaaactttaatttgtgttttacaatctcaaaaccaacaaaaacattcaaaccttaattgtactagtttttctcctagtataagttttggtactaaacttgaactgaattctaatgtttcatattctcaaattgttggtggaaatggtttttatgtggtttaacatcatcatcaaattcttcaaattcaatcatcgtatgttggagattttctaactcttcaaattcaagtactattgttt

SEQ ID NO: 31503 - DNA, 850 bp, Medicago truncatula
  Intron number 1 from transcript Medtr4g092780.1 (locus Med tr4g092780) derived from phytozome v7.0 (chr-ID MtChr4; po s 19481422 to 19482271 reverse strand)
ccctacttaccgttaacaggagcagctcagactcggtattcagtttttgtattaatgagttaaattcattgcttcgtgtatacaggagctgttcttgacaatactcatggtttgtttcaattgacgtatttgagtttatctactgatataagtacttgtaaaactgtttgcgaaagtttatggagcaacttataacacgactttcaacttattttcataggctctcacaaacgatgtgacttgtattccaaaaagaaaaaatgatgcggctttttttatctttgttgtagaaatcgcttatacataaacgtacttagaagttaatcaagatgtttatccgaacagggtctcagtttgatatgataattatatgtttggtattttacttggtattatacttttttttttattgttccctccataatcatgtgttctggtaaattatataaggtaagtcttagggaatggtattataattaggaattacatcagatataatagttgtatctaatagatttggtgggtttagaactaaaatattgagtctaattgataacacttttttttaatttgagactgtctactagctaatcaaatgttccctatgttagcaagaaagaattttaagacatttttgtcattgagtaaggcatataccagcttggtacactatattcctcggcatcagttagaaaaaatctttgatttttttactttatgcatatttccatttgaagagttgtttctttgttatgatttcaaagtttaacagtcctgctgccaaatattctttcgcaaacttttggatgtttattctctacttattttggggttttatcagggcacatat

SEQ ID NO: 31504 - DNA, 401 bp, Medicago truncatula; identical to SEQ ID NO: 30718
  Intron number 3 from transcript Medtr4g097130.1 (locus Med tr4g097130) derived from phytozome v7.0 (chr-ID MtChr4; po s 20665824 to 20666224 reverse strand)

SEQ ID NO: 31505 - DNA, 796 bp, Medicago truncatula
  Intron number 1 from transcript Medtr5g011650.1 (locus Med tr5g011650) derived from phytozome v7.0 (chr-ID MtChr5; po s 3186369 to 3187164 reverse strand)
tggcgtattcacaggaagattggtaagttcaagtgatgaatgtgttgctataaaagttgaaagaataaatggataaaaaaagatggtgatatatgcattttgttagttgtgggagtttccatcatattctcactcactgaagaaaatgtattagggtaggataagtatgatccaacattcaagctggactaattagctaggagacccgcctcgatattaattaatctatgagattactcaaattcaagtccaatattgttgaataaacatattgattcaaccgaatgaaaggataattaattagaccgtcacatttttttcttttcccctccaaattcaatggatatttataccttttcccgtccaaattcaatggatatctatattgttgtctcatacacacaaactaaacaatgtaatattttttaaggtgttggatctaaaaccgagcttatcgaagttaaagagaaaactctcaactaagtaattgttcgggagacaagcttaatttaaactttatgaaataaagattatacagaataagaattttatgaatctagtttgaacaatcactttatatgcaactaccaaagtaggaaggtggcagttgccaacctgctggagagaaataataaaaaaactgtaaattaatttttaatgttttttgtttcttccaatggcaccccccatttgcttttgtattctctcacctcatttactaatttccagaactgtagtgagaggatgagtcgaggaaacagaacaagaagtaagaacgccttcaccttcttcctca

SEQ ID NO: 31506 - DNA, 653 bp, Medicago truncatula
  Intron number 1 from transcript Medtr7g035190.1 (locus Med tr7g035190) derived from phytozome v7.0 (chr-ID MtChr7; po s 8557651 to 8558303)
atctccaaattccacaatcacaattcaacaaaaatgtatgtgtagttccttttccttaaccactctttctttttactttttcattttttttttaaattatcattttagttagtgcatcttctttcatattgtttctcagttgaaattgttacatgttttcaccttaattctacactttagtgcttactataacgttaaattgtgtttcatattcttctttttgtttctctaattcatcttgtttctctaggttgcttattttttacttttttcataatttggttttcagatctattactgctataatctttcttcttaatttcaatttcacaccatttccttttggtaagctcacacatttaatgtaatttattgtatatatggtaaccctactatctgtattgtaactatagaaacaagtcaacaatttcaatttggattttttatatttgcttttatattatatgttgttagtttgatttgctgctaattgtactgtattgagggtgttatttatcaattgttgtctctttgattagagcatatactgttttatatatttaaggtgtttcatttatagtaatgcatgtgttgttcaaagatattgcttcttgaatgcttctgaaattcgattcttttgttggcttgcagtt

SEQ ID NO: 31507 - DNA, 432 bp, Medicago truncatula
  Intron number 2 from transcript Medtr5g016180.2 (locus Med tr5g016180) derived from phytozome v7.0 (chr-ID MtChr5; po s 5613164 to 5613595)
gaatcctttgcttcttcaagcttatattctgaaaggtttcttagtggtttattgaatttgtttatcagtatctactttttcaaactgtttgtgtaaattatagttctgatttaagttctcgtatgaataattgatgctatctatagatttgcaaccatatttgacttcggagttttgttttaaatttaagtttttaattgatctattcgtgctgtttataaattgtcatcgctcaatttttgttataaagtttcattattaaaataagaatttataatttgacatcaaaattttgattttgatgctttggtttttgtttgtatttttgaaatgtgtgtaagctatagaagacaaaaagtaacacaattcattgaaatagacgagtggcttttgaacttaatactgattttttttctttctgtcatctaggtc

SEQ ID NO: 31508 - DNA, 494 bp, Medicago truncatula
  Intron number 1 from transcript Medtr6g006000.1 (locus Med tr6g006000) derived from phytozome v7.0 (chr-ID MtChr6; po s 607253 to 607746 reverse strand)
ccaaaagtagttggaagtatatatactttattttggtttgatttgtgggtgatcagagaaatttttatggatactcaagcaatctttttagtttatttatcaattaataaacaagcatttgtggaagatatgttgaatgtgagtggaggtttaggctacatggaccggaggttgcataaaaatattttcatttgggaggataatttagtgggagaatgtagagattctttggctaacatctctttgcattaaaatgttaaaaaatgcttggatttggaattaaaatctaggtgaaggatactctctcaaagaagcataccatcaacattaatgattgattagaaacaaggggtaatctactcaagcatggctttaatcaattggagtattgtttgtgtgtcaacgaatgtgtatttaatgagagcgcacaacatcttgttttttgttctttattttatggaaggtttagacgaaagtagttggtggttgggttt

SEQ ID NO: 31509 - DNA, 605 bp, Medicago truncatula
  Intron number 1 from transcript Medtr4g147340.1 (locus Med tr4g147340) derived from phytozome v7.0 (chr-ID MtChr4; po s 36941483 to 36942087 reverse strand)
tacttgaattcaatcaggttcattttcattcttcttctctgttagtattttaataagcaatgtatttaaattgttgttaagcctcaattattgatattgatgagaatcatacttcaatgtggttggtgattgatagctgtttgtattgcagtcgcagagatatcataaacaaaaactttgatgttggtggtcaaatcgcagtcacaagatttattttcaaacagaaatgttatttgaatgttaaatttgggacagaaaaattagacaactttttaaattgttaatgcagttcacacatgtggtagatttgaaaagttgaaaattgaggttagtcgcatttaaatttgtggttaatatctattgaccaactctaatctaccacttcattagacatgtttgaaaactgcgctaaccattcaaaaagaaagttgttgaattttgttgtcacaaattcatattctaataacatttttgttttaaaaaccctggttatataagaggttgactagtttgaaagatatcaatgattaagaaatctgggtgtctaatttgatgtgtttctttttgtgcatattgtcatatatctaatttttctttccttgcag

SEQ ID NO: 31510 - DNA, 654 bp, Medicago truncatula
  Intron number 1 from transcript Medtr5g073780.1 (locus Med tr5g073780) derived from phytozome v7.0 (chr-ID MtChr5; po s 26557886 to 26558539 reverse strand)
ggactatccaaggagttttgaagcactaaccaagttttcctcttttgattagttagttttttttttttttttttgacaagtgattagttagttacatattaacaatgttgataataaggccaaaatagaaagaaaaaaactttataaaattagggccaacttaaaagtattaataaaattgaaaaaaaaacaacaaatagcaaacaactttaactttcccttttaagttttaatttttaactttattcttaaagtaatttttaaacctcaaaaaagtagggtcaaacgcaccctaattcttcaaaagaaaaggagtatcttttctttcatcatgattcatatttttcttatgaggtaatttttcattgtttgtattcacaaaatcatcacttgtcttttagaattttggtatatgattgccctataattggaattcacaagagctattttcattgaatgatccaataacacattcaaaatagacatctaataacatgttaaataccaaaaagaaaatgttacgtgaatattatttttaaatcatcagaaaaaaaatattctcactaatatatgtgttttttactaattcaatgaaaacaatgtttaagttgttttattgttcttttcagattactgatcgaataggtagcaaca

SEQ ID NO: 31511 - DNA, 734 bp, Medicago truncatula
  Intron number 1 from transcript Medtr4g023540.1 (locus Med tr4g023540) derived from phytozome v7.0 (chr-ID MtChr4; po s 5163580 to 5164313)
agtttgtttcatgcttttctctttccacttcaatgttaaagggttgttttagtttttttttttctttctttcttgtttgcttcaaagaaaaattgttacttgaaggttgtgtttttgtttgtgttactttgtagtttgtgcatgttttttgtgtagcttttttttgtgttttaagttttaaccaagtgctcgtgttcaagtgattaacaaactctagttaaagatgaatcgtcttatttgaatccatactagaactatctttgaccagactttacttgactttcggtcaactctgaattactagcgctctttcttctgaaaaccggagggttaagaactgcagcattctaattactatcatgtgtatatcttctctctttcggataaaattgaccgagtcaacgtgtggccgttggtcaatatataatctttgtgagttgtgatgtattaagcattcaacatatgatctttcatgcattctcatatttatgctaattaatttttcttttactgaatattgttgttgctagctttttctttggttctcttctgaagttgttgctggaatggaatgatcaaagatctgtttctaactaatatttttatgtatctcaattatggatcttctatgttatcaatgaattcttctaccttgtgatttttgcttttgatggcttctaaaatatcttttgaatgatttatttgttcatgaacatttttcaggatttttcgcg

SEQ ID NO: 31512 - DNA, 480 bp, Medicago truncatula
  Intron number 1 from transcript Medtr4g115040.1 (locus Med tr4g115040) derived from phytozome v7.0 (chr-ID MtChr4; po s 26535612 to 26536091 reverse strand)
atagtttatcatgtgtaaatagtcatcggtgcagtttttggtaaaactaatttttcatgatcacttaatttgttacaatgctgaaatagtgctgagtaagtaactacttaattacttgattatcaactaaaccagaaaacgtgtttcaagagtttttctttttctaattttacctttgataacttttgagaaaagcaagcccagcccaaagctcccaaattggtagaaaatttattttggtgttgcttcacagtccttatcaaatcagagtattcaattggctgatttgatagtctttgatctcaggatctagctcttcatactacgattcaacagttttctttgtgaatcattcttattttccttcagatttctgatctagacaaaaacaaaaaagatttctgacctgatatgagtgaattattaataatttgatttttgaataattttttccagggctctgggaaaactatactagca

SEQ ID NO: 31513 - DNA, 736 bp, Medicago truncatula
  Intron number 1 from transcript Medtr7g062170.1 (locus Med tr7g062170) derived from phytozome v7.0 (chr-ID MtChr7; po s 12679782 to 12680517 reverse strand)
aaacaaaggtggcctttgactcttgcagtctcgcttcaaccacatgtttacatactgtagtttttttttgcctagttctgtttccatcgacaaaagagaggcgagcccaaggataactaacctcaaaacctgattttcttcgccattactacaaatatcgacgtagaggacaataagagagtagatgataatacagataaagataaagcagaagaaaagggattgatagatggaagaggatctttagagcaatggtaactaccaaagaccagtgtttattcctctccatatgctgcatcaaagttcttagttcaaggttttttgtttatttttccactgtctcttagatggtttgttggtacgtgtatttccaagaattccctagtgaattttgacaaaccagtttgcgtgaatcggttcgtgcgacaggtttgcagttctcaggctagtgcacgaattttgtgactgtggtatagaattcaaatgatgcctcacgatgttgcgacagagctattcaagacatttgcatagcttaactaattaccaaaaaggcctcttggtcataaattcaaatgttggtctccataaaattgattttatataaatcttctattaaaaataataattttaaaggcaacattaaattttttgctttaagcctcttaatttgttgggtcaaccctggtaccaacgaactactacaatttcaatgatttacattcttcagtaatcttac

SEQ ID NO: 31514 - DNA, 651 bp, Medicago truncatula
  Intron number 1 from transcript Medtr7g073440.1 (locus Med tr7g073440) derived from phytozome v7.0 (chr-ID MtChr7; po s 14893439 to 14894089)
ctgttttgcttaaggtatgcttttctaaactaagatattttttctcagtcactttgttttaaaattctaatttttaggccctttagaattttcaatcctaaaattgttgtgtagcaaaaccatcataatgtttatgtcatgtcaagaaaaaacttactaggtcaccacttttggatgctaaaacatgagcaggaccaaaagcataatttaaaaaaatgaaaaatttaaaatgataaatgggaaagataaagttattattaataatgttgacactaattttagaagtttttttcttcttttattttgtgttaatcctgcggtgtttaggaaaaagagccctcataattcgaagattgatgggagataaataaactccgacaaaaaattgttacatctagaaattgaactcaggttctcttaaacaattgcttagttactaaattccttgcttacttttattttttaaaactacaagtattgcttggttactttttttttttaaaactacaagttgatcagtttacatatgaagttatgaaagataatttgaaaatttatttatttgagtctgtaattcaattcacataaagttattaaggaaatttatagtttttcctctattgctttcttttcctttgcaggcggttttgc

SEQ ID NO: 31515 - DNA, 903 bp, Medicago truncatula
  Intron number 3 from transcript Medtr4g041430.1 (locus Med tr4g041430) derived from phytozome v7.0 (chr-ID MtChr4; po s 9822006 to 9822908)
tctaaggtactacatgctaatgtgtttcttgagaaatttccactatcatacggtgactactgcaaccaactcaaacacaagaagagagatttgacctaaagataagcatgtttctttttctgaaaattttagttaatgttaatgttgttgaatttgttgataaaaacacgtccaatggcaaagggaaaaaatatcatgaaaaatgaacaacataatactcatattggtctcaagaaaggtgataacgagattcaaaggagaacaatctcttgctttgtctgcgataatatataccacaaaacataccagttttacacgaaacaatgacaacaaaactataactagaagcatgttgcaccatttacacctcaaagcaaatcaagcataaattgaagaaggggtagatatggtggtagtcgaatcaaactggtcgacaacaaagcggactggattctagataccagtgcatttaaacatttatgcgccactagattgaggatgtgttgatggagagtgtgtctccattagaatttatgctacacctttagtgcttggtaaaggaaaattctccttaacttacttcaggaaaaatattatctttgagtgatgtttcatatgttcccacttaatttccggtagcttgcttaatagagctagattataattggtgtttgaaaaagaatagagtgatgttttggtggtgatggtcgtggtggctgattttgggttttggtggtgatgctcgtggtggctggtgctggtttttggtgaggattaatgatagtttttgtggtggtcaatggtagttttggggttgattgtggtgcttgtggtggctagtggtggttatgatttttgttagttttcttctatgagtttgttgttgatgaggttttcaaatac

SEQ ID NO: 31516 - DNA, 845 bp, Medicago truncatula
  Intron number 3 from transcript Medtr5g088870.1 (locus Med tr5g088870) derived from phytozome v7.0 (chr-ID MtChr5; po s 34498264 to 34499108)
tattagataccgtgatcttgctggatatatttgtatgttattttatacccttttaactagatagataataacactaatgtttggattatcagcttaattaagtgtttgtagcataagcagttattatttgagtgattatgtataaactatttctataacaaaagatgaaataaagtataagctataaattgttttcgtaagctatcctggagagctaatggaaataagctgaaaacgatttatggatatgtcatactatgtttggatgagctctttcaaacagtctcataagtgattatgttagtagataagctcaataagtcaattcaaacaacccctgactcaagaacttgatattagtgagtgcctagtttcttttcttatcttgtaatcaaagccatgatatcaagatttctttactggataaatcagctttttgtctttgaaattataagggtcggacaatttagtttttcaaatttgcattatgacaattgttgaatgtagatgccgtattgttttctacggagatatctgttttcaggtactaaattaacagacattatttagtataagagactaaattgctatttcaaaaattaagggactaggttgtctgacacttgattttcaaggacaaaaaagctcattttctcatatttttcttcatgctttagcaaatgcaattgtgactgtagcagcaatattgaatagtatcaagaatctggatgcatatgtgatcttaaaaccttgcttgtcacgtctttttgttgtgtaaattagcatatcatagctgcttatgtttgttccattttcattgtaggtagaaaagcatattccctcac

SEQ ID NO: 31517 - DNA, 986 bp, Medicago truncatula
  Intron number 2 from transcript Medtr7g032520.1 (locus Med tr7g032520) derived from phytozome v7.0 (chr-ID MtChr7; po s 8148029 to 8149014 reverse strand)
agacaggaaccactattgttggtttagttttccaggtctgaataataatttttttaattactattttgttatttttatgccattctctaaagtatttgttttttctcatttgcttgcatctttatcatgagttcatgaagcgggtcttccttggaatatgatgtatccaattccaaacactgaatgtaaagtttagtcttagattgtactctatagtgacttgaaaacatggtctgttatcttttgtgtggcattatagggatgtcacaaggaaagtcaaacacatgttttaagttaagttaatttgtggtaaggaggatttggttatattatgatgataatgcaatgtttagctctaacattatgtattactccctccgtcccggattaactgagccatttgctcatttcacacatattaaaaaaatgtataaatgaaggagagagaaaaatggttttaagtgctcttgttaagtattggtgcattctccactatcatatatgcaaagtggaatataattgaattgggagtggtgaaagttgtattaattagagttataaagggaaaaaagtaattaatattgtattgaaaagtgaaatggctcagttattttgggacacttgttttttttttttgcaaatggctcagttattatgggatggagggagtatgcattattatgttattataacaaagaagggggtcgggaagtgagaatatgttaaatatccttcataaatttgagtccgagttcctccttttattgatttctttttacaaaatgtgctacatttacaaaattgtaccttctggcatctatgtttttcctgattttccatggaaccgtaacccattcaacatgctttattgtactccgtgtttatgtttaatttgtcaagtttttcggatgttgacgtttcccacaaataatttttctaatttttctttaggacggtatcattcttggagcagataccagggcaac

SEQ ID NO: 31518 - DNA, 284 bp, Medicago truncatula
  Intron number 3 from transcript Medtr4g081610.1 (locus Med tr4g081610) derived from phytozome v7.0 (chr-ID MtChr4; po s 17090658 to 17090941)
gattctcaagtctagggaaataggtaatgttttgtatctttgaagtttgttaaaaatcttcaagaataatttcaatttaaaatgttccggagtataagacttgaagtgctagttttgaaatatctgatttagatttttcttcatgattccactgtgttatcatttctgtagtctggtttactgtaaaaagtacagtaagatatttaatggatacagttctttagcaacttctttctcacacttgtgcaggtggccttccgtgcaatctagaaggtattattgaa

SEQ ID NO: 31519 - DNA, 1035 bp, Medicago truncatula
  Intron number 3 from transcript Medtr4g143950.1 (locus Med tr4g143950) derived from phytozome v7.0 (chr-ID MtChr4; po s 36073420 to 36074454)
aatcacttgagtggtctgaggataataaaccgcaggtaagtgttttaacattgaaatttgattcagttttttaagcttatggaagttgatgctaaatccaatgatacgagtgacttaggagcatcttcgttgatgaaatcgtgtgttaataaggaacattcatcaatgcatgaaaagggaaaaaaggaatcacattagtgcctttaacatcatggaaatgattattttgatgtatgtatattgtatagtggagcattatgtgtgattgtaagagatgagaggaactgattttaaattttaattttaatcttaatcatgggcagtgttgttaaatagcagctatagtgtagctgaatttagacaaaccgctattgttttgtgatacactattgagtatgaagtgttgtcaaatagcggctatagtggcactatagcccaattgcgtagcaggattttaacaatcttctatcttcctctatctgcgattgacaactctaatcataggtcataattgcatggcgaggtatggtttagagatctatttggattgacttatttgagattatctacggatataagcatttgtgaaactgtttgggagaatttatggaaacaacttatgacatgtccaaaagctgtttttaacttatttttataagctctccaggaaagcttatgaaaacaacttatagcttgtatgaagacagtttagctttattttatcttttattatggaagtaggttatacataaacacttatatgataaacacctatgttgttaggtgcttgagttgtttatccaaagacggcctaactcacccacatgataagcttccatgtattttgttcttttgcaacttgattgcacaactatcattatgatactatcttcttatacccattcactgtgatgtgacttaattgtgtagtttttctgcattttttgcttctcggggatgttttgaatactaatagaattccttatttgatatggaacagattgctcttgtcgatcagtcggatcgatttgtttt

SEQ ID NO: 31520 - DNA, 788 bp, Medicago truncatula
  Intron number 2 from transcript Medtr5g040790.1 (locus Med tr5g040790) derived from phytozome v7.0 (chr-ID MtChr5; po s 17440522 to 17441309)
ctggtgattacaagaaattaggttccaaacataaggtactacataaccagctttcatttttttcttgtagattgcttattttatgttcttcctcttttttcctggcccaaataagtttgatatttgtaccatatataagtcaatagaattaattcaaagtagatggagtctacacgttgctgaaaagaattaaaaaagatatacttgcttatgcttaggagttgaaaatagtatccttccgtttcctttgttgtcatgtgagagagccaccgtcatctcctttcttccttgtagtcgtttttcctcttcacatatcgggagagattttgtaaaaacccaaaatccccatttttgaaaactttaatattcacatctgtcttctaatatgagatctaatgcctttttttttttagaatgattttgcttgtgttaaagttctgatttgggaattttatggttattggtttgctaaaatttgtgttattcatggtgttttctgatatttgattctggcatattcattttttaattgcttcttcataggtatatgcttgttggttgaggaaatgccacatgagagcatccaacggatatttgtttctacaagctttgtttttatcttcatcaggaacattaacaaaaagttgttgttaatacgtctcttaatatttttcctgccgagaaagaacatgtaattttgaagtttgaaaagagtggaatacatattcatggactactcatatacactcaatgtcttataagcttttgtcagtatttgacaagctttg

SEQ ID NO: 31521 - DNA, 782 bp, Medicago truncatula
  Intron number 2 from transcript Medtr7g062150.1 (locus Med tr7g062150) derived from phytozome v7.0 (chr-ID MtChr7; po s 12672084 to 12672865 reverse strand)
attttccacccattgccaggtgatggatgatcactgtttttttgttgttcttgtttcaattcttttaatttgttcaactgctgctaccaatttggtataagattgaaagattatagtgttatgaatcttttatttaggatttaattctagttctagttatgccttagagaggtatgtaactattgattaatatttatttatgaaaaaaaaaatatgtaaatgtggtaaataaatttgtacaaaaaatgtattatatttttagggaaatatttatttctgtttttagggaaagtttgtacaaaaatagatgaagagatgaggatgttgtgttcgatgtgacatgtgtggtaagactagatggaatatatttagaaatgaaagcattagagagaagacctgtggatgttgtagtacagagagtatatatatatatcagatggaggagagtcaaatcactagaggtagtggaagacctagaaaactattagagaaactatcaagatggatctagagatcaatgagtttgagaaagacatggcttttgatacaacactatgacgtcgtttgattcatgtagccgaccccacttagtgggataaaaatttgttgttgttgttttcatttctgtttattaatgtatatttaacttgattccttttatttcttgaccttattgtatcatcacttggttgacatttgtattctgacagtgacttgatgatgagtttgtgatttctaatgtttcagggatactctgcacttgcagaataaagacgatagag

SEQ ID NO: 31522 - DNA, 982 bp, Medicago truncatula
  Intron number 1 from transcript Medtr5g038370.1 (locus Med tr5g038370) derived from phytozome v7.0 (chr-ID MtChr5; po s 16218759 to 16219740)
gcatatcagcgccgatcagaagggtattcatctatatttcttaatttcaccttttattttttcaataaatatacattgatttaacttttaattatgtatgctattgattgtctggaatgtcatttgtgacagttacattatgattgtttttgattatcttgtgagaatatggtcttgactgtcttgattatgtactaatgacacaaatatcaggcaatcttatgtactaatgacacaagatttcgaatcatggctgtatcatattgcatgtgtttatcttacccttttaatgaacatttaaaagattattaactcatagtatgtctagattgcaacttgtctaatctgaagatgaagcatgcacaaatgagaccgtagaaagtagtgtttatggaaactttaaaaaaatttagctgattcacgtgcattacataatgcctcattctgcacctatgtgactgctttaattttcaaaactaaattttggaaactaggcactgttgccatccttagtgaggtgtagagtttggaaactgatgtaaggcagttttgcctcaactttatcctaagtacagtctagagccccaatttttgtgctgtttaggtcggacaccatttttttgcccaacatgcagtccttgtgtttggtgtcttggatgtaatttgacctcgatatttgtttcacatgtgtcatgctttgcttttctctatgttatttgattttctattctctttcaaagattatacttataacaagtttaaagcttagtaagctttggcttgaggtggggtattagatgatataaaaatattttgatattacgttcgagtatgttgattatcttagggttagttttgttcacttcatttaaatccctataacttcaacactagtaactgatatatgaacattaatcttatgaaagattcgaattcatcaatgtcctaagttgtttttgcttttatgttagggcttttgctg

SEQ ID NO: 31523 - DNA, 636 bp, Medicago truncatula
  Intron number 1 from transcript Medtr5g086960.1 (locus Med tr5g086960) derived from phytozome v7.0 (chr-ID MtChr5; po s 33501597 to 33502232)
ttcacctgaacttcctccacaactcccccctgttcgtaagtcatcaatttttctgggtttgtctcaaaatttcatttttgttcattttcggtttgatatgaaattgggtttgttaaaatcaagataacctttttggattgtttttatgaataaaatgaaattgacaaaaaaatagttttctgttttgtagttttagctatgattctttgaatgtttctgtatttataatggtattagtttgatgaagtggttttgttataggtttttatggaaattttgttgatttgatgataaatgatcaagctatgattatagtgtttttttttcttttctttttctaactatgaatatttttgttgttatcatgataaattttcaagcagtgaataattttgttgctatagtggtttttttttaagctatgattatttttgttgttagagtggtattagtatggtaaaatggtttagttatagggttttgtggaaatttttgttgttataatgataaatgttcaagttatgaatgtctttgttgttatagaagttttatcaatctgagtatttttgttgttagagtggtatctaatgtaatggtgtaatggaaatggttgtgttatgttgtttttttgcagca

SEQ ID NO: 31524 - DNA, 948 bp, Medicago truncatula
  Intron number 2 from transcript Medtr5g086960.1 (locus Med tr5g086960) derived from phytozome v7.0 (chr-ID MtChr5; po s 33502473 to 33503420)
agcgaggtttgttacgacaatatcgttgattatcaatttcagtaggtgaatgttctattatgattgcaatgttgtcaataccggatcgtgacaaatattggttttttcgaatatcactatgctatagtgccatatagcctgctatttgacaaaactttttactgaacagcgtatcacagaacaatagtggtttgttcaaatttccctatgatatagtgctgctttatgcgctatttgacagcattgtatgattgttatgtttgttgttctgtgatgactttacaaagtttacatgtggttgacaaactaacttgtgtcgttgtgtaattagaagaatttgttgtcattttttttaacatgtcttttatccctctttagatgcaggattttttcattctttataatgaaatttctcaatatatcaagaaaaaaacattgtcggaagagctgacgtgtttttactaatatgttacccatagttattgtttgccaggacggaccttgtctgttttaatggattatatgcaagaatttttttttttgcctgttatgtttttattggatatatgcctctctcttgtgacaacattaaattgcatccttttgaagagtctttaaatttgctggaatgaaggaataacagataatataagatgttttgatttaaaaattcatagttttgctaaaaagaagtatatttattagcattatattttgttgcccatggtaccggagtttccatcactgttatcaatatcttatgctttcgtaaataactgatgactgatggtgaaataacacttctgaatgatggtttaagttaaatttattgtctgtttcaatttggcatggtcttgtattatcgttcaatactattttctttttaagaaatgagacttcttgtatgttttatatttcaggcagttacattttgcaagaccgtgctga

SEQ ID NO: 31525 - DNA, 945 bp, Medicago truncatula
  Intron number 1 from transcript Medtr4g023820.1 (locus Med tr4g023820) derived from phytozome v7.0 (chr-ID MtChr4; po s 5293323 to 5294267)
aacattttaacccaaattagaatcaccacattgtggtgtgtgattttcagtggtgcttactattagattcaacattttaacccagatttgaatctctacaatgtggtgtgtgtgaatttcaatggtgcttactattgtctctacatacccaaaagaaagtgtggccctgcaattactattacatcatcttatatttaccaagacttaatcgaaattcaccaagactaattagaaaaacttttattttatgcctattacttataaatgtttacccttttcacatgtgacttgcaaaacaattattcttatttaacagacatgctaaaaacaatgaagatgagagttaattacgtaattatcacttcatatgtcccattgttcacaacccgttgtatgcgaaagtgattggaaacagtgttccaccacatctcaatcaaaggttgagaaaggggtcattatcacactaccaaacacgagcaaatgattaactaatttccaaagtggggtatcactagcaacatatgaagtagatgttttggagaacatgagatatgtttctatggacagcttcaatttgaagtatcgatgaaacataattgaagtatcgatgcaacataattaggcagtcgcaccttcatatcaaaatgatgttgctacatcattactgtcacataggtatgtgtatcaaatgtctatatataataattaatggaattcaaatacctgagctttgacttcagcaagtttattaacttcctacgttcaacacaaaactgcacacgctccttcaactttggtctacaacatacaagtacttacacaacatgaaggaacaatgcaaagcactagaacttggcgaactatcgattctgagattttctgaattttagatatgtggttctttttacagtttctctgcatcctacagaccaaatagaagggctg

SEQ ID NO: 31526 - DNA, 959 bp, Medicago truncatula
  Intron number 1 from transcript Medtr5g092630.1 (locus Med tr5g092630) derived from phytozome v7.0 (chr-ID MtChr5; po s 36319518 to 36320476)
atagtaatttgtttcccaatttcttactcgataaggttcgcaatcgtaatcacaatcgcaattcgtgttcatgtgttcttcgctatgaatttagtaactgctagtgtttaattgataatttgcgttttgaattgtgatgtttcggttttggaattgcgtttagattaagatttagaaactacttgaggcttgtttggattgacttatttgagcttatctaatgacataaacacttgtgagactgcttggaaaaacttttgaaacagtttactacacgttcataagctgttttcagtttatttttgtaagttttccaatatagcaaatgaaaacagcttatagcttatgtgaaaataatttaaccttattttattttttgttgcagaaataacttatacatatgcacttattatgataatcacttatactataagctacaagttaagttgttttccaaacatatgaatgaattcggtttcacaatgcttgttgtttaattgctagagattaattgatattttgcattttgaattgtgatatttcggttttggaattgtgtttgagattagatttatgcctgtttggattgacttatctgagcttctctactggtattagttttatgagaatgttttggagaacttataaaaacaactttctgacaattttcataagcttttttcggcttattttagtaagttctccatatagcttatggaaatagcatatagaaaaacaatttaactttattttatcttttgctaatgtaagcttatacataagcagttataatgataagtgcttgtgctataagttgcaaataaactgtttacccaaatagagcctaacacccaggaaattgcttgttttatgaatgaattcggtttctagctcattgttaacggtttctgtaccaatttgtagctactaaaaaagacgtcggatcgtcaaatatcgaa

SEQ ID NO: 31527 - DNA, 882 bp, Medicago truncatula
  Intron number 1 from transcript Medtr6g013130.1 (locus Med tr6g013130) derived from phytozome v7.0 (chr-ID MtChr6; po s 2675336 to 2676217)
cgacttttgcttctgcgtttcaatcctctctcactgtaagctttttctcagatctcaattttttccatcaccaatttttcattccattcatcaataattttttttttcaatttttttttttaatttttcaatttcgtaaccctaaatttttcaatttaaaattttcgatttttcattgattttcttgttgatttattattgtaattcgtcaaaatgtcgaaaattttgcttaatttcttctgggttgttcgtaattttggatttttttatgtaaattaaaggataatgacctgttttccatgagatagatataaatctgcgtttcagatgattgtttttgaatttttatgttgaaatttgataacctatgcagcagagtaatttgctttttgtgaaaagttttgaatttgatttaggagctgagattaataatttactgtgatgggttgtcatagagagtatttgatttataaattttgagattatgaaaatattatgtaagatttggagtgaatgttgatgcttttaatctccttttcaagttttttaacttttgacgttgtaacttgtgaacttttttgcagagtaattttgtttcctttacattgtttttttagattctcagtttttggaagcctgtaacaaacatatataaacttctaaaagtgattattttgtttaaaaaagtggctttttttttttcatgaaaaaagctgtagcaaacgagctcatttggtttatcaattgtgtttatattgtcgagtatattatgtaagatttggagtgaattttgatgattttaatctgtttttcaacttttggtgttgttacttgtaaacttttgcagaataatttgctctttgtaagaagcattgaatttgc

SEQ ID NO: 31528 - DNA, 806 bp, Medicago truncatula
  Intron number 1 from transcript Medtr4g032070.1 (locus Med tr4g032070) derived from phytozome v7.0 (chr-ID MtChr4; po s 7557850 to 7558655)
gaagaaaaaaccagagaattggagcacgtgggaaagtgagtgagaattagtcagtgtgtgaacatgtttaatttcggggttttaaactcagccatgtattttaatctaatgtctcctatttattcttatcattttcacatataattatcattcttatgtgatataccccctatatatatatatataaataatgaattgttaggaataaattgaattaaattgttatatgaaataattcatcatcagattttatttacttgtcaatctaatttataattactagcgaaaaacagacattttttctgctctttttattgtgccagcgtctgaaaattatgaacggtgttttttttatgaagttttgattttgatataaaagtaaaaatataaatgttttttgctttcaaattataaaaaatcaaaacaaacatgattatctattttaatgacacagcaacgtaaaaatagatcttcgtaaaaaatgagcgggtacccacccatgcttataatgtttttttcatttacaataaataaataaataacaccacaaaaaaataatataatgttatttattttgaagaaggtgataggtgaatacagaaaacgtgggcaatttagaacttagcatagcagtacaatagtatttaattttgttttgactgaaagagaagaagaaaatcgtatcgaatcatctctgtcctatcattaaagcgactaaattaactcgcaactattgttgttgtttacattttgaactctttcttccgcgatcaatcgagtcttcctcttccttcgttccgttccct

SEQ ID NO: 31529 - DNA, 711 bp, Medicago truncatula
  Intron number 1 from transcript Medtr6g061930.1 (locus Med tr6g061930) derived from phytozome v7.0 (chr-ID MtChr6; po s 11218383 to 11219093)
cacctacaaagttttgttagcatcgtcttccttaagtattcatttattcattttttctgttatgatgggttatttcgactgttctgggttatgggttcaaaccctagtgaatgagaaatatttatatgttaaaaaaaaaagagtatatttatatgttttagtttaacttgagagagtgtctaaaaagaatagcttagcctgtataaggtaaatgaccgaatagttatggaaattcaaaaattgtaacttttacacccgagtgaaaattgtaaaggtaatgtttgcttgtttttttttttctcttaaaatcttatataatttatgcttttccctcttttcacacatttgtataatagtaattatatacctgtacagttatacctatgttaaagaacattacttggaaacgaacattctactttttgcatataagttttcttgtctgatcctattcatctcagacaatacatatgttaaaggtgttcagatatattatattgatgaacatttgtgaagcttgattttgatttaattcctaaattctgagtttgtaatagtgcattatttatcacattatctgttatcagttttactgtatttgttacaaatcttacttgctgatgctgcttctactacaacatggtcttagttttttgtttgttttgttttgttaaaggttttcaacaaagttttgttcttgcaacctcaact

SEQ ID NO: 31530 - DNA, 585 bp, Medicago truncatula
  Intron number 1 from transcript Medtr6g093120.1 (locus Med tr6g093120) derived from phytozome v7.0 (chr-ID MtChr6; po s 19819694 to 19820278)
actggatttcagaaatccttcatctcaggtaatgtgctctgcttaacactctattggtaacaaaaccatctctttcaactctcttgttaattactgttattatatgttcttggtatgttatatgctcatgagggggttttgtttgcaagatgtttgatgaaatgcctcaatgatgacaaacttttgatttgattcaaatacaattatgttgttgcagacatacattgtattattattaattctgtttggataaagatttcattaagtgcttatgaaataagctagaaacagcttatggacatgtcataagttattttatatctatcctaattcaccaacaaattgaaaaagtattttgttatcttatgttccatatctatttatggactgtcatgtttctacgtaaatatggcagcaacacgggtacaaggagacgcgatggaggctgtctggtcattttaaaaagaagaatggaaaaaagaagaaagtcattgacattgctcttgaggatgtagagtaaatcttagtgttctgtctcttttatatttcagtaattttttgttgcttcatttatatagtttgaag

SEQ ID NO: 31531 - DNA, 688 bp, Medicago truncatula
  Intron number 2 from transcript Medtr6g005350.1 (locus Med tr6g005350) derived from phytozome v7.0 (chr-ID MtChr6; po s 233669 to 234356)
aaactggatacaagattgtggagcctgctcatgtaatttttcttcaatcctttgttttttttcaatgttaggcctctgatgatagaaagatgtttgagttttggtaatacctataattcataaaacatctgcaactgcgatttggactgtaacgtcaaggtttttatgtctcgacaacgcggccgcgattgagtctgtatcagtcaaggtccttatgtcttctgcaatccgaccataattgaggtcgatgagccatatttaactgtacttttccacaatatatcaaggattgtagtataacctttgtcgtgatttaaaaccttatctatataacttttaggaaattggtttatttgagcttatctactaccataagcacttatagaactctttgatagagctgatggaaataacttatgacatgtccacaagttgttttcagcatatttctataagttttctaggatagcttatattaaaacaatttgactttatgttaacttttatatgatggacataatttatatataagcacttatataataaactttatgttataaaagcttaattaagttgtttatcgaaacagaagtctgagtctggcattatcttatgattatcagcattatccttgggcttcataatatttataaatattttcaggaactagcaaaaccatcaattgcag

SEQ ID NO: 31532 - DNA, 971 bp, Medicago truncatula
  Intron number 1 from transcript Medtr7g080060.1 (locus Med tr7g080060) derived from phytozome v7.0 (chr-ID MtChr7; po s 16807420 to 16808390 reverse strand)
ccctaccagattaaagctgattttgactgtagcacgtatatctctctcactctcaaccctcttttttcaatttcatatacaaacatacatacacacatcatacctttttcggccttttcactaagatcaaatctagtatctgttcttattggtttaatatctgatatgtggtctaatgagtcaaacgatattaaattacttttttgagggggagaagacacctcaatagtttgctgttgggcttctcatgtgtcgctcatgcgttgcactattgcatgagcatgtcacaccccacaaaaaaaataaaaaataaaaataaaaatacttacatacatttatattttgttaagtaaatacctttagattaatggtttttggaatgcccttaaattaattcccaggaaaaaaaccttaaataagtttctacaaagcacttgaaaataatatgcattccctaacttcttataagtagtccatcaaatagagataatatgtgatcttcttaaacaaaacatatatcatatgttttatgagctacttaaaaaaaaataaaaaattacatgttatatttatatgttttagtaactttttttaaaagcaaaaatagagtgcatagacatcccatagggattaaataccactttattctcttaagctattttagaagttcaatttgatcctttaactttaaaaccggttaatttaatccgttcacttattttaaaaattcagtttggtcccttaacttaaaaccgacctatttgggcccttaacttacgcaagtaattagtgcaacttgattctttaacttaagaaaatatactatcatatacatctattgagagaccaaattgcattgacttgcacttttcatgtataataataactaatagatatgtgaagaaaactaatgtcatattcatttgctcgttgcagggtaaactagttcagcagcttgcagggcttgtgct

SEQ ID NO: 31533 - DNA, 643 bp, Medicago truncatula
  Intron number 1 from transcript Medtr5g038500.1 (locus Med tr5g038500) derived from phytozome v7.0 (chr-ID MtChr5; po s 16270946 to 16271588 reverse strand)
agtaggagtacacaaggtctcaacggcaaaaaaggagcaactcgcttcgacacatggggaaatagtttatttcttcgtactcttcttgaccaattcacctatagagtggaaaagaaccactacaccggaaaaaacttaaagcaaatattgtgtagaggaaaacaataaattatgggaatcaaccaccacacaacagtggatgaatgtcccttacttatagattgcatgactaaaaagtttgagagttgtgtattagtcagaatgttgcctcgagaggttgagctgagattggaattttgggagtcttttgctgcctaaagttgttttcacctcagcaatgggcatatgtaatgaacctaatttcttaacctaaaattctctaatgattcaacatttaatatataatgttagtgtttatttttattgaacatgttttgacatcattcaaacttcaaagttgtgccaacaccaaaatcgggaacattgtattatgcttaatcacaattgttcttaacatatcctaatttctcgttcttgtcatcaaaacaaaatataacttcatatagtttgtggattgacttattttttcattgtggttcatatgaatcataactataattattgataaatgtctgagtacctt

SEQ ID NO: 31534 - DNA, 765 bp, Medicago truncatula
  Intron number 1 from transcript Medtr5g076370.1 (locus Med tr5g076370) derived from phytozome v7.0 (chr-ID MtChr5; po s 27912591 to 27913355)
cgctattgactacctagaattcatatcaattattagttaatgtgattgttaattccaatcccattaacaactaatatataaggcatgcttacacgtgactaattattctaagcatgtggtcaatgcatgccatgaatacttttttttgacgatgcatgctatgcatacataatagacatagttgatgatgaaacaaatggatatgatcgtattgattattaaaaagatatgggttggttatgctaattagattagtatataaatataaatagtatttaatattgttgtatgtttgggatttaatttttggtgagcacccttttggtctgtatccgtgactttgatgagagaatcaagatgtttgcgcatgagagaatcaagatgtgttcattagtttactgaaaggaacttcgctgcaaaaggaagactttcctaatgtagacatgtttgcgaatctaaattatttcgggaagcaaaaagccctgggcaggctaatatgtggttagattacctttttatttaattgattgtatatttgatgtttgaaatatgtcatgtttggtgactttttttgatcaacttcttaattgttggattgtgcgcgcgtgtatagctacatatataaaatcttgtcttttttctcttgattttttgttagcacattatgcctgatcattgccccacatatgcaggctcagaataataccgaaaattaaaaatatcaaacagaggtttggctcttgcttgtctacttccctgcaatag

SEQ ID NO: 31535 - DNA, 364 bp, Medicago truncatula
  Intron number 1 from transcript Medtr7g075640.1 (locus Med tr7g075640) derived from phytozome v7.0 (chr-ID MtChr7; po s 15204663 to 15205026)
agttgaggtgttttcaaactgttacttgctttcaggttggttgctaaatttgtcatcttttggtttttgggttgacttgtttaatgatgattttgttttcttgtgtttattgtgtttgtgaagttggtgagttagtgtgtagtagtgtgcacgttacagtgagtttgaagaacttaagtgatttttttaagctctaaagtgtacgttgtcctaaaatcatggtaatttaagtggccacgttgtggttctgtcgaactcactagtgatccaaacatacatgcacttagttgttgtaaaatgggttttggtgattgttttgattgtggtttgatttgattataggctgtggtgaataacttggaag

SEQ ID NO: 31536 - DNA, 492 bp, Medicago truncatula
  Intron number 2 from transcript Medtr7g075640.1 (locus Med tr7g075640) derived from phytozome v7.0 (chr-ID MtChr7; po s 15205134 to 15205625)
agccgtgatcctgtccccttttcactcgctcccaagtaagtctttctctatttgttcctcatcccactttcaagtaattagcgtgtcttctatattacagttcaaatcatacaaagaatttggcttttgttttaaattgaaaagcttacaccaaacttgctttaaacacgatgttcaataaatgtgcatgtttgaattagctgaagtttggtggaatcattgtggtactgtgagattgttgaagcttcaaaggctagtttttgttaaaatcggggtggcccaatgtgattctaccacctttagctgatttgatgtcattcttcattgaatcacatgaatagatttagcaataatggaatttctggtctttttactatattgaatcacatgaaattttacaaacttatgtgtgaagaagaggaaccgattattggaaatgttgatgattagtctttatctaatttttgttttttttgcagattgagtaaccac

SEQ ID NO: 31537 - DNA, 849 bp, Medicago truncatula
  Intron number 1 from transcript Medtr7g012220.1 (locus Med tr7g012220) derived from phytozome v7.0 (chr-ID MtChr7; po s 3113784 to 3114632 reverse strand)
gtgcatataaaacgagctacgagcttgttgtaagtcatatatttatgttctccattgaaaaataaaaatggtatacgatagatttactttatgtaactctcttccccttaaattttgtacttgcatttttgaattgtattaaattaaattttattaatttaattcaattcataagttgttagttctaaatattaggaaaaaataatcaagatttagtaaaattttgttaaaagtaaaagaaaaaaagtgttgtattattttaatatttattccaaaagagttgtctagacaactgaaattcataaagtaaatcaggtattgggcagagaaaataaaaacataaagtaaagtattggcataaaagttgtcaaattgtttaaatattatttaaaaaaaaaaaaagacaatttgagtgtaaaatagtatctaaaatctaatatccttaaaaaaagagtacataaaatctactaaaaaaataattatgctaggaaattgtttcaatttatttcttaaaattttaaaataatttcaaaaattttaaaaatcaattaaagtgcatgaactatagtgtgaaaaacatattctcactgctagtagtgtcatgtgtgaattttgtagtgttaaaatgtctcactgatatcatgttttatgttgattccatccgcaaaaagataaaattctttgattccttgcttttggtgaatattgaatagaataagttgtttagtatttttggtgcaaagtaaagaagttctttacttgtggagaagcactttattctaatagtaaagttctttttgtttcttgttaccaggcttaaattaaaaacaaggaaaagaagagaattgg

SEQ ID NO: 31538 - DNA, 567 bp, Medicago truncatula
  Intron number 2 from transcript Medtr4g160730.1 (locus Med tr4g160730) derived from phytozome v7.0 (chr-ID MtChr4; po s 40786848 to 40787414 reverse strand)
ctttgcttgttcccaccccttactatccagggtaagaatcaagcacaataatacaatccggctatatgtttgaataaacaacttaattaataaactatttttaaaatacaagataaaatatagttaaactattttaatataagttatagagtgttttcatcaactatcctcaagagttatgaaaaatagtttaagaacaagtcataaattgtttccataaacactcaagtaatatccgtagaaaaatttaaaagtcaattcaaaaagagtgcctatctatatatttttaaaaaaacatactcttaataacacgcggcaaattcttcacatatttgttgcatacatttttttctttatgatgaaatatatattttttctttatgatgaatttcttctatcaataaaaaccttttagctagctagcttcatttgttttaatttattatcattagaagctatagcatgtaaccatacttgcttaaactatgtatgatgaaataatctcatgtatctttatcttatacttttgtaggtttgatagagacttaaggtggagaactggtgtaa

SEQ ID NO: 31539 - DNA, 615 bp, Medicago truncatula
  Intron number 1 from transcript Medtr5g040360.1 (locus Med tr5g040360) derived from phytozome v7.0 (chr-ID MtChr5; po s 17236526 to 17237140)
tttttttggttcgttttggtgattcattcaacactgtaagtatctagcattgtttatttttctgtttttttattcatttttttttcaatttttttgaatgagttaattgggtttttttttttaatgaaagagttaattgggtttgttctatgatataaagtttttaagatcttgattgatatgtttttttatgaatcatggggtgtgaagaataatgggttttgttcaaaatttgattttttgttttgtcgctgcattgaattgatggattcattcttgcatgtgtttgttcaattgaagattcttcttatagtttctgttgtttttcttcttcattggatctatctatatgttaatccagctcaagaagcatttcttcaatcacagattccatctttgttcatatcatgagaaaaaaaaagtgatttttgtggatttatggtttgttgaattgaatggattacgatctgaattcagtttctttttcttttgttggtgtttctgattattgattatattgaacatgctttgaatcttttgaggtgtgttggagaaaagaaaattgaatttgattttattgattttgtttgaacatgttcttgattttgtagagac

SEQ ID NO: 31540 - DNA, 791 bp, Medicago truncatula; identical to SEQ ID NO: 30776
  Intron number 2 from transcript Medtr5g005360.1 (locus Med tr5g005360) derived from phytozome v7.0 (chr-ID MtChr5; po s 131582 to 132372)

SEQ ID NO: 31541 - DNA, 779 bp, Medicago truncatula
  Intron number 1 from transcript Medtr6g076490.1 (locus Med tr6g076490) derived from phytozome v7.0 (chr-ID MtChr6; po s 14714540 to 14715318)
gcacgtgccgccatttcttttgatatcctcgttaggtatccaatctctctctctctctctctctctctcttcttcttcttcttcttcttcttcttcttttctctttgattcttaattgggttttgttttgaagttatcatgtttgttgcctccatctgtattttgcataatctattgggggcgcggttctgtgaattgtactccaaaaccctctaaaaccattagatgtacttaatggtttatagcaccctggcataaggatttccagcaccatgcataaaattatgccaaaaccattttgatgtggaaatggtttctgggagctgtactccaaaatcatttctgaatttatatagggtgcataaggatttcttatgcaccataaccgcacccatctattggggtttcagtgtttttgtccaaattactaccattgtcattgaagcatgaagattaaaaggatgaaaaacataataataataattgcttgcagcacaagtaatctagttagagggcttttaggtctttttgcttcgctgttatagattgttctatgttagttggttcattattgtataactataaatacatattgtagttgtacacattgaatcaataatgagaattgtcctctttcattcattccatattatggtttttaattttgttttctttaattttagatatttgaaacataaattatgtcgttgtttgtactttgcttagtttatgtcgttgtttaattgtgaaaacatgcaggtaccttaaacatttgaaat

SEQ ID NO: 31542 - DNA, 975 bp, Medicago truncatula
  Intron number 2 from transcript Medtr4g144110.1 (locus Med tr4g144110) derived from phytozome v7.0 (chr-ID MtChr4; po s 36146627 to 36147601 reverse strand)
ctcgtctggttgcactttctggtcgtgtacataaggtaaataacactacaatcgtcaaactcaaacaccatgtaatcaattctaacttgtaagttaaaagcattaataatgaaaataaagcttgcttctgattttcaaaatgattttttttttgttgctaaaccacatgccaatacagagttggattattcacatctaataatttatgcatggattaccttttgacatgttttttgttttataggtttcatttatgttaagttattaatctagcacactttgtgcaaaatgcatttgagattggcaacttagcctaaccggattttaagcgatttggtgccaaaagaccattttttatcctactaatcattcatgtgtttatgagaattagagtgttgctatgccagccatgaatcacaggtctacattgacatttaatttcaaattcaatgatagtagctaggctggtttgtggaaatttaatatatagacagacacacacgcaaatacatacatagttccttttctatttatcaccaagaattttagataagagcgtgatttgtagattgtgaatctaaaacgtgaaatctcaacaaaatgcaagaaactagatttgtgagttcctttattttggattgccttgttttgataaacagttcaattaagtgcttagagtataagcgcttatcatagaagtgtctattataaaataaagtcaatttcgtagctatttgctaatttcataagccattctaaagaacttatgaataagctgatgaaaaacagcttgtagacatgtataggcttttacaagtagtcttactatagatgtatgaatatatcttttgctacataaaagtggagtatattttttgattgtttaataatactatattgttcttcaaaaaatcaaaaaggattaatagtattctcggatttaacaggtcgcatatcaaatcgaaaatttgttgg

SEQ ID NO: 31543 - DNA, 907 bp, Medicago truncatula
  Intron number 2 from transcript Medtr5g008750.1 (locus Med tr5g008750) derived from phytozome v7.0 (chr-ID MtChr5; po s 1700110 to 1701016 reverse strand)
gacaatttggtgtgcaagttgagagcaacatagaggtaaaatttcctcattaaaatcatgttgtataattttggactgtattaacatgccctttcttttctcgtgagttattacaagtaggctatgcaacagtctatgcttaccatgtagtaaatgaccaagagcaaatcacaaggcatactttagataagttaaaaaatttgagtgcagtttgtaattagacctaaagtacagtgttgaaactgaactgttttaaaaataagtgacaacaccagtttgtgcggatcaatttttgtagttcgggttcggttagtgaaccatgtttgaaacaccagtttggttcgtctacttagagaaacggtttggttctttttagtgttgtatggtttgatttggttttacagttgggttctgtttttcagttttttgaacagtcctaactaactgctaagatagttccttgaattcccagaaccaaagcattttcttagtccttgggattgttctactctatactctgttttttgtgtaaaaaaatattaggtttttatattatgaaatagggtgagagtgcttttattggtaattttatttgacttccgtgaataattagctttcactctatcagttgaaatataaagactgccacagatactaacataaatatagtatttttaagtttttcctacccatttttgaataatattcttttcttccaaaagtaaactgttcttttttcttcaaaaatttattccacattccttcttgccccatttattttcaatggtatgatgtcgtttctgctcaggaaatttgtgaatctttatatacatcttggtgtgggttatgcaatcttgtgctataaatttcattaagcaaaacactttgttaaatttctataggatcc

SEQ ID NO: 31544 - DNA, 535 bp, Medicago truncatula
  Intron number 1 from transcript Medtr5g068030.1 (locus Med tr5g068030) derived from phytozome v7.0 (chr-ID MtChr5; po s 24264531 to 24265065 reverse strand)
gccccacactcacaagcctcctgaaattgtaacttgtaagtaatgttgtaaacatgacaagtgcctttgatgttcttctttgtaaaaagatgaacatgcaattagcactttgaggaagctcatacaatgtaaaaagacattgaatagctatctcccgaacaagccgcacaaggggagaaaaagaaatccaccattaatatcgttgttaattttgatcgctctaagcatcactgaataagtttgagaaacctaagctcttttgaataatcttgtcttttaagtcagacaagtttttgtactttcttaagttacagccaaaaataacgagttcatgcatgtctttctggcgtaaatttgtctagattattcaaacagacaaaatgttttaagaggcaacgaagttcctttatgacacaaataaagtcggcatgttttagcagtaaataaattataccgtcttatgagagtagtccgcaagcttaattagacagttgatgataatatgtacattctcaatgacagcttcttgtcctgc

SEQ ID NO: 31545 - DNA, 800 bp, Medicago truncatula
  Intron number 1 from transcript Medtr4g104500.1 (locus Med tr4g104500) derived from phytozome v7.0 (chr-ID MtChr4; po s 22850631 to 22851430 reverse strand)
cggcgttggcgtcttcaccaaggtttatctcttattctattcagagtgctatgcatatttactgaattcattctggtggtaatggtggaaagcgttaataacaatgttttttttttttttttaattttgaattgagtaatttatggttttaaattgcggtcgcggatgcagcaattgtggttgatgtgaagcgcattgcggatgccaccgtgtgaaatgattttaaatttttacaaactatataaagtggcaccaccgtgccactgcactattctttagccatcatagtagagtctgatttgctctgtaaatactaattgagaggtgcttgagatacaagagttgagagactgataaaggtaagatttttcattagatataaagcagattgagatttggggatctgaaattttaattttttgtgatcgatttgaacaaacatgaccgaaatagtctgatgcagtcgtacatgtatgtatttgacgatcacgcccgaattgcagctcaatattgctgcggagtcttccacatcagcaatattacatctgcaatttgaaaccatggagagattgaatagtttaaatattgttattggtgaaataaaattttaattaaaatcagtgttttggtatgagttagtaatgaattgtgttattattgagtaagaagattgggttagtttacacttcaattgtattttttttattatgttagaacttataatgtactttgtgtattgatgtcttgatagacaatcttggctcacctgtatttcttgtctccctagactgctgctgagt

SEQ ID NO: 31546 - DNA, 817 bp, Medicago truncatula
  Intron number 1 from transcript Medtr5g023150.3 (locus Med tr5g023150) derived from phytozome v7.0 (chr-ID MtChr5; po s 9077696 to 9078512)
cagtatactcaatagtgattacgccgtcgtttttggtatcgtctatgtccttaactaactaacgtctatgcattttatttctttgtacttatttcttaattaagtgcttataggataaccacttaacttataagtcattttatttaacgaaagtcaaattgttttcatttaagttgtaagctgttttcattagttatcctagatagcttagagataagctgcaacatagtcacacctttcggtgggtggtatggattcggtacttggttagccactctcgaagaattaggcagggagggtatttatagttggcagtgagcttagaaataatgatatttggttagccactctcagcgaattgtggccatttatgagctatcacaattgcttatatcaaataagttaattcaaactgttcttaattatgatgcaacgcggtaataatttgtgaaaattgaaatgattgtacataattacatttgtttgtgtcatgcccgtgtcagacaccgatatgtattgtgttggtgtcagacactaatacatgttggatactcacacaccttcaaatgcaagtttagtgctaagtggtcatttactcatttataacatgcctttaagttttagataactatgcttattctattgaatacacagtgttgagttgtgatcggagaatgataaaaatttgacacaaagaacatcacctatgttttatgcttttgtttttgctgttatgtactgcacaaattgtgtttcaaatattgtgtgaatgaaattggttttgcatctggcaggtgtacctcttcctttgattggg

SEQ ID NO: 31547 - DNA, 1013 bp, Medicago truncatula
  Intron number 2 from transcript Medtr5g007950.1 (locus Med tr5g007950) derived from phytozome v7.0 (chr-ID MtChr5; po s 1376857 to 1377869)
ttcaagttttcgcacggtgatatcgtcatcttcaggtaataatgctgttcatttttatgccatatgtgctttgtgtataatgacctgtttggataaacaacttaattaagtgcttatgtataagttaattctacaagaaaagaagaacaaatttaaattgcttttatacaagctataagctgttttcataagttatactgaagagcttatgacaataagatgaaaacaatatatatacatgtcataagttgttcctataagcactcccaaaaagttttgatccacgtgaagaaagaatcctgtcgtaaataaaataaaataaaaacacacacacacagacaaagaacgtgcatggtaatttcagagtttggtttagtggtgaaaaaaaacaagtcttggatttggcgctggttccttatttgagtaccgatggtccttgtgaagggaggaaaatccaaatcccgttattggtacgatttgacttctacaaagtttcccactttggaatgtggcatcatcgtatcaccaacgaaatctgtttaaaaaaagaaaatcgtgcgtgtagttaattcatgaaactgagattttagattcatgaccaatgaacatttaattaagacatgttcttctgcaattgatgagttggtatttttcaaaagtgtttgctcaaataagtcaatctgaagaggcccaatgtctggaagttaatttagtttgtaactgtagaactaggtgaactcgctaccgtaaacttgaaaattgttttaacagtgtaataatgtatttggattaatattgcatttctttagaagttattgccattggatggttcattatgtactctatgctatctgatctgcctataaaaattaatgacctcttgttcttatattcatatgctaatttatgataattgagacggagacctatgttgctgtttttggaagttcttattgacacaatgcgaaacttttgtagttccccgtcgaattttaaggagacacacataaaga

SEQ ID NO: 31548 - DNA, 1051 bp, Medicago truncatula; identical to SEQ ID NO: 31294
  Intron number 1 from transcript Medtr7g047690.1 (locus Med tr7g047690) derived from phytozome v7.0 (chr-ID MtChr7; po s 12003522 to 12004572)

SEQ ID NO: 31549 - DNA, 852 bp, Medicago truncatula
  Intron number 2 from transcript Medtr4g093120.1 (locus Med tr4g093120) derived from phytozome v7.0 (chr-ID MtChr4; po s 19609551 to 19610402 reverse strand)
ttactgttatccagcagaggtcccctgtaattaaggtatccattgtggcagtatttgctctcttgatttcgttaatctgacataggtgatttaggctgttattagagttttatgatctctgaaatgttatttgaataaacaactttattaagtgcttatgtataagttatttctagaatgaaagataaaataaagacaaattgtttgttaggaatgagttgttttcataaacaatcctggagagcttatgaaaataaattgaaaacgacttgtgaacatggaatgttgtcaaatatcagctatggcggattgcggtggtaaatttttgacaaccaccgtggtccacattccacattcgataacaatgtggacaagtcataagttgtttccataagctcttccaaacaatttcacaagtgcttatgtcggtacataagctcaaataagacaatccaaacaagccctaggttgttggtagtaaaagcttaaaccttactagctttttcttgtgtgcatagcatgcgcattaacccccttccattcatcaaaaaaaaaagcatgcacattaacttaggtccccgcttcttctgtcattgcagtttctattcttgagtttctctgcttcttgtctcctaatttttgtccctgtttcgatgcatatcactttcacctttggaagtaatcaatagattattatagtttaaatataaaataatccctctattcctgttttaagtgttcttttagaagtgtatatttttgtttctattactttctatgcttaaattggcactattaatttttgaattaggataaataaattgaaactaatacaataacatttgatagggt

SEQ ID NO: 31550 - DNA, 807 bp, Medicago truncatula; identical to SEQ ID NO: 30539
  Intron number 1 from transcript Medtr4g107860.2 (locus Med tr4g107860) derived from phytozome v7.0 (chr-ID MtChr4; po s 23669628 to 23670434)

SEQ ID NO: 31551 - DNA, 980 bp, Medicago truncatula
  Intron number 1 from transcript Medtr7g012600.1 (locus Med tr7g012600) derived from phytozome v7.0 (chr-ID MtChr7; po s 3302172 to 3303151 reverse strand)
acaaaggttaaaatccacaccttttattttgaagataagcaaattatattttttttacttgatagtttttaatataaatttttcattttctattcgttagtttgtattcagcagttttaatactcacttatatccctttcatagctgatgatctctttcacgaagcttagaactcatattcttgctttatgttgatttcttcaaattagatctgaatttttctaatatgttgttgttcaaatgagttgtgtttttcttccttgatttttttttttttaacataacttttatacttgatgaatcaattagcatctaattaaaacgtgtagtgaaattttttaaatgttcacttttgttgccctaaacctttgaattatctaacctataggtcagctgagaggtaaataaagactctaatatatttaaatgattaaaatataattttgcaaatatttttgaaatgagatcgactgtattattgggatccacaattgtatttgaatcatcttcattattatgagtaagttttttatttatattggtcataaagtcaaggttgtgttgaataatatcgatttttcttatggtgtgtgttggtaattaatgtgataaaagacattcaaaaaaataatgatgtaataattttttttattggtttctctaatactctaaatattttttggcattcccagagaacaaggggatcatcagctgcaaagaaaaaaataacttatcatgaagccaagatgtatctcaatgaaataaaggatgcttttaaagatgagaagcataagtattatgaatttttaagagtcttgaaagatttcgagaaacgaaggtttgatttatttatttattattataataggagaaaagttttttaatttgtaaattgtaattggtttgtttttttcactttgatgtatttatagaattgatctggagggtgtggtggcaagagtgaaggaattttttcaagg

SEQ ID NO: 31552 - DNA, 373 bp, Medicago truncatula
  Intron number 1 from transcript Medtr4g140550.1 (locus Med tr4g140550) derived from phytozome v7.0 (chr-ID MtChr4; po s 34508432 to 34508804)
gttcgcaccagaaacgatcatttgctactgtgactgtgagtaatacaacgatcctcttagaatctcgttttctcatttttctccataattacttttcatacctaatgcatgtgtaaattttcaatttcaacgtttgatttttgtgtcaactagcttctttgatcattcgtttcattatcaattgaatgtgtcttcaatcggagtatttcattatctttcactttttgtggtttttcaagattgattctcttgaatggttatgtgttgttttgattaatgcattcgtttttgttgttatcagcattgttgctgatcatgtgttgaattttattactgatttcaggttagagtactgagttaatttggatatata

SEQ ID NO: 31553 - DNA, 1052 bp, Medicago truncatula; identical to SEQ ID NO: 30300
  Intron number 1 from transcript Medtr4g069730.1 (locus Med tr4g069730) derived from phytozome v7.0 (chr-ID MtChr4; po s 13374933 to 13375984)

SEQ ID NO: 31554 - DNA, 431 bp, Medicago truncatula
  Intron number 3 from transcript Medtr6g005130.1 (locus Med tr6g005130) derived from phytozome v7.0 (chr-ID MtChr6; po s 137779 to 138209 reverse strand)
ctactccggagaaatacaatcagtcaaggtggctattttttcatcacattccttagattttactttggctatttcaatgacatggtatctcttgtaacaatttaagtacgtggctaacctgccttcgcctcggcatttaccgaatcatctgttttaacttgagcgagggagttggatgaaacttgattattttctgatgtggtacaatgatttgatggagcttaatataaattggctttgctttttgatttccttcagtttgttagatttgagattaatggctgaatgattattttgttatagctacccttatcttgagcagctagcatgatggatatatgaattgtttctataacgttcgttttcttacttcaaatcacaactacttcctatagaagccattctagctgaagccactcttcgaagagtcc

SEQ ID NO: 31555 - DNA, 478 bp, Medicago truncatula
  Intron number 1 from transcript Medtr5g019420.3 (locus Med tr5g019420) derived from phytozome v7.0 (chr-ID MtChr5; po s 7242462 to 7242939)
gacactctcttctattgaacttgaggttagagtcagaaacaaacatttgttttttaaactatctttttcatataacttgtaaatcaaatatagttttataaggtatattggaaatatgttgatgatggagctgaaatattcaggatattaagggatgtctaatcatattcatcataggccttacattttcatttttttgtgagataataatattctattaatttgacgggggaaagggggaaattagatctcaagttatattttgaagtagatctcaagttatataatgttacaaatattattattaaagatataattttgctgaaaacacttggcaataattgaacttttgtattgaacattttttgtaagacttttctttatggaacataaatccacttattaattcttccatggctttatccttcatctggtctataaaggcagcctataaaagctgcagtagctgctactgctg

SEQ ID NO: 31556 - DNA, 386 bp, Medicago truncatula
  Intron number 2 from transcript Medtr5g034120.1 (locus Med tr5g034120) derived from phytozome v7.0 (chr-ID MtChr5; po s 13966196 to 13966581 reverse strand)
agaactccagcttgtcaaagtaagtaatttttagttgatttaatattagcttcagttttgttacttttttttttctttcttttctttgtatatgtatgacaaagattattaatgtatagcttcagtttagtgattttcattttattaaattctatagcttctgacttattgatgcttatgttggttgtgtttatgcatgaatattaatgtatatagcttctgacttgtaaatgcttatgcttgttgagtttatccatgtctttgatgcatactttgttgagtttatccatattttgttgattcttatgcttcttcctttgagttcattgtgtctttgtgtctttcttattctaatggtctgttatttattttgtttttttagacac

SEQ ID NO: 31557 - DNA, 692 bp, Medicago truncatula
  Intron number 1 from transcript Medtr7g046210.1 (locus Med tr7g046210) derived from phytozome v7.0 (chr-ID MtChr7; po s 11304444 to 11305135)
ctgaaggtgttggcctgtggcgggtttcctgaaaataaagtctttctagactttcaagatcttttcgaaaactattgtgatatatattccattaaaatctatattttctatccatgtttagccttagaaacaataaggaaagaggagttcatcaaaacatagaaaatgttactacaaatagcattttcaaaatttaaccatacttgtatttggatttgagctttgtgcattgaaataattgaatgcaagaaatctaaatccaaagtaaagcttggttgaattttgaaaatgctagattttctctgttttgatgaactcttccttcatgattgtatttgcattgtttctaaattcaaacaaggataggaagtataaactatattgaaatatctatcaccatattattattatctttggaagtttcaacatattcataggctttaacatcttgagtccgaataaaaaattgaaataaatttacattttattgattattgcattggctttgatttccttgttgttgcatttcaatctatcatcacacaatttgaccttgttgtttttcataattaacacaacctcgatttttttttcccaacactgtgatacattaactctctcctcaagctattgttgattttatgtgttttgatgcagaataacttcttctatacaatatctaagtaaaacat

SEQ ID NO: 31558 - DNA, 917 bp, Medicago truncatula
  Intron number 1 from transcript Medtr4g158980.2 (locus Med tr4g158980) derived from phytozome v7.0 (chr-ID MtChr4; po s 40031652 to 40032568 reverse strand)
ccggccgcgaggttagggtttcaattgttcttcattcggttgatttttttaaagtatttaattaatctatattctgtgcatgagtgattgaatttatggaaataagctgattaatttgcttctaatagcataaatgcttatcattagtaataagttagtccaatcacacaagataaacacaatccaattgttttagtagaagctataagatgtttttataagctatcttggagaacttatggaaataagctgaaaacagcttataaacaagtcgtaagttgttttcatcagttctccgaaacagtcacacaagtgcttaagccagtagataagcttaaataagccaatcctaataggcccttagtctcggggatttctttgacttgtattgatacttttataaagacgatttacatatcaattgaaactattgcttttcatataattacattaacttgttgccacctttgaactaatagcaccaatgctagttcttagctgtagtcgaaattcaccagatttgtcaattgctgattgccaatcagcaattgacaacaagtgatcacggaaaatagcggtttgttcaaagtatgctacacacacaacgatggtgctagtgctgctatagctgctattttacaacactgaaatacttaaatacgtactatagagctagtattggttcattgtttcacctggtttggattaacataattttgcaagtttcttcatatggaggagtaaattgaatctgttttttttagtaaaagtacaagctggtgctttataattcccattcatatatattgcaattttatttgtttttgtgaatttgaatacctaagcctggcattagttatcctattcattttgttgcatgaaggaatttatctgaagtatttgtctgacagatcgcc

SEQ ID NO: 31559 - DNA, 287 bp, Medicago truncatula
  Intron number 4 from transcript Medtr7g084180.1 (locus Med tr7g084180) derived from phytozome v7.0 (chr-ID MtChr7; po s 18141148 to 18141434 reverse strand)
ctcatcaagttagttcttgaccaacctttactagttttctagtcgttcttgtgtttgatctaatactaatttgagggagataaaagagtagcatagaagatattaacatacaaacataattaatatcattaacaacaattgcataattggagtttagctttaattttttgtacttttggtttactcatacgcaaaatctaaggtattcttccaacttttgatgaggatatccttctgtcttttttcttgaaggatccaattcttgaatctatcaaagtagctgcaga

SEQ ID NO: 31560 - DNA, 702 bp, Medicago truncatula; identical to SEQ ID NO: 31249
  Intron number 2 from transcript Medtr5g008070.1 (locus Med tr5g008070) derived from phytozome v7.0 (chr-ID MtChr5; po s 1434042 to 1434743)

SEQ ID NO: 31561 - DNA, 444 bp, Medicago truncatula
  Intron number 1 from transcript Medtr4g118110.2 (locus Med tr4g118110) derived from phytozome v7.0 (chr-ID MtChr4; po s 27332036 to 27332479)
aaatcccaactgttcacaccagatcttcgattcatgtaactcttcttcattctacttcttatttttttgtttttttagttcaggttttggttgattatagtttgatttgaatgtatttgatttagttttattgtttgtaatgttttgggaattttttttttcatgtatttgtagaccctttttgtgtttttttttttttttttgtcgtgtgggttattgattaatatgtatgaaatgattttaggttatagattttaatgtagtttttattattttatttagtttatatgatttgaacaaatagcttaaatttgtccattcttgattgttagacatgtatttgtatctatagaagaatttaatcactttttttggtagtatattttaatttatttgtccattcttgtagttgagtaaaatactatctactagcagcaccatttt

SEQ ID NO: 31562 - DNA, 462 bp, Medicago truncatula
  Intron number 1 from transcript Medtr7g088800.1 (locus Med tr7g088800) derived from phytozome v7.0 (chr-ID MtChr7; po s 19335878 to 19336339)
aaggtatatgattctaactttctatacttttttattctttgtttgtttttcttatttttctttttctaaaaggggttattcttttcttaactttgactagaaccttggatattcacttctgattctccttaaactatgctttgttttctctctttacctttaccctaataatcatggttctgtatatttttttatgatgcaaagtgatataggtttttgttggttaaattataaaattgttagagaatttttggtttctaaactttgtcacctttatttggatggttttgattttgtgtcttttttatgttttgtttgagatgttgaattttgtgtcttgtgatgtaaatttattttgttattacatgaaaattatttgaattaaagactaattaaacaagtcacgatatatgtgatttattatatgattgcagaagtttgtgctcaaattagatttggaag

SEQ ID NO: 31563 - DNA, 562 bp, Medicago truncatula
  Intron number 2 from transcript Medtr5g029680.1 (locus Med tr5g029680) derived from phytozome v7.0 (chr-ID MtChr5; po s 12407735 to 12408296 reverse strand)
ttgtcgtgttgttgttcattgaggttgtagtcatctagtatcttacgtggttgtgtcattgcttcatctttagttttgtagtctgatgtaattgtggtagtagtattcatgcctgtgtttccattgtttgtgtgtagctatcatctttctgctcttaatgtgtttatacattgagcaagccaccactttatcaaacttttgtatctttctttttgatctatcttttaataaggtctacttgtttccaattcttgtgtttaactttcttccaacaatcatttaagcttgcttcaacataagattttggtttagattcagcagatatatacagactaaaatcctgttgcaatgatgagaggttagcataagaaatatattttttagaatagggactacttatctgttgacccccttcttattattctgacagatataatcttctagatcaggaggatttttgatatggctagctatatcttctaagattcatcgcgttcctttgaggtggactagtggtatcctcattctgcatgtctagattttcttcttgtttgacagactg

SEQ ID NO: 31564 - DNA, 823 bp, Medicago truncatula
  Intron number 1 from transcript Medtr5g099280.1 (locus Med tr5g099280) derived from phytozome v7.0 (chr-ID MtChr5; po s 39682987 to 39683809 reverse strand)
aagatatttcatctacccatcttctgcctgtaatctaatctatcatatcatgctcctctaattattgttgcatattttcatttatgaaaagtatcttgtattggtaataatgtttataactttggtatatataagtaagaataatactatctttatgcgtgtctctgaagtcttcttatgcaagttacaattaattaatgaccctaagttcaagattgggaatttaattgtttcagttgagaccctaattcagaatttccatattctgtacttgctattattagcacatagaaattactactattctcttattataccactaattttctttcttgtttcataataatgttcaataaaataaggcttaaacatgttttgaggtcatcaagcaagataaatatcgttcttctgcatgtttgaaatcacggtggatttgacaaaatcatggtgacttggttgatgtttcaaagtgtcgtttttgcaaaatcatggtttgccaaacactccatcaattcaaacatgcactttgtatctcgaaaaagttttgttgcttttttcaaaatgatcataattggtccctcttaatcagacaagagagaaataaaaattgactaaaccagagatcaagagtatggagacaaaccaatttgatccttttcagaaaccaaggacctaaagcaataattatcctattagaaaccagggaccaaaaccaattgttatcctatttttcatgaatctgtttccaaattgttttgttcatcaatcaattttcctccccctatcagaattgcagtggtagtctgaactctgtgcttaggag

SEQ ID NO: 31565 - DNA, 827 bp, Medicago truncatula
  Intron number 1 from transcript Medtr5g105820.1 (locus Med tr5g105820) derived from phytozome v7.0 (chr-ID MtChr5; po s 42526061 to 42526887 reverse strand)
ggaaggttacccctgctactagacagatagatcatgtgagttcttcgccttttatgcttgtttatgatcatcacgaaattgggatttgattttgatcacaagtttgtgtgcatcatcatccttatggattgtttggttccattttattagacatgtatttgctgatgtgttgtgttgatccttttgtgttgatcatatgtttgtgaatcacattgtctagattaatggttttgtgaaaagttttgcagattttgatcataattgtgggtttgacttttattttttgcctctaatgagcaagacttattggttatgaatgtcaatgagagttaaggaagattcataagaggtgaatcatttctgagctctatatttacaaccattagtatagttgtgggatctgttagccttagctcttgtaaagggatcggttagccttagctcttgtaaataatgtatatgttcttgagtatatgagttttagctaaactaaaatgtagttttgagtatatgctgatcagaaaaacatatgaacctgcgtggtcatctcctcgatgcagtttaaagatcgtggtcggattttaatatcttggatttcgatttacttatctacttttccaacaatgtgaattccattagtttggagaagggactgcggtcatcagagtgtttgatgcgatctttatatgttcatttgtcattgaatatctgtttgagagtgaattgaacttgtctagatgccaaaaagatcgttacttttattctgtttataattaattttcataaccatttctacaggacctaccgcgaaccttccctggtcacgc

SEQ ID NO: 31566 - DNA, 671 bp, Medicago truncatula
  Intron number 2 from transcript Medtr5g084160.1 (locus Med tr5g084160) derived from phytozome v7.0 (chr-ID MtChr5; po s 32011931 to 32012601 reverse strand)
atataattaaaaaagtgttgcagccatattcaagggtaagaatcacaaaattatttattggtttctattctttgttatactcatgaaactaatgtttttcaacttacaaatttaacaaacatcaacttgaatactatgagaaaagtttttctgcattagaatttgttttgaaactttcatgcacatatttcttcaatagataagatgctgcttgtgtttattttcaatccttgtgaaatacatccttccttcaggtcttaagatcatagttcacagccatggttgcgtcacgattcttggtatcggagagaattgtgctcaaatttggttgattgatgtggtctcagtattagttgcgttacagaagcataaaaaatctagatgccatggttttaatctcattcctaggccatttttaaaatcatttttatagtgcgctcaattataaaaaaacagtagcatccttgattgtggcaaaaacaaggttttctgatttttgtttttttgaaacagcaatcatggccatatcaactatatttaaccttttttttttgcaatataaacgatctcaattgtaacactactactctatttaaatccttgataacaggactacttcttgttctttgatattatcataaaaagtttcatgttttcattgtattttacag

SEQ ID NO: 31567 - DNA, 451 bp, Medicago truncatula
  Intron number 1 from transcript Medtr7g089740.1 (locus Med tr7g089740) derived from phytozome v7.0 (chr-ID MtChr7; po s 19824467 to 19824917)
gagatgtatgtgaatcgggagttgatgcttattcttactccatgattctcttctcttctcaatctcaatctaacccttgctgttctgatgtctcttgtaaaccatttttgtttattttacagtgtttgcctaatctaattggctaattgtttggtggttattttttagtagtgtgcaacaacctcagtttttttctcacatgaccaagtgattaattgcaaacatcactaccttttccagcgctgtattcgagcaatacaaaatcatgttctcttaacattttgttttgttcagaaaatgctactgccagtctgccacatcaatactcccacacgaggagtcgctcaaagaaattttgaaatccacatggctcgcacgcacgactctatcttggttgcatctgaaattggttattgccagttttccacaagatagagtctgaagctgcagg

SEQ ID NO: 31568 - DNA, 736 bp, Medicago truncatula
  Intron number 3 from transcript Medtr6g013310.1 (locus Med tr6g013310) derived from phytozome v7.0 (chr-ID MtChr6; po s 2787341 to 2788076)
gtgcattttacaattgcaggttccttgggtggcaggtaactttactctcttgagaaacttcttaaattgttttatattgtgatgtatgcatgttgaattgttaagaagaatttgctaactttcaatgaattcatctttgctttggagacccttaaatatgcatttgattaaatgaattctgtgttggatgatatatccttgtgtaagttatagacgagatgtgattacagagttcgagcaattgtgcctacgtctctgactgcagagtggttttagtacctttcgattattcaagcttgggatttacatagtacaaattgtgcttaaatactacagtctttacaagattattccatgcgacgacatgtccacttatcattaaactatgaatcatacatacccaaaaaatcatacttggaaaactagacggtctaatgtgtaatagcaacgtccttttgtttcattttcggacagtataaaagtgagtttgaatgaagaaattttatgaggtaatgtaattttagagggtaattaaaattcttgaatctaaattgcattgtttagatattaaatttggataattttgtaaatgaatggatttcatgaaatattttgctaaatctaaatttatggaatttcaaatatcatctcaaaactaagaatttgcaagggaataaacttattcgttgtttatgatgcaggacacactttatttacattctggcaaacaatattt

SEQ ID NO: 31569 - DNA, 568 bp, Medicago truncatula
  Intron number 2 from transcript Medtr5g022250.1 (locus Med tr5g022250) derived from phytozome v7.0 (chr-ID MtChr5; po s 8660303 to 8660870)
tataccatcactttttgccccacaccctccgcaaggtaatttttacttttttactgttttacctttgcttcaataacttaacaaaattttcttttcttttcaaaatgagtgtaattggttgttagaatatccggtgaaaagattgctgagatattttagtaaaagatggtagagatatttgatatgttagagtacaagattcaaaccatcgattttagttgtgtattgaaatagaaatattgctattgaattttcatatgatctttttttaatttaattatttagacaaagaaagttgaatgtcaagtaggggacctgttggctgttatggtatggtatcaccttagatatggttgtcacgttgcattttttctttgtttatttatttatatatgcaccgtccatgcgagattttttatgttatgaactatgacatgccagatgtaccatcaataaaacattccgtgtatgagttagtttttgtgtagttttgttttgtgttgaagtttgagtgcaacattttgaaaatttgtgtttgaatgtgaatgcagttcaatcaaatctggga

SEQ ID NO: 31570 - DNA, 950 bp, Medicago truncatula
  Intron number 2 from transcript Medtr5g039240.1 (locus Med tr5g039240) derived from phytozome v7.0 (chr-ID MtChr5; po s 16588325 to 16589274)
gagtaagtaaataatatccctttcgaattttgtatgttgttcagtttctacttttattgcatgttagaagtaaaaaaaatgttggaattatggaacacttctaatattaaaaaaatgtatcatttatattattgaaatcgtggttgggcctaacacaaccctgcaaaaccagcttgtgaggttaggattgcccccacttataaacacatgttcaggtcatattttatccaatgtgggattctaacatgaagttgatgtttcgtgcaataataaaaaagataaagaggaatgggatcatggaaccacaaatggtgaagttagttaatattatacccttcaaatgctgcatgttgtttcttagtttctatttttattgcatatttcagaagttaaaaatgttggaattatataaaacctatactcccttcgtcccttagtctaggaacttctaccaaaaatctcgggtattgaaagttgttgaagtaataaatttgtctgaaatgtgtgttagttatttatccctataattattaatatcataagagagggaaaatgtatttattttttttagtggtaaattaaatatgggttttttgtaaagaaatcaaatcatcaatgcttgtggaattttctagagagctttatagttagggacacataattgtttgtaaatggtcttataattagggacaaagggagtaatattaaaaaaaaaaattatcattcatatttccaatgtttcttctattatgtatttcatccaatcagtttaaggaaactattgtatgggtttactattcaacaaacattttagtgagctgttgtgaccagaaattgagagttgaatattgtttttgataccttttactacttaaactttaaagtattaattttagtgtcttctatgttgtaaaggtagctgccaaacttaacaatagtagtagacaatc

SEQ ID NO: 31571 - DNA, 914 bp, Medicago truncatula
  Intron number 1 from transcript Medtr5g039880.3 (locus Med tr5g039880) derived from phytozome v7.0 (chr-ID MtChr5; po s 16969336 to 16970249)
aactcttcctttctgttcgttctcgcgattacactgtaactctctctctcttccctctgtttgtgtttttagggtttagaaagttataggttcttcttgattttttattcgtattactcacaatcacaaatatcacttcctgttgtttaaagtttcgatttttaagatacccattttagattgttttcttggttcttcttgatttcacttgttagattgtttgcattctatgttttttgggttattgtttccatgtttattttttggaagctatttatattgacttatgtagaagcaattgacatttcacgtacattcatatttttgtccacaatgtccatatatctatgaagcactgatactgacagggacacactgacacatctaataatttgaaaaaaatcacataatttagtgtgattacaagtgtcactgtcgtgtcggtgtcggtcacgtgtccgacaccgggacacgcctaatccgaggagtgtccgtgttttcatagccatatatgaatatttttatgtggaaataatggctcaaagcagcacttttagtcaatggataactgtgatttgcatgatctatgcctccctatgctcctattcaggtcttgtagttctgtgttagtatcatcataaagtgctctagaaaaaattagagagttgcctcttttctttgggatggtgaacttatttttgattttaaattatgttttttaaagtcaattaacagatttttacctaaaattaagagactcttccatggctagagcttataaatttgaaatgaagtgttcatttgtttggatctctctctacctgtctctgtactctactttactctactctacatgtttgtttggatcttaattttttgttgttgatatcctttgtttaccaattaaataggca

SEQ ID NO: 31572 - DNA, 276 bp, Medicago truncatula
  Intron number 2 from transcript Medtr4g137130.1 (locus Med tr4g137130) derived from phytozome v7.0 (chr-ID MtChr4; po s 33693267 to 33693542 reverse strand)
agcgcgaagattttctaagactagttaataaagaggtaatttggaacctttaatacccagtcatttgcttttatatcttctacatattttcctttaggtaaagtttctgcatgattttgaataggtacctctaaattagctgatgtttttctgttatgttacagggtgcatttataattatgttatttgattttaaagttgtccgacaactatttcatttattttttatgttatatcttagaatttggatctgagctttactcaatcccagaagtt

SEQ ID NO: 31573 - DNA, 545 bp, Medicago truncatula
  Intron number 6 from transcript Medtr5g084910.1 (locus Med tr5g084910) derived from phytozome v7.0 (chr-ID MtChr5; po s 32364291 to 32364835)
tttatcaagcccagttaggaacactgtaaggattatagtttgcttgttgatattgtttcattttattgagttgtgattttgtttgaatctcaagttgaagaatgcagacccttgagcttgtaggccaaagggatattggcataatgccaaatcatgaacaaccagattctcaaaatttcttgtctacacctttttacaccctcatgctcaagttatatactaccataatttgtgtttgctacgtcatcactaaacataacttcttaatgtttatatatgaaaaatatgtttgattgttcatgtgaaatttaattatttgaaacatacttttgtattttctatttttttatttgatttctcagaaacatacgttattgtgaacccttatactacttaatttgcatcagtaacacctgatttctcataattgcttagcacataatgtttcttacattgatttgtacgttctaattttaattcacttccataaaagatcccctaaaaatttgataaacaactaatgtatttatctgatcaggtaaatt

SEQ ID NO: 31574 - DNA, 831 bp, Medicago truncatula
  Intron number 2 from transcript Medtr4g144770.1 (locus Med tr4g144770) derived from phytozome v7.0 (chr-ID MtChr4; po s 36535527 to 36536357)
gaaaatattctgctgcaaattgcaggttagttagtggattttattaccgaagaattgtccacttgtttgagtgaatcaccaaagccaaaggctattgtcatttcatctattaataaaaaatatcagcagttagtactcaagcctatgttagatttggatatggtaaatgtttgtaactaattcaataacagaggtttaatttaattttaatgtgatgtgaggaactgtagtgttggtttggtgccccaagttcaagagtaacagtcagtttagattgacttatttgagtttattcagcgtgttgaagagttttacattcgacaaaaaatgacatgaacatgtgtttataagtgggggcaatcttcacttcacaagtcggttttgtgggcttctgtcaggccaaaccacgatttctaagacactgacatgcacttgcgaaattgtttggtggaatttgtgaaaaccacttataacacgttcataacatgttttcaccttattttcgtaagctctccaagatagctgatgtaaacaacttatagctatacaaaatgaattttactttatttatcttttcttatacataagcacttatttcataagctcttcaagatagcttatgaaaacatcttatagctatatgaaatgaaatttaaatttattttatattttgttatattacacataagtgcatatcatgataaatgcttatgatattagctacaaatcaagttgtttagccaaacatggctcaagtgttgtaagcatgcctatatagcttgttattttcgtaatgtacttttttttctatttgttatcaatcagggaagt

SEQ ID NO: 31575 - DNA, 587 bp, Medicago truncatula
  Intron number 3 from transcript Medtr5g075320.1 (locus Med tr5g075320) derived from phytozome v7.0 (chr-ID MtChr5; po s 27412605 to 27413191 reverse strand)
aggagttgtcaataagaagcttggtaagtggtaaagatgattgttttttttttttttgaagaggcatgatttttttatttttaagaagctaaagatgaatatcattataagatgaacttgcaaattcttaaaagtaagtggtataatattacaatttacaacctctgaatttctggaaatttgagtcgttaacaaagtcgaaaaatatgtggttgttgtgttaagattgaatgtcaacgtagatttctttaaaaaatttaaaatattattgaactttagttttaaactatttgatcttgacacaacgactactaatgtgctgacacatgtaaatacataaaaattgttggcgatagtttatcctggttctatcctcgtcctataaacaacctcaatgacaaaatcatgaaaattaagaaatggttccatcctctcaattcatgtcatggtatctataagatcattctataacatggcatgggagaagacttcttattagtcttctttattcttaaacactaacaattttttgtgtccctctatttctcacagatagatcactcagtagtggagagtttcggagcaaa

SEQ ID NO: 31576 - DNA, 954 bp, Medicago truncatula
  Intron number 1 from transcript Medtr5g028360.1 (locus Med tr5g028360) derived from phytozome v7.0 (chr-ID MtChr5; po s 11701657 to 11702610 reverse strand)
gtttcaggtaagtaatacatgtctcatagtatatattttcacatgcacacaaaaatagggtagtttgagtcttatacgtgctttaataggtgatatagaagatctgcttgcagtagcgtatctatgaccttagtttagagtttcaaacttttgagttcttgaatttcttagctatattggtgcaaaattaatatcataaggttcaaaatgcaaaataaataggagtatacatgctttcttatttttagttcacaggggtcatctgaacctactcaaatgggcaagatcctcccttggctgcttgtattgacttgtttgaatttatctatttatataactgtttttgagacagtttgagagagcttgtagaaacggtttatgacatgtgtcttagaaatttcttatgaaaacagtttattgtgaaaaccgtatgacttgcttttatcttgtattatagaaatatgatatgtttagattgacttattttagcttatttattgacataagtagtgagagtaatatttgagaaaattaatagaaacaaccaatgaaatatcacaagccgttttcaccttatttctttaagctctctagtttaacctataaaaataggttataacttcaacgaaaacaatttaactttattttatcttttgttataaaaatggtttatacataaacacttatcatgataagcgtttatgttatgaattgcaaaataaattgtttatatatagacatgaccatagtttatacaaagtgcctatatgatacacacttatgttataaacgttagttaagctatttatccaaaaatatattcttaattatagcaaaatggatttcaggagctggctgcatcataaaactaactacataggatttaatttccttcattttatgaaatggatgattgcaggaagtggagaaaatcgtgcaccccaagtgtaagga

SEQ ID NO: 31577 - DNA, 929 bp, Medicago truncatula
  Intron number 1 from transcript Medtr5g036920.1 (locus Med tr5g036920) derived from phytozome v7.0 (chr-ID MtChr5; po s 15469583 to 15470511 reverse strand)
gtcgaattaccattactcttggacgcagtggtcaggtacaaacaaatttgtgcttttattcaattaacttctttcacccattttttgctactttgattttgctatatttttggttttgttgtatttttttgggttttgaatttgcttgatcaaacagtggttgattattttttattctgttaattgatgatagtatttgtagtttttgttgatgagtaagacattttggaattagaaatgatagcataagagagaaagttggggtagtacctatagaagaaaagatggtggaaactaggcttaggtgatttgggtttgtagatagaagacacttggattttgtaataaggagagtagatcagatggagggtagtcagcacatatacttctcagattaggcgtgtcccggtggtgtcggatacgtatcgtgtctttgacaccgacatgacacaacacaaacatgtatgattacatatttacatagatttatgattgacgtgtctggtgtcagtgtctgagtctgtgcttcatagcttgaggcagaggacgacctagaaaaactataagagaaactattataagatttagagagaaatgagttggataaaaacatggtatatgacagaacattatggcgtcgtttgatctatgtagccgaccctacttagtgggataaggcttggtgatggttgttgttgttagtttttcttttgttgttgacgtcaagttcaatgttttccatttctgtctttttttgccttgtttaagttatttgttgagaattaaaggaatggagtataattttttattcttaccactgcttatggatttgaacattggaatgtagagttttagtttgatgtatgatgaaagggattttcgtgtgaatgacattatatttttcacttgagtttaggttgtgaagaggg

SEQ ID NO: 31578 - DNA, 606 bp, Medicago truncatula
  Intron number 1 from transcript Medtr6g014770.1 (locus Med tr6g014770) derived from phytozome v7.0 (chr-ID MtChr6; po s 3520408 to 3521013)
atatatcctcacataaggtattacccaatgttttgttaatttgaatttttatgtctagtatgacatgatcgttatcattggtttaatttcattaacattgaaaattttgtacatatatataattttcaatgtttatgaaattaaattaaaagatagctcatttcataatagacacaaatatttaaattaaacaaaaaatgcatagtaccttatgtaaggatacatcttcgtgagcctgccaatagccaatacaggcactgaaaatccaatcaagaaactcttggatggtggtcgtggggaccggttttggtttgatattgtctgcagggagattatgaagattgttgggtgctgggttgatattgtggtgtggtttatagatgaatattgaaaatggaggggagtaatgtgtgtaactcaaggccactagctctctacattttatcttctttttgtttcttatgtttcggtttcatcttcttctatgttctgatattgattattttatactcaaaattaggttaaagtttgaagaaaatgacaaactgtgagtttggtaaaatgccagtagtggttaagcttccgcataatttcctttagattgag

SEQ ID NO: 31579 - DNA, 469 bp, Medicago truncatula
  Intron number 1 from transcript Medtr7g079960.1 (locus Med tr7g079960) derived from phytozome v7.0 (chr-ID MtChr7; po s 16759036 to 16759504)
aacaaaaacaattacaagaggttattaatcttatgggattgtaatatcataggatctttccatgggaatggcttatctagggtgtatgtcttgaattggaggtgcacaagataaaaatggttattttaaaatttccatgcccggcccatgtgatttggcggaaaaagtcaatgtgggtttatattttggtgaagaagaaagggatggtgaaggatctttggtgttgtgtaggagattttcatttggtgatggaaaacgaggagagaatggggaagtttgagtttttttagagaagtgtggcaaaagaatatactagattatttgatcattgtccaaacctgttgagatctgtagatttaaggtttcaggttaacctctaatatacatcagtccttactattcaacatggattatttggggctccaaaggttcattattgcgtgtagttcatgttgttgcagggagttgg

SEQ ID NO: 31580 - DNA, 958 bp, Medicago truncatula
  Intron number 2 from transcript Medtr6g104310.1 (locus Med tr6g104310) derived from phytozome v7.0 (chr-ID MtChr6; po s 22972570 to 22973527)
gtcgtgcgtgagttactgttattgaataagttaaggcaatctaattaaaccataattattttaattgaatgagtgaggagagctatttgtaaagaaatactggaatagttgttatagacatttactccaacatgggctgaaggttgttttgtggtgtcttcatgcagacaaccttccaaatagtattgattttcctgtaactggtggtgcatatgatttcacaaaagcaacaacatcactaacaaatgagttaatcacttcatcaaagaaagtcactcttttaaggcatggtcttagcacttggaatgcagaaagttggattcaggcgatttgctctctactttttagttattagctctattattgagttcagggagatatttaacttgcctcggaaatgcttgtattatatttttatttgtattaccgttcttgcgttgcgtggctctagatgacaaggccaaaccgccacgagcttataagttcgtatggttaaaatagatttgtttggtaactgtcttctttcactagcttaaagtgttttttttttttcactaccttatagcgtttttggtaagctacttcaattagcatttgaacttatagcttttaacatatcattttctctctctcaacttaccctcattatcttaattggtttttttaaaaatattaattgaaaatatctttttatgtcattttatattttatatttcttagtttaaacgctagttttactaaacacttcaaaatcagttagataacttatcctctatatgtcatcagctagcttacccgttatctcctacttttaccaatcaaaacctatgtctccatcatgaaaaccttcatcgatcatttaaactgtaatctttttaccacatttacaatccattgtcattaaattgatcatatgtgtgtagggaagctcagatttgtcagtgctaactgaagttgg

SEQ ID NO: 31581 - DNA, 801 bp, Medicago truncatula
  Intron number 1 from transcript Medtr5g065250.1 (locus Med tr5g065250) derived from phytozome v7.0 (chr-ID MtChr5; po s 22777662 to 22778462 reverse strand)
ctcacgagagattacgtagcgaagccttccgaagtgtattttcaatttccctcacatgttgatatatctctctcttttttcctcgtattttgcaaaagcatgattttgattggttagtggttcgttcgggataatctcatattttccttcgctttaaatagcacaactctaatggaaaaaattagtttatcgtgcatattttttcaacataagtgcttgttgaactacattttttttaatcttcaaagaataatatccaaactatttgtatcaaaatgactttttcaaaaaatcttaaacaaacggattatatgtgcgtgtttccttctcttgcgcctttcttttaccgttgtgaccacctaaagtgatcatggcaacatcaatgtcccccatcatcctctctaaattatgttcactcatcgatgctaacaaatgttttacaaattacgtgataaatcgtaaatttggacgagtttacatttttaggtcccaaattcgttttaaatcggagacaaaaaattgtattttagctaaatacgaactcaaaactgagtttaagcaagttaaatcgtagcaaacttgataaaattgcataaatcaccagagatttcattttaaaaaaatcaatttttttttaccattttttgtgctggaccattttttttcaagtcaagtatctcacacacactgtgtgtagcgtattctggttcccaaacattaatgtaaccttttcgattcccacattttctgattttaacacaaacagagaagagaatacaaagagacattcaaaccctaagt

SEQ ID NO: 31582 - DNA, 550 bp, Medicago truncatula
  Intron number 3 from transcript Medtr6g028110.1 (locus Med tr6g028110) derived from phytozome v7.0 (chr-ID MtChr6; po s 6288531 to 6289080)
accttgattaccttgacggaaagcacacagtaagtattctaggcgtcctttccttgctttgattgtttcgcagggtacatgggcatcattgcattgatttacctagttcttcacttttgggtcatttaagcaatgtattacccgattctatttgacattaaatactaatttcattattttaatgtcatttgacttttaaatatatagaatgagagaaagtgaattatggaactgaaaatgtattttctgattggtagcttcagagaacacgaaattcatcttacggtgctcttaaacttgttaaacaagtcctaacaactctacagttatgcaattgaacctttacaatatagagcagatgtgcatttacattttatataataaaagcatataatagaagcttgactaattgaagcagctatcataacaaaagcaacttagctataacttaactctatcaacttttatactgttgaagttatttgtttggtttctaaggtatgccatccctgcaggtttttggtgaggtagctgaaggatttgagacttt

SEQ ID NO: 31583 - DNA, 956 bp, Medicago truncatula
  Intron number 1 from transcript Medtr7g077370.1 (locus Med tr7g077370) derived from phytozome v7.0 (chr-ID MtChr7; po s 16251394 to 16252349 reverse strand)
tgtgcaaccggatcttctagtgtactgggcctttggtttgggctttgttcttttacgtttttgtttgttttcctgctatttgcaccatatttctttgctgtttgaacccctgcatgcttaaaattttctccaaaaaatctccaaaagttatcacatgtttcttgatattttcttagtttttttatgacatttttgaacattaaggatctatgaaatttttgtataattaattcatagcattttaattctctttgaattatttgttatggattcttcttcacacatttgtccttaatgtgagaatatgtaataaaagctacttgatgtgttaatatgagagatttgtgcctataatttcatgattgatttgttgttttgatttggttcataagttcttgattttatgaacaacatatgcatattttgaaagatataaaataccaagtttattctagaaaatatggcatgaaaccatgcttgcatgtttccaataattccatgctataacttgagataaagaaaactctttcaaaatttgttaaagcatgagaattagaggccaagaatgctttaggtttcatacctaaatttttagggtttaatgtcattttgttaactttttgtgccatcttgcatgcttttatttcttagtacttgttatgttttttttcttttcactaacaagtttatttccatgttccatgcatctcatttagtattccctctgccttctttagcctagcatttatttttgcaagttttaattcatttagagatgtaatttaccattggtttgtagcttggcaaagaggccatagaatgtatttagggaatgttgtaatatggactatggacactatggcgcaccgacacgcacacactcaccttagatgtatgtataggattgtatggttaaataagcgtttaggttttaaacacttagagaaaatccatcc

SEQ ID NO: 31584 - DNA, 861 bp, Medicago truncatula
  Intron number 1 from transcript Medtr5g072500.1 (locus Med tr5g072500) derived from phytozome v7.0 (chr-ID MtChr5; po s 25835867 to 25836727 reverse strand)
ggagtttgacttaggtggtgaagttggatttggttgttgttctcatgggtgttgaaggcaggacttagttaagtgatgtgtgtattgatgtctttaatggtgttttgtttaggtgttccgtctatatacggcgtctttattttgtaatctttgatttactgatctctgttcgtcttaagcagggatacaatttttaataaattttgcggttaaaaataaacattgtcaaatatggactcaaaagtggcttaaaatttgggatagattgatcttctaatttcaatatatctatctgttgaacttacgacccgagacaactggaaccaaaatttgctctagtttgtcaagttaacaataatttacattggtttctatgttatttagaatgaaaaacctttggaattcgtagcttgaatgatgattaataattaaagattcactaagcgtagtcaccatcaaaggacttaaatttgatgggtttggccattataggttacaaaaactacatgaagtatgattctatcatgtacaatgtacatattatattcccttttttcttggatggtaggattgttgctatttcatgatattgtactgttgtgtttgcttgctacatgatgctgcaagattagggaacttgattttgaggtatatgaattctgttttgcatcaatgtaacatcttttgaatgtagcatgtgtcaattgttgaagtgtgcaattgaatcactaattgtaaacataaaaggaggtttaagcatccaagtgctttagtagtgtgcaattggttggtcacaatctgtgtttgatgcaagtatttgagaatagaaaggttttcatttgtttatagtgtagattgtag

SEQ ID NO: 31585 - DNA, 970 bp, Medicago truncatula
  Intron number 1 from transcript Medtr4g159630.1 (locus Med tr4g159630) derived from phytozome v7.0 (chr-ID MtChr4; po s 40310788 to 40311757 reverse strand)
tttttacttcaggtttgcaatcaagaaataagtggagataatttaggacctagaattagagtgtcttttttttctaaatgtaagaacatgtatgatgtaattatccacaaggaattttaaggtacatatatttatctcaaaagatcactagctgcatgatttgcagctttctttgcatcgggcctaaaaaattgtataggctgataaagtaataatatcaatgaaattgttatgtttaaatctttcctttccaatacttttcagttttatttttttactaattttcttttcaaaaccagtactggatgattgtcaatttgcactctccattattgacaacatttagtacagatatgtcacacgccaatacatgtgttatgataataaaaaaataaaaaaaaaaaccaagaattgagaaaacctgatatgctgctgatgcaatgctcactgatgagggtaattccattagttcaagtgtctaaggttaggtttgttaatcataaatataaatttttttaaaatatttaaaaaattgcaatacccactaagcaacacatgacataaacactttcatattacagaggcatttgagtcgatgacttgtatttgcatgttgatatttttaagattacacctaatctttggaaacttcccccaagcgtcgtgggtcagcacagcagtgatgcaatgataatttgaaatatccaatttaccctttttgacttcatttgcatgaagactctaaaagggtattgtggagatgaaaaacaaaaaagtaaccgctatttttgggaacttcaacgaccctcttgtactttccaaatactttatttttttcttcatgattttagtcaaaaagaataatttaaaaccacaaaagagtgaaagaccaaacacaaacaagaaaggataactgaacaaggaagacaagtaagaaaccactttctccattgagaaaacgaaacaaaac

SEQ ID NO: 31586 - DNA, 967 bp, Medicago truncatula
  Intron number 1 from transcript Medtr4g109940.1 (locus Med tr4g109940) derived from phytozome v7.0 (chr-ID MtChr4; po s 24745310 to 24746276 reverse strand)
tcttccttcaatcacgagtctctctttcaggtgccatgctatgcatgttccacacacttttttttgcttccatttttggtcatttctattttaatctcgttgtcccatttgaagttttgattcaaaaactagtatttgttaaagagttccactgcggatcgaatgagagacggtttgacaactagtttataagtgggggcaatcctcacaagtcggttttgtggagttgtgttaggccaaccacaatttctaagagtttccacactttttagcttatcccttttgttgggtcagcttctatttttgttcattgttctgtgaacactgaacacttatctggtttaattgacaaagcttgtgctatttttgagataaatgaaaaaaaacgagtgtgtttagctcatgaaatgttgcattatattcttgaatgagtttgttttgtttagtggaaatgattgaagaatgaatagatttggagtctatttgaattgactcatttcaatttatctattgacataagcatatcatatgattgagagaactcactcaaacaacttatgacatgttcataccatatgattaagcgtttatcagatacatgttcatgtatacgttatttctacaataatagataaaataaagtcaaattgttttcatataagttataagccatttttataagctctaatagagaacttatagaaataagttgaaaacaacttatgaacaagattatttttttcactgagtgcgtatagtatatagtgaccatagagaaaaatgcaattgatcataatgctgtttaatgagtaattggcgtcccaaatgagtttatatatcgatagttagtccttgcactttgctatttctggttatgttattgatttttgttgttccataggtccatgactaaattagattacaacatgcagattcattaccgttggttggattccgaggctaaaat

SEQ ID NO: 31587 - DNA, 455 bp, Medicago truncatula
  Intron number 1 from transcript Medtr5g039080.1 (locus Med tr5g039080) derived from phytozome v7.0 (chr-ID MtChr5; po s 16521255 to 16521709 reverse strand)
atactatatagcataaagtttttttctagaacaatcaatattagtttgttaattgttattatgaagttaaaaatcatataaactagagtattaacatcaaagttttacctgtcattatgttaaatacataacttgttgttttctttcattaggcttggatggtcctgtttgcctaaggattaagggaagagtattgtattttgtcattaagtcatttcatctaagaaatttacttaccggtaaacacaggtcagagagactctaatgattaaaaattcacttcttaagataaataagtggtgaatttgatgttcgaatccagacacatgcgtatgaattcaaacattatggtatttagcaaaataatgagggatattgggattatttcatctttgattatgtggaatatgtggtgttcgaaaaacaaacaagttttggataatattcagccagat

SEQ ID NO: 31588 - DNA, 593 bp, Medicago truncatula
  Intron number 2 from transcript Medtr5g009650.1 (locus Med tr5g009650) derived from phytozome v7.0 (chr-ID MtChr5; po s 2166720 to 2167312)
gcgcagaagagtatctccctacattatcgaatactgtaagattcatggcatacatttttttgtgttatatgtaattgagtatttacatctgaagttagttgaacacaaaagtttgagctgtcatttacctttttccatgtggtcctctgttaagttatccaaacattaatttgctatctatatttctcatagcatttattcttgacattgtggctttgacacctcgagaaatcctttgccattttatctcattgtgaccatcagtttcatttctccatctacattttggccataatatttactttcacttcgtcagcatccatttcttgttaaaaggcatagtttattcccacttttttattttggatacacagtttttgtatgtatcatttcctattattgtctcagcattaacatggtggtgtgtcggtcattgtcgaccatgaactatgaaagctattatagcacacatatttgaatttcttgtcttcaaatatataatagaaaggagtttctgcaattttattgcactgatttatgtaaccaatttgtggacagccttttgcggatttacttgctgaccagtacagttc

SEQ ID NO: 31589 - DNA, 974 bp, Medicago truncatula
  Intron number 1 from transcript Medtr4g159340.1 (locus Med tr4g159340) derived from phytozome v7.0 (chr-ID MtChr4; po s 40182587 to 40183560 reverse strand)
actcaactctctgttctcactctcactcactttaagtaagctaattgttttagagttttagaattgggaattgttaattggaaaattggatgcgtaaattataggaataaaacattatattgtgaattgttttttgcttcttttgggtgacataatgatgttgtttagaattgattgttttatgcgtgatatacatgttatggaattgttctagcaatgtgggactagtcgtttacaagaaatgcaatttgcttgtttttgctatttccttcacgtttattctttctttctttcaggcttctatgtttttcaagtgtaatccataaaaaaagaactttagtctcaatctttttcttttttgattaattcatttacaaccgtaaacattctatgctagtgtatatacatgcaacaacaaataaatgtaaaccacgtactgaagggtgagaaatataaagtgtaaagatgaacaaatatatgcatatttttgtaataacatcaataaataataatacaataacgaaattgacgagagttttttaagtgtgaaatttctaagtcttgaacacaattaagtagcctattctaagtaataatatatatagatatacccagctgacccgtgaatcaaacgagtcgaactatacatagctcaagttcaactcatttggttcatgaaccaacttcaacgaattaattatcgaatcgaatctcgaactattttcgagttggttcggttcattgctatccctaattgtggggggaaaaatctatagaagatacgactgtttcgagcttcttcttgttgggtcgggtatgtcattgacccaaatgtatgctattggggctgggcctatttttcagataaacaagggaattttttatttttatactttttttataacaattaaatttaatggcgtcctcctgccctagcagacatcagtcctgtcgttgtcctccctcaactgccg

SEQ ID NO: 31590 - DNA, 265 bp, Medicago truncatula
  Intron number 2 from transcript Medtr4g157900.1 (locus Med tr4g157900) derived from phytozome v7.0 (chr-ID MtChr4; po s 39465414 to 39465678 reverse strand)
caggtatgttttgttattttgatttcaaatttagacatttcttatgcattacttaacaatatttgtaacaatgattactaaaaaaaaatttgtcataatgaaaaactagtttttttcccacttatttttgtttatctttccattcaagtatgtttagctagagatacattacaaattaccaaaaaataaaataagaagaagattggggtaatcttgtttcacatggaaaataattttaatcaggatatttttcaatatcaattgg

SEQ ID NO: 31591 - DNA, 571 bp, Medicago truncatula
  Intron number 1 from transcript Medtr5g026930.1 (locus Med tr5g026930) derived from phytozome v7.0 (chr-ID MtChr5; po s 10920575 to 10921145)
ctcatcgatcctgacactcttccaattctttcgtttgttcaattactctcatttctctattttattcttttccaatttggggttacaatattgctttgctttttcaattgattcagttttatttttttgttaattctttcaaattcgtctccaagatctgttttttataccttcatttatggtatggtttctgttaattaatgagactttttccttggtacccttgttggataaacaacttaatttccggcttatagcataaacgcttatgtataagctatttctataataaaagataaaataaagtaattagttttcgtataagatgttttcataagtataacttatgaaattaagttgaacaaaatccaagcaggccattttgttattaaattcaatggattgagactcaaattcaattctttttttggttatttgtattatgtatgaatataggtatgtattttgatttgatgttatgattatgatatgatatgattctaagaaaagaagtaaacttttttagctgggtgcagaaattgaggactacagcatataatagacaacaagg

SEQ ID NO: 31592 - DNA, 1052 bp, Medicago truncatula
  Intron number 1 from transcript Medtr6g071050.1 (locus Med tr6g071050) derived from phytozome v7.0 (chr-ID MtChr6; po s 13600649 to 13601700 reverse strand)
tcgccgctctcccggatctccaacaaaaataagtagttttttacaatttgatataatttatgtgtcatctcttagcaaacgttattggatatactttccactggaattaatctttttcttacgaaggtaattgttgaatcttcagtcgcatcatgtgctctctataggacacatgtggaatcaactttccacttgtttttctttctgaaaatggttccgttgaagaaaaaaatcatacatcatgtacctattatgagtggaaattggccttgattttatattggagctaatagagtagggcgatggggggtgagtctaggtcagactatccctggaaacaaggacctagtttttgtcaaccccacccgggagtgttcacttttcttattttgaaagtttccaaatgttcttttcagttagattgcttatcgggcggatgctagggtggatgattgaagtaggtcatctacggtgggcgagtaatgtgaaccgtcggataagtgatgttacgatacactatcagtagaatatacatctctctctccatcatcatctgtctatgtttctgctccctttctcccaatttattttagttaccaactttggaatttgaatcttccctttctaagatcttatgttactatcattatagaaatataaaaagttttgatttttcatccccccaaattgtccattaaaaaatatattggaattcctaccatgaatccttgttgtagaatcccaactaaaacctattgacttctgtgttttcttcaattaagttcagtgattcaacaatgatgagtatcttgtccggatcaagttattctagatcaatcatagtcatggataatatgatcaagtatttatctgtgatgggaagagagggaatgtaaagaggatttggttatggtgtagaaggaagaaaggaacgggtaaagcatggaaagatgacagagatggtggaaagagagagaaaagaaatgtataatctactgatggtgcatcataacatcactcatccaacagttcacatcactcatccaccgtgg

SEQ ID NO: 31593 - DNA, 932 bp, Medicago truncatula
  Intron number 4 from transcript Medtr7g020840.1 (locus Med tr7g020840) derived from phytozome v7.0 (chr-ID MtChr7; po s 4941793 to 4942724)
gaagtaagttgtttatctagctcctattcttctctgtggtgtttattttttttcgatgttgatttgcaatgggtgattgtttggaatcattttttatcatgtgtttttttctttatttttgatcctgattgattcaagctaaccgaactttagtgtatgtttgtacctggggtatagcatgaaatccaatgtagttgattaaaatgaactaagctggttaatatactttaaaattgatgttatttcatatatcccaacataacatcacagtcacatgtagtaattgtctatgcattgacttgttagtttgtatgttgaatgaatattgtaatatttgtcatgcatagagttgttaatcatgttgaaagaatattatacatggttgaaagtatgtgatacattgaaccctgttgtactgagaatattttaaatggttgaacgaatgtgatacatcgaaccctgttgtacaataatgtcatttgacttaacttccaagattctggtaaatgaattaatatggtttacgctgctgatgggcatgttttgattgtattaacttttgtgatgtttgttaaaaattataataatctttctgtggaactaattttgaaagatgcaattaattttccaaatatgcttctgttaatgtatactattggttttccaaagatgcaatgaattttgaaagatgcatagtatgatgattatgcatatgcatagttagattattatgcatatgctattgctggccaaccttggttagcacttcttactgttgttgtattgttgtttctcgaattgttggatttcttcctattgatgttaattgtcaactacaatgatgtcttttatcaattgactctttaaggttctgcatgtatatttgtaagtcacttatattgacaagttgaacttttgtgttatcatagaca

SEQ ID NO: 31594 - DNA, 506 bp, Medicago truncatula
  Intron number 1 from transcript Medtr5g100160.1 (locus Med tr5g100160) derived from phytozome v7.0 (chr-ID MtChr5; po s 40088491 to 40088996)
ttagtggtctttcgttggacctcaaatcggaataggtatgaagggtgaaatattctttaaaaaaatggcaaagactggtttagtttgattaaaaaaaattatgttggttgacctaaaatgaagattttattagccttactcttaaattggcccgcaaaattctctatttctccacatttaacatgtgaaattctcgcctctaaactattagaccaaagaaaaatatgaacttatcatataagtttagtaaaaaaatgaatatacaagctaatttctcctctaaaaacaaaagttaactttttttaaggagaatatataagttaatatcaacgcaaagatgagtaaaaagttctccctcaaaaatgagtaaaaagttctataaaaaaattaagttggaaaaaataaataaagttatacatcgccttttgtcaaaagaaaaaaaaaaaactaatcattgccgcaacgcaacagagccttctccttgttccttccaagtattgctgctt

SEQ ID NO: 31595 - DNA, 815 bp, Medicago truncatula
  Intron number 1 from transcript Medtr5g075390.1 (locus Med tr5g075390) derived from phytozome v7.0 (chr-ID MtChr5; po s 27460156 to 27460970 reverse strand)
aaattttgttccggagttttcgtcgcagcgttcaggtatctttttatatcagatgatgatgatttattagggaattgttataagttaaacactcaattaggtcactgaaattgtaggattgcgtccacttaaatcggacttattaagcattgacacggatactagatacgacattgtcacgtggacactggtgatagtttaaaaaatagaagtgtgatttgaatgtaattgtaaccacttgtgttagtgtctaggtagtgggatcctgggtagtgggatcgcaaaggatagattgtataagaacaaatgagagattttgttgtataaattataaaaaacaatgagcaaacaaagttatgataaaagaattactagttagagatgattcaatgtgtcttttaatgtctattctagtagtagcttatacaaatgtaacaaacaaaaaaaacataatgaacagaaaagacagaagaacaaaaaaacatgggtgtaggttatataatatatagtcaatatgttaaagtaaaaacatgtattgaatgaaatagaatagagaagaacaaaacaaagggtttagggtgaactgagcaaaggcagcagtgaaggagggcggcggaggggtaagtgtgtgatacgatgggaaggaggagagagaaaaaggtttagggttgaaaatggaggatgcagagagagagagagagaatggaaataagaagagagaaaagggttagggttgtgcaaaaaaacccaaatttcccttcaaacagttcaaattttaagggcataatcgtgattttcctggagcgggagctgga

SEQ ID NO: 31596 - DNA, 423 bp, Medicago truncatula; identical to SEQ ID NO: 30420
  Intron number 1 from transcript Medtr4g132960.1 (locus Med tr4g132960) derived from phytozome v7.0 (chr-ID MtChr4; po s 31716438 to 31716860 reverse strand)

SEQ ID NO: 31597 - DNA, 892 bp, Medicago truncatula
  Intron number 1 from transcript Medtr5g015150.1 (locus Med tr5g015150) derived from phytozome v7.0 (chr-ID MtChr5; po s 4979038 to 4979929 reverse strand)
ggtttattcattatgtaattttattttcagtgtttatgctttttagcatggtttcttatattccttaaaaaaaaaaaaatgctttcttatattgttggcatttttttttatcctttttagcacatgttgtacttcaaaaaagaggtttgtaaaaataatttaccatttgttctcttaaaaaaaaaaataaaaaaatacaacaaatagatagagtaatatcaagacagataataattgactttcataaatagaatttttgtttctcaaatatatatatatatatatatattttcacaatcgattgaaagtttgatcaactgctggacctgatgtttctaatattgacaaatcaactatcaatatcaaatcacttcttagattatgtgacaaaagtaacaataataattaaacaataaaaaaatcctcaagaaacttttcatgccaaatgaattgtggaagaaagtcaagattaaatatttggtaatttgattgaacttacaacttgcaagctgcaacaactccttgtgagctagctagctccgaaacgttaatcattcaaatatagtgttggcctgctttgacctatcgataaagcttgcaataattaagtgcttcatcatataaataatgaaattttaaattggtcaataaacaatgtaatttgaattcttaaaaaaaaaaaattgcaatttgaagttaccataatgattttttataatatggatataacttttaagttggttaaataaaagaataatgtaactgacaaataaataataaaagtaataataattgattaaattattaaatttacatacttttttaacattacatatatttttgctcaattttttttcttcatatatttcttaattatgatataaattagtta

SEQ ID NO: 31598 - DNA, 724 bp, Medicago truncatula
  Intron number 1 from transcript Medtr5g092240.1 (locus Med tr5g092240) derived from phytozome v7.0 (chr-ID MtChr5; po s 36152284 to 36153007)
gttactattttaattctaaatctatttcattattttaatttgtttttccattggttttaaccaattctacctattttatggccggccacagtgggaaacaacccacttctctttctcaatcatttaattttttcccctaattttctgcctactatcttatcttattttatatataaaagttgataaacaaatttatgtataaaaatgctatatcattggtgttatttaaataaataaaaatttatattatatttgttaaattattgatatcattgaaaaagttaaatatagtttattacaatacgataaaagtgcaaatattgtttttttagaggtaagaaagtgtaaaatattatacctaaaattttaatcaaatctatattcattctataccatgtataaaggaaataaataattttggggtgacttttcacctacaattatattcttaaacaaattagtctgtaaaaatgctatgttgttgatattattaaaaaatataagaatttatattatgtatgctgtatattttattttaggggatattcatttgaagaatataaatatagtttgttacaatataaaaatgaaaaacaaatgatttccttgaaaattactatattttcccaacaagacaacttcatttcaccgtatcacaatatcaagattttctagtggatattgctgaggatttcgttagaaaattacactcacttggtgctag

SEQ ID NO: 31599 - DNA, 740 bp, Medicago truncatula
  Intron number 2 from transcript Medtr5g022300.1 (locus Med tr5g022300) derived from phytozome v7.0 (chr-ID MtChr5; po s 8679659 to 8680398 reverse strand)
attctttctggtccgctcttcgaatactacatcaggtttactcactagtcactactgtttcttcaattctcatatatatgacttcttaattagttattataattatagttttaaaaaataaatagatatgcgattgcaacatgagctatgactcaaagtttttgatgtctctgcaattgtaagttaggccgcatttgctgcatttagaattgattctttatagacatggttattttcttaaaaagaaggtatgcgattacagtaccttcttttccgcgattacagtttaagccacattagctgcatttaaaattgattctttataataattttaaaaaaataaaataataagatatgtgatcacaatcggagctttgagtcaatatttttatgtctctgtaactgcagccacgtcagtttcatttaacattgattctttgcaatttatgttacggatgattcatagtttactgacaactgggtatgtcaatctagctggttttaaactagactgtggtatttaaacacaagttgtcatttgtaaacccttagcttcaatatgagaactgtggtgtggccgctctatggtcggagacgtaggcacaattggttgaatatgtgaccgaatatcgcatgttctctgtttgtgttctttgtaattgttttcttttgaactgggatggctattctaccaatttattgaccttgaaatgttaaatttatattgcagaaaatcaggc

SEQ ID NO: 31600 - DNA, 714 bp, Medicago truncatula
  Intron number 2 from transcript Medtr5g105920.1 (locus Med tr5g105920) derived from phytozome v7.0 (chr-ID MtChr5; po s 42565441 to 42566154 reverse strand)
aaggtcggttcttaatcttgatcgtttttaactgttttcatcgttactgtactaggatttattgattttcttgattagggttcttaatatttttttgagaaaatgaattaatcgactcgattagggtttatatttgatgcttgattgtaaactgagttttaagttgagagaacatgaattaatcgaatgtaatcggtgtcagatagcgtagtgacactgtcacctttgattagaggtgtctgtcctatagaagttctgagtgttctgagtgttcgtctttgcaatatcgtgctcatgcatattatatgtatttcatggttgatatttagttcaacataattaaaattttcaaatcatacggtgacagaagagagttcatcggtattccctttttcaataggtacacttaagactataaagttgcagtcttttcttgcgcctctcaaagtacaagttttttactagtcctatctatccattaactgaaacaggtttaatttgagttcacttataatagaaacaaaaagaaaacacttacaattaaggcataaaaattgactgggacgatgtagttaggctggaatgtagttatgtattttaagcacctaactttgctgcaaaatttgtagtatcatagttgttatattaggcttcatgaaatagcacatttacagtgttttatatttggcttgtcttttggaatttcagaatatc

SEQ ID NO: 31601 - DNA, 410 bp, Medicago truncatula
  Intron number 1 from transcript Medtr7g077400.1 (locus Med tr7g077400) derived from phytozome v7.0 (chr-ID MtChr7; po s 16304169 to 16304578 reverse strand)
gaggttgttgtcgttttgagattggtgttaatggtgtttccattgatgtttagttttttctcttacagttgttgtgttatgggtttgtatggattggttttggtggaggttgttgttggtgtaccttaattgacaaggacatgtttattaccgtacggatagtgttgtgaatccacaacgaagatgtagtaattaaaaatcacttggacaacttctgtttagtctggttgtgagttttgatttatgtggttgttttcttctatgagttcgttgctgatggggttttcaaatacacggatgttagaccgtgtaacttgtttaaagaattgagctatcttttcaatgtgcttttgtagggtgttacatgtttttcaggtggtgattttttgggtgtttacttgtgctcaagt

SEQ ID NO: 31602 - DNA, 734 bp, Medicago truncatula
  Intron number 1 from transcript Medtr5g012000.1 (locus Med tr5g012000) derived from phytozome v7.0 (chr-ID MtChr5; po s 3340122 to 3340855)
accaataatagtaaaacactaaagaagagaaatactagtcaaatggatatcgtttaagattagttccaacaagaaatagatcttgtctttggtattaattatgaggtcatagcattcgtaattaattataccaagaatgaatgtggtcgaagtctttgtaaaggtgcaagcagtatcttttttcacaagaaacttgattaactgcttaaacccaccactaaccaagcagaggatcccccttccgatatggtcattgtttgcttgggtgctacgattagagtcacaatcattccacgaagccatcttcatcacagtctcatccattattttaattaacgtcaccacttagctttcatcttaattttctttgacttgttccaatggacacggtgcctctatatttttactcgtatatgaaaaatactgatgattttgctttgagcataagttaagaaaaattaatgtatagtcatttttttaaggagaaaattaatgcagtaacgtttttttttttttttaaagtatgtaatcaattttttctgaagtttaaaaatgaaaaatcttgttctttcaatagcaaaatttgtgaagaaaaatactaataagtggactggcatgttaaagaatcaaatatagtattactattcttaatgttttactattattatttttttgaatggcaaactatatatatactaggtacaccaacatctgaaggaggaaactctagcccc

SEQ ID NO: 31603 - DNA, 779 bp, Medicago truncatula
  Intron number 1 from transcript Medtr6g009370.1 (locus Med tr6g009370) derived from phytozome v7.0 (chr-ID MtChr6; po s 1540531 to 1541309 reverse strand)
agaaagaatttagtttggttattagaattaagagtttagttttttaatatacttttgacttctgaaatttctatgtgtatcgataacatgtatttggttttaaaaatggggatgaaaaatgtcccaacaatttgattatactctcgttatttcagtgtgactacaaaactacacaattacacatagtccactatcccaaaatgcccttgatttattaaaggtatcttgcgaatatccggtgtttgggggtataggtataaatagaggctatgaagtcaaactttctcctatggatcctcttaaccatttgaattttgctcttcctcatgtaaaaaacacttgtgccctgcaaccatgcctaaaatgcctatgcgagttaactcacgcaagttggccggtggtcagaactgaagaacaaacattttttcactttggtcaggttttcaacattcaatttacacgtttttaacctttttcacacttttttttaccacatttatggtagatacaaactagtttatcattcctacctataaataccctcacaaacttcctcttttcctcacattatctcctcccactctctccccctctttctcttcttcttttttgcttctatagtctctaggctctttttaccactttaggtatatagtaatagctgttgggggaaatagtggttagtcggattgggaaaaaagacatcataccttgaggtaaaattaggtttgcttccttttactcccaaaatctttttaccgtgggtaaaaagaatcatc

SEQ ID NO: 31604 - DNA, 366 bp, Medicago truncatula
  Intron number 1 from transcript Medtr5g073400.1 (locus Med tr5g073400) derived from phytozome v7.0 (chr-ID MtChr5; po s 26362807 to 26363172)
agacaaagaaaagtgaccttctttggatacggcttgtgaattttcttcttgagttaagtactgttttagcaatttattccttttgttcattgagatttacattggtacttatggatttgactgtttgtgtgtgtgtgtggtattatctatggataccatttattgaattgcatgatgattttctctttttagagtttggacaattgatactgttatgtatattacttgcaaatgtaataatgcacaattgtgttataatgtacaatatttgttaataacttcatggaatgtgtgattttgctaaattcttttgttttgatttttcacacatgtagtgcgactgtttttggagtttcaacagaatcc

SEQ ID NO: 31605 - DNA, 779 bp, Medicago truncatula
  Intron number 1 from transcript Medtr6g027720.1 (locus Med tr6g027720) derived from phytozome v7.0 (chr-ID MtChr6; po s 6060157 to 6060935)
tgaggcatttgttgttaaggatcatcgtggagaatgtaagttttataaacataaacttggtatattaaatcataaacttggtatattatattctatatatgttatcctgaatatgacttaattttttgtgtagcatgatatattattgcaatatagattggaatatatttgatgacaatgactaaacacttatttccaactaactttgttttttaaaaattgaatttgtttacatgttaatgtgttttccattgatgatttgccaagtaagcactttttttttgccaaatcacttaaaaattagacacatcagcgtttttggaagagaaattaggagttaagactaaaacaacaaaaacatgatagtttagggacggttatgttcgatttaaaaaaggcaggaccattttcttgagttggtcaaaatacgagggccaaaagtgtaattaagcctaaatatattaataagatgatccccacttttgttgttgtagttatgttattgagtgtgcaaatattgtttatatttagtatttacacaaaaaaatggagacggtccatttcctaaacaaaagtagtactttaaatcttactttgatgtagtattaattttatgagttgcatataaacatatttgcctgttaagggaatcatagtttagaagtattactaagttttttttttaagaaagtattacatgctaaatatctaaatttaatttcttgttgacattgttttcatcattatcattatcagtgtacaaaaaacaccacccacca

SEQ ID NO: 31606 - DNA, 724 bp, Medicago truncatula
  Intron number 2 from transcript Medtr6g027720.1 (locus Med tr6g027720) derived from phytozome v7.0 (chr-ID MtChr6; po s 6061039 to 6061762)
aattagcagttattgatactccaaagctaagagaggtatatatctttataattaggggtgaaaataaatagattactccaaaaacatttctatttttatgctaattttgtttaggatctatttatctaaaaaatcacactttagttcataaaaaagtcttttagttctattaggtcaacatatttgaatatatttgttattaatattttcaataatttaaacatattaaactacgtagaacattatgcaagatcgtctcataaaaaagtcatagcttaagtgacagaaatgtcgaaattgttaggccggacgtcatgaccggggttcgaatcccgacacctccactgtgtgtgtgagtttatgatgactttgccatttcgtctatctacacacaaaaagagaactttatacaagatcaatttcttcaaaggattaagttagaccgcaaatttgaatttaaacttaatgatctattaacttgtgctcttatgacacatgttaagaaatttaaaagtacaaattttatactgaaaagagtagcttgggtacttttaagaaattgattagacaacttttgagatagaattactatatatatttcctttaacatgtgctattagcattttcctttaattaaatatattagattcttatttgtgaagcaatatgaacttattacttttttattgatgaatttatctgaaatcagattttgggcataggg

SEQ ID NO: 31607 - DNA, 764 bp, Medicago truncatula
  Intron number 1 from transcript Medtr5g028060.1 (locus Med tr5g028060) derived from phytozome v7.0 (chr-ID MtChr5; po s 11516551 to 11517314)
cacttcttcagaggcttcgaattccaattatacaggtactactgactgcaaatactctttcaagataaaagtagtagtgagttccctaatggtcatggacattggagccacttaattatgatatatttgcactctttttcattgctctagctatacaattagaaatagttattatttttggcagtagtaatttgctgctggtctaatcaaagaatattacctgcaaactgagtttggttcagttggtaaggagttgacttatactctacaaggacgtaggttcaactcccactgccgacatgaggacctcgttggtggacaatttgtaagtatttttatcggtgctctttgaactttgaggtctgccctgaccttggtgagtcccagggtccaactcacctaaattaagttagaaacaaaaaaaaaaatcaaagaatcttaccgtactttgcacaccacttttttctttttctattatttattgttactattagcagaaaaaagataaaaataaaaataaaaaagaatgaagaaaaggtgtgatcagtgttttatcaaccatttctagttacttgcgtctgtagtgtctgacaccattattggtgcgtacgtatcagtgttgtgtccggtgtatatatctatagcagtgtttcttagtgaacaagtagacatgtaaaaggggaagtgtatatgtttctctataaaaaactcacttgccagactaatacaacacaaaacatgttctcaagcaggtaaaacaaggc

SEQ ID NO: 31608 - DNA, 727 bp, Medicago truncatula
  Intron number 1 from transcript Medtr6g017810.1 (locus Med tr6g017810) derived from phytozome v7.0 (chr-ID MtChr6; po s 4308412 to 4309138)
gctttctctacttgcttttgcaattctaaggtactgcttttttttgtttgataatcttggtgtttcttattttatctaatgttcttgttttttctttgagatcttctgtttatgcatatttttgtttttgtttagtttttgtttttcaatgtttaatgttttgaactttgatgttgaaaatgaatatctttttatggtatgattgacaaccaagccggtccaaggattaggctactaaaactctagttttaggcccacgaaaaaggccatgtatatagacaaaaagactttgtatattcaaacttgtttaagacctcactattgcaaattattggaccgaccttgtttgacatagatgtttagcattctatggatcattggtttaaaaactaaacttaaccaatctggaatcgaccagtttgctggttggtttgatctcaactgaaccacaatctagttaacccgattgaacaagggttgattccactgatttttactgttttcattttgtaaattttttaatatccttttttttttttgtcatctattttaaatggggttgtacgaattgaaccataactcaaaagtcttaccgattatttaaaaacttaggaaaaaaagttcaattgtaatgtaagataaatatcaatcatgtagagtttatccttcaattggtgaatgttgcttataattgtgattctatttcttaaagattgatcatttaggg

SEQ ID NO: 31609 - DNA, 712 bp, Medicago truncatula
  Intron number 1 from transcript Medtr5g081500.1 (locus Med tr5g081500) derived from phytozome v7.0 (chr-ID MtChr5; po s 30630341 to 30631052 reverse strand)
gggtttgattgtgaggtaaatatagtttaccgaaaaatttgtttcaccaataaatcaaactcaggttatttccttttgtcaagacaattattatagttagagattgaatatgaaataagatttggttttacagttctaattttctgacattttttatatcaaatgcaataattaatgttggtatttaaatctctgatcataaaaatatatgaatttaaacttgcgtatttattcaaattcaaactttagtttaaaatctatgagctatcaaatttatctcttactctagatttaagcttgcaatgacaatctggatttgaccccattttttgatagccttagcttttcaaccatttttatatgtggtaattgaccacatataaaaatatgtggtaattttataccagagaccaaaggcaacattgatatacctatagtagagagtattcctatcttgttaaacatatgttgttttaatgcaccttagcgtactgataggatatggtatataactctcaatatctctttggctttatactcttgaaattgtgaatctgtttttctccaagttgcaaaatgttgtcttcctcttttaatccatttgaagctcttggaagtggcttttatatttttctactcttatattaataaatttattttgttcattttattgtgttaatttgtgcagaagaaaatacaactctcagagaaa

SEQ ID NO: 31610 - DNA, 1014 bp, Medicago truncatula
  Intron number 2 from transcript Medtr6g046710.1 (locus Med tr6g046710) derived from phytozome v7.0 (chr-ID MtChr6; po s 9965464 to 9966477 reverse strand)
attgacaattattaagcaccgtagtatttatttgtttgtttatttatttttttataataaagattctctgtttagtggaaaatgtttaacattttcgatgggatttttggttgttatggtattgtgtgtatctatatatatatatagagagagaggggggagataccattttcatcctcatgtatgaggcgttggctttgtccttttcaaaatatttcttctgttttttttttttgtttctttctttttttttataagagatatttcagctgttttttatgttggtaattgttggagtatattcgaacactaaattttctatttaagaacaatttgaagatcaaaatgatgaataaaaatgacatttatgtttgaatttttaatcttattagataggtataatattagataggtctgctataatttttatttataatcatttttttttggtacaaatttttattcataatctataagcatattattaaaatttcaaaaacttgttcatcggtatgcaatttcaatacattccacaacagatatgctataattgttttcaaattgtaaatttaatctataagcatattattaaaatttcagaaacttgttcatctgttcacacattacattactatcatttatattagcgttaattgcaaaattcaaaaaagaaaatattagcgataattgttctaattgactctgtaatatacgcaatatctgaaaaatgactttgtaaaatagaaaatacatattttcaccctaaacatgcatgtaaaaataatgaaaaaaattcaacatctaggtcgtttttctggactttgtgtatattacaaggtaaaaaataataaaactctcgaattatagatttagaatatgtgctttttattttacagagtaatttttcagacttcgcatatcttacttatagcctgcattttcgacaggctcaattaatgcaatcaatatttgttgagcttggacttttcaggaatcaaagtctttattttcaac

SEQ ID NO: 31611 - DNA, 632 bp, Medicago truncatula
  Intron number 2 from transcript Medtr6g077790.1 (locus Med tr6g077790) derived from phytozome v7.0 (chr-ID MtChr6; po s 15523926 to 15524557)
ttgttacaagtaagatccttatactttgaaaccataaatacttttaattataatctttataaatatgcatgacttgtcatttcttagggtgtatgaagaccgttataaaaatgtgtatcttttgtccaacaggtcaatttagatacaaacttcatcttatatcacagttaaatagatagtttaagggattaaaaattgacaaaaaaaaaaaaaattaaaaaatctgttcaggaaatattaaatgtatgtacttcatggtataaagaagtccttttttaataattcttaagttttggttttgtacttacaataggaaaaattaatttacttcgatctgctactccttaatgtatctcaagaattcatatttccttcatatgatttattaatattttaaactgaatttcattttatttttctcattttgaccgtaacatgtcagaattttttgtttttctgcataatggtttgtatgacaatttcaagagtggattctctcttgttgaaataaacataaagaaattatgtttgaaactcaggcaacttttctctaacgaaaactaagcatttacttgttctttgtctgtacattgtcaggaaaccatctgtagtcatctggctatttgcattgt

SEQ ID NO: 31612 - DNA, 831 bp, Medicago truncatula; identical to SEQ ID NO: 31574
  Intron number 2 from transcript Medtr4g145040.1 (locus Med tr4g145040) derived from phytozome v7.0 (chr-ID MtChr4; po s 36688783 to 36689613)

SEQ ID NO: 31613 - DNA, 357 bp, Medicago truncatula
  Intron number 3 from transcript Medtr5g080550.1 (locus Med tr5g080550) derived from phytozome v7.0 (chr-ID MtChr5; po s 30149403 to 30149759 reverse strand)
tagtggtatcgaggattgcgattttgataatcaaggtctattccatttttataagtttttgttggtcttctttatttctttgttttagattgtttatttaaattatatgttgttgggcttcctctttgcttagttttgataataatttgcagaaataaaagtttttgaatgtaattatatggttggtgtcatatcagtatctaaacatcagacatgtcatcaatgtgaagttttgaatattggtgaatgattgttgggtgcagaacaaagatcatggcaaaagatacaattactttgttgggtcattttaggttggaaaaaggctcgtgtttttgggtactcaacgggttattattt

SEQ ID NO: 31614 - DNA, 649 bp, Medicago truncatula
  Intron number 1 from transcript Medtr7g084710.1 (locus Med tr7g084710) derived from phytozome v7.0 (chr-ID MtChr7; po s 18341535 to 18342183 reverse strand)
ctagtccacatttctggaagaacgtttcaaaactggtatgttatccctctgtatgtaagattgcaattttagaacaagaattgattttaagtgaaagcaaatttaatcattcatgtatgaatatttgatcggaaattgttaagttatatgagatactattaagaagattaatgggttggatagagatgtgatatgtgacataatattatggctttatttgatccatgtagtcgaccatatttagtgtgataaggtttggttgttgttgttgatgtgttcaatgacttcagtaagctaaatttgttcggtatactatgaaattcgtcaagtatcagcaagcttcaacactattagtaaataactagataacgtgtcctaggtttaaactagttagtagtgtgtttgtatagaaaggtcttctcaggagagtcaaaacacaggtgatgccttaatctcagagcggattagtctgcaattgtgagatttgaaatttctgggtgattaaccatttgctcaaaaataatcgctcaaagatgacgatattggtttgtcacggacttatcttatgccattgttttgtagtttttttcaatgttagggaacaaatacttttgtttgaaatgtatgtgaaagcagtgctgccgctgtg

SEQ ID NO: 31615 - DNA, 577 bp, Medicago truncatula
  Intron number 1 from transcript Medtr4g025680.1 (locus Med tr4g025680) derived from phytozome v7.0 (chr-ID MtChr4; po s 6184202 to 6184778)
gcttctttgaaagtattgaacgatgctccatatttaaggatgcttcagtcttcttaagttggcttcaagtgcttgccaacgtaaagattttgaaaattggttactctgtcattcaagcaatagactatgtaagtcactttagtatactttcacttctttattttgatttaaacaatcatctgggtccttaaatatgttagacgatgtcagcgtagtctttgaatgtattacaaaaacatttatgaatctgtcatttgctaatcaacttggtcctgaaaagtgttttatgttaattaaactggttagttgtttgatctatgaaatcaccaacaaattagtcactcatggacgttattgaagtttccatacatttagatattatcgtgacaccgcctcacacattcagtgactagaatgattgttcactcatttatatatatttttttgtttcctcgtttatattttttttaatgttcataacatctctatattcatgcaggatatccatttgaaaatgtctcatattcactctaattgtgcaggaacaccttgcaaatcttatttcgaagaaagtgca

SEQ ID NO: 31616 - DNA, 495 bp, Medicago truncatula
  Intron number 1 from transcript Medtr5g032300.1 (locus Med tr5g032300) derived from phytozome v7.0 (chr-ID MtChr5; po s 13035086 to 13035580)
ttgcttcagggtgttcacgttcaacatttttggtggtgagaaattgcactttccatttccaaatcaccattcatcatcactaggtattctactattttcggttctagaactggtttaattattaatttacttatttatttattttagcattcatataggataaaatatatatttttatctctataaatatttaagttcttcgttttattcccttaaaaactttattcaacttaactacaaaataatttaaaacttttctctcattctctttttctccttcgtagacgctagtagttgtcatcacttttcttcttctcgatttattgaaaatgggtgatttaagtcaactttgatctaaaatcacctatccaaattgtttttttttcttttttagttaagtaagtgattttcacatattttaaatcttatttcgttagtttttatgattttgtcgtgtttgcacgactttgtttgttttgatttctcgtcgagtaa

SEQ ID NO: 31617 - DNA, 970 bp, Medicago truncatula
  Intron number 3 from transcript Medtr4g049590.1 (locus Med tr4g049590) derived from phytozome v7.0 (chr-ID MtChr4; po s 11425418 to 11426387)
gttgtcgaaactccagctaaaggttcggttactacttctctcgtatgtttgagatgtcctttgtctttgtttgatcgtgattttgaaatggatttagtttgtttacctttgagtggaatgaatgtgattcttggtatgaactggttagagtacaaccatgttcttatcaactgttttagcaattcggtgtcctcctcctctgctgaagaagaaagtggagtggagttcttgtctactaagcagctgaagcaactagaacgagatggaattttgatgtttaccttgatggcatccatgtctattgacattgttgtgtcgaatcgttgaagttgttgataataacaaaccatgggatattgatgaatatgctgtcgcttatgttatgatgtttatgatgtgatgatttatgatattatatgatgacggtcatattttgagttattaatgaattcttataagaagagttaattgatgaagtttaggttgttaaatgcacatttttgtattatatgcttattattattgaaatgtgaaatatcaccctttctgtttgaatgttgtctcgaccgtgggtaacgtgcagataatcaggagtaaccgctgaactgagttgatttcttgtgtcgtcgtaggagtcgctctgatacgtaacgggatggagatcttacttgttttccatatgttacgtacttgctatgatttttatgttgaagaactatttagtttggattttaataagttgttaagttgaagccgttttgccaacatgatgttttattaagatattttccgctgcattgagatttaatttgatattataaaacgatttaaaatgaatagtaattttactatatttacgtttgaaagaagtgtagcattcagtttaaggtgttttactctgattgttatgataaattttcaatttgggaaaacagggtgttacaattggtatcagagcaggttggtccgt

SEQ ID NO: 31618 - DNA, 319 bp, Medicago truncatula
  Intron number 2 from transcript Medtr4g078970.1 (locus Med tr4g078970) derived from phytozome v7.0 (chr-ID MtChr4; po s 15583708 to 15584026 reverse strand)
ctatcaatttttttcaccattttctaaggtaaccgcttactgacaattcttgagctcaaatattagctattataatattgaatttttaatttttatttgaattatatgaattttgtttggtgtattcaatttcattgcttggtatgtagtatcagattttttcttgtttataataagtataataatattaatctaatgtgaccactaattcattcttcttaattacttaatttatataattaatttaatttttcgctttttcctatgttgtttcgtttttgcaggaccttagaaagtttataacttgaagtgaagaaca

SEQ ID NO: 31619 - DNA, 899 bp, Medicago truncatula
  Intron number 2 from transcript Medtr4g103750.1 (locus Med tr4g103750) derived from phytozome v7.0 (chr-ID MtChr4; po s 22427637 to 22428535)
ctggcgtgttccttcaggcggagccttaagtcggtgtaagttataccatgtgtcaacatgtggttgatcttctaatcgatccagaacaataactatccactcgagacctggacaattcacgcatatatataataactacctttttttttatctcatatacgcgagatattaattaattttttctcgtaaggaaaaggtaggtcgcgagatgtttggaaagcaaactttccattattagtcaccgcagttcatacaaaagttgcagctaaccgttttaaatgcattgtacgttaccctcttttaccggtttttcaaacatacattaacatcaaccgccaacatcacctctactataaactaatcatattttcgcgtaaaataatttctactacatttaatattttcaacgcagatttaaactaagtcaatacattgtacatggtaagtgtgtccggctaaacaacactactgacactatcatcatgattctgtcaatctcatcaccgactaaatgtgcgtttgattcataaaacgaccactctacgccgccattgttgtttctttgtgtaaaaaagagagaaaaaaaaaatccaccaaagcttcttattacacactactagttgtttgacccacttctactttgtagagagagtagcttttggatttcgtgcccaacttccgcacccattttctctctctatattttctcattcctttcattttcattttcatttctcaagtttctcagttttcagggtttttctctattctcacttctctattattcttaccttcaaatttcgatttctctcatttttttcttcaattttgaaattaattttccctctcaattcatcttcacagggatcacaccgttgctgttccgatcacagagtcgt

SEQ ID NO: 31620 - DNA, 777 bp, Medicago truncatula
  Intron number 1 from transcript Medtr5g078990.1 (locus Med tr5g078990) derived from phytozome v7.0 (chr-ID MtChr5; po s 29288886 to 29289662)
caggtggggtggctttttattgttcagactttgtggtagtaggagacatatttttatggttttctcaatgttggttgctttggtgttaaaccaaagtaaattctgctttaacaatgtgatggtctatttttagataatcttgtcatacttctttttatatatttcgcttttttaaaaaacacacacacactaaactttagtgcacttctaggattagaactcgatccctttcatctatcagtaaggtttctacaatacaagacattactagctatggtaattgcaagatgatattacttgcaaatagaacaacaaatactgatctcataaaaagaaaagcatggaatgactggagtaacaatatatacttgttttaatcaacaaactatctgctccttgttacatttacttatatttcaatgttctacatttcacaataacaaagctcattaaattgcatgtaagtaaattgaaatatgagtggtaaatatttatatcaaaatactttatgaagaagagggaactagatcaatgaataataacattcagactacaaatcttagctaagtagatctcttcatcctcaaggcagacgaaaaaaacttcattcccatgtttgtcaactgtttgttttggttgccagcagaagcatcacagtttttttttttacacgacccttgaaggatctgccgttaatgcagtatcagcaaaaatgacagattgaagtttcaactaaaagcagaattgtgcagcattttggaggacctcaatcaactc

SEQ ID NO: 31621 - DNA, 598 bp, Medicago truncatula
  Intron number 1 from transcript Medtr5g100560.1 (locus Med tr5g100560) derived from phytozome v7.0 (chr-ID MtChr5; po s 40214951 to 40215548)
tttatgtgagaattttcttctcttcttatccactgagatttctctcctgttcttatatatcattcatcatacttgtaatttccttcaattctcttctacttcatacactggaagttgaattggagcccttagtaatacaatcttcatttttcttatttgtcatcctttacagttgagataaatagccttaaatctctatctttcttccaatgatttgaatcaacacataggcattcagttaccatcccaaatgaaaatattattggcaacttagaatcacttgcattaatttaggtcaaacacgtgtctcgtgatgaaaatttgttcaagtttgcgtccttaagaatcttgtgttattagtaatattgaaaaatggtttaacaagtgacattccaccagatatccagaacctcaacaagttgaaaaggtttgttattgctgaaaactattctattgagaagtttctgatgtatgtttttaatgtaatgaatgagttgttaattttggattccactgtctgaaagtttaccttttgaatctttgaggggagtttgattggaagtcctatgttattttttcagtaatcattgttgacatc

SEQ ID NO: 31622 - DNA, 639 bp, Medicago truncatula
  Intron number 2 from transcript Medtr6g018050.1 (locus Med tr6g018050) derived from phytozome v7.0 (chr-ID MtChr6; po s 4510594 to 4511232 reverse strand)
ccagatcctgaggtaagcttttgattttattgtttaaaagtttcctttgtttcattctcctataccaatcaaatttgtaagttgatattataacctataacaaatagaaaacggagtttggtagatcctctagtactatactcgttttaaggtggacctttagtgctggtcggagcatcaagagcgtggtgtaagtcggtagtgcaatttccccaacgaaggtctgcaagcacttcgaagctcaaaccaataggtgattgagttgggttagaggtgcaaaatgaaagggcgccttaattatgggtggaaatcctcatatgtagtcgaactgatactttaatgaaattttttagaggatctaaaataatgaaagttagtatatttcgagggagtaaaaatatatttaacccttgaatttatagaatagtgtgaattatgtatcacaaaaccatacatttttttctgtcagcattaatctgtgtaactaggtgggataaaccgatggaagattttgctcgtaaaataatgatgttaaaatatcaagtgtttagcttctgatgttagaaatattttgttgataaactaatggaatgtttttctccagagccttctttttcatagatatattaggcgggtgtt

SEQ ID NO: 31623 - DNA, 762 bp, Medicago truncatula
  Intron number 2 from transcript Medtr5g009090.2 (locus Med tr5g009090) derived from phytozome v7.0 (chr-ID MtChr5; po s 1907428 to 1908189 reverse strand)
tccatagccaattcagatccgtcgtgcccagaagagtaaggtcactcgtttcttccttttttgagaaaaatgttagtcagtttggagaattgagaaataaataaaataactttacaagtttaaggtggcatgttgtcttattacaacataaaagtagataagagctcaagggcgtaaggcgtaatacattgacattataatatcatgggttgagtacttgagtttattcatactttctcaatggagcatgatttgatcatgcatagttgatgatgtaggaacattgttaattggtttcattaaataagtaactgtaaatttgtttgatgtaaatttgtttgatgatgtagtaacactgttaattggttttattaaataagcaattgtaaatttgtgtgtcatcttttagatatacattttttttttttgataaagctaaaaaattcaataaatgttttcaggtgcagcctgaacctcatacaaaaagtttcagaaacaaaaagaaacaaaccctcctaaaacagcaaggagggaagaaaaacagtagttagaaccagtaataacatatcccaaattttttgtgctgtgttcctctttttttctgctgaagaattaataaattgatttcaagtaaccatgattcacatcacatctttgtaattgggatgaagcaatctttgttggtcccctttcttatgtttacctttaagtcattgttttgaaagctgtctcaatttaagagtaatatttgtaggtgggaag

SEQ ID NO: 31624 - DNA, 789 bp, Medicago truncatula
  Intron number 1 from transcript Medtr4g024760.1 (locus Med tr4g024760) derived from phytozome v7.0 (chr-ID MtChr4; po s 5718517 to 5719305 reverse strand)
gaaatagcaacgattggtgccatcttcaatttcaggtaccatgttacttttttaatgtaaatatcatattttgtttttcatctaatatttgatattatagtagaaaatactatggaaattagactaaggtggtttgaacatgtggacagaatacctctagattctgttgtaacaaaagtagattaattagatggagggtagtcacatcacccataggagagtaagacttagaaagatgtagagattaatgagctatgaagcaaggacacttcttggattaggcgtgtctgacacgacaccaaaacatataattacactgaattatatgattttctcattattggcggtgtcagcatgtcagtgtctgtgtccggatctgtgcttcatagttaatgagttagatagaaatatagtatatgataaaacattatggtgtcgtttgatccatgtagccaactccatttgattggataagccgtggtcagttggttgttgtcgggagaagggtctgtatttagtctataaaagtatttggaacatgattacctccgagggaagaaacctacgaaaactcaataaaaattataggatattggataatatagcttttagaaagaaaaaaaaaaaaagctatattatattgtgctttgagtttactttattccttgttgaattatggtaacagattttatgtgatatactatggttattataagggcttaattaagttgttttgctatgtgtttcgatacagtgggaagaagcctgaatatcttggagttcagaaaa

SEQ ID NO: 31625 - DNA, 291 bp, Medicago truncatula
  Intron number 2 from transcript Medtr4g161200.1 (locus Med tr4g161200) derived from phytozome v7.0 (chr-ID MtChr4; po s 41121522 to 41121812)
cttttcctgcaatccaggtaataatgtctttttcttttactttccttttctctctttgtgtttattggattcttttttttgttttttgagttttgaccaaacaaaaaaagagtatattaccactgtaaccttcaagttaatggtcaaattttttgtcaggaagatctgagatggaagtgttaatgtagtatataagttttagttttcgctctcattatttttttatggtatgattgatcggtttgttatgtctattgacaggaaactctgctggagtttcgtgctggtaaa

SEQ ID NO: 31626 - DNA, 745 bp, Medicago truncatula
  Intron number 1 from transcript Medtr4g093080.1 (locus Med tr4g093080) derived from phytozome v7.0 (chr-ID MtChr4; po s 19590936 to 19591680 reverse strand)
aaattcagattcaacccaagggccaagcgttccaagttagagttttataccttaaaatttgggaccctagaaaatatctcattaaattttaatttagtttcttttaagagtaaaattttaatttagtatggcattaagttagaacactgacattatatatggatgttctaacccacctacgaggtttggtagacccttttgtccctaagcctcaatcgatcgctatggttccactacaccgaaataatcttacattactcgaaaatcaaagctaatttatggtttcactaagacatgttttacaatgacaatcgtgaaaactttgcacaaaatttaaagcagacaatacctcataaatgcgacttgagttcaaaacaaagtttatagtttgtcaattcagaatgagggttttcatatctaaatctgttcttcgtcattaagcaacacttatagtgttcttatatttcacttatttccacctgctcctctttgtttgcccctctgcctcactatcaacctttgttatcccttattttccactgttgatcccccctcatatgcacctcatcatcttatcttttgtgcttctttgatccatcttttaaaaggagatattttgaaatattgactttatgtcttttataatatctagccaattttaaaagttgatgtgcatgtatcaagtacattaatgccttctttaaaaaaatagtgctgcatcaatttgctttgaatgattaggaaa

SEQ ID NO: 31627 - DNA, 1047 bp, Medicago truncatula
  Intron number 2 from transcript Medtr5g099310.1 (locus Med tr5g099310) derived from phytozome v7.0 (chr-ID MtChr5; po s 39700997 to 39702043)
tacttcactgattcaagcacagtctatcagagaaggtaagttcaatactaaacagtacctcattttctacaatcaactctatctgcattttgttaaacaacattgcttttgattacaaacaatttttttttttacgaaatgcacatcattttatttaagggttgtttggaagttcggaggggagataagggctctaagtaagggaagtagagagaaaaagagagaaatattaaccattttctatagtgcttttctagattagaataaatgaatccttacaattaatatatatattttaaaaatattttaacaatatagtttaaaatttgaagaatttatcggaatcattcataacccttcaaaatcctcctccaataaatttttttagttgccccaaattagatgagtttcatattacaaagaaaaataaacctctcaaaaccctcgccttcaaaaggcttaaattcctttcacttactcctttattttttttaagtcctcccatacatttcctactgaactcttaagcgaaccctaaatatatagtcattatgattttaaacggtcaccacatagtatgaaatgaattttaaaatctatccttgcatattaatttgtagatttaggaagtaagagtaccggtacacttcaattacgagtgtaccatagaagtttcatgtatatattcccttgttaagatcaaatcatattgttgtttcgaaatgctccaccacatattcaattacgaatttacgactacatttaatagtaaattattgtatcacatcacacataaaataaagttgtgtgctgtattaagcatatcttttataaagctaaagataacatcaaaacacatcaataatatttgaggttataaggagaataatatacaaggattgaagttcaaatcttaaacttctcacttcttcacatttaaaattaaaatatgcaagcccaaaaagaaaatgagtgataaaatgatctatatgttggtcatttttgtttgtaggcaaattccgcttttacttctaagtggagacaaaa

SEQ ID NO: 31628 - DNA, 456 bp, Medicago truncatula
  Intron number 1 from transcript Medtr5g094840.1 (locus Med tr5g094840) derived from phytozome v7.0 (chr-ID MtChr5; po s 37581944 to 37582399 reverse strand)
cactaaagggtggtctcaagattttgtcttaggtccttctttcactgattcatgtaagttattattcatccttataattttcatgctcttgttttgatttgatgcatttctatctttctttgacattttctatgatttttccaacagtttcaatatattatttagcatgaaaattatttataccaagtcagtgctaacctaaaatgcataaccataaaaaactacactagtaatcatgttgaggatttatttttttcttcatatttaactaactataataatttttagtaaaataatagcattattttcccttcatcctcagtcaatggtcatgatatggttttatttcaatttcaaatagtaaataaatgaacaaaacaagcaaatgcaatcatgtcctcaaattatcataataaatatgattttatttgactttgaatttgaatttgcagctta

SEQ ID NO: 31629 - DNA, 623 bp, Medicago truncatula
  Intron number 1 from transcript Medtr5g048810.1 (locus Med tr5g048810) derived from phytozome v7.0 (chr-ID MtChr5; po s 20679726 to 20680348)
aaattatacagcgtttcttttgtgggaggtcaaatgtacgatatcaggactttatatatttttgagcatgaccaaatattagtagaactccatgattgggaaaggacacaacatctaattgtttacgattccaaaattgatactttcaatattcaagatattgaaaatgggagtttgttgaagaacccaaaagtctacattgagagtttaatatcaccttaagcatgagactcagctgcaacatagatatggttagtttctgtttgtgttatttattttgccacttatgtaaaagaattcggtggctgtatttgtgttttggtggcctcattatggttttaaataacatttggttggttttgaagcattttgattatgagacttgttgcagtttgctggtttctggttttattatattttggacttgtttatttgttgcaggtctactgattttctgggctgacttactggtattcttgattgttgttgttattgtcgttgttgttgtgagggcaaagctagcaaatacatgaagaatagcttgctatacaagaggattgtgaggtagacataaatgtagttggatattgatcttgattctcatgaggcagcaggctcctagc

SEQ ID NO: 31630 - DNA, 486 bp, Medicago truncatula
  Intron number 1 from transcript Medtr4g128490.1 (locus Med tr4g128490) derived from phytozome v7.0 (chr-ID MtChr4; po s 30261069 to 30261554 reverse strand)
cacgttcattttcctctcttcaatgtaatcatcttaacttacctcaattcacattcaaatgctgcactcatgcttttctatatatcttaatcttttttcttcatgctgttgttagctaaattttgcttggtttttatataattgggcttgttttatgtttatttacttgtctgtgtgaagaattcaattatttttttatgaaagttgagctttagatttgtattttggtctggattatgctgatagattgattttattcattcactgatctatcaaaattcagttgataaaatgttttattaaatttaattgttgtatcttaataaattataatatatatttagaaccgactttgattgactttgcaatgtactgaagattagactgtgtttgccaatctatttcacaattcagtttttgcccttttaatttgttaatctgttctgcttttgcaatggtactttaatagttttttgtcagataaaa

SEQ ID NO: 31631 - DNA, 653 bp, Medicago truncatula
  Intron number 1 from transcript Medtr4g025300.1 (locus Med tr4g025300) derived from phytozome v7.0 (chr-ID MtChr4; po s 5993464 to 5994116)
ctgccttaaaagcttacatagacactgttaaatccgtaagcaccgttcaacctcaacaacaagtaagatcaatcacatattcatacttgtttttctttcatctttctttgtccctttcttttttccattttagttaccttctttgtaattgtttttttgttttttaatttctcaaatatatactattatgtaacgtacatcaagaacaatcgtaacatttttcaatattcaacatcatgagtaaaaatcttattcatcaaatcaaattattattgataagtaaatgatccccttcaatcacatatgtctacataattttctttcttgaattcttttttctgagtaaaaaatatctttctttctttattactcccccttttccattttcatttccctctttgtatattttttttcttcttatatatcaaattatttattagtttccgcaatcacatcacatgatagtatgtatcaagaataatcgtaattaatttttttgacatcaagaataaatcgtaatcaatgttaacacgttgttgttatttgtcttaatttctattaaaaaaattgatgatcttttaatatggtattaattatttgagattttctttattacagtgtgagaaattcaaggaatccggagtagctgagct

SEQ ID NO: 31632 - DNA, 668 bp, Medicago truncatula
  Intron number 1 from transcript Medtr7g040960.1 (locus Med tr7g040960) derived from phytozome v7.0 (chr-ID MtChr7; po s 10370452 to 10371119)
atttgctttggctgccgtctttcttgcaacaatttgtgtgtattttaactacttttctcacatttatataccatgcatttctttttatatatgttagaaaactcatgggaaattaatcagaatcaactataaattaatgaagtaatatgctcataagtaaaatgtttattagaataaacatgtaaatatatttaatatgttgtatgtatttatttattttcttctactaagtatgtaacttatttaggaatcatatgtcaaaatcataactgtgctaattaaaaaaatcagtattaatataatttgtattagggttaatagtgtttttcactcctataatatatgcgattttcggttttcgcctctataaaattttcggtttgatttgcatcctcgtaaaaaaaaaaatccgaaaaacacccttaataggtcattcaaaaaccaaaatttcttgaaatttttttttctgaaaatggcctattaggggtgttttctgaaaattttgttttttacgaggatgcaaatcaaaccgaaaattttataggggcgaaaaacgaaaatgacatatattacaaggtaaaaaacactattaaccctttttatttttatcatatcaattgtcatatgtaattgttccaactttaactgactttcccatttgcagtcat

SEQ ID NO: 31633 - DNA, 562 bp, Medicago truncatula
  Intron number 1 from transcript Medtr6g031150.1 (locus Med tr6g031150) derived from phytozome v7.0 (chr-ID MtChr6; po s 7122216 to 7122777)
ggccactttttgtgcttttgctgtctggactgtaagtgagttctgcataatattttttttattaagctttctttttaaatatcaatatcaacttttcattcattatttgatgttttaagctgtaacactattattatataacaatcgaaaattttaattatgttttttttcttcttagtagagactcaatttaattatgttaagcatgaccaaggacactcaaaaatagaaactaccctttttagctaattaatttattcaatggtatatcactcttttttcattatttgttcattttaacattataattgctacccctttattattatgtgaacatttttgacaccaagttagaactattggcatttcttagcataaataaatgttgtgacatataattgatctatgaaggagctagtctaatattggatttttatgttattttttgtttatagaaaaatgttggtattttctttttgaccaacaaaatctaatattgaaattatttttaaagtacatatttgcaggtgtttcatttccattcatccacaaagacagactc

SEQ ID NO: 31634 - DNA, 578 bp, Medicago truncatula
  Intron number 1 from transcript Medtr4g157100.1 (locus Med tr4g157100) derived from phytozome v7.0 (chr-ID MtChr4; po s 39073358 to 39073935)
ccagtcatccttattcaactcaccctagagaggtacctttcattcttcactctctccaattcctgttttttagattcaattctattttccatgtgattttacttttgatttattcaatgttcataagacaaagttcaaatatccaattcaattttaagtttaatgaaattgctacatgtaatctgggtacattacaggttatagggtttaagagagtgatacaataatattaggtcatgtttgggtaaacaacttaatttgcagcttatagcataagtgcttatgaaaataagctgtttctattacaaaagacaaaataaagttaatccgtttttgtataagctgttttcataagctattgtggacagcttacgaaaataagcttaaaggaacttatgaacacgtcgtaagctgtttttataagttcttccaaattgtctaaaaatgcatagataaattcaaataaaccaattcaaacagctccttagtgagcttgtggttcagttttccacgttttctctgattgattgcattttgttgttgtttcagtggccccctttggttgaggtagcaaatac

SEQ ID NO: 31635 - DNA, 858 bp, Medicago truncatula
  Intron number 2 from transcript Medtr5g009830.1 (locus Med tr5g009830) derived from phytozome v7.0 (chr-ID MtChr5; po s 2244765 to 2245622)
ttcgtaagaagatgtaatgccttttacatattttttatttttatctataaattgatcacaaaacttatatggattgttatttacttatgtgaatggtttataagttatgaattctcactttaattctcaattgtataagatcatcaaggttttcatattgttttggatttatttggtatgtttgagtcactgaatataagcttttcttacactgccattcaattataatagttggatttggtattaactatttaaaactcacagattcaattggttgtaattgattgacaatgtaaaaaactttacaccgacagtgcatccaaagtaaactcgttttggatgctctgtcggtgtaaaaatcttgtatactgtccttcaattacaatagttggatcaccgaatatatttgaatttagtattaactattttaaaagtcacagatacaattggtagcaattgattggcagtgtaaaaagttttacactgaactgtacatcaaaattaaactctagattataatgactatgatcttttctcatagaccatcggtaaagtcgaacagatcccgccagcactaatcatatagtgcatggtgcaccctagcggtattattttcttcattttgaaatattggtttatgtcacatatcgctgattaatagaatttggtattttgcaaagtatgatgattgatgaaatttctttcttataagtgagatttagagtttagttttgtacttttgttgagttttttgtttttcttagtcaaatgctttgtatttttctttttctaacttgaaaatggcggtagttgagataatttaaatttcacacatttgtttgttgcagcgagtactct

SEQ ID NO: 31636 - DNA, 302 bp, Medicago truncatula
  Intron number 2 from transcript Medtr5g023350.1 (locus Med tr5g023350) derived from phytozome v7.0 (chr-ID MtChr5; po s 9195172 to 9195473 reverse strand)
gtgggtgcaggattttaactgagataaacaagttagtaaatggatccaacttgcaaacttttgaccttcatttcagtttcaatatgttgtgatatcttccattctaagcatgaataatggataagttttttttttgtaatatttggttgaaaattaatttgcctatttaatatttgatatttgcaaaaacacaactcaatatgagaaaattattttaattttaagaataaatattttaactaaaatagtagggactttacctaaaagggagtccttccaaaaattctcgaaggcagttgcac

SEQ ID NO: 31637 - DNA, 809 bp, Medicago truncatula
  Intron number 1 from transcript Medtr5g023350.1 (locus Med tr5g023350) derived from phytozome v7.0 (chr-ID MtChr5; po s 9196481 to 9197289 reverse strand)
gagtggtaataagttttgtttcataaactagaaaactatgaaattataaaagatttgagagttaacagggaaatgattatgctgggattaaacttcatcaacctattcatacgtattctcggattagtgttgcatatcctaattatcaattgatattatcacatattgctcgacaacatcattcgtgtccaaatgatgtcatgagtcctattgaatcgttcaatcgtcgatttcccaaactaataaacgatccactagtcgattgcatcattgtatagttgatttcccaaactattcaatgatacaaaagctttaagttccaatattcaaagtgattatcaagcttaagttccatgtctagaacctaagcattaatagaagattattctaaactagattcaaaaggtatttttcaataacaattcaaatccataggattaaaatgaaaagcaagaataacatcaatatcttaagataatttagaatcacacaacgtccaaatcaaagggaatacatactaatagagttaactacatttaatcccaacaaaaagagtttagctactcattttcatggtaaccttacaaggagaaaagaagagatgaaatgtgcaagccatgatgtctcaatgatcttggagatcccttcaatccttgtgctccttgctccttaggttctctctggttttcccctgttttctctccctcaagtggcctatgatatgataaatttttcttctgaaatgagtaaatggccttttattcgccatggcaggtaatttgctcgcctcgcgagttgagctttctttc

SEQ ID NO: 31638 - DNA, 592 bp, Medicago truncatula
  Intron number 1 from transcript Medtr7g087710.1 (locus Med tr7g087710) derived from phytozome v7.0 (chr-ID MtChr7; po s 18851514 to 18852105)
caggtaataaactcaatattaatttggattctcactctctaaatcataatcagatttaattgtatatctacagcagaaatgagcttaggactgcaatccttacattttttgaaaacgtaggaaacttactcgttggacttgaatggtaaacgagcttaagttaaggataaatcatttaggagaatttgaattcgaatcctacctacaaaaaagtttggccatatttacttatcttctgaccgaactagaattaccatggctccattccgttaggaaccaaagagttaaggcccaattttttttttaaaggattaccttgatgtttttctattttgtatgactgaatatatttgacccttgatttattatgtaactcttatgttataaatagaagatgccttgcaagttttctattaaatatagtacaatcaagttttctagagttcacaattgtcacattgcatcacacatataacatgatcagaagtacatttcagttacaaatcatgttcatttgaattattttagtcattgatggattgattgcatacttgcagagatattgtgattgaatattcacaaaaaataaaga

SEQ ID NO: 31639 - DNA, 738 bp, Medicago truncatula
  Intron number 1 from transcript Medtr5g097900.1 (locus Med tr5g097900) derived from phytozome v7.0 (chr-ID MtChr5; po s 39013105 to 39013842 reverse strand)
ttggagaagagtaagttctttgaactcataaatatcatataattgaaccaaaaactatatactatttcaatgattctcactttcatttctttccaacccaccgaaactagggtcttataccaccatagacgccttaatgttttccgacaactcacatctttttagcccactatgagactaatctttgagtcggctgcgagacatcgatttcttttttttttttatatggggttgaactacctctcagattgacttcaaaaattgaaattaaattcctttcttcgggaagagtgttaccaactccctggccatcatgttggtttcttaataccttctaactaaagggcttctcacattttgaatttttttattgatagaaataaataaaaatagttaaataaaaaggttttccttttcgtgatcggtacttaaactatttgaaattttttaaataagcctttgaacattttttttataattaaatccatgaatttgtcaatacattataattttcccatggctttaattaggttcataaactttttaaattatttgtaatcaatgattattgacaagttcaaatatataattagtaattacaaactttttttagtctaattagaattctcaaatagttcaacatgtagtaaactatttaattcaattgtgcattattctaattgtttcttcttgttgaatatgatagtgctagaagaggaagagtgtatctccctcaag

SEQ ID NO: 31640 - DNA, 663 bp, Medicago truncatula
  Intron number 1 from transcript Medtr4g111790.1 (locus Med tr4g111790) derived from phytozome v7.0 (chr-ID MtChr4; po s 25658560 to 25659222 reverse strand)
gccttcaagatttgattcctcatcttgcttacaaggtaaattgattacattcatttttaagattggtcaattagtttacgttaaccatttttcaatcaaaattttgtgcatattaattaatcctttcataaaatgtgcaccaagtcctcgaagagtgttttggtctaattttatcctttcaaatatattttttttggagagattttctaagtaacaatttttcaatttacatgctcaaaatagtttcttaatatatgaagagaacaaatattttttattctttgtaccatggcgggacaactttaacttatttctaattaattttatctgtctactgatgtcatccaagaaaaatttgcacgtcactaaacatatatggcaaagatatttaaacttatatgaacctccatgaatcgattcaattttaatagagaaatcctgctttgactaaattcaaatatggacttagatttttctcaatggtcaaaataattttgactacctccgggctaaattttaaattactaaggtctctttccgtcaagaactgacggattaatacaactaaaaaaaaagttgtaaaattgatttaattactaagatgctttgtgttttatttccttggcaggtagattctgtaaccattgtggaggaaacagtgaa

SEQ ID NO: 31641 - DNA, 536 bp, Medicago truncatula
  Intron number 1 from transcript Medtr5g082730.1 (locus Med tr5g082730) derived from phytozome v7.0 (chr-ID MtChr5; po s 31177941 to 31178476 reverse strand)
gcaagtttctcttgcactgcatcacattgtgggtactgccacaaacatcttaattccaaataacctatatatgtcgctattagtgtctttgtcgttattggtgcagttttcttcattgttactgtcacagatgtcgttgtcgtcattaacgtcgattgtcactacctacttttaatgatactactttgctggattttgtttttaagctttgtgttgaatttttaagctctgcagagcatcaagttatcactgtgttgaattttttatttaatttaatctcatttcttttgattataaaggatatgttctcttgacaaaaaaaaatagagagataatcaaaataggaagcaattttgccattctctgtatctgtcatcaatattgtgttattttctgatttggaattctagtactgttgtgtattgtggttgtttgtgctgtttggttttgcagttaagagttattaagcaattttcgtttattatttatgtatataggtagcttttcgggaggaggcacgactattcttggaagag

SEQ ID NO: 31642 - DNA, 627 bp, Medicago truncatula
  Intron number 1 from transcript Medtr4g121190.1 (locus Med tr4g121190) derived from phytozome v7.0 (chr-ID MtChr4; po s 28315044 to 28315670)
accaggaacgtcttctcattatcctcaaggtgcatgctgctacattcttttcatttcgtttacctgtttctgattccggtagtgtatattgtgaattaatcgatgttaattagtgtagaatgtttttatatgttttggcgctaatgaatctttttcttgcgcaaaattcataacttacggttcttgaatttcacgactctagcatctttttcacatttgtttactacactgtgctcgttaatatacgcattctttctttattcaaagctttgatgattctgttatttgattcatggaagacattctttaatatgaaagtttagacgtgttcttcaaatcaactgtgtagttaattgctatgtaaaatgaattgttagctgttcaccttggattggtaatgactttaggttatcaaactcagaagcaatttgcaaacacctttgtcgcaccatgtgattgcattcaattaattcattttttccccaaatatttaccggtgtcacgtataagtgttgtgtctgtgttagtgcttcattggttggtgtactttagtaggatttctttgaacctgtttataatttaattctttggttgacgttatttatgctcaacagtctcagttacgtc

SEQ ID NO: 31643 - DNA, 307 bp, Medicago truncatula
  Intron number 1 from transcript Medtr5g099030.1 (locus Med tr5g099030) derived from phytozome v7.0 (chr-ID MtChr5; po s 39566782 to 39567088 reverse strand)
acattcttcacctactgttcagctacaaacccaaggtagtcatcactctctctgccatctacctttcccaacctctttttgttgtttctttgtttttttgtgtttagtttactacatccttgtatggtatcctatgttttcaataactgttgctttcttttcaaaccctcatgttttctttgtttttctttcaataacaaattggtaagcaaaaaatagatcttttccacatatggtatataactctgttgtagttgaagtgttttttttatctgcaggtacatttttatctgaaaatcatagcaaa

SEQ ID NO: 31644 - DNA, 454 bp, Medicago truncatula
  Intron number 2 from transcript Medtr4g134800.1 (locus Med tr4g134800) derived from phytozome v7.0 (chr-ID MtChr4; po s 32579441 to 32579894 reverse strand)
aggctcgcggtgttgttgcgtccttctttaaggttattttttctttcctttcctttgatttcaatgcattttacttatcattattaggtttctttaatagagttatgtttttttcttcggaaattctttacttagagttatgtttttcatttagtttttaaatgtctgcaacgttgtcaattgaatgaaactaattaagaaaaatgaagtggtagaaattgaaccaactaactcttcactgcatatataggaaataaggctaaactatcgacagtggttttggagacaaatgatcacttaggcccagatatgttgttattgtatcatacttccctgctttgcttgcttaatcttcgttcataatttcaattgcattttcacttacttaatgactatgagtcaatattttgacattttaggttttggttttggttgaggctctattagctacttt

SEQ ID NO: 31645 - DNA, 691 bp, Medicago truncatula
  Intron number 1 from transcript Medtr4g134800.1 (locus Med tr4g134800) derived from phytozome v7.0 (chr-ID MtChr4; po s 32579924 to 32580614 reverse strand)
ttcgagaagattgcggtcttcctaagggttatttccccttcctttgatttcagtttcaatgcattttacttattattcattattggatttctttgatatgatatagggtaggtattgtcgtatgattttctcttctaaaattatttacttagagttatgtttttcatgtagtttttaaatgttgtaacattgtcaatcgaatgaaaccaattaagaaaaatgaactggtagaaattgaaccaactaattgttcattgcataggaaataaagctaaattgtagattattgttttggagataaatgaacgagtaaccataatagtttttcaattatcgaaattttaaaatggtccttgatcgtgcactctgatatgattgtattgtcagagcattggactattttgaccaacggagtacattattagggactattttagaatttcgatatattgagagactattgtggccactcgttatccattcaggacgaaaatgaatattttcccaaatgataacttggacctaaagttgttattgtatcatacttccttgctttgcttgcttaatcttcgatgataatttcaattgcatatataccacaacttatttgttaaaatgtacttaatgaactgtgagtcaatgttttgacattttaggttttggttttcgcttctgaaagcgcgcgcttctc

SEQ ID NO: 31646 - DNA, 404 bp, Medicago truncatula
  Intron number 1 from transcript Medtr4g142630.1 (locus Med tr4g142630) derived from phytozome v7.0 (chr-ID MtChr4; po s 35557895 to 35558298)
aaacttcatcaccaaacatcttctgcccttctacggtattgacatatttgtgttttattttttctgttacactttgacatatttggtttaatttgtttgttataggtataggagtagtttatttatttatttttataaaataatcacttttaaaagcatcttttacgacagatattttttttaacaattgtttttttaagatcatctttaaaagattgaatatcaaacatttttttttatataatttgaacaaaaaatagtaccaagaggaagaagaaaaaaaatgaagttatagtataagtttgattttatgttaataattcagtacagctgtatttggatgtatttatgaaactatgctatatgtaggtaatacccatacttgtgagagttacgttggaaac

SEQ ID NO: 31647 - DNA, 560 bp, Medicago truncatula
  Intron number 1 from transcript Medtr4g028940.1 (locus Med tr4g028940) derived from phytozome v7.0 (chr-ID MtChr4; po s 6763252 to 6763811 reverse strand)
gatcattgctggtgagagggccatcaaagttccaggtattctaatacttattattaatatatttgattaatcaaacatgtcgtaaatccgagcataatatacaatattcaatgttctgtttgcttagactattgattcataataattgaacatgtttttataaaatatgttttcatttctaacattaggaggccataatcacattcaaaatgtatttcgaaaatgaaatgcataattctccatgttttcttagtttatatattgatttatattactatgctggcctttgaacatgatcttgttgtaatacattaattttcttttctatttaagcaagttatttgggaatgtcacccatataagctgattgaagttgatagattcatgtcactaatttacattctgaaaaataacttgttcacaaaccccatgtccctatagaccttatgtttatgtatccaacattatcgaaaagatttgaattgtgaaatattatagctcattttttatttcttgttattttaggcaaagccaaatatttcagagttaatcgcagagag

SEQ ID NO: 31648 - DNA, 343 bp, Medicago truncatula
  Intron number 4 from transcript Medtr4g144730.1 (locus Med tr4g144730) derived from phytozome v7.0 (chr-ID MtChr4; po s 36515009 to 36515351 reverse strand)
ctttctgcctgatatagataccgtatccggtgccggttctatcactctctatatctgtttgtgtgtgaatttacttcatagacatttttttattaaaataaaatcatatgcattgtcagtgtaaaaaagttttacactgtcaatcaattacagttagattattgaaaacgtttgactttaatcctagctatttctaaaataacacgtaagattggttgtgttttgctgatagtgcagaactttttacactagtgtatacatacatacatacatatatacaaagacattttttcttttcttgttgaaaacatgcattgacaattatttgattgttgatttgcag

SEQ ID NO: 31649 - DNA, 679 bp, Medicago truncatula; identical to SEQ ID NO: 31468
  Intron number 1 from transcript Medtr7g077870.1 (locus Med tr7g077870) derived from phytozome v7.0 (chr-ID MtChr7; po s 16542391 to 16543069)

SEQ ID NO: 31650 - DNA, 605 bp, Medicago truncatula
  Intron number 2 from transcript Medtr4g079590.1 (locus Med tr4g079590) derived from phytozome v7.0 (chr-ID MtChr4; po s 16061465 to 16062069 reverse strand)
aaccgtcttgctaaattaaggtaattatgtttgatttaatcgcaaactgattgtttaaatataaagaaatcccagaactttagaaaaaaaacctacatcggttgctcaactaagaagcaagcttgacttagctgaaaatttctctttaggtttctcttagaaatcgtggttgggcctaacacaaccccacaaaaccggcttgtggggtgaggattgcccccacttataaacacattgtcaggccatcttctgtccgatgtgagactcttaacagtttccattttttctcccagtcacccagaaataaccaaaatacccccaacagcagttaactgagcaattttcgacttagctgttgaggacttgaaatgccaaaacttgtgaacagaggtagcatcagttcccaagtgaggattagtcttatccaaagggaatctagaattcttatgagaccaaaaatagtgctattcaagtattaatttctgttgatagttatctgctagtgtatgcattttgatgttgcattttgaatccattagacggcttgatttacaagtttatacggccatttttgctctgatgcagtgctcggtggataggtaatc

SEQ ID NO: 31651 - DNA, 869 bp, Medicago truncatula
  Intron number 3 from transcript Medtr5g101000.1 (locus Med tr5g101000) derived from phytozome v7.0 (chr-ID MtChr5; po s 40398646 to 40399514)
gcccgggacagcatcctactcaggtatgagcgaatttgtcgcgatatagtttagtattgcaaaatccaatgcttcacaaagcaagtaaatctgataagaacataggatgatacatttttacaatcttttttctagtgtggtatattactcggaaatttgaagggagaatcccttattttgctgatgcagtcataagggttttaaaacagaagctaaaacctaaaattaccttaaaatatactttagttttttatgcagtgttttctatgttgatgcctgctcaaactattaacaggcaaattgctagggctggctgtaattatcattattattttgtctcatgtgtatgagtgtatcacgtttattatgtatataccaggttctagctgtctactatatatagatttcaaactttcagaatattttaggctaaactttaagatagaatctcctataacctcttgtgtatttgtaaatcatttaatttctgtctattgaataaagaaaagccacattaaaccctgtaactttatctttagaagctcgcttgattgacttttatcgtgatctctcttgttcttatttaccaactgacaagatggtgatttgaagtttgtttactatttaagttctttgtcttttagagcaagagaatacaaacattgcaaatttcgttttcaatttttatcatttttttgtgcatgctactaaatttataatgacttgaatggtaaatgaatgtgaaatggatggtcgtatattttctaccaagtgttctatcatcatttctatcttttaaaaagtaaatggatggtgccttttgaaatttgtcaggcacttttagacatttataccattgaaagagagat

SEQ ID NO: 31652 - DNA, 914 bp, Medicago truncatula
  Intron number 1 from transcript Medtr5g097600.1 (locus Med tr5g097600) derived from phytozome v7.0 (chr-ID MtChr5; po s 38905188 to 38906101)
tgcaagagggggtttgtttgtttcttaacaacaaacaaggaaaagggtaagaactttggtagtgagaggaaaagagtttttgattagtgcaaaggtaccaacttctatttgttcctttctcacatagatttctgctagaacaattttatcctcttcttcatttgtctatgtatatgatcgcatatatagttgtgccatgatctctatatttgacttttttttttttttttataaactatttttgtattcatatgaatttgagttatttgacttcactttcaagacacttcaataatatataaaactaacttttgacaaagtgttgaacattcttctccaatattctggtcagtccaaaatagttgttgatatacatatacttgttcttattattgttaaaagacaagtttttattatttgcaaggctccatttgaatgaatgattttgttttaaacttgttcttattattgttaaaagacaagtttttatcatttgcaaggctcaatttgaatgattttgctttaagtttgaatgtaatatgcagaaaatcatttttgtgtaaaatttctttttcaacttctatttgttccttatgatctctatatttttgggtaaaatttcttatgatcgcatatatagttgtgccatgatctctatattttccttttcttttttttataaactatttatgtattcatatgaatttgagttatttgcacttcactttcaagagacttcaataataaaactaacttttgacaaagtgttggaacattcttctcccattctggtcggtccagaattgttgttaatgttttgtataagctaagcttgctctatatattgtacctccaatcattcattacttgttcttattattgttaagagacatttttttttttccttcagaaaa

SEQ ID NO: 31653 - DNA, 1036 bp, Medicago truncatula
  Intron number 1 from transcript Medtr5g099550.1 (locus Med tr5g099550) derived from phytozome v7.0 (chr-ID MtChr5; po s 39836401 to 39837436 reverse strand)
gttattcccactcggaccgagacataactttacttgttaaaataacaattaaggtgaagcagagtcggaaacaatgaatcccgatatgataaacgggttcattttccaagttcgttattacgggtagttcctacatgcgtttcggcacatcttggaaccggatgcgcctcatgtatgtgtgttgtgtggtttgatggtggaggcgtcaacacatcttttccttcattgtgatgtatctgttggtgtgtgcaagtgtgagttatatgtcccacatcggataaaatagaaaaggttgaacaccttataagtaagaggacccataaacccattgccttgaggttttgggtaagagtgtggtgtctctcttgcttgtgcggttgttctagcctcgatgtggacggtcccccaggcctccctcatgacccaacaatatcctctctaatttggcgtgaagtcttggattggcttgagattaatttcattactccataaaatcttgatgtggaggagattgtggatgatatcaaagcggtatcttgggtttgggcgtccactcttatgagtggacttggaatcctaaagagtgtctaaatagaagatgaatatggaggtttggtattttcggtcctttcagctgttggtctaggttccgttgatgcagtttggcattttagggagcgcatgtatatagctttgttctttttggtgatttggcttgttgcctccctgtatgatgcgtttttttctgcactttccctatgctgctgcatgtttgacagtaggcaggggcttgtttttcaattgtatcagcttgccattttgcacttcttgtgcttggcttatcaatatatatgccgattaaaaaaaaaaattatacatcttatccaattttttctttggctggctccgacttcaacccttatgttcttagtttatttgtataaatatcaattaatgtttcaatattttatcagctgcatgaacatatattgaacttgtagattgcagaagtttctctctttaagcatcctagtct

SEQ ID NO: 31654 - DNA, 847 bp, Medicago truncatula
  Intron number 2 from transcript Medtr7g026630.1 (locus Med tr7g026630) derived from phytozome v7.0 (chr-ID MtChr7; po s 6874482 to 6875328 reverse strand)
agctggaatacatacatttctcataatcctcaaacgtaagtaatatagcgtgtgtgtgctgctaggaaaagaaaacaatttttctttcataacattaaatagaacatagaaatctggtaatgatatgtcacattaacatcaaagtgctactgcagattcaaaataaaggggaaacaaattttaccccaactcctcttagcagtagcgcccatcttgcagtacatactaaacttcacatttctattaacaacttaaagaaaggaaaccaaagtagatatatacataacaagataaataaagaaatgaatttacccaaaaaaacaacttaaaaaacaaatttgatggaaggatgacacagaataaacagggtgtaagaatattgggctgtggtagttgggcccaactatggactagcccaaaatcttctgggcctagcccacatgtacataagtgaatgcaatatagggtgttttattttagggattgagattcacgctgagggagaagggtcagtgtagaactgtttgacagaaatcgggatgttaaaatcattgtgattgaatgaataggtcactgctgaataattgtaagtgatacgttgttgattgaatttagttgtttgatctaatctaattatttgcatacaaaattgttgattaaatttcgttataatctcaattgtgtgcttcttcaatcccctttagatttgacacctaaacatgtagttagtaacattcaaccacttcgattttcttaaattattatcggtgattcatagtatgttattaacctttgctgaacatttatgattagtttatcagctgttctagttgctttcactacagaa

SEQ ID NO: 31655 - DNA, 886 bp, Medicago truncatula
  Intron number 1 from transcript Medtr5g033220.1 (locus Med tr5g033220) derived from phytozome v7.0 (chr-ID MtChr5; po s 13545823 to 13546708)
gttggtaagatgatatgtttgtttccattctgggggggtagattcattcaaccatgtaagatttgacctgccacgtctcccatcatagtttttttgcttatgaagtgtttttaatttttttttattttaaaattggcataattaataattgcgttgttgaaagtattgagttttaaatgttcatattatgctatatattacctgcattatattggtccgagattctgaacccttagacaaagtcttgtgttctagtcatgtgaatctatccaaccaaaggtagcaaaccaaattttttaatagatattaattttcgtcataacgggtagatatttcgtatcaataacatggttaacaaatataatactaagtgatttagttgcgtaagcaacattcaactaaaactaaataacaaaaaaaaaaaattcattaaatgtttactcaatttaccaatatgtttgtatttacttttctaagtgcacttggaaaagaagcatatatagtaattatgtcttcgaatgtgtgtaaaagtctaaaaagtattattttcaatacaaaattattgtatatgattcttgaacaagtgttttaagggaacttgttagcatgatccattttgtaaaaccttggcttggaaattagcattcatgttgtgcttctaagtcaaagtctaaactccatgggaagtaggtgaatctgtgagattttcctttttgtcccaattgaagtaaacagaataattcacctttagtgtttatgtgtttgaatttagaagatacaccatcagtaacagttattcaaaactcttgatataatataacaattattataacttataatgtttggtatttttgctacatagagaacttgattggaaaaggtggtc

SEQ ID NO: 31656 - DNA, 723 bp, Medicago truncatula
  Intron number 1 from transcript Medtr4g028550.1 (locus Med tr4g028550) derived from phytozome v7.0 (chr-ID MtChr4; po s 6590798 to 6591520 reverse strand)
ggccgggtcattttttctgtccctttccgtgttttactgcgtcctacgcacatattttcttctggccaccctccgggcacttttttactttctttctttaggcatagtttaagcatccccgcccttctcacaaaggatacaagtttgattcatagctgttacctttcactaagataaaaatcacgcctttttttaaccaaataaatatttgggcccaaacccgaaaactcgtggttagttttaattatgaaccaactattaggccaagcttacggtttaagccaagttggcacgtttttatctgttttcccaagtgtgatatttacccaactctatcgctttcatcgttgagattgaaataatgggatcgtttctgggagtttcacaaagctttcgtataagtctcgaagaggatacacatgggtgctttcggctgtgttttcacgtaaaccaaagacacaatgtcagaatgtcatggatatttggctcaataaaactcccaaactcggcaacgtatctgggatgattttctttttaccggcattgcgactatgattatgccaccgattattttatgaatcactgtctcagttgttctgtggaggggccaggtgtgcagcgtgtgtgtagtaacaatgtgtgtccccgcacgtacttgcgtgtgtgagttataacataaaacatggcatgagttcatatttcgaacatcgatctcaaaatttc

SEQ ID NO: 31657 - DNA, 896 bp, Medicago truncatula
  Intron number 1 from transcript Medtr7g083630.1 (locus Med tr7g083630) derived from phytozome v7.0 (chr-ID MtChr7; po s 17901493 to 17902388 reverse strand)
ttgcttctggaagaacctctgtttcatcagatcctgtaagtttattaacatcttaccatctcaaaaattctatcttttttcatattaattttttaaaaatgttgcttttttgttgttgttttgtttggtagctgaagaaatggaggaaactataatgtttttcatgaaatgataatgtttattaggcaagatggaatggatttatattttaggcattacatttaattttttttatgatcttattaccttttttttttaatttaaaaaattccttaatttggttcctgtttttgtttttgcactaatttgctaatgttatttcttacatgagacaattattttcccttttgcctgagagcttgtggtttttgtaagttgtgacctttcttttttgagatttggatgtttttattcaaaacgttttatgatcttacaaatttatgttctgttttctagattcagatcgtctcattttctgttttatttgtttatttatttatgcacttgtggattgaagacactgattttctaagccattgaacattagctttgtgtgatttgcatgattttgctgctgaaagtgtagccttgtcaaaataagatgataatattcaagaaatagatgtgttgtgactaagttcttgattggataatgtatactagattttgcttgtttgcattttgttaatagttattggcattgcactcctagtttaattatgacaagagctaaatatggtaaactgaattaagttgacaagctaggaaattttatgtactttgtgatatggttttcttatttcacatgccaacatgtacaagatgtattagttaaattaaatttaaactgttacttttcagggaggggattctacaacaaaaagagccaagtttga

SEQ ID NO: 31658 - DNA, 575 bp, Medicago truncatula
  Intron number 1 from transcript Medtr7g025540.1 (locus Med tr7g025540) derived from phytozome v7.0 (chr-ID MtChr7; po s 6265850 to 6266424 reverse strand)
gcacctgattttgacccagctactgattattgctggtatgcacatctctctccctgactatcttgctttggtttggttgggacacatttgaaatccaataaagctcttagaactaaaaaagacatgcattttcttgaaggactgaacttagatgtactaccataagtaatgttcttattgttcctctcagtcttttcttttcataaggcagtttttgtacacccttttgtatatttattagggatagttgtactattttttttcattgagaacaataggaacagtgacaataacactatcctttcttggaaacctagtcttgagctgaattgagacgattaacactggccttagtaggcgttagtggacaagctaaactttgtgatagtcaagacatttctgtatctaacaaactcgtgtccttaaaaagaaaaagaaaaggaaagaaagctttacacaatccatcacttatttgagttttactaggtaggaatagcttgttatgacatttaataacttgatcagtttgtgtccttgcagttgctggctggtgtgcattatattccgtggaaaat

SEQ ID NO: 31659 - DNA, 980 bp, Medicago truncatula
  Intron number 1 from transcript Medtr5g015540.1 (locus Med tr5g015540) derived from phytozome v7.0 (chr-ID MtChr5; po s 5209320 to 5210299 reverse strand)
aattccaaagggttgttgttgattaattcaagaaggtaacaaacaagagagagagagaatcattagaaagtgtgtgatgttgatgatgatgttgttgtttcttaaattttttctggatttttttatgaatgttgatgaagatgatgaaaaaagtggaaggaagaagatgaagaaagcaaaaagaaattaaaaaatagtcacttaacagccaaaacaaacggaaggggggtaattgactaacgtttgataatttcaggggggtttttgaagtttcttaaaaatcaggggggtttttgacgaaagttacaatttcagaggggtttttgcctattcactcattgtaatttcaatccaaggagaacgaggtttgcaaaaaaagttattgtggttttctaagttttattttatttttggtaaaattaatttataacttagtttatcaatttcttcatgtgttttcttaactgtcctttgagtacacttttgtttttatttaactaccgttttaatagtttaaggataaaatttatcaattctattatttttcaattactcctacttactcatttttaataaaattaaaactagtttgttaattttttttttaacaaagtttgatttttgctacgtacaaatttaaaatttcataaaactaaattcggtttcctgcaataacggttccatgataaaatcaattttgattaaaagagttggtgggaagttaaattttgcttaagggaataacacaattaaattttgattatgtgaagttgaaataaattttattttactttgcaatcaataatttgccaattgtttgttataagaaacagagagaggtaggtgctgttgagctttttaaaaggaatagaggaagtatatgttattgagttttttcataagtttttattggatttgggttcctcgctgtgcctctgtttgaagctagttccgtttgggagcttgagattgaggcagaa

SEQ ID NO: 31660 - DNA, 597 bp, Medicago truncatula
  Intron number 2 from transcript Medtr5g106000.2 (locus Med tr5g106000) derived from phytozome v7.0 (chr-ID MtChr5; po s 42592621 to 42593217 reverse strand)
tttcctctttcagcaaccacccttaagatcttaaggtaagctctttcttcttatctctttccgatctatttaatcaatgtctgccatcataattacatttcatttcatgatgatttctgctagatcttttctttccgttgaaattctgaatagtttagtttaatatttattttattatcaaacttccaaggctttgatttcatatacttcaaattattattcatcattactagtagcgtgtttggtaccgcgtttcgatgatgttcaacacttccagcagcgtgtttggtatcatgccttaacaacatgatttttctctttttcaaacacacactaagaaattaagcacttcttcgtgtttctttataccattttattcgagaaattcggatgatgtaacgttatctggagtaagacaagaatatgtgaatgtatcctcatgtatttgagtgcgatcataactattgatgtttcatagaatcaatcgtatatgaagttaattcatgattatttatctgttgacttgacttgtgttagttaaatttatactcatccatttactatgttttttatgacagattcatttttcatctatca

SEQ ID NO: 31661 - DNA, 871 bp, Medicago truncatula
  Intron number 2 from transcript Medtr5g096600.1 (locus Med tr5g096600) derived from phytozome v7.0 (chr-ID MtChr5; po s 38399160 to 38400030)
catcgcgggagcgtgcacaacgccttctggacaatgtaacgttcttttgctctctttttgattcattgggtaccaaccttgtaattgttgtgatcattaaattaggggttgcatgtaggaagttacactttgcatgatttgctctggtttttgttgttgattgatttagaatggaatgagtttatcggttcgttttcttcttttagggtatgtttggatggagggtttacttttctcttttaaactacggacactgtaaaataataatttgtaatgttgttctttgattttttttaaaatatcagatatttttaaaaacataggcttagtcctccaaacctccctcccaaacaaacccttaattggaagataactctatatttcatatgcatgtacgaagttcactttggaagatataccatgtcgttttgtagattgtgatttagaggagcaggtttttatggattggtgtttttcttattcttcctctaatggggaagataactaactttttggtttgttttggaattagtgatagaccttgttatcactcctttattgtattgttgccgaaaactgttgtatattttggtgttttggttacttcggacttatttgtccctgttgctgccagattcacacttgtttgtatgcacttgtggatttcttgaatgttaattgattataaaatgaaaacctataacttcatgttctctgctttggaaaaccctgtagaacatataactcttgttatttttatgctgtagcttacatgttcttctaattacttcataagaatatttttatgaaatttttgtaattgtttttcttactaggtcattgaattggagaaaaagcgccgtaaatcagc

SEQ ID NO: 31662 - DNA, 554 bp, Medicago truncatula
  Intron number 1 from transcript Medtr7g049970.1 (locus Med tr7g049970) derived from phytozome v7.0 (chr-ID MtChr7; po s 12399670 to 12400223)
agctgttgtatcttgtctagccaccactgtagcaggtattattagatttgtttctctcaaaggatatcaatattgatgtggcgagtattcacaaaacatcaatgatttgcttatgttgaatgtgttttgaggtttcaagattgatgttagatttgtaacatctaggactagttgctaacactgcaaaacaacagggtattgtttttttgggacaaaaatcatgatactcgttgataattttttcaatcttgggtttcaagattggcattagagatttagcactacagctaaagggcatttctcaaaacaaattttgggcgatgatacatattatatttggtttaaagaggagggcctctgatttattatgtgcaaagtggaagtttatgaaatgatattagtatctgaaatttgagagtagatttaccgaaatataagtgttttccttttcttccatttttttaaaattataatattattttaaattcatggtaattgattataagctaacaccaactatacattcctatgtgacagtcccaatatcaatctat

SEQ ID NO: 31663 - DNA, 903 bp, Medicago truncatula
  Intron number 1 from transcript Medtr6g083240.1 (locus Med tr6g083240) derived from phytozome v7.0 (chr-ID MtChr6; po s 16836135 to 16837037)
caggtaattaatttatgattaatttgtgttgattggtttaatttcatatgcaaacatgtgcaacatatttttgcaaaatggaaaaacaataaaaactcatgaaattaaaccttgttttttcccattgatggctcatttgtttaaacttaaatcaaagttattttttaattaaatttttttgagatttacttataagttacttaagtcaaaaattgattatttcaagatgactcttaataaaaacttgtccaaacatgttacgtattttttaaaaatgttttcttttatgtaatttttttttttttttttattgtttttgtgtgtttgggagagattttttttttaatggttggcatgttttggttagagagacaatgaaggagagactagtggttttaatctttggctgtcattttttttacctttgattggtttaggaattttttggatctaaccttccatctagtgggtcatatatatctccttaataatgaaattatgcaaaccactacatgatatcctaatcaactgaaaaaattgcatttaaaaaatgcagttatgatcacccttcatatcatgttgaataagacatggaacatgcaacaatcttaaaaccacaaaacaaactacaaaattattgaattctcaatggttgattcaattagtaaagaaaaatatgttgtctcatagctaagggatcatagtcattgggtgaagaccagatgactcgtatggtttaactaaattgactttaaaagatatctcataatacgaacaatctgatagtcaactaatagtcgagaatccatgactacagactacaaagaatctaaatcactggataatatgcaacctcaatatcgagatgtaatagataaatattttatttattgctttcagttg

SEQ ID NO: 31664 - DNA, 749 bp, Medicago truncatula
  Intron number 2 from transcript Medtr5g094620.1 (locus Med tr5g094620) derived from phytozome v7.0 (chr-ID MtChr5; po s 37447322 to 37448070)
tcaaaaggaaagagcaatacgggaaagaacaatacgtaagtactctttcttttgctcaattagttgaaagtgtgtctaaagatctagtactttgtagtcgtatcctgtgtccggagtatgttcggtgttgtgtccaacaccgacatgtcatagatacttgttatttgatttgttttttcctaattattattggtgtcaaagtgaatgcctaggatccttgtttgcgtcggtgctttataatgacaagtgaaattgaagggtttaaaatgggggaaattgaagacttgatctttgtttatttcctaattaacatcccaaattgtctaatttactatgttgcaacactttatattgaagtcgtgttatgggttcgacatgtgttagtgtcaatgtccgtgtttgcgttaatactctataatgatagtgaaattgaagactttatctttgtttatgtcccaattcataccccaaattgtggcctttatcatcaagaagaattttttaatctataatacactttataattaccaaaggaaaacttggatatgttgcactaatctgtgctttctaaggcctagtcacatattctctcatatttgagtctattttttagttttgttcaattcatctttagtattcatccttcatttttttttcattcaagcaatctttttcatttgatgaataaaatagtttaactgatattgtgttgtattgatactctttgcagtgacacaagcatacacttc

SEQ ID NO: 31665 - DNA, 500 bp, Medicago truncatula
  Intron number 1 from transcript Medtr5g066090.1 (locus Med tr5g066090) derived from phytozome v7.0 (chr-ID MtChr5; po s 23213491 to 23213990)
tgacttgtttcaaattaggtatcagaaaaagggaggtatatcgttcttccccttatatatttaatgattaaaattagaactctaaaaaaagaaagaaatgtaagcaataataagatagtttcatttataatagaaggacaaggttttttaccaaaaaaaaaaaaaaaaaaaagaacattgtcacatgtttttaatgttacttcattatcagcatttcaacaagtttcataagttttgtttttgcaatttgttaaacactttaactaatatttttaagaagtatagctatgcacaatatttgactttagaaaaattatattcacaaacaataggtaaataaaaatatgtatggggaataatctactttatgttataattggttggttgtgactataagaaattctattaaagtttagtgtcttctacttatcaatgtatgtgtgttgaatggaaaattgaatactacatatatgcctaatttaatattgtagacggaagcc

SEQ ID NO: 31666 - DNA, 951 bp, Medicago truncatula
  Intron number 1 from transcript Medtr4g096450.1 (locus Med tr4g096450) derived from phytozome v7.0 (chr-ID MtChr4; po s 20307252 to 20308202 reverse strand)
ctaaatcactgaccttaaaccgaatcttcacaaaggtactttctttacttcaaccttatttcatttcttgtaaatcgattgattatgttgtttctctcagattttgacctaattactcagtgctgtgttgatttccagttctgttaatttttccattcaatttaattatcaatttagttatttaggtctctattttaccaaatcaaactttttcaattatttcatgagctttgtagttactgatttaattgagggttattgttactgttttttagttaaggggttttgtaactgttaatatgtaagtctccgatgatgaacaaaatgatataactttcgttcttctgagatgtttctgtgcggaagaaaattattggagacctgaactgaggagactgcttcaaattttgtatttttacaagacatgataaaaaaaactttgtgcttcagactgtatgctgtgtttatctatgtggtgttatattttatggtatctgaatttagaaaaatatgtatgttttaacttggatttttgcttcttatatcatatgatttagttgaattcacactgcacaatagtaaagttgtagtcattgaaattatttctagtttgatgacctgttcctgttctaatagactgcattatttttcaaaatctatttatttgatgtacatagggaaataggaattatgagtttgtcttatgcttctgttaacgattgtttcatgtatattttgattacacaatgttgtgtgtttatgccttttcattacatgttcatatggttcgataaatatgaacaagtaactaagtttgatttttgataactttcctgctctgtcttgactttcttctctagttttgtttccaattaattttgcatcttttattacgggtcatttattggaatgaaatttatgttttatatatttttactttgcctttctcag

SEQ ID NO: 31667 - DNA, 661 bp, Medicago truncatula
  Intron number 4 from transcript Medtr6g013060.1 (locus Med tr6g013060) derived from phytozome v7.0 (chr-ID MtChr6; po s 2648147 to 2648807 reverse strand)
ggataaccgagtcttctccttcttccgttacaaaggtaataagacataaaaatttatgttctttctcttttctttgctatcctttcctactggtttcttaggttaaatgcaatcctatataattctcgtgatccccccatagtatatatttttgttgttggtgaattgtttttgccctaggacacaagttcaaatattctttgaatcattgaagaaatattcgagatatggttcttgtatggcaataaaatagttgttgactagaattcgtagtttttttgtttcaaagttcttcttttttagatgatcattttttcccttaaattcattttttattgtggagatagaggaactagatgactttggtcttttggtcacatttaatgggatgagtttgttgattctaccatgagtgcacacgttggttgatcttgattatgtaatgatcagattatcttttggtgaagttcataagtgctatttctatcatgtttttagtcagctcttgagatcaatgcttcttttgtacgaaaatcacgttgtagggtagatatgttaatatggagatagagaccgtgttcttcatatttaagttattttcatttttaacctaatttatttcgtatttttcagactcaaaaggaaaaggacattctgaagt

SEQ ID NO: 31668 - DNA, 544 bp, Medicago truncatula
  Intron number 2 from transcript Medtr5g020530.1 (locus Med tr5g020530) derived from phytozome v7.0 (chr-ID MtChr5; po s 7769520 to 7770063)
ccggacgccgtttttaataagaagaaaccaataaggttcttacttttaattacttcttctattagttattatgaagcacccacaccagacaccaacaccaaacataatagtcacacagatacgtactgattgaatgtaaccatgtgggtgctacatatctattacattgttatttactaaggccctgtttggataaacaacttattttacaacttatagtatgtataataagcacttatcgtgataagacctcatgtataacaagataaaataaagttaaattgttttttttttttttgtataagttataagttgttttgataagctgtcttggagagcttatgaaattaagctgaaaacaacttatgaatatttcagtacgttgttttcataagttcttccaaacagtctcataagtgtttatgttattagataaactcaaatgaaccaattcaaacaggttctcatttgggatcccttggatactgattaattttcttctggaacagtggaggtatcccacattgctttccacagtttggtc

SEQ ID NO: 31669 - DNA, 987 bp, Medicago truncatula
  Intron number 2 from transcript Medtr4g165950.1 (locus Med tr4g165950) derived from phytozome v7.0 (chr-ID MtChr4; po s 41925009 to 41925995 reverse strand)
gaaagaatcccattgactctgaagtggcagctcgggtatggtaactgtaacttgactttgttttgtgtaatacataatgcattaaaaaaaagacttagatctaaatgacttgctgggattttagtttatgatggaatgcaatggcattgattgactcatgtagtcatactcatctaatggaaaaagttctggtagtggttgttatttttgtgatctatgatgccatacaccactatgactttcttggtagtggttgttaattctccttattctatatccttaacggggcctaatgcaattcatcaaaaccagcttgtaaggtgacagagaacttagtctaataacagaaataggatagtctctaataccatcttagaatttggcttagggtctaactcaatcccacaaaaccaacttgtaaggtgaagactgtccaagccttataagcattgcttaggcaaatatctctagtcgatgggggacttcaacatgtttgtatttgattgggccaaaatatttttgtgaatattttctagaaggaaaaaattcaacacaacaaaacaatcagagatgattaaaaagtgttttgaggaaagaagattctccttaaaatgtaataagaaaaatagaaaataaacaggagatatcaaaggatcaatgagacatagttacctaatctcctaaatatctgccagagaaacctttgtaaaatggttatctaccctgtgtaactgacacttgtttctttcggaagtctagctggctttgaatagaaatgttggggggaacttctaactttcttatcgaaaaagagtcggaagaactatggtatatgttgtttggatgaggatggattcatatgataagcttagatgccatagttctaatgaaccgtggatgttttctcagtctttgaacaatcctttcaatcatgttttggtgacgaaagatctcatgcaggtgtacttggatatttctgctattgga

SEQ ID NO: 31670 - DNA, 450 bp, Medicago truncatula
  Intron number 1 from transcript Medtr4g076190.1 (locus Med tr4g076190) derived from phytozome v7.0 (chr-ID MtChr4; po s 15075573 to 15076022 reverse strand)
acgcattgcgttctttggttcccaatataactaaggtacactccatggttttaaattgttgttttacactgcaaacctttatattgtggcaaaatgccgtcaaaatttcagttatgataccattgtggagacttcaaaatattttatatatgataaaatttgttctctcaaaaacaaaacaaaaaagtaacataaaatttgtgtcgtgtctaactcgatcttcaaaattcgtttataagatgaaaattgcttcggacttaaaaccactatttggcctatatgttaactatccaaaatggttaagatgcattgttgattagactaaccttgtaaatttcatagaagcataaatgtcttattataattaaaatgtgattaattaaccttgactttctttttatttgtgaattaagtatatataattgatattatatttaattacatgtatag

SEQ ID NO: 31671 - DNA, 607 bp, Medicago truncatula
  Intron number 2 from transcript Medtr4g097240.1 (locus Med tr4g097240) derived from phytozome v7.0 (chr-ID MtChr4; po s 20766223 to 20766829 reverse strand)
tgaaggttctacgtttccaagtgcctacacatttggtaagttaaatttctattttaaatctaaatgttgctttatttttctgaaatttctagagttgtatttgaagtagtttcagattctgctgtttcgaatctttgactagaatggtcattgtccaaatccgaccgaactttgatttatcaaaaccccttctcccttgaaccgaggattaagacttataaaagattccactgcatttgactctccctagcttagatgtacacttccaaatttacatggtcttaacttttgaaaatatttaatgctgatatgaacatttggtcaatttttatttgcctgttggctaaatcaatttacataaattggtaaggtgtcaatggtcaaacacattttgtttttcttctccaaacttggatatttataatcgatcttaatttattatatttgaaaatgcattttacatagttattaaatgacaacatttctgactttttttatattatgacacattatattgatggtaatttatcatgagcagagtttttctgaatatttgttgtggttggtggcagacagagtatttcggggtgactgtgaaacaaggcag

SEQ ID NO: 31672 - DNA, 460 bp, Medicago truncatula
  Intron number 2 from transcript Medtr4g109610.1 (locus Med tr4g109610) derived from phytozome v7.0 (chr-ID MtChr4; po s 24592597 to 24593056 reverse strand)
gggttcacaggtgaaaatctcaacttcatttttgattgaaattaagtgagtttttggttcatgtttatgcaacaagaattaatgatttgtattgcttatcaacaatgtccttgtccttgttagtttgactgttgcacatgaaatatttgttctgttttttttttttgtgaggaaattaatttattgtggttggatgctaactttatagtttggtatttaaacatgtgtagtcatcctctgtacccttttgtggattaatttaatgtatgactgaaagtaatatgcctcatgctcatgccttttgtgtctgaactctgaagacatctttttttcaagttatataatttttttcaaaaaaggaatattctgatactgacacaatttgtaattttaattgattcctttctttgtgctatattcatcagggacctgctcaagcacagaatctacgggactcact

SEQ ID NO: 31673 - DNA, 321 bp, Medicago truncatula
  Intron number 1 from transcript Medtr7g067560.1 (locus Med tr7g067560) derived from phytozome v7.0 (chr-ID MtChr7; po s 13673809 to 13674129)
cattgtgctggtcctagcttctggtaagaaatatgagtattttatgttacaataatattctctaaatcttttctctttggtattttatgtattgctttgatcttagcttcatgtaaaaaccatgagtaataaacatgaatacttaggtcccttaaagatctatttataatgattaacttatatgaaaaagatatcaatattatttatttattcttctaaatgtgttatttcatttttcttcttcttttattgaactttgaatttgtgacttttttttttatagcagggccagtgttagcaggaccaacaataggtttggac

SEQ ID NO: 31674 - DNA, 616 bp, Medicago truncatula
  Intron number 2 from transcript Medtr5g097510.1 (locus Med tr5g097510) derived from phytozome v7.0 (chr-ID MtChr5; po s 38862008 to 38862623)
caaaggtgaaactaaactctttcttatgattgaaatcaaaacagtggctatttagctacagttaccatgactggtggaatcatccccttctttgtatgggtgtccacttgtaatttagttttatctgttatgaacttatgactctttggtggtattgaccagtgattggcaccttgtttgtgtaaataattttgggtggtttgctttttgcatgccttgtgcgaggcactccactttgttaatataatatatcattttagtttgttaaaaaaaaaggataattaaataatgagacatgataacaaatgcctttatgacacttgataagaaatttaaattagaaatttatcttaaaacttgtgtgttcaacctattaaaatatcaaaaaacaattaaaacttcatgcataacttttttgtagaggcaaaaacatatacttgtttttaaggggatgaaaaacaaaatttaatattttttaacaacgaaaaaacttatttaaccctttttaaaattgaattataaacttaacaaaaaattgattcaaaacttcgatcatatatcctagttattcacttcaatagtctattatctcttagttagcaaacaaattaacaca

SEQ ID NO: 31675 - DNA, 1003 bp, Medicago truncatula
  Intron number 1 from transcript Medtr5g049810.1 (locus Med tr5g049810) derived from phytozome v7.0 (chr-ID MtChr5; po s 21409669 to 21410671)
ttgtttagagattgagatcagagattttgtgataggttgctaggattttctgttgacgtgtttctattcaattcttgtgtttgctttagtacctttagaatgtctttgtttgactttggattccagcctttaagattgggttgatatcttttggtgttaccacttattttacaacgcgatttagtagtgtttagtaatgattaatctccatctgaaaaattgtggggtatacaaagttggttctcccttttcacttgaattttagagttttcttcgtatacaagagtcaggagtgtatctctgaccacttttttttaaggtttcaactttactacttgaacaaatttattgttggttgtgttgatccctttttttttttttttttttttgaaggagtgttgatctcttttattaattgagtggatattccatttgaaatcgatcaatttagttctaaaactttttttttccaagagctaatctaatcgacgattttaaatttgaggatttgattttaattttcataaatttaagaaataactttctcaattttcaaatttcaaggaaggcgtctttcactgtgcaagagtaacgtaggtttcgtggtacataaacttttttaactattggatttaaagttacaccacatccacccgcattttttgtaaaatacttctataataaaagatggaaggagtagtatatattgattatgctatttttttttttttaacaaacaaaaatgatatatattaacaacaattgattacaagtggacatcaatacaaaggagcggatgattccaccaattatgatagttgtaaataaatattatctgttttgatttcagatgtcagttaaaccttttcaacgaggatggaagaagtagattctatattcttaaaaaatataaaattgattatgctgatatttttttatgttaacttaagggtcacttgtaccttcagctttcattgctctctctatctccctctttcttact

SEQ ID NO: 31676 - DNA, 640 bp, Medicago truncatula
  Intron number 1 from transcript Medtr7g079980.1 (locus Med tr7g079980) derived from phytozome v7.0 (chr-ID MtChr7; po s 16776294 to 16776933 reverse strand)
aactgtaacaagtacatctctcactatcaaccctcttttttcaattttttttttgtgtgtctatatatatatatatatatatattatatcttgttgaataaatagcctttagttatcaattttttaaaataaaacccttaaattaattttcaaaaagcacatgaaaataacatttacctacgactaatctatcatatttttatacatttacaatctgttagggactaaacataaaagatatatcatttgttttatgatgagctacttacaaaaagttttcaatattattttgatatgataaggaactatttttaaaagcaaaaatagagtgcataggcatcgttatatgacagaatggcgtcaactaagttgacactctcaagtcaccacttactttaggaactagaagaatatgatatttgagaaagtaaattgaaaattcattcaaaatataaacttttccttttaatttcttaaatatgagtttacaaattgataagaactaattcaacataaaccaaatactttggggactaaaactaatatcaaacattttattagttgtaaattcataataagtaatttgatatgcaaaggaaactaatgtcatattcactttgctcattgcaggataaactag

SEQ ID NO: 31677 - DNA, 427 bp, Medicago truncatula
  Intron number 2 from transcript Medtr5g020810.1 (locus Med tr5g020810) derived from phytozome v7.0 (chr-ID MtChr5; po s 7873203 to 7873629)
ttaaggtcagtagagccccttttgtcttgtttggtaaaaaatgtatatggagattatcataaggataaagcattaggaaatgaaatttgcttccttttattttacatacataaatatatgtttgtaggaatgaaaactcattttgagaatttttaataaaatccgtgactttgattgagactgcatcaatggtgctattaatgcagtctcaatcacagtcacaaatttgctagcaattggctgcaatttaatacttcactcttatttatgagttaccataattaatcttgcttttgaaatctgatgataattatataatatataggaggattatagttttgttgttaggattagataatttgatgtgatttattttcttgcatcttccacagactgttcttaacaggtacaacagttttactggaat

SEQ ID NO: 31678 - DNA, 586 bp, Medicago truncatula
  Intron number 1 from transcript Medtr7g027390.1 (locus Med tr7g027390) derived from phytozome v7.0 (chr-ID MtChr7; po s 7248122 to 7248707 reverse strand)
aaggaagaggtagagagaagtgagggacaacacttcacgtgccatctttttttttttttttttttttttaattcaacaaataatatgggtggcatttttctttttttttttaataaataattacacgcgtggcatgtcatgcaagctttgatgcgtataatttttataaaattttgattttaattaaaagtaaaattgtagatgtcttttcttcaaaaaaggtatagatgcctaaaaaaattatgcttatgttatatatatatatatatatatacataaaaggtatagatgcctaaaaaaattatacttatcttttaaatatatattgcacctttatatcgtaacaaactatccatatatttttcttattcaaaaaaactaaatattgctaaatagaaaaggtattattttctattttgtaaacatcagatgatagaattttgtataagtttgataatgacccgaaaaatgtcttttcttatgtagtgggaatatagttgatgcaacactatgggaaaaaaatactctgtagctttatcatttatcatctatttaccttgagtttcttgcttccattttatagtca

SEQ ID NO: 31679 - DNA, 817 bp, Medicago truncatula
  Intron number 2 from transcript Medtr7g021330.1 (locus Med tr7g021330) derived from phytozome v7.0 (chr-ID MtChr7; po s 5180617 to 5181433 reverse strand)
cttgtttgggaggttagttccattatattttagcatatattaaatcgatgttttgtaaaattaaagcgaaaaagttgtgtacttttgaattttatgtaagttgacttgtgttgtatcatgtgcttgttacaaatttttgcaactaaccatgttggtctatgagcaattttggataacaacaattatggaaaaataaatattaaaagaatcgtcaattactataaccattttccagtgtttttcccaagatgggttttgcactggtttgttggagctttgtggcttcttttttcccaaaatgggtttgtgaccgactttggttgtacttttgaggattaaatgaatttgtttagctttttagaaaaagaaaaaacagctttccatgtaagtcgaaataaacttttgtattgtatcttccatttttgtagttatctcgtttaacctgtccatgaatatgtgtacacttttattttatatggaatccaatctttgcctatttgtggtttatgttctagtatcactttattctttttgcttttcagcttaagataaagtttatgttctctttttgaaatgaaaaatgtcaactgtttttggctttggaatttagggcttttcacttaatgaaatactccctccagaatgatttataagcaaaagttgttcatctatcttggaatgaaatataagcttatttaatgctactatctttaagatatccctcatttaatttaactcttgttagttatctgcttaaaactaaggccattttgtgtatacagaacttttgttcaaaggagggtaccgttttttgtgg

SEQ ID NO: 31680 - DNA, 943 bp, Medicago truncatula
  Intron number 1 from transcript Medtr4g143000.1 (locus Med tr4g143000) derived from phytozome v7.0 (chr-ID MtChr4; po s 35731218 to 35732160 reverse strand)
cgggattggtggcttcggtggtttattcccccttggtaagtggttcttcattttcacttgtttggatttgatttttggatagaaaaagtgattatagaagtttaaaattgatttgacattttttttagtgtaccgagtaagaattgattttgaatgtagatttgattcttatgtttgtattggcttatttgtgtttatccattggcataaacacttccaagagtgttctttttcagcttatgattttgtcagcttaggatagcttatgaaaacagcttatagattgtatgagagaaagttgactctgttatatctttattataaaaatagcttatagatataattatacatattataagcttttatgctagaagcgcttaattaagctatttatccaatcaagacctcaagctgagattcaaagcttttgactttagaattgaattttagtaaattgttgaagtcatttttttgagaatctatctgaccatttgccaacaccaaagcaaccacactcacaatcacttttgtttgttgggttaaatgcacttttgctccctgtcgtttgagagaattccaacataccccctgtaaaaatgtttttttgcaattccaaccttgtaatttaaatattcttctcttttagaccttcgtggcatcaaattttgggattaaaggtacttttgcccattgtcatttgggcgaatttacttcctgccacatcatttcttttgtacagtcaaataacacaaaggtctaaaagcaaaaaatctcaaatttcaaggttggaatctcaaaaaagaaaattactgggagtaaactagaattcaatcaaatgtcaggtggcagaaatgtatttaaccctcgtttgttttgttcctttttattggatgttgatttggcttgttttgcccaggtgattcatatctcgttgctggtactg

SEQ ID NO: 31681 - DNA, 839 bp, Medicago truncatula
  Intron number 2 from transcript Medtr5g040710.1 (locus Med tr5g040710) derived from phytozome v7.0 (chr-ID MtChr5; po s 17394313 to 17395151)
ataaggtgggaaaggtcatatgttggaatattttgaggaagatcaaagatcttttgaagctagcttggaaattctattttttcatgtctataccaggaggctaacaaatgtgctgatgtgcttgccaatatggatgcataaaaaaatgtgttgttgaacttgccaataagtttgaaactatatttatatttttttcaatttttttttttttaatttgtgttcaaaaaacttttaatttctaaaatttgtgtccaaaaaaacttttgacatacatattttatttaaaaaacgaacttttctaaaaaaagttataaccaatgggctctaagaaaattcttataagtttcttttcacgtatattgtaggtatatcataacaaatcttgattttgttataaatatcaacccctaattaacaaactaaatgtagatattgtaagtacattttgataaatcatgagtttgttacactaagaactttaattttcttactttacattttatttactttaaaggaacatccttgattttctcactttatcaccatagaggatcaatcattgccccattttttttatagtatgtttcttatcacattttttattttatcagtattcttttccacactcatattcataccaacaaagtcaagaaatgtggacactttgaaggatctggaaatacaaagggttatttttattcaatattttccaattttattctctatttagagtgaactttgttgtaatcaagactatttcaatataaatttgttgctaatttgtgacttcgctttcgtaaatatgatcttgatgtagttgcaatcaagcataacagaag

SEQ ID NO: 31682 - DNA, 452 bp, Medicago truncatula
  Intron number 1 from transcript Medtr7g020910.1 (locus Med tr7g020910) derived from phytozome v7.0 (chr-ID MtChr7; po s 4970645 to 4971096)
aactcaaaccactgctgccgaattcacaacaaaaagtattgatctcaatatcgatttgtaattttccttgtcattgttatctttgtttgtgattcaatgtattaaattctttaattttaataatatcttgtatttattgaatgcatgtgtattatacattaaattgttgattcgaagaaaattgattactcatgtccttaatttgtgtgatggtctttttctagaaaattgattatttagaactaaatcaaaaattaaaataaaggaaaggctaggaacaccggttaaaaaaacaaatataatactttttgtattaaaattattgattactcatgtccacctgttttgactgagtctaacaaccctgttgagtatgtgcatgacgtcaataagcctcattccatgtcgagtttgtatgttgaacccttcaaaaaccgtaatgtcagaaccaa

SEQ ID NO: 31683 - DNA, 877 bp, Medicago truncatula
  Intron number 1 from transcript Medtr5g095520.1 (locus Med tr5g095520) derived from phytozome v7.0 (chr-ID MtChr5; po s 37869900 to 37870776)
attcctcaccaagtttatttggtcagtttatagttattcttatcatcttttttttacatcccttgtttcctctttggtgacactaagtgtgtgtatgtgtttttttttctttcccttttgtttgtatttttgctctttaactttacttttagtgtcattaaggttgatgttaccacagccttaaattttaattattgttttgtgattttagtgaatgctttcatatttttctcttttttctgttctttatttgtttattgttccaaaatccttggttttctatgatcaaaatcatgtttgtttaaattttgttgataaaaatttcaggttcttgatagttctgaataatgaaaaaggggcaagttcgttcataactgatatttgttcagcaagaaacatccagtctatgctttaagtttcaaattttaatactctatggttatttgtttattattgttttcatcttttttttttttttttttttttttttgtgagcagtgttcctccaattcaaactctaagctttctaatttatccttaaccaatttatatttttgtttaagcttccttttgtttgtaccaaacttagatattaagctggttcaattagtaggcttgtttggcatgttcaaaatattatggtgtatgacagtgttgtcagaaccagacaagtcagttcaatcagttgagccgggaataggattgtggaacggttggttctagccccttagaacctgtttgaaccgcggttcaactatcgttgattcaacgcgctttcttttttcttttcgcatttttctagtggctgtttgtgtttggacttatatttcatctactcacaggaagtacaaatactcaaagtaacataaagcagact

SEQ ID NO: 31684 - DNA, 816 bp, Medicago truncatula
  Intron number 1 from transcript Medtr5g023330.1 (locus Med tr5g023330) derived from phytozome v7.0 (chr-ID MtChr5; po s 9189345 to 9190160)
cctgtgcatccggatcttttagtgattgggctttggtttgggcttagttttcctttacgtttttttgttttttctgctatttgcactgtttttctttgctatttgaacctatgacttgatttaaaaatcttgataaatttcctagaaaatccatgcttacttcttgacattttcttgatgttttatggcatttttgcacgctggaattggcaaaattcttgtatgattaatccatggcattttaattctttcttggattatttcttatgattgttttgtcaattctatcattgatttgtgaaaatgtgataaaagccatttgatatgttaatgtgaggtgctcacacctacgatcctatcttgattttgctgttttaaatggattcatgaaaccttgattgtatgagcaacgtatgcatattctagaaagtaataagatgctaattctatctcaaaattggcatgaaactaagcttgtttgtttctaatgatcccataattatagcttgagataaaagaaactatttcaaacttgctatagcatgagaattagaagctacaaatgccttagttcttatatcaaaattttgggtttttattaccattttattactatctttatggcattttatgcgtctttgcctcttgctactctttatgctttatttcactaacaagtttatttccatgtttcatgcatcccatttagcattccctccactttctttagcctagcatttatcttttgcaagttttaattcatttggtaatgtaatttgttatcattggtttgtagcttggcaaaggggccataga

SEQ ID NO: 31685 - DNA, 835 bp, Medicago truncatula
  Intron number 1 from transcript Medtr5g075370.1 (locus Med tr5g075370) derived from phytozome v7.0 (chr-ID MtChr5; po s 27446694 to 27447528 reverse strand)
aattttgagtgcgaaagagtatcaaatactttggcatcattttggtgtatggacattctttgattgatgctgattttcatgatgatgatctacctttggttagtatatacgcaattcttttttattacttctttgctttccaattttatatataagaagagtttaaaggagatgcattatatataagaccagtttaggtaaatcttccctctttttttttcttccaaaaaataaatattgaaaatgaaatgagtttaaatttggatgaaagtgcactctcattcaactctctatacacacactccttcctcatcataatatatatttctccgataaataaataggtgtaatgtgtcattcaaacatcacattgaaaaataatgaatttttgatttggtcccaatcaattttctcacggccctattaaactgagtagaagcctaatttgtcttctagtaaagatgtcaatgactattttaaatattaagagactaaattgggttgtcggaaattatgaatgactaaattgaatattcatttttataaaaattaacttaccatgcaagttcctaaaagaaacttgtcgttcaagcattagcctggaagcgtcttcaatgatgaacaaatgagtataaagagatttggttacatttgaaagttgctatgtttcaaatatataaaccaaatatttacacttgaatagaagacaatcagacaataagttgcgtcgtaaataatttgttacattttgactagaaaaatagtattttagattgaaagattaacatgttattcataaattattgaatttgtacctttgaatcttggttgcagg

SEQ ID NO: 31686 - DNA, 1016 bp, Medicago truncatula
  Intron number 1 from transcript Medtr7g073490.1 (locus Med tr7g073490) derived from phytozome v7.0 (chr-ID MtChr7; po s 14916927 to 14917942 reverse strand)
gatcttgttgattcttcgttgatttgcactgatttgtgatgttttgtgttgatttgtgttgatttgtgatgatttgtgttgatttgtgatgattctggtggaatttggaaacggttagggtttggaagatgatgaatgttcttgagtgttcatcgtgattcctggaaattgttgagttttgatctttgggatcagaaagagaaaattgggaagtgtttgtgatgtggcgtgtgattgattcctttctgacttgtgcattgaatgcagccttttataggctgccacttgtatctgagacccaatgggacactgccacctggaattggacttaatatggctctgccttggacttttgaccttaaggacctttctgcaaaatgtaaaaaatgaggactggactgtaaataagaaaaatggactagaaatgtaattttgaaaagttttggacaaaaatgcaattttggaaaccttttgagggaccaaaatgcaattaaaagaaaattgaattaaaattggtaatttgaaaaaaaagtaaagtgaaacctaaaataaaatcaacaagaggactaaaacaaaccaattactgacatgaggtattttaaaatacctccctgccgaaattttgacaggaaaagaccaaaatgcccctaaggactaaactgactcaaactgactcagatgcaatttttgaaatgactttttaaacaaagactcaacagtgatttgtacagacaagttgaaaagactcagaagcaaacacagggactaaaatgggttccactgcaggaaatgaccaaaatacccttttgtatgatttttgaaataaaatgcaagaaaagtaatgcgacgcttcagagagttcttaaatgacttgtaatgtcagaaaagacagaggcagtaaaatacgtttaaaaagagagtaaagattcagagtaaaataacagagaattgacaaatatcagtgtaaaaaaagaaatttgaacgagtatttttaggtccaaaatcagggtataaca

SEQ ID NO: 31687 - DNA, 794 bp, Medicago truncatula
  Intron number 1 from transcript Medtr6g022510.1 (locus Med tr6g022510) derived from phytozome v7.0 (chr-ID MtChr6; po s 5033938 to 5034731)
tacaaaggtaataacatttctttatttctttcttaattttgttgtgttatgtgcactcactctagctacattattcatttcatgagcatatttcgatcaacaattttataaagtttattgcataaaagtttgattcatatgtaatgtccaaaaacattgtatctaatgtgagcataaattatgtttacacatgcatctagtgacatatgataaaataaatattttatgcatctaacataacaaagtgatatcttagagtagtttgtatgaatgcatgtgtatttttttacttttttttaactatcaattcatacgagtttaatagaagtgcattgttggtgtaagaccattttacagcgacatccaatgataagtcaccacattgtcatataaacccatttagaaaaaaaataaaaaagtctttggcttgttaaataaaagtcaagttttttttttttttttttttttttgaaaaggtcaggttcttattattaattgattgttagtgtaaaactattatcccttttctgttcaaacatttatatgttgtcaatacttatgtcatataataacttcaaagagtttatttactatacactgacggtgtaaagttattttacatatcaatgtgttgttacattaattaatgacgtcaacttcaacggcaagttaattatatattatgaagtataaatattcatgaaaataaactaaattttaatataataattttcagatttgaattgaattaattagtgaaattaattttaatttctcttcttgcaggagcatca

SEQ ID NO: 31688 - DNA, 553 bp, Medicago truncatula
  Intron number 1 from transcript Medtr5g094780.1 (locus Med tr5g094780) derived from phytozome v7.0 (chr-ID MtChr5; po s 37546524 to 37547076)
tggttcagattcctctcttcttcctcaacttataggtactcttctttttcttttcttgatgatttattccaagacccaaattgtgatccttgatattgcagaaaaatgctatcaaatatgattgatgaggctgcaattaggttggaatgaggttgctgagacataaaaaaccttgactttgcagccacaattgtggtctcaaaccctttgtagaaccatgcagtatagttgaaaagttataatttgaaagcattgcattcaaattatggtaaaacaaatctgtacactgatgtgaatgaaaaaaaaaatatatataggaatcaatgaaaagtaagtcaaacaaatgtacctcattcttatgcaccccagcttcaaaccttgctcatgcttagccatgtacatatcagctgcaatatctgcagattttttcagttttaatttattctgagtataaacaaatttaaaccaggcttgcgttgttaataacattaattgttgtaatgaaatcatcgttgcagctgagaagattggattgacatcaatccaaccattt

SEQ ID NO: 31689 - DNA, 578 bp, Medicago truncatula
  Intron number 1 from transcript Medtr7g032040.1 (locus Med tr7g032040) derived from phytozome v7.0 (chr-ID MtChr7; po s 7848793 to 7849370 reverse strand)
gacattttaatcaaacttccttccaaatcagagaggtaatacttcttttctctctcttattattcctttcttcatatacatatgaacattaatattcttgaaatattaatttgtggttactaagaaacacttcattttcatggtcatttcttctccgaatactttgatacgtattatccacataatgttgacttgaaccgacttgaagactcaaattaggaccttcaaactcttggatcaagtgcaaattaggctaattggatgatatttgatagtcataagaaaaaaccatgcgattacgtttaatgatctacattccaatttactatgtgtaaattaattattcaatttttataattattttaaattataaagtacattgcttaaattattggcgatatatttcacgatgtagttatttcaaaaattaaattatatgcttctttcaaaaaaaaattaaatggtttaatctctaagtttgaaattattgtattatgttaaaaaaaaaacgtaaaacatttggacatattgttaacaccacagttttaggagtataaaattgggcaaggccgaagctc

SEQ ID NO: 31690 - DNA, 977 bp, Medicago truncatula
  Intron number 3 from transcript Medtr5g025170.1 (locus Med tr5g025170) derived from phytozome v7.0 (chr-ID MtChr5; po s 10073792 to 10074768 reverse strand)
aaggagtaactaggagttttgtagttattaatacagtaagtattttatgatagggatcaaattttctcactcttacctctcaacttttttatcacctgcattgtcaaccaccaaggagagaaagaagcctctgtaccttggtctctttcttttggaagaaaagcttcaatgaatgattaatattctagctttgagatgttgaagaaaactagatgattttaaacacatgaaattggagagaaaggattaatccttttgaataaatgtgtggatgagtgaataggggaaagatgtgacaactggttcttcattctcaaggggagaaagggaagtagtcaagttaatttgtgtctgataatgtcccacatctaccaatgcataaactaaactatgctgatcacatataaaatgaaatgacctctacctccaataggtacggagccgtgtgatgatcacatagcgaactattctttcgccttttactaaagaatactgtgtgagtgtcacaattagcggcatacgctagtttttggaagagtcctcctcaccgaaggctctgcaattttagtacaatattttcttattcttgtttttttgtggttactatgttattggtatgctacttgtttaagggagttctttaccacttgtattaattcattgttggtaatacttccctaatttttttctagaggagtgactctagacaaaacaacatagagtaggaattaatttaatcatcatcccctcaaagtgacacctattcattgccaataggggtgggaataggtaagaccgtccaataggggtctacagcctaggctgagttttttcttaaatagataagtctaagattttattaagtaacattctggagatggtggtttctgcaataccattttactcttaacactagtaattttgcatgttaacaatggccaggacaaaagagggtattctgctgtcgaaatttgtgg

SEQ ID NO: 31691 - DNA, 993 bp, Medicago truncatula
  Intron number 1 from transcript Medtr5g098920.1 (locus Med tr5g098920) derived from phytozome v7.0 (chr-ID MtChr5; po s 39507260 to 39508252)
aatttttctcctactaattcaaatcctttgctcaggtgatttttttcttcacttcttctatggtttttggtctatatctccttctgatatgggttacaaagttgcttctggtttaatatattattcactgtccttgtatctcacattttcttctgttttcaattgtttctgtttgtattcattattattattattattatcatctgcatggattattttggactcttttgaattcttaaacaacaatatgcttttccttataggattcaattgctttatacttttagtgattatttagttcaactagcatggttatatatttatgttggactaattggatgcaatgcacttattggttcattaactgagcttttttggtgtccataaattcatttcttctttttatggaaaataaacaaattccttaattgcaacaaaatgtttgtctcttctattattgtttagtcacacacattatgatagagacattagaacaaattattttgattatcatctttctatagtttcacattgggcagttgaatccaaccttatctccagtacttccacatgcagtttcttgaaaacatacaagggtccaactgctttgactgttatataggggtctcagtacagaggataccccacatgtctctattgtccaatctagaactagaagatgctcgctgtatacaaaacttttgacatttgaaacaatagagattagtgagtgaggtccaaaggcctaatataataatatggttaattgtgatcaatgaatttcagcatcttcttagattcattaaccatgctaaacataattaaccaaagattgaaactacattagctgtccatttttatggcacttaaggcttaaatcaatatatttggtatctcttatcacatgtcttagaaacagaacagacaaagtaattcaattatatgatttcaaattcaggttcaagtaggacagaaaaggaagcacaaagagaa

SEQ ID NO: 31692 - DNA, 208 bp, Medicago truncatula
  Intron number 1 from transcript Medtr5g088290.1 (locus Med tr5g088290) derived from phytozome v7.0 (chr-ID MtChr5; po s 34201584 to 34201791)
caaaatcctggttatagtgttttgttctacactatgtaagtttgatatcttttgagtgtttgtgtttgtattttctcttctcgttaattgttggtttaaaagagaagacataaattaacaataatattgtatcaaaaaaattaacaataatatttttggttgctttatttaaaacagtatattggagaaagcacctgcagcaaagggt

SEQ ID NO: 31693 - DNA, 836 bp, Medicago truncatula
  Intron number 1 from transcript Medtr5g089500.1 (locus Med tr5g089500) derived from phytozome v7.0 (chr-ID MtChr5; po s 34780897 to 34781732 reverse strand)
ggtgagttctcataaaccaattatgtattacaatttggctagtattagatgttgttgctacatggttttaaattgcagtcgcggttatgctataaaatgcggttgaagctgttcatagacttcaaaatcctttatattgtagttgcaattttgttgttacagcctgctaattaaaaccatgttctgtattaagagaaaaatatacctagaaaagaatcatatgatatgcttgtttgttcctttatgcaatgaaggggtgattaatttttttatttgttttgaagctaaaattagtaattttcagtgtatttgttttggcctaaagtggattgaaatgacatttttcagtgttgacagacaaatatgagtatgaaaatttgcaactgaatattatggctgtttattgtccttatgttttattgtatagtcattatgcttatatatggtaggcacaaaaaaggatttgaattgtgtattaacaaccctgtgactgcgcatagttagccacgtctaattagacggtttagatttcaagctcaacattttagatttaaaaaatatatatatcaaaatgtgcattgaaatatggatcgtctacatgtggttaactgcgtgcagtcacacagcacacaatccaaattagatgcaaatgtgtgattggttagttttggttaagccttcaaaatacttctagttcttaccaaatagcaacaagagtgacatcattctttgaagttttaagagttacatacttcattactaattgaattttcttattttgtacatttgatatggttacagtgctgaagaatactacaagcaatcagtggtagtgg

SEQ ID NO: 31694 - DNA, 504 bp, Medicago truncatula
  Intron number 1 from transcript Medtr6g014490.1 (locus Med tr6g014490) derived from phytozome v7.0 (chr-ID MtChr6; po s 3379810 to 3380313 reverse strand)
ttcctttgtagaaaaaggtctcacgccactcaaaggtactaagttaagtttttttcttcataaagtatatatttatagagagattaatattaattttgctacactattctgacacttatgatttattgacggtgtaaaaaacttttactttgactctatatatgaattaaatctatataaatggtcgtgtgcgagataatcaacttactccaagagtaacacttgatatagtttcagttaatataaaactcaatgtagacactaaatttcaataaagcaaccatcaaattaaaaactcttattgaatagaggaactccacaaatttcataaaacttcaaaattaaaatttatacatcaataaatgacttttattcaatttataataccttattatatatgtatgtttttgtcgaaaacaaaatactcatgtatgtacggatgtatgtataaccttcaagatattaactgatacatttgatatgcagatcagagctatctaacaa

SEQ ID NO: 31695 - DNA, 816 bp, Medicago truncatula
  Intron number 2 from transcript Medtr7g021470.1 (locus Med tr7g021470) derived from phytozome v7.0 (chr-ID MtChr7; po s 5257437 to 5258252 reverse strand)
atatagttatgtgctttaatttatttctttgttttctccgattataatattattatagatgtaatatttttttttaagaaatcatcgggattcttcatgagattgtcaagacaacaccaattgtgattagaaagaaaccgtgtacgaacattgtgttgaaagataaaaggtattattttctaatttgtcaacatcagatgatagaattttgtataagtttgataatgacctgaaagatgtctttccttatgcagtgagaatatagttgatgtaacactatgggaaaaatactccgtagcttgatcatttaccatctatttaccttgagttcttccattttgtagtcattggcaacccaaatatatgtaacaattggtcaggttcgaggctgctcatcaacctacattatccggttgttgagaagtttaagacttagtaagtttgcattatgatttcaaaatatagtattagagtaacttatcatttcacaatctgatttgattgttttttgaccatgtttcttgaattgttgtcgtgaccttaacacttctcaagctcagagtcaaagtatcagtcataacttaagttagagttcggcttcttctcaacgtactttgtacaacgattttttcaatctgcctcaggttaggccaattactgaatttataaacttagtcatggtctgctttttttatgcacgaacatgctttgagttttttgatgcacaagttaaaaatacatattgcattattctttatttcatgtgcataatttggattaggatacatacttcatcactatttggaaaacaactaa

SEQ ID NO: 31696 - DNA, 477 bp, Medicago truncatula
  Intron number 1 from transcript Medtr6g092440.1 (locus Med tr6g092440) derived from phytozome v7.0 (chr-ID MtChr6; po s 19440917 to 19441393)
cttatataatatatacatacaatctctggttcgcggttagccattttcacaatctctatgtatgcattttcatttttcatctctttcaatttttgtcgattattgttgtttataaatgtctcgtctgtttctttgaaatatgttctgtgattgtattgggtaattagggttttaattggagattttctgttgtcaagggcttggaactgtgactaactgcgtgtttgattgcatgaactctcaattaattaatttctccaatttttgatatctcacaagcccagatgagtcatttgaagaggaagaattggcccaaaacaacaccctaccatcatccttgggattatcccaatgaggcaagtttgtttttgagataacatgtatcaaacaaacaattttaattagtttcttattttctccatatatgatttattcaccttttaatataataatttatctctaaaccagaagaagacc

SEQ ID NO: 31697 - DNA, 962 bp, Medicago truncatula
  Intron number 2 from transcript Medtr4g114290.1 (locus Med tr4g114290) derived from phytozome v7.0 (chr-ID MtChr4; po s 26092428 to 26093389)
aaactccgcttaagggatttcaggtttgactaatatatctacgcatttcttgtttgtttgttacatatgcttctatttggtatcttctaaatcacccttgccttatcccctattcaatatattaagatctgaggaattacgacatttatgataggtattttaaaaattgaatcgaacagtttaactagttgagccatgaattagcaatgcctgcaccatggttatttgaatggtttggtcagtcgtactttcgttccggttctagccatttaaagctgtttaaccatgactcagacggttcaatggactgaaccatgaattgaccctatttacggttcagttatttgagcgatttgatcacagttttgttctggctctagcattttaaacatgacctaggggtctcgctggttggatgttcggtttgttttttaaaacattatttaggacacatacatctatctccactcactcacagaaaaggaaatttgaaataatcttgcaataattatgagtcttttataaacaggttttcgcataaactaaaactagcttatgtatctcaatcttttgagaagctctctcatttaacttatgcataaatacatatgatcttatatggatttttgcaggtaaaagactataacttatttttaactgataagctggcataaggcataagttagaagctaatctaaactaggcctaactgaaattttgaagagaggttagatgcatgcttaatgtttgcattcttatttgataataatgtatgcaaaagacaatatttgaataccaatttttgagttctgcagaatatagagagaatccaaaaaaaatgacctatgatgtgctgtattcaaaatgaattcttcaccctctattctcattgaaaattatgcttgaaaattttacacttcaattacaagtaatgaaatagaatcttctacagataatagtga

SEQ ID NO: 31698 - DNA, 840 bp, Medicago truncatula
  Intron number 1 from transcript Medtr4g159960.1 (locus Med tr4g159960) derived from phytozome v7.0 (chr-ID MtChr4; po s 40444188 to 40445027 reverse strand)
ttgataatcttcctactgggtcagtagatttttcatttttcttcttttttgatcttgaatttgtggattatatgatttttttttttttttttttttttaaattttaattttgatatattttttgttatgatatcatttatatgcatcctaacaactaaaatctgttcagaagtagtttgactttcttttgttatgtttttttgttcaattctcaaactgatttcagcatgtaatccaatccatgatttgtgattgtattctggtactggcatagttgattgatataaaggtatgttgttgattagaggttctgtttatttatcaacattttttattccacttttggagatggcaaattgattttgacatatttggatgttctcgataagaattatgttgtctacataattgattgtgattttttgaagctagaattttgaatttttgcctctacaattgtttttagcctcaaatttactgttcaacccacttatttatattcaaatataagtaaattcagcccactttctgtcataatcaattttacgaatcagttcactaaaagtcgattttatcaccgcaaagccaaacacactcagattattcgaatgttgtagcacttaagaatttacatgattataatgggaggaatttactagcaaaccagtaataaaacatgtgatctctatccacttgttgatgattcagtaacattgaatggtcgtatcttattcctaaagcatttgattttgtgatatgaaagtttggatgatgaaacatgtgatttttatagcttttttcctttgagtaatttttcacattgtcacattatttgcaggg

SEQ ID NO: 31699 - DNA, 826 bp, Medicago truncatula
  Intron number 1 from transcript Medtr5g068520.1 (locus Med tr5g068520) derived from phytozome v7.0 (chr-ID MtChr5; po s 24524816 to 24525641 reverse strand)
acactctttgggccgaacggtcgcagtttgggccggttagcatttttttgtccagccctactacttagtattgtttcatgcttataggtctttgatgctttctttctgtttgattgtacatattgtattgactctattgttcttcctttgtacatcttctgctaggaagaacatcttgtttttggtaatatattccattttagcctcttcaaaaaaaaaaaaatcatataaaataaaaagttatttaataaaaatactacattaattttgattttaaaaatagttatgagtttttaaaattttatcatatcaactttcttatatatctacataaaaaaaaatcgcataaataagcaaataaaatctataactagtactccataggtttttaaatataaacaaattttgatttttaggttcattcaaattaatgatgtatgtggtttataatatagaccgcatacatcattaattgaatgaacctaatagtcaaaatttgtttatatttaaaaacggttggagtataagtcagctatttaactaatctttgtaaatataagagaaaaatattttataaaaacacattaatactcataattgtcatttaaatctatacacattatccaaacaattaaattgtttttatataattatcgcaatcttacgtgaaaattataaaaaaaaaaaaaaaaaaaaaaaaaaaaactaaagaggaataaaacaattttcaatcctaattttccaatttcccatattcttaaaataaaaaactaatttccaatatttattttgctccattctcatttatttataggtgagtgagtga

SEQ ID NO: 31700 - DNA, 663 bp, Medicago truncatula
  Intron number 2 from transcript Medtr6g046910.1 (locus Med tr6g046910) derived from phytozome v7.0 (chr-ID MtChr6; po s 10156780 to 10157442 reverse strand)
tggagtggagtcattttcggcgctcttgttgataggtttgagatctcttcgaactttgtctattagttcatgtgatagatttaaatccatgtctgagggtatcagatacctaacttgtctcgagactcttgaaatcagtaactgtccacaatttgtttttccacataacatgaacagtctaacttcccttcgtctactgcatctctgggatttgggggataatgaaaacatactagatggcatagaaggcatcccctcactgcaaaaattgtctctgatggattttcctttggtaacagccttgccagactgtttgggtgccatgacttctcttcaagaattatacatcattgactttccaaagttaagttcactaccagacagctttcagcaactccgaaatttgcaaaagttaattattattgattgccctatgttggagaagagatacaagagaggttgtgaagaccagcataagatagctcacattcctgaattttattttgaatctggtgcaaaaccaacattccctggtaatttaatttaatttaatttaaggaagccttttattttattcctttttattctttctaactatatcaaattatatggtgtgattttagacttatattgaacaatatgtgcagagaatatcatatcagc

SEQ ID NO: 31701 - DNA, 814 bp, Medicago truncatula
  Intron number 6 from transcript Medtr5g062300.1 (locus Med tr5g062300) derived from phytozome v7.0 (chr-ID MtChr5; po s 21899011 to 21899824 reverse strand)
acattgctaagaagtagtaagtggttatcttttgttattctgtttgttttagttatttctaaggcccgagaagattattttgctacctgattttttttgtgtggtccctgatgcttttgtgaagattattttgctacctgattttttgttgagtggtccctgattttgttttagttgtttccaatagttgtattgtttgttacattaattgtgttgtacaattggctggcatttgattctttagtcatccaaataatataactttgcaaaacaaacttaggtgaaaattgcagtgttctattactcagttttgttttatattatattttttttatagatgactaatctggttgctctctttgccacatacttcttgaaattttagctgatcccaattgaattttgtgaatttgaagtgctttgaccgcattgatttattatcgaagaatatgattatgaatcactgagatgaaatagaatgtagaaattttgagtaggtgatgaagagatacaacattatttataatcaatgttgatttaatatatttttttctcaactcttgtccaaaccctgtaaagtaacttctcaacttttaaaatgaataatatgatattttgcttaaaaaaaatctttctttttgctcagattgcataaaaacacataaaaagtcacaacttttctttactctcttaaatacatttgtctcctacaattgatgaataaagactccatgtagtgtatctagtaatttaaaattttaaaaccttgattaattcaggtccattgggtgatacaaaatcacgggtaggttct

SEQ ID NO: 31702 - DNA, 1002 bp, Medicago truncatula
  Intron number 2 from transcript Medtr4g128230.1 (locus Med tr4g128230) derived from phytozome v7.0 (chr-ID MtChr4; po s 30096436 to 30097437 reverse strand)
caatacgagaaacggtattgcgattttctgatttagatctggattttgtttaggtttatttttgtgatgtgaattgaatgatttggttgaattagggaaatttatgtgatgatttcagatggaccaagattagatcaaatttatgacttttataatcataatctgttaaaaaaatgattttttttttttttttttttttttttttttttttttttgtattttgactttttaatgtgtgacacaaccctaatagaacttggtgtgatgccgacgataattttcattgtatattagttttggaagtaaagggattgggttgttagttaggttgcaaagtgcatggttgcaaccacattataaaggttttggacgcctctgcaaccaagttgcgattttaactgcagctttatctgcaatttaaggcaatattaagagttgctgcggaactgtgagattaacctcgtttttaaatcttggtgaagtgtatcagggtagtatatggtaggctggttagaacagaacaaagctcgtatgttctattcatatgaagagtaaaacagaactagacataaggcagaaaaatagtacattttggttcaattaaggaggtggaatggaagagagtagaactggctttatagactttttcttattctgtcttgctttctgccaaatgctatctaaatccaaacaactgtgtagtgtatcgacattggcgcatttgaggactggtcgttttaattgatcataatgaattttctatctgttttgctgatgcatatagaccagtaacttgttgaaatttaaaccctctgaaatgccatgtttcttccttttggttgtttacatacctgattacatcataacaatttcgaataaactataagattgtatgcacttttttttatgtttacaaatcactgtgttgaaactttaaaaacaaaatatgctttccttttctttttaggttcggtccatacttttgccagcctgtaattgctg

SEQ ID NO: 31703 - DNA, 492 bp, Medicago truncatula
  Intron number 1 from transcript Medtr7g084330.1 (locus Med tr7g084330) derived from phytozome v7.0 (chr-ID MtChr7; po s 18189314 to 18189805)
aggttgaggtgagacaagatttttgtggagagtaatattcttttctcttttactggtatctatgtatctaggttctttctaattatataggttatgttttgcttaacattgttcaatgttaataggacattttttttaatgaggccagttataagtaacttcttaaaaaataaattcagaatacctttcaatctgatggttagatcaacaaaaattagtcttgagaaatcaaaatgggagtttacttactctaaatcactagtattattattggcacaaattgaattgatcataatgttctatttcaatcctgtgtaggctgtgttcagtccatagctgtcaattagaataatttaggcatcacatgaaaattgaaattgatacattttaacttgtactcgatttttagagataaaatgaaacaacattgttggtcgattttgatgaattatagccacagaaaaaataatgtgttttttttttttttagaac

SEQ ID NO: 31704 - DNA, 960 bp, Medicago truncatula
  Intron number 1 from transcript Medtr7g084860.1 (locus Med tr7g084860) derived from phytozome v7.0 (chr-ID MtChr7; po s 18402066 to 18403025)
gggtggattggacattacgtccgatgcttgatatactctatgtgtttcacgtaatataaattgtattttggtgagtttatttgtttataatcttttatggatcatatatatatgtaccggtatataagttttcattattattttccattaatatttataatttttctttcaacttgcaatatgattttacttataaaaatcagcattagctgctaccacatttggagtttgagttgtttcactttagcttggatgtgtgaaacataacaatcacagtcttaattcacttccaagttttaaccattcttaagttctatttgtatttgtttctgtcctgagcttgtcttagttttttttccctttgctatactttatattttaccttcataactttatcctaaatgtttctcatatagtttatcttgtgtcaaatgtgaacatccatttaatcatagaacatattaactcatattacctcaaaacaaaaacaaaagatagtaacttacgttaattttatcattttgaattattgtttatttcttgtcctctttggtgtcaatgaacaatggtacattagttttgtgacgagatgaatttacttgtgtattcatcggcaggatgcaataattacctccaaaatccttgcaataattacattaatattatcattgaatttttatttatttcctggtcttgttcggtttattgtttttgtaagactttagtgttcttttctactacgctttgtgttatataaaatactttctatgtgtgcggttccttcaaacagatgtgcgctgctgcattcatgtgaaattgaatatacaatcggcaaagtctatggctctgtcgtcggtggttcttcccgatgatctcatcgcagaagttctttccttccttcccttatatttcttcttcgatttaggtctgtcagcaagtcttggaaaactcttatttcca

SEQ ID NO: 31705 - DNA, 386 bp, Medicago truncatula
  Intron number 2 from transcript Medtr4g104610.1 (locus Med tr4g104610) derived from phytozome v7.0 (chr-ID MtChr4; po s 22909733 to 22910118 reverse strand)
ggaacaaaaggtactatatatatatatatatatgtgtgtgtgtgtgtgtgtgtgtgatatccattttccttcaatcaggtcttcttatgccttagacgctaatcaaatgaaaaaagagaatatatgtattatgttcggtatatcaaaggtcatagcagcctatatatagggagataaccaattaatgttctcgttattctgaaaggggttttggaacaacctttacaagttcttttcataccttatctctttttaatgtaggacttgagttttttccaatataatatcaatcgtgaactaacatgttgttttgtttggttgatatatagaagaactcattgtgttaattgccttttttatgaaattgtttttgattttacagcttg

SEQ ID NO: 31706 - DNA, 726 bp, Medicago truncatula
  Intron number 1 from transcript Medtr4g154410.1 (locus Med tr4g154410) derived from phytozome v7.0 (chr-ID MtChr4; po s 37907646 to 37908371)
tcaaaactcaaaccaatcctaccatttgcctataggtagtaacgttttcagtttataattatatatccattcatacaacaatttcatagcttcatttattttaatatcaatgagccattttattaatcttttggcacttctttgctcttcgctatgatagagcagtgcaattcatagagaagctgctaaatatacttcaacatatgaaaacttgtgtccaaacaaaatatttcatcttgctctacattaattgagggtgctggagttatgagatttctaacttccacagtatatttaatgatatagatcaaacagattcctttcgttcgatgagctcttaagtatgtctgatcgaagattgtttttttaagcaaatagtataaaatttaaattgtcaaaattttcttcaatgaaaaccattaattcaaatgaggcattcccctaccttactgccagttttcactctcatcacggaccttgaaatgatgaaataaacaacaattcctttttcaacaactagaactagttactccaatatacatgactaatattgtgatttgagatttcgatggtgtaaggcgacgatttactaaacaaaacattacgagtacgctctttcttttgtgtttttcaatactttatagtataaaaacatatacatatgctctcagttgctagtaaaaaaagaagattataatatccaattttgccaaaatactgaaacag

SEQ ID NO: 31707 - DNA, 530 bp, Medicago truncatula
  Intron number 1 from transcript Medtr5g101020.1 (locus Med tr5g101020) derived from phytozome v7.0 (chr-ID MtChr5; po s 40409950 to 40410479 reverse strand)
gcctagaacaaggggtacattacatatatatttttctgcctactatggctatgatatttttgttgcatatacacccaatttgatcaatgaattttgagatttagtcaacaatttttatttttatgcaattttaggatcgtatcaacttagtatccaacattattaatattctaaaatgatcattagagttatagcatgttttcaaatacatccttaaggttgatttaatttcaaatggatttgtgttattttcttcaaaaaaaaatgtatttgtgttatcatcaattttttttttttgaaagatgttatcatcaacttaatgttattatagtctgcgtagatatcaattcatgtataaatctgattaacattttattgttgatgtaagaaactaggtagatataatcctacaatttcaaagattaaattgaatatttattcaatattttgttatgcctacgttcacttcagtatcaatttcaacatttttttttgtggacacatttaggtggatttggtgggaggctact

SEQ ID NO: 31708 - DNA, 652 bp, Medicago truncatula
  Intron number 1 from transcript Medtr4g108600.1 (locus Med tr4g108600) derived from phytozome v7.0 (chr-ID MtChr4; po s 24084354 to 24085005)
aatctaagtatcctcaagggaagagaaaagtcaaggtatacttaaataaggaaactatagagttttattcttgctaagtggttttatctaaatttggtaattaaattcagtgtagctagagttcatcatgtgtagtactaactttttagctaaggttctctcactgtctttttgttaccactcttgacaaagagtctcagtttgtctaaagagctcacgggtaccctaacggtagatacacaataaaaaataatagaagattgcaatttttcaaaattttgctggtaattcgtagtaagtgtatgtttggtattatgtgcttttgccatgattctgacaatgttaacggcggtagaacttcgaactttttatagaaaatattttttcaattttcttaaaaaagattcatgtgtaacaatttgaatataccaatttaattcttcggggacaattttacagcgaactttcttttgctgcttacacattgtaattaggatatttaactcccatttggcaatctaaaatatattcacaacttagaccatttgagtctattatttatatataagtaatgccattattattattattataaatttgtgtgtacgtacatgtaggtggattggacaccagaattgcataggagatttgt

SEQ ID NO: 31709 - DNA, 839 bp, Medicago truncatula
  Intron number 1 from transcript Medtr7g076420.1 (locus Med tr7g076420) derived from phytozome v7.0 (chr-ID MtChr7; po s 15552794 to 15553632)
cgtgcagcctatagttggaagaaagaaaaggtgtgcattgttaaagcggttgaagaagcagaaacaaggggaagctaaataatctggcaatgtttcaaatcatctgttatagctagggtctttagaaagagtgaaacatattaattatttatgttgatcttataagtggaagtagattttgaaattaacattgaatttgaatagcttcacttataatcattttttatatttgcttcgctatcgaattattcttttagagatgtcatggatagggatgctcttttgatatacatgtgtgagaaaagcagatctacaagtgattttgccccaaatgttaacaattgcctttcgttgaaggagatactcgaaattttgatatcgatgaagagattgattcgaaagttggatcctaaatcatgatggaaccaaataaaggattatgaagttacaaactacatccttgcaaagttccctgaaatgtatagatgtatttttaacacaaaagttctcgcgaatatgcttttagagcaacaaaaatttcggtattatatagatgtatttttgtgtgctaagcttacattgcatatatgatacggggattctagttatttggtgtctatatttggtttgagggctaaacatttaagatgtcctgcaagcttataaactggttgtttcgtcgttttattttagcaagtatgcatctaatatcgtgtctcttgttctaataatttttctttttcccgtgatgatcttaatgatgcgggtgtttggagtatcactggatctccggataattaaactactcacagaagtgtgggagcacttatcagaaacaa

SEQ ID NO: 31710 - DNA, 467 bp, Medicago truncatula
  Intron number 2 from transcript Medtr4g140910.1 (locus Med tr4g140910) derived from phytozome v7.0 (chr-ID MtChr4; po s 34665085 to 34665551)
atgtgaaaaaacctcttcgtaacaagcacaagcctaagcagactaagctcaggttagttttcactgtgaatctctctttcagttattcttatcatttttaaatttattagattttgtgctttttatctcatgttatttcgatttattttcatagtgttgtttgtgttaatttggaagttatactttattataattattgtttattttaggtgaatcctttgaacacgattttagtatgattttgatttgctattatttgggatatggaataagttttagtttattgtaattactgatgcattaatatatgtaaaatgataaaattaaccactttttttaaataagttttagttcattgagattacatgatttcaatatttgtattttgatttatttaatttatttatttttttggttcttttttgtcttcagggcaagcatcactcccggcacagtgctgattcttc

SEQ ID NO: 31711 - DNA, 515 bp, Medicago truncatula
  Intron number 2 from transcript Medtr4g160200.1 (locus Med tr4g160200) derived from phytozome v7.0 (chr-ID MtChr4; po s 40542644 to 40543158)
aggttttgctctatctgaatcttctttttatgattttttatttttttattttttttacttttcgttgttttgattttgaactagtgtatgtttgggtttgcggtgacaaaaattgattttgattgaattgatcatgactaaaaagtgagttgaaggtaaactgatgtgtggttttggatacactcatgtaaaaagtttgtatctaaaaatcaattttagaatcacaagctacaaatcatagttttcaagtataatcaattctacaggcaaaatcaattttactttagaatcaattctacaccttcagaatcaattttagtgtaagatggtaacgaaaatttactttatttgctgagaatgaattattgatattttaaaaatgaactgttagttaggatgaccttgttatggatgttttctgattggtgtttgtggtgtgatttgttgttttattgaacatttgtttgttgttatttctagtttttgttgctgggcgcagtcccgttccctaaaga

SEQ ID NO: 31712 - DNA, 595 bp, Medicago truncatula
  Intron number 1 from transcript Medtr4g107670.1 (locus Med tr4g107670) derived from phytozome v7.0 (chr-ID MtChr4; po s 23571688 to 23572282 reverse strand)
ctcttagacaacctagagttattgcagaagtcattgtaagcactttttttcttcttaatattatagaacctttcattgcttttgtatcatttcttaaatatgattttttttctatttttcaccttcatgaccaattcattttagaaaataaagtatgtaatctcaactgttaacgagataatgaacgattgatttgatgtataaggtttgttattacgtatgtttagttagagtaaatcgctaaatttgcccttaaaatttcaagggttggcctttttagttcgtgaaatttgtgaattgacaaaaacatctctaaatttgtaagaatatcaatcaatttagtcattctatcaagttttttgttacgtctgacacgttaagtggagtggagaaaatgcattacaatattttgttatcatatgtgtcaaactcaaaatctctaaatcatgttattgactattttatttgagttcttcttattcaaattcatacacaaaattaatttgagtttggattgaaatgtctcacatgatgtttgtactgttgaaaaacaaatgcagggaggtatattactaggaccctcagcaattgggag

SEQ ID NO: 31713 - DNA, 716 bp, Medicago truncatula
  Intron number 2 from transcript Medtr4g137700.1 (locus Med tr4g137700) derived from phytozome v7.0 (chr-ID MtChr4; po s 33986386 to 33987101)
ggagcagttcttcttaaaccagacggttcttttatgtagaagggataatatatatccttcattaataaataatgaacttgcatgttttgtgaatctttatggttctctctaagtgtggcttggagatattttgtttttgaaatattttggacctcttgaatttcgaaccttaattaattatgagactttgttagaagttgcttctctccgtcttatgttttatcaggtgttttgaatcaattttcaaatattttgattcagtaattgcatgcatgaagaagtgatagacggtgaacaattcatttgaaagagttgttttaatatatcttgtttaaattgttttaatttattttgtttgctctactacttcgggtgtggaacctgggttattaaatataaagtttattatgtcttagttgtgattgattggtgacaaaatcctttagcatacctacaatgcatctaatggtacccttttttttgttgttgttacacatttaaggatacctttgtaagggctaaaataccagttatacttccattaatacatttttttaataaactttttattgttatcaaatatacgagtttttttgttgttgaaggaattaaatatttgagttatacttttattgtaattgtattgtattaaataatattttttcttatttttaatataatctacattattttttctttgaaattttaaggaccga

SEQ ID NO: 31714 - DNA, 443 bp, Medicago truncatula
  Intron number 2 from transcript Medtr4g165790.1 (locus Med tr4g165790) derived from phytozome v7.0 (chr-ID MtChr4; po s 41856215 to 41856657 reverse strand)
tcgaaggcacttgcaggtgattcaccttaagatcatttcactcttttttacaaaaccatagttctagtaattaaacttaggacaaaagatgccatcacttgagattttttcactaacagactactacttgaagaatatgtactatgttgtctttgatttcttttcaattttgtttttgtttatcatttgaagaagacaaattaaatagaactgcactttgagcattacttgatgatggaaacaatttcaattgaaataaagggccagtagaacagtaacagacctctttaaccccaaactaacaatatctgtgataagcctttttgtgtcttggactaattttgtttggaaataaacctgtaataatttggatcaaactgtttctgttttggactttgtggtgatgcaatttttgggctttcaactattacgcagtggacgac

SEQ ID NO: 31715 - DNA, 583 bp, Medicago truncatula
  Intron number 1 from transcript Medtr4g165790.1 (locus Med tr4g165790) derived from phytozome v7.0 (chr-ID MtChr4; po s 41856758 to 41857340 reverse strand)
ttcccccgcagttcttagcttcatcaacgaacaaggttcgtgtctactctctagtttccctattttcctctcccctatcttttcgaattgaagtgcgaaaacagcgactagccttttctccatcacttcaagagagtaacgagggttaacactctaattaaccacatattcagttaatattagttattgcataagcaaatattacaatcgaagagcaaattaggctaaactctgtttattacttcacaaaattacccgaacaatgaactgttactagggcacactttctctctaatttcatatccattgaatttcatcgacaacttgtgatttttttttattcgtttaacttactatgttattttcattagcgttgggaatttgggtacattcatatatatcttttcatctttctttcattgtttgaaatgaagttagttggatttttattcgatttagggtttatatggttttgactgtttttttttttttttttttatggtattctttgaatctactcttattatttgttttgtggccacaagtaactgttcaggttcggtgagaagggagagaaaagaaa

SEQ ID NO: 31716 - DNA, 785 bp, Medicago truncatula
  Intron number 2 from transcript Medtr4g097000.1 (locus Med tr4g097000) derived from phytozome v7.0 (chr-ID MtChr4; po s 20595348 to 20596132)
attctatttggttcttcgcgctcttgataccgttggttcgttactttttctgctttttctaacctcagtgatggatgatagatattggtttttaaattaacgtgtaaacccgtgacgcgaaccaaatcacctcatagcttgagcgaattcgggttaaatgcaagtcactacggattgaggagcttgttaattcaatttaatttttaaaagacttggattttatgtgaggtttagtgccagattgtaaaaagaaatgattttgatattaagtaattaagagattagatatctttttaaagaacagaagttgttttgtgtttgtttatggaaatgaaaatcaattaaaaaaaaacagttatttaaaatgattttctggagaaactactaaaagcaacttctcttttgaagcaatttttaggttttttgaaaatttgtaataaatggatgaaaagttgtaaaagtgattattctgtttgaaaaaagtgattttttcacgaaaaagatgtaacaacggctctaaatatcatcatccctgcactgtggaaaattttggttttgaaatattctgattgatgtaactcagacaactagtttagaaactagtataagccaattacacgcagtttgtaatattaccctgtaatgaaactgtttgtctatattgtgttttgtcttttgaatatgaattttatatatttgaatctcaaaccattctgattgaagttccatagttcaaaaattgagaggatctaatgtttttgtaactcttcttgttttggcagagg

SEQ ID NO: 31717 - DNA, 537 bp, Medicago truncatula
  Intron number 1 from transcript Medtr4g111260.2 (locus Med tr4g111260) derived from phytozome v7.0 (chr-ID MtChr4; po s 25412692 to 25413228)
ctggtaagtaatatttttttcattaaaaattcttctttggctttaggttatccaaatatttttctgaccacaaactttttggccatagtctttatcagatatgctatagatttttttatggtggtgtgacaaatcttataataaatccacactttttgaatttggaactgtaaagctgattttgctttttccattgccatttgagtttagaattgtttatattctccaacagattttattttcaaaatatctaggataaataaaagtactatctcccttttccaatctactttatcctagtattgtgaacattgaataatagtgtatcaaggaacaataatgatttgttcaagtttgttgttatttgtatattgtatattgttttgatatattttgagtttcataaattttgaattttaagagaaagttttgtttttcccttggcagttactgaacttgtggaaggagattcatcaaggaaaatagtggaaattatatgcaggacaagctggttaaagtcagaaaaccactgtggca

SEQ ID NO: 31718 - DNA, 984 bp, Medicago truncatula
  Intron number 1 from transcript Medtr4g080400.1 (locus Med tr4g080400) derived from phytozome v7.0 (chr-ID MtChr4; po s 16512044 to 16513027 reverse strand)
ggaaggtctgtatttaactttataatgtaatgtacaccatgtatttatgttgataatgcatctttttcaagaaattgcatgttcttcaatatgattaatgcatgtgttttaattacaatgttatgctaatacactttgaattacaggaaggattattgatgtgtgatgaatggaagacattaactcaagaaagtgcatagttagtgaggagcttttttggcattgcagctcgataatttgttgcaagtccaaccttttgtgtttacaacttaagtaatttatgataatgacagcttttgtattaatctctagcgtgagagaagatacgcatgttaaacttgtatgatgttgtttctgggtaatgagcattttgggacgagcgatttttggcctccattcatgtctttgtgccaagactgtgatcgctgtcaactttatttttctaaatcatgatcatgacattattttctaagagtttaacttggagtagtaataacaaggttcgggaaagttctaaccaattataaggacttgctgcgggggcggttaatgatggaaaggttcaaattatttggtttgctagcatgcgttctgtggaagaagagaaataaggtttcattctgtgggcgagtgtttgagaatttaattttggtaaagttagggaaggtggtgtggaagatgattcaaaaagttgtgtgaattgatatatgattgtcatcaatctgatttagctatgttatttttcgttcagtcatatgctacaatgcttcattttcgtgtagtcttgctatttgatatttgttgaagtttatcatttgattttgaaacgaggttgttcgtatgataatgcgttagagggctaatggtttttggtgtaagcataattgttcccagtttctcggtctacccctcaaagcgtaggatagcatgcttctaggtagtgtattttaccagaaattagtcaaaatacgctaccagaagcac

SEQ ID NO: 31719 - DNA, 578 bp, Medicago truncatula
  Intron number 2 from transcript Medtr7g037530.1 (locus Med tr7g037530) derived from phytozome v7.0 (chr-ID MtChr7; po s 8953698 to 8954275 reverse strand)
attaccaggtattattaattttgtactatcttcctctctataggcatttataaataataaaaaaaattgtaaaaaacagatttctattttaatttaccaattatacaaaaactaaaataaaaaatcatatcaagagttaggataataattacaccaaaactaagcattcgtttattttgaaaagtgttccattatttggaaattttaaaaaaggatggaatagaatggtatctaataccatccatcccattccattatttaccagttaccaccatttttcttcctctctaatctgaggggaatgaaaaggaatcatatagtaactgaattttgtaattattaaaatactatttcatccacgtgttttaaaatactatatcaaaataccctggcatcacactatgctcaagttgtatgcagtttcacaaaatcatgtttccatttttctgtccaggtcttcacagtttaacataatttcaaagtttacgactgctaaaaatgaacattggcatggttgtttacatttcttttttttttcgttaggtacggtcaaagttaacatcacttgataatattgt

SEQ ID NO: 31720 - DNA, 621 bp, Medicago truncatula
  Intron number 2 from transcript Medtr5g067150.1 (locus Med tr5g067150) derived from phytozome v7.0 (chr-ID MtChr5; po s 23810217 to 23810837)
tatacggtagtcattttcatctttgggtgtaccgcatatatacgacaccttgtatttagtctttaaaaaatataaatagaacattgctcttttaaaaaaaatacgttttgattttatcactggcctcaaaaaaaaatacgattttgaatttatcgccggcctcttttcattcctaaaactgagcctctgaattctcagggacggccctggtcaatgaccaacttgtgcaaaaaaaaataaaaaaattgaccaactgaatgttggttgacttttaattgcaaaggaacactcttctttattcttgattatcgtaagcggcagaattcataataaatagcaattctctaaaaaaaaaattgtaataatcaaaatcttatctgtagttaaattaaatcaaagtcttatcttcttaaaaaaaaaaaaaaatcatagtcaatgttagccacctttggctttcacgaatcaacattattaattgttttttgaccggattattaattttgagtccttgaaaataaattacttcccagattccttattagtataaaaagaaaaactaaaaacatcaaaaccaatgtcttcctacctagaaagtctttcctggtctttggaggattggag

SEQ ID NO: 31721 - DNA, 634 bp, Medicago truncatula
  Intron number 2 from transcript Medtr4g110530.1 (locus Med tr4g110530) derived from phytozome v7.0 (chr-ID MtChr4; po s 25056799 to 25057432 reverse strand)
acaacttagtggtcaaaccccagtgttctccaaaggttagttatgtagaaatttattaccgagttcttatgcaatgctggtaatgagtgtggattttagcgatctgaaattgtaatgtgtttcagacaaaaaaattaacttgggtttcgtatggaatctaatttagggttaataatgggattttcaattgcgttatgttttagtctttaaataacaatgtgaaagctttataatagggtagttatggtagtttgattttgtagttattggtaatgatgaaaggtttgaacttgtgactaaaattgtagttatggttgttatgggtttcggaataggattaatgtaagcattcaaatatcaaatccatacatgtaagaaaagaaaagaaatgtttaaggtctttgactcattgatgtacttgaacattgtggcttacttttgctcaattaaacctagtttccatgctaaaaagcaggactctatctaatgtactttatgccataaaaatgtactttatattattaattaattcttataaactggctattatattggataaatgtggttgtctcatttttttctcctttgaattttgacagcgaggtacactgtgcgatcctttggaatcagaaga

SEQ ID NO: 31722 - DNA, 630 bp, Medicago truncatula
  Intron number 9 from transcript Medtr5g075060.4 (locus Med tr5g075060) derived from phytozome v7.0 (chr-ID MtChr5; po s 27261057 to 27261686 reverse strand)
cagattctgtgagaaggtatccgtcatatttcatcatatatactatgtgaagttccagttttgaacttttagacagacttaaatctattgctcatgctgcatatatataatcaattgtctttaatatatatagttctatgtaactatagattttaaagacgcagagccgatctaatatgtttaaagacctaaatcaaattttataacgagaccttttaaaataaatatagaattcattttattgagtctaagactagtaagatataaggccttcatccaaaccaattaaaccgaagaacatttacaattagtttgtcatattatgtatctataataaaattgaaaaaaaaattaggcgttttttgtttgcctgaaattttgaagcctaaatccctagcttgggttggttgacacttgggagttgggactaccatgtaaagaagctatgtggccgcaattgtatttgattgcgatgtggaccgatttaaaaccttgtcgagagggttttttttacgcaaacttgagaggttaaatctaggaagtgtaattattttggaaatctctaacaagagtttgttcattggatttgttacaggaatctattaaccaatcattattaaacttgctaag

SEQ ID NO: 31723 - DNA, 837 bp, Medicago truncatula
  Intron number 2 from transcript Medtr6g025480.1 (locus Med tr6g025480) derived from phytozome v7.0 (chr-ID MtChr6; po s 5732756 to 5733592)
gagttgcagtggtaagttataacaatgcatcaatttttttattctatttcaattagtattgtcattttctcaagaaaaaaatcaagttaattttgtgttagaactggaaaatgaagaaaagatcaaccaccctttaatatatgttatgtttcattgcatgaacctgactctcaatatttgatttttttgtcaagtagcatgcggctagagaaattcaccttaaaggtgaataagtggagtgttttggcttcgaactccggtccctacatataatatgtattatcctttatcaagagagttaagctcaaggggactgattgtaattagaagagttaaataactataatgatacattaattagaaattaattataagcttgttcaattttactttaggaagtcacaacaataacacattcatgtgagtttagttcagtagatagggacattgcataatatatatatagatggagttcgacttcgaacttcagacaccacatttcttcacatttaatatgtgtgaacttgaacactagactactagaaccaaaaacattaacacataacacaagtgactgataaattcttccaaaaaaaagtgcatgataattgatgaaagaaaaaaaaatgaggcaacaatattttaatcatacacaatttataaaatcctactatctaagtctcaatggcttctaatatcaaatatgaatggtctttataacaagtatcctttacaaaatctaatataaattatgctatattattgatgcaaattaaggaacttaattctatattactaaactatagttgaatattttgagacttgcttgtgagcagg

SEQ ID NO: 31724 - DNA, 707 bp, Medicago truncatula
  Intron number 1 from transcript Medtr5g048900.1 (locus Med tr5g048900) derived from phytozome v7.0 (chr-ID MtChr5; po s 20796861 to 20797567)
ttgcattgtcgctctagtataattcaaataacctaagtgttatttttaattatctaaaattatcatatgcaacacaattaaaatgttttaattttttttatgtgtttttgtttaaatattatatcaatttttatatgtgttttctaattagctaagttcttattaaatactatataaacttttaattattttctttatgttttaaaattatgcacgtaatataaattgaaattacatgtgcgtgccaatttaaatgttttaattttttttatgcgttttttcatgttttaaatgtgttatgtcttaaactagaaatatgtgcgccaatttaaatttgtgacccatctgatgaacagtaacccgacaagggtttaagcggcgctacctctcacggtggttctgccagtctccttttctccagacttcttcgtttatgggtgttcaccggtcttcaaggcacgttttctctcgcgttcttgattccgattgactgatactgacaattctgggttcgattgcttgtgtacgattcagggttcgagtgcttgttccgattaactgaccatgctagcgcaattgggtttctggttgttgggttcgattcgagcttgttcagtttccaggctgttgttctttgcgctgggttttttgatctgatactgcaatttgtcttgtttgttctgctttgtaggttttgaaggtctgcg

SEQ ID NO: 31725 - DNA, 762 bp, Medicago truncatula
  Intron number 1 from transcript Medtr6g013260.1 (locus Med tr6g013260) derived from phytozome v7.0 (chr-ID MtChr6; po s 2759832 to 2760593)
tgaaggcatcggccttggaagctgcctaaacacaggtactttatttgtttgtataatatatcataaatattaaataaataaaatagtatattccattaaaaaaaaatttactgctgtatcatttgtgaaaagcatgtttgctatcagctacaattttctttgattggagaatttttctaacttctaattttttgtgagagatgaaaacaaaaagaaaatgaatataatgagaactggaaatcaaaatgagatagaaaaggaacaaatatagatgtgaaaatagaggacatatacaacttacaaatgagagcacgttgtgaaaataagagaaagttgaaagaggttgctacaaagaagaaatgaagtcagagggaaatttaattaaggtcaatacttggtaatagtgggattggaccatgataataataataatgataatgatgataataataataataataaaatatatatagtttgcaccaagccaatatgattttaatacgacactgcttagagcaatataaattagtatatatcatgtttcaatgatgtaaaattgaaagaatagtaaacaaaacttaactattcatgttggtgtgtaaattagaaaaaaaatcctactttttttattggttgttgatatttgaaaaatgcaatttttgcaggcgaacttcagaaatatatcagttgcagtcatgggggttttcttttctctaactactccaattggcatttgaataggaatagcgaaaactaatagtt

SEQ ID NO: 31726 - DNA, 830 bp, Medicago truncatula
  Intron number 1 from transcript Medtr4g092660.1 (locus Med tr4g092660) derived from phytozome v7.0 (chr-ID MtChr4; po s 19433520 to 19434349)
tccagattcagccagaccctacgaaacgttcaagggtaataatcatttctcatattcattcacacagatctcgttcgtgattttctcattcttcacaatcacaatccaattcaattcaattaattgctcaattcatcattatccgctgcttattcaaactgattcgcataattatgatatcatgtcatgtctccctcttcattagattcattcattcatttattgaaattatgttacttttttcttttattattttttatatatatttagttccaatgagatgttagaatcccaaaattcagattttgccttaagaaatctatctaccttgagctatcgaatcaaacattattatttagcctcagcgcttattgttaaacttagtgagtgtgttttggctctatgtcggagaaaattgttttgtaaaactcattgtagtttttttttttttttgaacaaagaaaactgatcgtagtttaaaactagtttaaggtaaaatgattgatgtttggatacgttcacgccaaagtgaattgaatatgcttagagccacaaactacaaatcctaactttaagttggaatcagttttaaagacaaaaaaaaaaaaaaaaaattctaattgagaaccgcaaacataccataataacttttaagtcttcagaatcacttcgagaaacacatgcacttatttttatataaatttatcaaaatacgagacactttatagtctctttttgtcaccagagaactagacacacacacacactcagtgtagttatcgatatcaatttacgttctctttacatcaaggttgctcaaaggtcgtagc

SEQ ID NO: 31727 - DNA, 707 bp, Medicago truncatula
  Intron number 1 from transcript Medtr5g017120.1 (locus Med tr5g017120) derived from phytozome v7.0 (chr-ID MtChr5; po s 6097849 to 6098555 reverse strand)
gagggttcaggacttccttattataggattttgatgtaattctgccttttctatttttgtttcttcctgatgtagactttgttatgggttctggccctcttcagttttattgaatttcttcgcttgataaaaaaaaaaaaattagattttcacctatcacctaggttttcaatttctattaactaaagcgaaaggggaaatatggtttcgtagacttcttctacttttgttgaatgtgggaacactaaaatttagaaacaccatgatatattgccttgaccagtgaacaaacatcatgtcaaagaactagtactactactatatgcagtgagccctgtagatatggatgtgtttaccttttgtgttatttcttgttcatttcgttcttataaatcaaaaaacatagtgacattgattaggaaaataatctacgtagacacaaacacccattctacacccaagatataaaaaaaaattaaaaaaaaatagagaaagtgatatgataattgtgatacattgatgatgatgaattgttcaatgagttgaaaattaaaaattgagatgtataaatattgttactctattattattggtttgcactagctatggggctaagtaatgactatgctctgcattcatattagagttagaatataacattttcttcacaaaatagtcctgaacaagttattttgttattgaaacag

SEQ ID NO: 31728 - DNA, 448 bp, Medicago truncatula
  Intron number 1 from transcript Medtr4g118260.1 (locus Med tr4g118260) derived from phytozome v7.0 (chr-ID MtChr4; po s 27441778 to 27442225)
aaatcccaactgttcacaccagatcttcgattcatgtaactcttcttcattctacttcttatttttttgtttttttagttcaggttttggttgattatagtttgatttgaatgtatttgatttagttttattgtttgtaatgttttgggaattttttttttcatgtatttgtagaccctttttgtgtttttttttttttttttgtcgtgtgggttattgattaatatgtatgaaatgattttaggttatagattttaatgtagtttttattattttatttagtttatatgatttgaacaaatagcttaaatttgtccattcttgattgttagacatgtatttgtatctatagaagaatttaatcactttttttggtagtatattttaatttatttgtccattcttgtagttgagtaaaatactatctactagcagcaccattttcgac

SEQ ID NO: 31729 - DNA, 450 bp, Medicago truncatula
  Intron number 2 from transcript Medtr4g118260.1 (locus Med tr4g118260) derived from phytozome v7.0 (chr-ID MtChr4; po s 27442256 to 27442705)
gctgcgttcttgcttctttgcattggtgtgttcaggtataagttttttaatgctatctatagagatttacggtggatcaacatcttccaccattaaatttaactagtttgtgtgcatctcattgtattttccttctccgacatcttccctcctctcctcaatcaatacatcctccactgtcttgaccaaccttacaagagctttttctactaattatgccataggtattactcatggaaattgagatgagtactcttttttgtgcactgacaatttgagatttttgttgaaaaagacacgatctttgtagacatgagtacccagaaaatggaaacgccgattaaccacttatgtgggtttacctttcaacatgcatttgaataaggggatctaacttggctttagaggttaggttgttagaactggccaagctgataaaagcatccacgt

SEQ ID NO: 31730 - DNA, 757 bp, Medicago truncatula
  Intron number 1 from transcript Medtr5g041710.1 (locus Med tr5g041710) derived from phytozome v7.0 (chr-ID MtChr5; po s 17914211 to 17914967)
agttttgtatttttaatcgacacttctgaagtaattttttagtttttatcatcgagtttcatgattcaatgttttgttttgtatcttttcttgggtgtatatgtgaatatacacaaattaaatttcaatttatgtgcgatgataaaaatgtttgatttttagtaacttttacttttcagtccatctgtgcattttgtttttgctgcatgatttggatacttttgaagggggcatatatagatagagatagcatttgtgctagcatttttatatggtttcttggtatgccagaattagtcccataatgaagttgcaggaggaatggtagtaatgcagaaacgaatataacgttctttactgaagatttttcattcgagtggcattaacctcatttaagtgactttatcttggtattaaaatcgtgtaattcgctacatgttatgtttggaaaggtttctaagtttcagttattcactgttgtagaaattccctttttgtggtgtttttggagaagaaaataatgcataatgaggatcattggtggcagatagatagatggaacattttttatgatttcgttctattctatttataattgatttggctatttgattttttgttgtttatgtttggttttcgattgcattgttataggatattttctatgaagctattttatttataacagatatggctatttgattttttacggcttatcttttgttttccattgtgttgttatagaatattgtctgcg

SEQ ID NO: 31731 - DNA, 587 bp, Medicago truncatula
  Intron number 4 from transcript Medtr5g017820.1 (locus Med tr5g017820) derived from phytozome v7.0 (chr-ID MtChr5; po s 6452790 to 6453376 reverse strand)
tgcgctcttcttctctacgaaaagctgctttaagggtgtgtctctttatataaatccttgcctgactttaaaaaactagattttgactgtaaaaaaaaaaaaaaaaaacctgattttgatccggaatgagcctctattgaaatgtatgtcctgttactctccaaccttgattttcaccacttcagtactgccgctcttcttctattaatatgattagattttcaccagtgtttatgtcgaagctaatgttcaaattgtagctaaagttgattgttttccaaatattgagtagcagccctgccaaacttttcagagtttttctttttccaacatggcagactcaatttctgtttctatagatgaaatgagttttggaagtttgaagttaaagacgtgacaaaaaaaattatctatacattgtttcctttcaaaccattaggcgtgagcaagtctttctgctattttgtttgtttttttttcgtcttttttcttttggtttataacaatctatgtacttctcagtaacttattaaaaatgttatttctatgggaattgggacaggctttgtctaaggcattaactgtgg

SEQ ID NO: 31732 - DNA, 362 bp, Medicago truncatula
  Intron number 3 from transcript Medtr5g007470.1 (locus Med tr5g007470) derived from phytozome v7.0 (chr-ID MtChr5; po s 1137421 to 1137782)
caggaaaacataaagttgaccgttaccctgaacctgtaaggaacctcttgaatgaattatgaatgcaagttagattgctgcaatatatttgttcatatatatgctgaacactcgcagttttattgctgcaatggttttttttttttttgggatgacacaaattagattttagaaactgctcttggatgtttgttaaatcaaatgagcggtgatttgtatttaattttgttcctattttgttatgaggctgtattaggtgttgaagaaaatgggttgtttgccaaattagtaacttctttcataattcgtttctcaacttgtatacagttggaagaagtaagaaagcaggcttctatcctcga

SEQ ID NO: 31733 - DNA, 287 bp, Medicago truncatula
  Intron number 2 from transcript Medtr5g021210.1 (locus Med tr5g021210) derived from phytozome v7.0 (chr-ID MtChr5; po s 8053144 to 8053430)
ggtttcaaacacagagtcaccgacaatctccaaaggtatcatcagattcttctaattcacccactcaattttcaattcccacaaaaaaaaaatcagtttttttatccgtttttgagtttaatagtttataattcttaatgggttgcctcaaaaaagaaaaatttctaaatgggtcgttcaaagttgttgttttttcctttctcttttgatttgttatttttcgtaaaaaaaagtactttttatttgtggaaggtgggttattgaagtgggtggagctcctgggacac

SEQ ID NO: 31734 - DNA, 598 bp, Medicago truncatula
  Intron number 1 from transcript Medtr5g068280.1 (locus Med tr5g068280) derived from phytozome v7.0 (chr-ID MtChr5; po s 24399547 to 24400144)
ttagtacaggtacagaaacagggcagaaacctttactcaacttacaacatgaatttctcatactttactcaatgaaattcaacgattcttgagccttttatgtaagtattttttgtctactttacaaagattcaagtttcactctcaaatgatctatgtataaaaatctatgatcaatttactaacagggtagccaagctgcaaattgcagaattttcaatctattctttctttaacttactcaattgattctacatctactttcttaatctatagagtattactatgatacaatggtataacagtgttattcgcaaataatattaactttaacatccttgccaaatttaatcaaatgcatttctacaaatttttttagcactttcacacatattatactttgagcaattcttatcatttcagtccgacagaaaacatatagaaacatagaaaatcaagtaataacaataaaataaaaaatcaatgcattcatttgggggaatttttaatcatgcaaaataacctaatttttttatgttatctcactcaatttcataaaatcaaactcaagggtagtactacactaacaggaactcac

SEQ ID NO: 31735 - DNA, 655 bp, Medicago truncatula
  Intron number 1 from transcript Medtr4g161130.1 (locus Med tr4g161130) derived from phytozome v7.0 (chr-ID MtChr4; po s 41091406 to 41092060)
tcaagtaatctttcaagttctcagtaactaatattaaacaaacaattctactcccatccttttcctgtcacaaggagtttagcaataaatgtaaaagttgtcaaattttacttttaaagattatcattaaaatagtttgtttaaaataagcttgaagcgataattctctaatcttatacaaatataatcataacctcatcatgtctaaacaattaaagaagtttagctcatgatgagtttaaccacaaaagcaaaaaataaagaagagatgactaaaaacatgataactatataaatggagaagttaagagttaaaatatgattacacaccaaaatgaaaataggtgagctttttgcatcacttaagtaattataagtctaactcactatggaagatatgagatgaagtgagaattatagtgattgttaaccctagttggatcttggctcaatccaaacatcaaatttcgaaccctaggcatcataatatggttgtccttttatagtacaagtctaaccactacaaattgtgtagtttggtaatctctcctagcatacgtccttgtcttatcctcttggtactcaacatattcttttattcctcatactacaatcattagggacatctcgtcgaacttcgtccccaagcaaaggt

SEQ ID NO: 31736 - DNA, 601 bp, Medicago truncatula
  Intron number 6 from transcript Medtr4g135950.1 (locus Med tr4g135950) derived from phytozome v7.0 (chr-ID MtChr4; po s 33133859 to 33134459 reverse strand)
cgtctgaggtgtggcaaaaaaaacaaagagaacaggtttgacacttttacagtgagtataaactataaagtaaagtgagaagatcaaccgttaatattcttgattttacactctaaaatgagtgtctcactttgaatgggtcaactcctttaaaaatattctattgtgtatcattttcctatcaaacgattgaatgagttaatttttttaggaaaaagataggtagacaccctttttcatacaccacttatgtacacccatatgttaggggtattttaataattttatatcatatcatcactccttttcatctcttctttcaatatttttgccacgtgtcacaaatgtatgtgggtgtaaaagggtgtatgccacctaagatggttcatgtataagagctcatttttttaaccaacttcaaatcctgaagacacaaacacatcttagttccacacctccaaattttttattttttttaaactcacgctcactcctaaagttttgtttctgtgacattgaagataaaaataatcattatgtcgtttcatcaaaaaattgtgttgtaacttcttgtgctattatgtcgtttcaggggttgtat

SEQ ID NO: 31737 - DNA, 968 bp, Medicago truncatula
  Intron number 1 from transcript Medtr4g135950.1 (locus Med tr4g135950) derived from phytozome v7.0 (chr-ID MtChr4; po s 33135118 to 33136085 reverse strand)
ctttgattagtttagactgcacaacacagcttgtggtaagatttcaactctcttgtttgttgcattaatttaaattcctatgtttataatatgcattttttatcttctagttaaaggtctggataatatagtctatacagttgccagtagttgtatgattggggatattagagtttatgggcggcaaacatggctgttaaatcattttttaagggtgagtggttgggtttacttaaccacttaggttttggttatgatgttgctgtactcattccgttccaaattataagtaaaaaaaaaaaaatcacacttgttaagaaaactaaaacataagaatttagagtatagttttttgtgttttctttgaaaaaagttttataggaagatgtaaaaacaattttcattggctattggttatggaaaaaataaaagagagagaaaattgaatgtaatttgcatttaattttatgagaataaacaaaagtttttcttggaaaatagatttttttttaaaaacaagattaaataggataaaagtgtgtcttttttgcttatattttgggacaaagaaaatgagttttttttttacttatgttatgggacggagggagtagttgttttattttcaaagtttaatttaaaattttggatattgatctagagtgtaaggctatgttttaatatgataagtaattgtgtaaatggaaggcctttttgcacttaactgcttaggttttgtcattgttctgtagaaatttcttgggatacaagttttataacatagtagtcttttggctaatgtcatttgatcctatccaaaatctcttaaatagtatcattatgttttagatgatagaccctgtggcttgatgtttggctcatgtcaaatttctattttaagtggagacaagaaattttaacttttaattcctaattcaattgtggtgttgtaactcccattataggcc

SEQ ID NO: 31738 - DNA, 997 bp, Medicago truncatula
  Intron number 1 from transcript Medtr4g092310.1 (locus Med tr4g092310) derived from phytozome v7.0 (chr-ID MtChr4; po s 19192004 to 19193000)
tctgctatcttcagcattggtgcttttgggatttggtaattttattcattcatttctctcttttatctattcattttgtgtaatttggtctcattgattttcctaattccatttctttattgtttgttgagaaataggataataatgtttcatacatattctgtttttttagcttattacttataacttatgtttgtaataagttcatttgactaaaaaaatacctgtttggtaagggtcactttctcatgagcttataggggtttgtgataaactaattcaagtagcttatgcctcactgttttttatctcaattttacccctgcaatctcaattggaaaaaataaatattaattaaatgcacattttttgatatcattttatatttataagcaactacaacctctgttaaacaaaagctacttcaactattaattttatcaaacagtgcaacttcaataagatagcttgtttgctatcacctataagccagcttataagtcattcgctataagatagtttatcagctatccacttattttttcccaaacaaaacataagggtatgattcaattagttttaaactgcgcattggggcgtcaagtaacttttaaatttgttcaacttttaaatttgttttctagtttgattaatataattccaagattatatgtttgaatggtttaacccgcttggattagcccggtggtattaactgggacctgagagtatgctcctcttcaaggtttcaggttcgattctctctgatgttaatttgggtgggctaaagacttatatttgaaacaagtgaatcaaaaattattgaagaacaaaagctaacacacaataaactaatttaaggaccaaatgtgcagttattcttatttttataagtaaaaattatgatatgttatcattgatatgcatgtatatatagtagatgaacttttatacattgttgtgaaatacaaggtcggagaagactaaaattgggagc

SEQ ID NO: 31739 - DNA, 762 bp, Medicago truncatula
  Intron number 1 from transcript Medtr4g121380.1 (locus Med tr4g121380) derived from phytozome v7.0 (chr-ID MtChr4; po s 28442630 to 28443391)
ctgttgagaaaaaagtacttcctgctttcaagcaagtaagacttcattcatattcgctccaaatagaaatctcccagagacaaataaattttagacttgaggcattctaagaggtcatttgtgaaagatttaggcttacaagtacatatgaaatgtgtggatgtgatcacgatttttgttgtgattgttgttcggtgattctagaccaactgtacttttatttgaggcgtttctgcattttcatctataactaaaatatagtcacaatctcccatttaaatgactgtcatagtggttgtatatcactcatatgacaatctttgaactgtgtactagtttttatcatcttttgttttttcttgtacttttctatgttttcattaattctacaatgattgtaattgtttgttcctaatagtggatattttactacagttttctttagttaattcttcacttttgatagctaggaaacatgatacaatgtgtgaaacaaagggtgacaaatgtgagcgacgaaaaatggctcagaaattctaaagtttgctatttgtaggaaatgaaaagaacatattttattttctacctgtgagtaagaaacttaatgataccaccctactctaaagtatatgtcttcagattgaattatcttctcccttgtatgcatgagtaatagccataaatatatgttgaaaatgttcaaaaacagtgtgagtattcctccgattatattggttggcttgcaggaagtacttggtctct

SEQ ID NO: 31740 - DNA, 724 bp, Medicago truncatula
  Intron number 3 from transcript Medtr6g086240.1 (locus Med tr6g086240) derived from phytozome v7.0 (chr-ID MtChr6; po s 17543392 to 17544115 reverse strand)
cctgccatcacatttgtcttggcctcagctttaaggtaatatatcaatcatgtctcctagagcctatttgaatcgacttatttgagcttatgtatttgcataagcacttgcacaactctttgagaaaacttatgaaaacaaattatgacatgtccattagttgcttttagcttatttccataagctctttaggatagcttatgaatataccatatagcttatacaaaaacaaaatgactttattttatcttctgttgtggaaataacttgtacaaaagcacttatatgataaacactttttcaataagagcttaatttaattttttgatccaaataggaagtacctatttagattgacttatttgaacttggttacttccataagcacttgtaaactattcaggagatcttatggaaacaacttatgccatgttcataagctgttttcaactaatttctataacctctcaaggatagcttatgaaaaaacttatagcttatatgaagacgatttgacattattttatcatttgttataaaataactaagacatacgcacttatatgatagacacttatgctatgactttaagtgcttaataagttgtttatctaaacaggtagtaacattcttttttagtttctattttaatttcatattacaactttgataagtttaatttgtttttctaccagacttgaggaaaccaacattgcaagaagag

SEQ ID NO: 31741 - DNA, 442 bp, Medicago truncatula
  Intron number 2 from transcript Medtr6g086240.1 (locus Med tr6g086240) derived from phytozome v7.0 (chr-ID MtChr6; po s 17544163 to 17544604 reverse strand)
ttattggttcaattcttcctattggctttattggggtaagaaagtatataaacttaaaaacttcacacatttattttcttttgagggtctgcattcactttcctaaagtaaaaaataattccgaagacttaaaatcggtcttgatatgtttcgagattctcgattagaattgatcataatttgtaacttctacctgcaaacatgtttcttacgctcaaagttattattcaattcactttcacatgaacatgttcaaatataaataatttgaacgtaaagtcacttttaactaaaatcaattttataaaatctattcgattaaaaataattacgtcacggtataatcaaacaaaaacttaatattagttctaaaattttcttctttttcttttttgttggtaatgtaggatcactgcaaaccaaggattttacttgttgggat

SEQ ID NO: 31742 - DNA, 601 bp, Medicago truncatula
  Intron number 1 from transcript Medtr5g027040.1 (locus Med tr5g027040) derived from phytozome v7.0 (chr-ID MtChr5; po s 10974957 to 10975557)
ttcggactcgcaagtaagcttcttcttttgcatgcccttgttttcttctttttcgatttttatttttatttttacattaattgaaaatggtatctgaaactagatgttattaggttaaccatgtgtagaaggtgaataagggatttttccttggagtgcacaatttttggtctacaatgtacacgccagtgaaattttcaattttagaaccttacttgaataaaaagagaaatttttctagggctgtttataattgtgacaccacgccattaacaatttgagaaaatgaaataattcaatgtaaccacatttgtcggtgcctgacattgacacgtctctagagtcagacacctaacatgccttccattccatcggaatttgattactacaggggatagtttaaaagattcgttaaaggaattgttgtttcctagtagttttttgagttttgacatcgttgaatgatttataaaccaatagaagcaagttttactcctcttacaaccaaatctgtttctagcttatgtgccggtgattggctgatgatttggtgtttttatttacaaacagacttctcattgtagttgatttggaagttata

SEQ ID NO: 31743 - DNA, 568 bp, Medicago truncatula
  Intron number 1 from transcript Medtr6g096270.1 (locus Med tr6g096270) derived from phytozome v7.0 (chr-ID MtChr6; po s 20942183 to 20942750)
aattttgtgttcgacactatttgatttgattgtgattaattttttaacttaacataatctcgattcattgaattaatattcttttcaaattcaatttgatcataattaagtttcgtctctatgtggtttattgtaattaggtttggtttgagtatgtctaattttgaaatttttatgcttgattattaataattgatgattttaaacattgtcttagacttgtcatcattgaaatctgataagtcatacgttttcaattcacgccttcgcaaactcttttgaaaatcaaaaaacctttttaaccccccatgcaccttcttgttcatcgtaaagaccaataaatgacatcaagaacgtggtctgttcactaacagttaactaccgaaagagtcgatatgatgaacaaagagccttagtgggagtacagtagggctccaattttttacggcaaaaaatgtgaatattggaaagaatgcatgaacttccatattcaatcagtcgacatggatgttgggaacgccatggtcaactagcggtccgaacctcaagttgaagttaacggggttgc

SEQ ID NO: 31744 - DNA, 704 bp, Medicago truncatula
  Intron number 1 from transcript Medtr5g071960.1 (locus Med tr5g071960) derived from phytozome v7.0 (chr-ID MtChr5; po s 25568841 to 25569544 reverse strand)
gtcctaattggcgcattcttcaggtgcatctgctttcttcttttggtcttattatagttcaagtgaataatgttatcaagtactccttttgtttgataataaatattacagttcaagcttataattgttaccaaagttgaatccataattagatgatttatttcataaatatttgtgttggagcttgattcatttagatgttgaaaccataattagaagatgaaattgtaatggaatactaaaattgttgctatgtatagatttgtgccctataagataaggctcaattgtaattctaaaattaaggcacaaaaaatcaatcaacagatctcatgacacccaattcttccatgtgctttctttctttagatcaccaagaagaaacacagcctgttggttacacaccactcctttagctcaaccatgcagttatattgagttttcttttctggagttaatattaataaaccatgaagaagcaagttttcgcactatgtgattgtaatcaaacgagagtgatcatctaccattcttctgtatactgacatgtaaacggttctacctcaacgtgtcactccaattgagtcttgcactgttcttgatgagttgattagaagaaaaaaagtgagatgatgcaaataatatgttcagattggaatgtcagaatttaacatgaattttaggagctctgtgttacaagctgt

SEQ ID NO: 31745 - DNA, 708 bp, Medicago truncatula
  Intron number 1 from transcript Medtr5g034470.1 (locus Med tr5g034470) derived from phytozome v7.0 (chr-ID MtChr5; po s 14152539 to 14153246 reverse strand)
actccctcatcgctggcttctcctttggcttggtaaaataataaaatccaaacgcaaaaccgctaatagtttttttacattgagtatatatattctcttcttcatcgtttgagtttttcaagaaaaaatgtttattgcgagaaagcgtcaatatatgattgtttctagcatgtagtatcatagaagagaaaataggaaaagattagaagaagaaaaattagcaaagaaaatttgaagaaaaaagttcctcaatcattttttttgtcactactttggaaaaggatttcataatttttctctcaattattctcgttcttttgctgtgtttgttggaattgaaaaaaaaagccgtttgcacataagctacaatctctagaatttagcttttgcgctaaaatttgtattggaagatgtgtttaaacgtgattcttgagtgcaaactgtataccaaacacatacttttttaacttttttatagtagtgttttgtagccaatcaagtaaaaataaagttatttgatttcggtcaaagatagtattcaatgatgattctctctataaaaattgtatagctattgctttgtggactttgtgattaaatttctttgtatcaaataacataattttttttaatcgcaaatgttagtaataataatgtaaaattcgagctcgcttcaccttccttgatttgattttcaaacagcttggg

SEQ ID NO: 31746 - DNA, 886 bp, Medicago truncatula
  Intron number 1 from transcript Medtr5g105700.1 (locus Med tr5g105700) derived from phytozome v7.0 (chr-ID MtChr5; po s 42474148 to 42475033)
ctctgctctctctctctcaattcctcctttttcaggtctgtcttctcaaacctcattctcacttttcatttcttatgtaactcattaattcatcactgtttaatgtaaagttttcatttttcatatctaaatttcatgggtatttagatctctatcatttcactcaggggtttatgtgatgatgtggacttagtatttgactagtctaactttgtaactgaattttataaaataaatgtttttacttatttatttattttcgtaacattcactttaatgtctcatcttgaatttaccattttggaaatgtggtattatgggactttacaattcaaatgttacaaatttatcattttttagatctgcaattgcttcttcttattttggtttcattacaattcctagatcttgatttatacatttcaatttcattattgtttgcaagatctggtttgagtcattttgttaatggctatagatttaagtaaattgttaacaaatgttgagtgttattatgtaaagaagagaatgtggacaaattagaaagatttataattatttgtttagaagtattggaattggagattgagtttaatgtttgaactaggattttatataattttctgaccaaataaattactttggtctctaaatgtgtaagattgattgtataaatcgaaactttcaaaataatccgagtgaatcttttgttagtaagtttacgatcaatgtgacagacaaaagacatgttcgtatatgtttttgtaatttcgataccttctgactatatttatggatctaaattgttgtagtttagtctaatctaacatggtggagcttttttcttataggaatttggagagagtagtgatattataaggtaagg

SEQ ID NO: 31747 - DNA, 752 bp, Medicago truncatula
  Intron number 1 from transcript Medtr7g084090.1 (locus Med tr7g084090) derived from phytozome v7.0 (chr-ID MtChr7; po s 18115289 to 18116040)
atcctgaaaccaaagtaatatttttcatcacttaatttcttcaaatcagttgaagtcctactttcattttacctatcttggaattaagttgtagtttgtaattttcattttttctttaattcctttttctgatgttccttagatcctatttgttcttgagtttgctgaattatttttgagaaaatagatttggatattgaatttatcttttgagaacaaaaatcggctcatgacataaggcacacaagaacacaaagatggatcatggagttacgtcttcgacaactgtgtgcctgccatagtttattttattttttttgctatactttagggttgcattttagaagctaatattacaatcaagattgcgcttgtagcttccctctcttgcgctcaagtgtgtgtccacttatgggtgaacatgagtcatactcagcaaatcaattaatttttgttatgtatatggaatagaaatttcattctgtttgaattcaaagctcatatccattttttttactgaatcaatgctcagatctatcaatcaattatgttaattctttgatatgatagtaaagtaattaagaattttggatatattttgcagtttgttaacaggtgatcatgattatgtgtttgatggtttatctggtttggctgttaaaattgtatgaatgttatataaattttttaatgctgaatttgaatttatgattgcagtgtttcataaatctggacacaggaagaatattccg

SEQ ID NO: 31748 - DNA, 1011 bp, Medicago truncatula
  Intron number 2 from transcript Medtr7g084090.1 (locus Med tr7g084090) derived from phytozome v7.0 (chr-ID MtChr7; po s 18116055 to 18117065)
ttgttggctttgttgacgcctatccgaatcaatatgtgagtttctagctcattttcttgtgcacaaccaatattaacacttaacctaagtggtgtatgtacctctaatttactctcttgatcagtaattaattatctaactttcctgccttgaaatacttgtgaaatatgaaacgtgtttttattaatttttgagttttcctgttttttttattttttattttgcagtgttactccttttgaaactaaggtcccgtttaatttctgaaagaaaaaaaaaatctaacttttcattttaaattaccaccaaacggatggaagacttatgtagtgaacaattgtgatagagagaagatggaagggaatatatgaagaatgtatttttagcattttcgaaatttataaaaatgctagatctattaccaaatgttgtaaaaaaaatgatgaggaaggtattggatctgcattctcttatgtttattagctcgttcattacttctcaaagcatctttaattacatatctagcataaatcatatgtaatgttttttttttcttttcatctcattagaaatttatcatcagaagtaacatgtcatgtgatagaggaagtggcaactttggcagatcagtattaatatttcaaaacttattttgcaatttttacaatatctttatacaatgagaaatgtgtctcaaatgatggcttaaaacttgtgatatgcatgttgtgcgtgtatcaaattgggactttggtacattaagtgcaccataaccagttttctattactacatatgctcttttttgtgcgtgtgtcaatttggaaaacaatgaaatgtaattcaaatgaagaattgtggtgatacattctaataacacttgtatttgatctatggggttagctcttagctggtacatctgtatatgatattacatttctgaaaaattgtaactatatatgtaatctgtggttgtagggtcaaactaaaataaaatttgaggagaaaccatc

SEQ ID NO: 31749 - DNA, 842 bp, Medicago truncatula
  Intron number 1 from transcript Medtr4g041330.1 (locus Med tr4g041330) derived from phytozome v7.0 (chr-ID MtChr4; po s 9741105 to 9741946)
gcattaagatcaaacaggttagttgatcgtaaacttatatccctgtgtctaacaactaacatccacaaatgaatttatttcagatcccttcaataaaaagtcgatgactcacactttctaaatcaaaatatcatttttggattgcaaattgaaaaaagcattaagaacataaataatttataaacataatgaaattaagattacatataattagccagacccatgggtggttccaccatccggcgaccccagacactcgcttgggctcaatcgatactttcttatatatggcacaacccaatatctcattaactcgcttaaaaaaaataatattgggaaaatcatgaaatttctcacacgcgcagagcagaaacacgttctttatcatttacatagcattctattttgcacatctttttgttattttgtacatagtctgtgtgaggtggaatttcatgtgttcaactgttaatagaacttgttatattatatggaatttcatgtgaaattgtgaatcatcattatatgtgtgattactagtatcaactatcaagcatgaaccttttctttccaactatatttaatgagccgtttcaatttcttcttttactgccaattaaagtgttaaactaatatctaatctatggactgttcaacaaattaaatgctaaaatattaattaatgctgatgagtaattgaatcacatttgttaatcatataggaaggaaacaaatattttctacaatttgttaaaaagctaaaagcatgacagagcccgatgaacttaattggttgatagaacaagtattgagaatatgaatgttgtgcaacaagatcaacg

SEQ ID NO: 31750 - DNA, 888 bp, Medicago truncatula
  Intron number 1 from transcript Medtr5g095680.1 (locus Med tr5g095680) derived from phytozome v7.0 (chr-ID MtChr5; po s 37939694 to 37940581)
aattcgaagatattctacaactgttttgaaattgtaattttttgatgtccggtgtagttcactaatgtttctgagtacagtcaattgtatggattcaaatttattaatatattggttttttatcatggatctgtctcatatatttcttccacttaattatctctcctatatgttgttaaattttttgtctgatattgatacgcagtacgtagccattagcaatttgaatttggttgataaattttgtgtttatattttaaattaacacataacaaatgaaatcaatgcatgttatggaagtgaaatttctttaacaaatgaaacctaaagttgattaaaaaacctaaaacctttaataacttattattggagaaaatgtcatgtggtgtgatactgtcagcatatgtttcagaatttctatatgatattgtttgcggttgggggagtaatgtctattggtcctcttatacgcataattctattagaactccttattcttgtgaccaattaaggtacaattttcattgatatgaggttgtagttaattaatttgatgattcattgtaaatgtaatttcattgatcagtttgatttcatcttacctgtctagtatcaaccaagtagtcttaggtgtagatcgtatagctatttctatatattaaatccaacctgaaaatatgatgcacaatattgttcattagctatagtaataattaacatgtgacattttcttcaaatattaccttcattgatttatacagtatataaatgcatatctaaattttatggcatggtatgagaggtagactataacttgattatcattgcagtatgtttaaggttatataattagggccggtcttgtgcaagtgcaagaagctcttggca

SEQ ID NO: 31751 - DNA, 814 bp, Medicago truncatula
  Intron number 1 from transcript Medtr5g089120.1 (locus Med tr5g089120) derived from phytozome v7.0 (chr-ID MtChr5; po s 34586451 to 34587264 reverse strand)
aaggtcggttcttaatctcgatcgtttttaatttaactgttttcatccttacggttgtatactaggatttattgattttcttgattagggtttatatttgattcttaatttgtaaaatgagttttaagttatgaatcactgacatgggcacacggacagttacacctcgtcaccggtagaaagttaatttgtaaactgagtttcaagttatgaaccacatgggcacacgaacacgacagtcatacctcgacagcattagttgtttgaaaagttaataatctcgattagggtttatatctgatgcttgattgtaaactgagttttaagttgtgaagcacgacaccggacacagatcaatactttttgaggaaatgaattaaccgaatataatccgtgtcagatagtgtagtagacactgtcacctttgattagaggtgtctgtgctatagatgttctgggtgttcttttgttgaaggggtgtactagtattctctttttcaataactacactttagactataaagttgcactctttcttgtgccaagtacaagtttttagtagtcctatctatcattaactgaaacaagtttaatttgagttcacttataatagaaacaaaaagaaaacacttacaattaaggcataaaaattgacctgggaagatgtagttaagctgcaatgtagttgtgtattagaagcacctaactttgctgcaaaatttgtagtatcatattggttatattaggcttaatgaaatagcacatttacaatgttttatagttgacttatcttttggaatttcagaatatctcg

SEQ ID NO: 31752 - DNA, 560 bp, Medicago truncatula; identical to SEQ ID NO: 31647
  Intron number 1 from transcript Medtr4g028860.1 (locus Med tr4g028860) derived from phytozome v7.0 (chr-ID MtChr4; po s 6718134 to 6718693 reverse strand)

SEQ ID NO: 31753 - DNA, 1047 bp, Medicago truncatula
  Intron number 1 from transcript Medtr7g035050.1 (locus Med tr7g035050) derived from phytozome v7.0 (chr-ID MtChr7; po s 8506687 to 8507733 reverse strand)
acaacacgataagggtgatcaatgttgattaacaacatccgtcaatcggctaagatggtcgtgtttgttttaccaagatgcaacttcaaaaccacgtcgatttaaaaatcatgttctctatatttagtcaatatagttccaacggaccaattagttagatgttaccgtgacaatagttattcaaacaagcttgattcatcctaggatatttgaagaaattacgggtacatggttgaacccggtaaaaaaaaagcatgtcaacttgcaagaatgcaacaagtttgactcatccataattttttctgtgttcaatttaagttcgttgtttttgaactatgttcttgttgaattcgatttaaaaaatattgtacataactagaggaatctaaagctaaatttcattgttataaaacaatgtttttgatgggattgttaaataacatgttgacctggcttatctgatgacgcgacctaacccccaactagagttaaatttcattgggccctgtatattataaaaagactcttataaaaatgaagtcaaagtaggatttcattatttttttttttgaaggatttcattatagaatctaatacaagaataaacttggactaacctttaaattatggaaaatgatagatggaccactctcttttgtacacacctcataccacttgctgatgtggatggcaattctgtaattttattaaaaagcaaggggcaaaaatgatatttcatgttcctttttccacaccctctctgaactctctccttcctctcaaatccaatctgcattttttcttttctctatgctccttctctctccttaggctgatctatctctcgttttctcttcttctcttttacaacaaccatgtaaataaaatccaatctcttttacaatccgttctcactcattgaagaagcaagaaaaaaactcaccttcaatgttgaagcaacaccaattgagataaaaatggacgcattgaggtaagtacacaacgatgacagaagcaaagggggaggagatcaacaaacggcaacgg

SEQ ID NO: 31754 - DNA, 684 bp, Medicago truncatula
  Intron number 1 from transcript Medtr7g018050.1 (locus Med tr7g018050) derived from phytozome v7.0 (chr-ID MtChr7; po s 4334601 to 4335284 reverse strand)
aagttcaaagggttcacatcaaggccttgattgtaattaaatttatccctacttccttctttttatgtaaaagtcgcatctttacttctttcttaatgttggtgagaaacgaacctgagactacgaggaggagcacactgtctaatatcatcatatcaacccaagtgggttatcatatcaacattaaaactgtttttttttttctccagttttagcaaacttaattggtacggatttgaataacaaatattcccttcgatacatattcattgatgagttgatatttcatctatgagcacgtgccttattagacttagtcaattaaattttgacataatatcaaataattcaaggacaaaactaatgtattttttattgtaatttaaataatttagtttatacgcaccaacagccaaacataattgttcgatccatggttgactttagtcatatttaacttaaaaaagatgatgtattgtgataggttgattgtgtagaatattttacagtaacaatcaaaattattctcttatatcatcttcttatcttatggtatgtgatgatgttttttataagatcaaaaaaaaaaatcatattcaaccaagtaaaagttaatgattaattccttttaatttcgtatgtttcacaggattttttcacagcaggaacagacacaacatcaat

SEQ ID NO: 31755 - DNA, 855 bp, Medicago truncatula
  Intron number 1 from transcript Medtr7g065060.1 (locus Med tr7g065060) derived from phytozome v7.0 (chr-ID MtChr7; po s 13289181 to 13290035)
ttggtattaagctctaaacttattcttcaattttaacagaattgacattttgaaattgtttaaatttgattaaaagttgtcactattaaattgactgattgtgataagtatatgtttggttgaggtgataagaatgaatcagttctaaagacaaaatcaattatgttaggaagaaaccaaatgtgtcagaatcaattttggtccctctagaaatggaactaaacatacaaagttcccaactaaatcaattcaaaattgcgtttaatggtgtaccaatagtccatggagtgtgcattttgtaaatttgtaaaatagctttaggtgaaatttgagttaaacacaacacgatttatgtttgaaaaacttctaaggaaagtgatttttatcaattcatttgtttcaatcaatattataactatattacaatgaaattaatttagagtctattctgattcaatgaaaaagttacatatggaagctttgacttaaaatcaattttaatgctagagttttggcaccagactgaattctgaactattagagagttactattatgcccatatggatattcaacttctgtgcattctcaaggctttattccataggtcttgttctgttaaggtttggttcattttgatttctttttgtaattatatgttttgaatcataacctattatgctcttgtaatgatgttctgatcaatcatgtgtttgttcagaattcaggaagcgaatcaatctacttgcttttgtaagataaatcttgaatgtttttgattcagctatgaaatagggaaactctgtcatcaatcttatatctaaattgagagtaggtgggtgttatagggagcttaa

SEQ ID NO: 31756 - DNA, 679 bp, Medicago truncatula
  Intron number 2 from transcript Medtr5g011790.1 (locus Med tr5g011790) derived from phytozome v7.0 (chr-ID MtChr5; po s 3250662 to 3251340)
tttctttagcggatctagacggtaaaagagtaagtattgaaaaatgtttgttaaagcatgttttgttcagggttgatccaagggtaaggtcatcaaagcaaccgttttaggtctaaaaatatatataaaaaattactttaaattaatttaaattttaagtttgccctcaaaacttcatggtaccaaattgttttctttaccataattcataaaaaaaaaaaaaaaaggcttttcaaatatgaatattcatctctctcaatatacaatatgaatattcatcgataaacaactctaccaattcaaaaagtttaccaccgtcttcaagtcgaatatgtgtatctccattgatgttccaaaaccttatttcacatttttttagagctcctatattagtgcacgtccaacttttcaacacccacttaacacacttatttttttcggatcaccatcaaatagggtcgtatcttaggcagggcgaccgtcctaggccccaaaaaataagtacgaaatttgggccccaacaaaaataattaggggttcattaggctataaaaaattacttaagttctaaagggattcatggttgttggtaatggactaagttctatgttgactcatgtatagtttattacgatgttataaagggagttcaaatccttagtcttccaccatcccaaac

SEQ ID NO: 31757 - DNA, 576 bp, Medicago truncatula
  Intron number 1 from transcript Medtr5g104250.1 (locus Med tr5g104250) derived from phytozome v7.0 (chr-ID MtChr5; po s 41794325 to 41794900)
caaattcaaggaaggtttgttggtttaaccctactgacgcatttgttgtggcagcctgccagtgcaggcacggacactagataatagtcgtgttcatgttgtactcttcggatgctactagtaatttgtaaatattttacatctattttttatttttatatcaacaccggttggaataccacaacaattagataatctttagcaatttattacatgattatgtacaacgaatgccccaagcaattcaatacaggaaaaaagcgcatagcaaaacaaggttcgtctatagtgctattgatatagcagtttgctcaaattctgtgacgcaacagttctattgtgccgctatagtcaccatttcacaatgttttgtactaaatagtgcagtgctgaacagtagatattcatccaaattctgctatgcaattacgttgcagtgcagctatagccgctatttaacaacactttcaaacaatcttgaattttgtctcatttttttgtaaattgacgttaatgatgttcttaaattaattttttgtttgtttttacattgataggcacaagttgtccaattca

SEQ ID NO: 31758 - DNA, 252 bp, Medicago truncatula
  Intron number 4 from transcript Medtr5g011040.1 (locus Med tr5g011040) derived from phytozome v7.0 (chr-ID MtChr5; po s 2882242 to 2882493)
ggttcaggaaaagaaaaggaaagcttttggtgaaagtttgatgttgtctacttcaagacaattttacaatttctgcatgttttgtttttatctactttgagaagatttctgcatgttttgttactgtctacttcaagacaattaattttacaattttctgcatgttttgtttctatctacttgagacaattttacaatttctgcatgttttgtttctacatggataattgtgatttcttttggataggttga

SEQ ID NO: 31759 - DNA, 578 bp, Medicago truncatula
  Intron number 1 from transcript Medtr4g132560.1 (locus Med tr4g132560) derived from phytozome v7.0 (chr-ID MtChr4; po s 31502737 to 31503314)
tctctaccatttcaataccagagaagaaaaacaaagtacttatccccaaaccatatattatattttattctaatttatatctatctatacacaattatatacctaaattaatacataattttctgtataaattattaaggttaagattaaaataattcttattctctctttcttataattgttgatgtgaaaagaaagagagagatcttgttgttctacaatgtccactttgtaggtaaatctcttcaaaacaaaaattttcacttttaactctctttcatcacttcaattttcacgttaacgtttcgaatcacaccttttttcctcttttcatcgattctgattattgcttttctacctcaaacctcttttgattctcttttttccgttcaattttgcacctttttcataattgggattaggttttttcttcttctgcgtttttagttggtatttatgctcatattttttctgttggtgtttttttagggtttcattggatcatactttggggggacagttgctgaatttggaaaatttcccaattttgtagggtttggatcagagactgtgattga

SEQ ID NO: 31760 - DNA, 604 bp, Medicago truncatula
  Intron number 1 from transcript Medtr6g090360.1 (locus Med tr6g090360) derived from phytozome v7.0 (chr-ID MtChr6; po s 19182524 to 19183127)
ttaccacccaaaattgaatctcagccaacatcaaggtaagtcttttatgcaaatagctagtcaaactaaaaaatgagctaaaagttaccctaaatgaatatttggttttaattcagcttttcatatgtaaaagaaaaatgacttaattacactttttctcctaagtattatgattttgcaatattggactaagtgtcgaatatgtgttacacatgaaaactcgtctcttgtttcatatcacatgtcagtattctataagctagtttgagtcagggacaacaaagattcatgtgtgacgtaggcttttgaagttaaaattcgacgacctagttagtgattgagggacatgattgttacaagatggttacttagaaactttgttcgctcaattaaaactttgagaccgaaattgcacaatcgttataattatgcccaagggactacgccaaaaaaattaacatggaagaaatttgcatgcaaagttaataaatataaacatatatttgatatgatttaaataagagaaaattttatgaatcttttgcatgtatttgtctttggatttgcagaggtgaatcttcaagtaaggaactagctactaaac

SEQ ID NO: 31761 - DNA, 677 bp, Medicago truncatula
  Intron number 3 from transcript Medtr4g109930.1 (locus Med tr4g109930) derived from phytozome v7.0 (chr-ID MtChr4; po s 24742468 to 24743144 reverse strand)
actttgtgatccggagaggattgtacaggggtccggtaattagaacttgaaaatctttattgtttgttgtattttacaccataaaagaaatttccttcatatctttttggttgcaacaaaaggaacagtgatatgtgaagtaataatactattctttgtctaagtcagtttgacatttgggtttgtacataataatgtatacagtaaatgtaacttgtttgcagacacagcttaatctgctagaatagttgcctaagtttaaaataaaacttgtgattgtgagtacctccatcaaattgtacattgaagaataagaaaaaagggtattattgtgacttgaaagctatcttaaacttttcaattctcaaaaaccctttgtattggaaagtttcaaagtttgatgtccctgttgcattcaaaatgataaaaatcgtactaaaatatatcaatacaatttaggttggttgggggtggctagtaccccaatctttataaagctaagaataagatcaatataaatatataaatttggttaagatgataacattcagctcactttcataaggatcaggcctcaaattttgctgcaggactttgttggtgggtaacatgtaagtaccagcacactatatatgaatctagagacgttctccgatcttggcgagttcccgagattc

SEQ ID NO: 31762 - DNA, 437 bp, Medicago truncatula
  Intron number 1 from transcript Medtr7g011990.1 (locus Med tr7g011990) derived from phytozome v7.0 (chr-ID MtChr7; po s 3012719 to 3013155 reverse strand)
gagacaatcttgaaactgagtttcaaaaggcagtggtgggtttgttttctcttctgattacgatcaactaatttcttacttttacaaccgctttatttgatgaagtgattcaatcatttttaacttacttttaaattgtatccccgtgtgaaatatgcagcagtctcaaaattgcttgttatactctataaacagtgtcccaatgagtaaaccgtactctgaaacttatctttctagcttgaacatagttgtatgcgtaattttttacgaatgaaaatgtggtttttctattcttgatattataattatgtctttctagaacaggatactatgcaaagctcattaattttggttttatgatatgactgcttaggattctggtttgaaccgtatcccctgcagtcaagttgcttttcaaagagtagggccgaggcaag

SEQ ID NO: 31763 - DNA, 725 bp, Medicago truncatula
  Intron number 5 from transcript Medtr7g080530.1 (locus Med tr7g080530) derived from phytozome v7.0 (chr-ID MtChr7; po s 17152892 to 17153616)
aaggaaattggacaaattacatcattgagactcttgtaagaactttaccaaagaagatgaattattagtattgatcctcatcaaattttgttttaaggtggtgttgtctgtcctacttgatactgtctctttgtttcaaaagaaggatcttaatctggacatatgctaaacatatccttatgtttttataaatacacttattttatttctttgtgacataagtttgaagtagaattggctgaacatacaaggaaatagtgttttcatatataatatccagcttgaacaacccatttactaatccgtcaattgttacactaagtttactttcgtcggtactttaccatccaacattaatctctgtttggattgagtttgacttgtttcagcttatctactgacgtcagctcttgtgagattgtttgagaaagcttatggaaacagcttatgacatgtccataaactgttttaaacttatttccataagctcttcatgatagcttaggaaacagcttattgcatttatataataatagtttgactttattttagcttttgatatagaaatagcttatacataaacaattatagcataaacacttaattaaggtgtttatccaaacagtgaattgttatagatgtctcatacaacattgcaagtcttacagctactgttgtaagatgaattgttataattctgacatattttccatgcaggctcttga

SEQ ID NO: 31764 - DNA, 715 bp, Medicago truncatula
  Intron number 4 from transcript Medtr4g142850.2 (locus Med tr4g142850) derived from phytozome v7.0 (chr-ID MtChr4; po s 35681590 to 35682304)
ggcaagtttctattcttccttttttttgcctctgaattcttccaatagtacatttatttattgtgttatgtgaaatgcctcagaatattgatgaccatgatatattcagtggatagaattgaatgccattgctgtgttcttgttaagatgacactacttaagatgtattctgtaatttgctttgaattatttgttttttgagtagtgctaaggccaaaactacttcatgtttaaagcttttttgttgcctcacaaaattttaagcacatggttaaatatttacctaaattaattcacattttacattttttaagtcatttttctgacctctgctgggaatgtttgctgacccgatgatgatattggccacttctatatccattcttatcaaattgaggctttaatgatttagatccttgtgagagttgatatcattcatattgattgggaatatcggccagtatatcgtggaaacaactggtttgttagcgaattgatctttcatctaatgatctgtaatattcatcggccaacttggacattgttagtgatagggttctctgccaaaatgactgcaatatttgtattagatgcaatctgtttaatgatctttggagttggaagatgtccttttctttaagttgatgcgtgttgaaaatttagttttggattacctgattacctctatattttgttcccaaaactgatgcagttt

SEQ ID NO: 31765 - DNA, 506 bp, Medicago truncatula
  Intron number 1 from transcript Medtr4g104300.1 (locus Med tr4g104300) derived from phytozome v7.0 (chr-ID MtChr4; po s 22701650 to 22702155 reverse strand)
taaaggttagaggagttacttaagatttgttgtaatttcctttatgagttatcaatgttacttattagtgtacattttgatttatttctattttttggtttctttctcgaatttagggtgatagagttcatataataactcgatatagacaaatggagcattgaaaggttttcgattagaagtgtctatgctacaaaaatgtgtgtaagtgtctatgctaagttaatgtttttgtcttcagtttatgatattcagataatgatctggctacaatgactatcttattttggtaaaggatcctttccgccctattctctgctcgaccctcaaaatttgtttgttctccgtcatgaggatcttacaagtatatcaatttgtgaatttttcggttgttttggaaaagatttttttttttttgttgttgactgctttagattattgttggaatttgagtggtataaataatattgtggttggttgaattgcagggtaatttggaagtttaa

SEQ ID NO: 31766 - DNA, 869 bp, Medicago truncatula; identical to SEQ ID NO: 31150
  Intron number 1 from transcript Medtr6g046520.1 (locus Med tr6g046520) derived from phytozome v7.0 (chr-ID MtChr6; po s 9803826 to 9804694)

SEQ ID NO: 31767 - DNA, 833 bp, Medicago truncatula
  Intron number 1 from transcript Medtr5g018930.1 (locus Med tr5g018930) derived from phytozome v7.0 (chr-ID MtChr5; po s 7011391 to 7012223 reverse strand)
gatatttcggtgactttaattttatcatatatttttgtagtcattatgccgttatatgctattaatttggatgctgtgagtttgttcgcagatttgttctttacgtttttagcggtgttgaatgatataatctctcgatttgaatgaatgaatatcattttatttttgtcaaaaaaaaaaaaaaaaattgtcaacctcctacctagtatatgctgttatctcttcttgttgactaatgttaccctacattacacatgatgactaacaaatgaatcttttcaaatgtaaacgcttgagattgagatgttagaaagaaaaaaaaaagaaaaactagttagcgataagctttattttttttgtggtgggggtttgaacctcaggcattgtatatattatgcattgtctattccaattgaactaaactcacaaggacaatgattaagcattttgaagacacatgcaataattcctggttgattaattcaactatagttaaattatacaatataattgatgagtgcaattgctaatgtaattcttctgatatactaatttgattctttctcgtataaatatataatattaactattattttataaaattatttgtcttttttatgatacatttgattgtttatattattttatttcacttattcgttttctacaataaatagctatgaatatttctcacaaaacaatagttttttttttcttgatataaattttgtaaataacaaataaaaataagtggagagagtaattttattttttttgggggggaagagatgtgtctagggtaacctagatcaacactcaaatcttattagaaa

SEQ ID NO: 31768 - DNA, 677 bp, Medicago truncatula
  Intron number 1 from transcript Medtr5g103310.1 (locus Med tr5g103310) derived from phytozome v7.0 (chr-ID MtChr5; po s 41381438 to 41382114)
tgcccttgcacgattttagacgagttagtggcgaggtgagttatggcatggcgggttggtctgtttatgtcaatgccatatgttatctctagcaacatatttcaagttttttttgtcaagaacgtactatttcaagtttaagtgctaacatatttcaaattgacttcctttaaaaaaaaaatatttcaaattgacttgtaaaaaaatatatatatttaaaattaacatataatttcaaccactaattccctcaaagaaaaaattcaacaactaatgaacataaccaacaaacctagggtttgatacaagtagatgaaacataaatttgcaaggctacgaaataacgaggagcatgagaaaatttgataatttgaaattgataaaataacaataaaaaataaaaaagaagttaaatcataatgagggtaagatacactttttatagtgatctttactaatcctaattaacttcaactataatagataatctataactaactctaagatgccacattataggctgcaaagtatgatatcaatgagacagaagcaagcaaacatgctcttcaaataaaaagaaaagagaaaacaagagaagagagacgtcagagattaatccgtcggtggagattaaagcaaagaactctaaggtggtgtcattgaggttgtataggcgg

SEQ ID NO: 31769 - DNA, 902 bp, Medicago truncatula
  Intron number 1 from transcript Medtr4g147320.1 (locus Med tr4g147320) derived from phytozome v7.0 (chr-ID MtChr4; po s 36928958 to 36929859 reverse strand)
aggtgattcttttttctttttttttttatagacaaaaatgggttgaattttgatactgttttagttttataagttgaatttcgattgagttttgcggttaacaattttatttatgattgtttgtttgtattaacggatttgtgaaaaaagaaataaaaaaaccagaaatattttttttttagagaatttggcaaaagccacacctacctagggaacatttgttttcttaaattactgaagactttgctttcaaatttcaatattccaggataatgatatatgttgtatggtaatttcagttcaagaaaccaaaattgtacttgtttattgtgatggcttgaaaaaatagtgccatgaaagaaagagcatgtagtggtgttaattagagggaattcacatggctgttacaggccggaaaatttataacattttagaattgtaaatactaattcatactgatattatatactacaagattgactagattaaccgcagacaagggttacaacattgttacacactttcaatagcactattacaatcgagtctgctaaactaagacatgaatgctgaggcaatttctttaggattgagataatcttgaaatagtatcactcaggattgagataatcttgaaattatttatgttataggcataaaaaacatctaacggaaatcatgcagtaccaacatttcagattgaaggtgtgtgtgatgtttgtgactgcgtcggtgcttcatagaacacaatttctcgtgcagatattgacttattgtctattcttttagtaatatttctttcttagttgtcttttccatccaatttaaagctgcaacagcaatggacttagattcataactcattagtaaccctctgaaagtgttgcattctgcaggtggta

SEQ ID NO: 31770 - DNA, 553 bp, Medicago truncatula
  Intron number 1 from transcript Medtr5g095350.1 (locus Med tr5g095350) derived from phytozome v7.0 (chr-ID MtChr5; po s 37790911 to 37791463 reverse strand)
tgggttaaaattcacataaatcctggaaaatacgtgtaagtttttattattattattattttgactcacaaatacacgaaagttgctttttttgttttgttttgagggaacaatatatacatcgttgttacttgttaagtgcatctaattcatatatagggatgacaattagatccaaattcaatcaatatgcatctttaaaaaatattcacaatggacgggtaactacacacattgtaattacccgcagccaggacattacatgttgcaagggtttgtttgattatatttcggtttttgagtttttagaagttattttgtacaatagtttcgattttttttttcttttaagacaagtatttttatttatttatttattttgtttcagaaacaagaaaataagaagcaactttgcagaacaacttttttgaagaagctttacagaacatcttctttttcttttaaagtttttaaaaaatgaaatcaagcatatcctacatatttttttcattttcattttcttatttttgttttgttttgttttgcagggaaa

SEQ ID NO: 31771 - DNA, 510 bp, Medicago truncatula
  Intron number 2 from transcript Medtr5g006820.1 (locus Med tr5g006820) derived from phytozome v7.0 (chr-ID MtChr5; po s 855832 to 856341 reverse strand)
acgtaagtatgtatatatacatgcatgttccataggtattcaatgtgccatgttatgttagtttgaagagaaatgatattttcatgtcaaatcgttgtcctttagtttttatgtataccgtatattaatgcatataggttgtagaagataaaaagtaagagatagagagataaacatatattgtgtcacattggtgtctgaattttgatgttcaaataacacaactctagtttgttttttctttatgtcaaaggttgttatatgaagttagatatacttgtaaatctttagagacatgtttcattgccattgaagtgtgttatctttcagatggaatctctttttgcctatgcttgctttctataagttgagattatgggtaatttttaatattgtatattgtgctaaagatgtgatgcaacggtcatgattatatcgtcattttttgtttacatttaatggttgtgaaagctgatgtttgtttcctgtttgttttagttgccctcatac

SEQ ID NO: 31772 - DNA, 796 bp, Medicago truncatula
  Intron number 2 from transcript Medtr4g109200.1 (locus Med tr4g109200) derived from phytozome v7.0 (chr-ID MtChr4; po s 24374451 to 24375246 reverse strand)
tggatactcctggtcacgctgatttcggcggtgaggtaaatttagataaactgtttgtatcacaaatgcacactatcaggataagcgcttgtcgataagtttacgtaaactatttctattgataaaagaccaaagtgaagttgtttttataagctatcttggatagtttatgaaattaagctgaaaaagcttatgaaaagtgtcataagctgttttcacaagttctccaaaaagtctcaaaaaacttatgctactccatgcaggtcctagtttctttaactgtagtaattgtacctttggattgaaattttaattgcatagcctataagcctaacatggttgattgattaccaaaaaatggttttgttattttcaaaataaagaatcacgttaacggcggtatgttaggtcgtatttcgattaataacttattttaattaaactccgagtagcttatagcataagatatgtgttatttctacaccaaaaaataaaataaagccaaactgtcttcataagctacttatgaaaataagctaaaaacaacttagggatatgtcagaagttgttttgataactcttccaaattgtctcccaagtgtttacttaattaagctaatccaaatttgttttttttctctgtcagggttgaacaaactcttttactattaaatcatcaattttgtttttgttttgaatgtgaattactatcactgaaacctacatattggttgtagtttgattgcacttactatttttgtgtttggttcactactaggtggaacgtgtagttggt

SEQ ID NO: 31773 - DNA, 594 bp, Medicago truncatula
  Intron number 3 from transcript Medtr6g078330.1 (locus Med tr6g078330) derived from phytozome v7.0 (chr-ID MtChr6; po s 15946391 to 15946984)
agaaggagtagaacttgtgtagcagcaacaacactgtatgtctcttgtgattattaagttattcttgtgtaaaaacacttctctgccaaatcagttttctgagacagaacttgtgtagcagcaacaacatatgtatgtatgattaatttgcttttaataatacaagagtatgtacatattgtgataccgacagatgtttcaaccaaatcactgtccaatgatccatttctcaaattaattagtgtttgattattaactatgataacatgacattttgtatttcaatgtatatggcatttgataccaagtttagccaaattctaaatggcaatttccacatcaaacaaaagaagaaaataaaaactccaaatgtatgtttgtcaggggaatttacttttataattatgtttgtcaggattattagcttatgaaatcgacttatttgtgatttgaatgcaatgtagcttatatgaaaagaatttgactttattttatcttttgatatatcaatagcttatatattagaacttgaatcatgccatgacattatttggttctaagaaattgataacttattgacatcagttagagagg

SEQ ID NO: 31774 - DNA, 799 bp, Medicago truncatula
  Intron number 2 from transcript Medtr4g093200.1 (locus Med tr4g093200) derived from phytozome v7.0 (chr-ID MtChr4; po s 19642739 to 19643537)
catctcgagtgcaggaaattcgcgtttccctacaggtacatactgaactaaaagctatatatatgtatatgcattctacataaggaagtatgtttgatgtggcctgacataattagatgagtggtattacaaactttgatttatagtgtgtttggaaagtcaggttttctgtggtgtgaccatgtggtagcatgaagctatgcctgtaagactaaggctatagaactattaagtttttatattgggcctaacacaaccctacaaagctggttttgtaagaatgagttaggccctatataaaaacttaatatggtatcagagcctattgatttgggtcatccattatttatatacacgcaccaagcccaatagtgctgggcgtgaggggaagtcccacatagattaaagataaggcctggctagagtttatgaagagtggcacctctcaccttacaaactagttttgtggggtttgtgttggaccccacccacaaattctaagaagaacggtggaagtgaagcaagcacatcgttaagatatacttttgagtgctaagacaaatgtgtgcatccacatattacatgatatagttttataacttgcatgtgtttaaaataaatatgcatgttattttcgtatttgaatttcttcgtttgtaccttcaattagcaaatcctgggtatgaaaattgttgtaattcaacttatctaggtgtttatatattttgtaatactttcatggtttctaaaacatttattaattagtttttttttcttccaaaatctgagtaggagcacc

SEQ ID NO: 31775 - DNA, 943 bp, Medicago truncatula
  Intron number 1 from transcript Medtr6g083940.1 (locus Med tr6g083940) derived from phytozome v7.0 (chr-ID MtChr6; po s 17252946 to 17253888)
actctctctccattcttcaatccccttcttccttggtatccctctctcttactttcttcttcttgaaattaaggttatttagttaaatatttgattttgattatggtatgagttttaatttgatgacctatttggttttttagcatagacatgatgactcatttcatgaaatactatactattgattgttgttgcttaaagtttgaagcttgcaatggtcattgatttggtgtttcagttctgctactgattgtgtttgtaatgatgattgaggatttaatgtaattttggattagcttatttgagcttatgtactttcattacttgtgaaattgtttgagagagcttatagaaacaacttatgacagagtaaggatcctcaaccatttagagagagatagacataaaaatagatagccccactattattttatattttatttcaaacttctttgtgtctttatctttccaaatggaataaatggagaggatcctaactcgttcataagctatttttagtttattttcataagctctcaaggatagtttattaaagtagcttataacttatatgaaaacaatttgatttgattttatcttttgttatagaaatagcttattagctgcgctttattaagctgtttatccaaacaagaccttacggtatgtgactgtgtgtggttgtgtctgtgtgatggtgatgattgaggattagagtttgtatgtttgtgtatgtatggttgtgatttaatagttctgatcatgtaaataaatacgcagtaatgcttaagcagcttctgctttcagcctgtgtcttcctgaaatactgattattaatggttaaattgccataatacattcataccattgttgaatcacaattgacagttatggccttttggacttttgattcaagggcaagcctggagtaactggatcagtg

SEQ ID NO: 31776 - DNA, 980 bp, Medicago truncatula
  Intron number 1 from transcript Medtr4g072880.1 (locus Med tr4g072880) derived from phytozome v7.0 (chr-ID MtChr4; po s 14177000 to 14177979)
catcttattggtgtaccctatatataatgaaatgttcaattttgcaacggttatttattcattttaggagggttatgaacttcagtaaactgagcatatgaaatttaggaaaatgttagtacttttgtgatagttgttttgtggtggttcataacctccactaaaagtaagttatatacacaaatttgaaaacctaaatacttgtatgaaatatcaatcttcatcctctcagatgtcttccctttcttctcgattattaaaaaatatgtcttccttttcttctgaaatattaaaaaatcttgttgggatatgtgagtctccccttaatgtctttcctttcttctagattattaaaaaaaaatgtccatattcctagactttttatatcctaactcttatgagtaaataactttatttattgttactagacgtctacccgtacaatgcacgggtaagttttgttgaattattcttaataattgttgcattttaaatatataatcttgaatatattagtttcaatgtccataattttggttacatttttaatttagaacccgtgtgatctatggtaagttttgtagaattattcttgataattattgtagtgcaacgaattaattagttttgaatataataatattttgtagccttatttgaatacccaaaacatataattttgaaatacttctttataacttgtccaaaaaaagaaatacttctttataaactacattcaaagtttttattaggggttgcattcaaagttgttatgtatatgggccttccgcatcaattatcaagattttcaaatcattcttcaagtgattcttgaaattgtatgataagttctttttcacagtgttgaatctttccacattaccattaaaaagatataaacaaaactcatagagagatcaaactccaaacgtcataacctcaaaaactcaagtaaactttttatgtggtgtcagtattga

SEQ ID NO: 31777 - DNA, 534 bp, Medicago truncatula
  Intron number 1 from transcript Medtr7g076130.1 (locus Med tr7g076130) derived from phytozome v7.0 (chr-ID MtChr7; po s 15422383 to 15422916)
tgacttgcctaggtttttctttctctctttctctcatcatgcatgacatttttttaaggattaaatgagtttttagtcttataaaagtgccaccatttgttccataatcgatgataaaagattgcaaggatatttgatatatttgaggcggtttcaaacttacaacacccctcttctctgtatttagtctgtgtgaatttcattgttatgctctttgaaaaccaaaatttgccactatttgagtttagttccttcataaattttattaatttgtgcaaaaaaatgaatgttttcaacccgtgtgtttagcacctataaaagaaaaatagagactaaaattgaacaaattatttgtggagggtaaacttaaaaatttgtgaattttgtagggactacaaatatatttaacttttttaatattgatttttgttatggtttatatatacatatatttatgatatgattaatcagggttggctatgtttttgaggtttgtgtggaatgtggttattatttctatgttaaaaaggttca

SEQ ID NO: 31778 - DNA, 730 bp, Medicago truncatula
  Intron number 1 from transcript Medtr5g065270.1 (locus Med tr5g065270) derived from phytozome v7.0 (chr-ID MtChr5; po s 22793284 to 22794013)
tacagttgttggccaaataaccctacttcctataggtatgtttttaacttaatacttcctccaatcacatttacaagtaaaaaacaactttttcgatttattgaataactaacgtatctgacctatatatagatcagatacgtatctaaccagatatgttttctgttgatttatgtgactggagagagtatatcatatctattattaatatcattgattcactcataatcatcactatatccatgtattcatcataattagtcgtgtcaccacatttcctttgtatgagatatgaaatgaaaatttgtttaaacgtgaaatattcctcaccttaatagtgatagagttgagctataattttaccaacttaaggttgagtatatcaagatttgtaaatcaagattcacattttagttaagaggtacttacatttaatatcagtcaaatctacgaaaaggaaaaaaaaatgagtttttattttggaaattgaataaattcaacttagatataatatttttggtttaaatatgtcatgcttctattctcttcaatattttttgtttgtttgttatagaatctataaaaaattccattttttagtttttgtcattacaaatatacattttttaatttatagtcaaaagtgttttgttttattcgtgcaatatatttttttttatatggagattgatcttggtcattaaagtttttttggtagaatagtcattaa

SEQ ID NO: 31779 - DNA, 906 bp, Medicago truncatula
  Intron number 1 from transcript Medtr4g152090.2 (locus Med tr4g152090) derived from phytozome v7.0 (chr-ID MtChr4; po s 37605762 to 37606667)
aaccctctttcaaattctctacaagcactaaccaggttcaaattttcatcttcctctcttaatgcacatacttacttcttatttatttgtatctacacttcaataggttcgtgtgactagaaatgctatattttttgtgtcataagttggtaaaagactacggagacatttgatatgttgtggctcacggttgaccttgcaatgttcatcttttccacacttactgtatatgatgttctttgaaaaaaaaatgttactatgcttttggtatagtatatgttaaatgcatgaaatgacttggttaaagttttctccgaaaaataaactacttttggaaatttctctatagtaaattttttgttaaacgcaaggacgtgttaacttaggtgttggaaattgaagtatatagcttaattacattggtaggttcagaacatagcaagagaacatacacgttaatttgttaaggttttggttcaatactaaatctcaagttcacctttgtattttgttgccttttctatttggataaacaattaagcctttatagcataaacacttatcatagctattgttacaacaaaagataaaataagtcaaaaaaaatcatataagttgttttcatatgttatcctatatagcttatgaaaataacttatgaacatgttataatcagtagataaactcatattaaaaataatgaatatacttttggtggtggacatcatatagataaaacatgggttatataacgactttgaaactcttgatttgtcagcttgttctaggtaacacagtggttttaatactttttttatgaggtgaggaagaagtgaaaattttaatttgagtggttaaaacatacatgcaggtttctttcagaacttcaagttttggtgcaatttc

SEQ ID NO: 31780 - DNA, 714 bp, Medicago truncatula
  Intron number 1 from transcript Medtr7g083770.1 (locus Med tr7g083770) derived from phytozome v7.0 (chr-ID MtChr7; po s 17963611 to 17964324 reverse strand)
aggagaagcttgactctgagcttaattcctatagggtataatatttttctataatcttcaatttctcaattttaggttttgttgtttttcatcatcttaggtctaaattttcaatgtgcaatatataacacgtattttttttgaatattatcgatgttgattttttttgtttgtttggtgcatttattaaattttgctgagtttgatttgaatgtgatatagacattcatatagatacatggagaatcgtctaatgatatgtgtataaattgctatgaactatgaaacacgaaaacatatacaggacactacaaaccccggacaccaacacatctgaaactgataaaattttgagaaaatttcacaattcaacgtaatcacatgtgttgtgttggtgttttacgtgtgtcggacatcgggacaagccttcgatcaaaagtgtcgtgctatagagatgaattgtttttggcttgtttccatgagttcttcaggaaagcttatgaaaacaatttatagcttctatgaaaatagttatattttactttatcttttgttaaaaaaatatcttatagataaacacttatataggtgcttaattaagtcgtttctccaaacaggacataatcttgtagattataggtatttgtttttttcttcattttgactgtatttgattgttttgtgcagacgaacttgattaaagagagtataaga

SEQ ID NO: 31781 - DNA, 963 bp, Medicago truncatula
  Intron number 2 from transcript Medtr4g081790.1 (locus Med tr4g081790) derived from phytozome v7.0 (chr-ID MtChr4; po s 17210541 to 17211503 reverse strand)
tttgttcaacgccgtcgttgtcttgtagagatctggtgttgacgtgattatgtggtagtctcgatctggtttttgctatgtttttattttatttttgattattggcgtttgttttcgttttgttccgtggtgatgaagatgggtgatgactttatttcggctctgtgattttgtctgaaaatcttgaatcttgttttctggattgaagacacaggttctttagttctggtgttgttctattggatgcatatctcgatttaacatgactggttttatcctgatgttgctcgaatgagctaggtgcgtagatgctccgtgttgacaatattagttgttcatcatacctaaaagatattatcctctatggttgcttcttgcatcgttggtggatattgatagatttatgtcgtttgttcattccttggtggacaatgatagttttttatttcattttcttgataaaaacttgtcccatattttttatttatttattaatgacaaacttatatttttattgaaaaataatcatctcttgtttatttcaaagatatttattattattgaaaaatgttttccctcaatatttttttaatatttatcagtgatgatatttatctcgtatttttttttatgttttattgataaatatttatttcgcatttttccattcgtcaatgaaaaccatatgtcatgtgtttttgtaccaatgatgaatatttgtgttatgcatttgttaatatgaattggggaaatgtaatcaatgttatgtttttcatttttaacctcattattatcatttaatacggtaaatatattttcttttcaaggttctttttcatgattgtggatcaatgtaaatgaggtagtgtgtgacatatgtgaataatcaatattatacactgtcacttgtacttctcatattgtttttgtttgtactttttttaatgtatttttgataggaaa

SEQ ID NO: 31782 - DNA, 484 bp, Medicago truncatula
  Intron number 2 from transcript Medtr5g029020.1 (locus Med tr5g029020) derived from phytozome v7.0 (chr-ID MtChr5; po s 12024805 to 12025288)
cgaattattctgctggaatttgtgttgcgttttatgtaagtatacacaaaataataatatttttgaatttctttaatcaatctttgttatatatgtttattcctttcatatttgatccttttttgttagaaaaagattgtttaatattttatgtggtgattaaaaaaattataaatatcagttaaactttccttttacttggtggagaattttccaaaggacaagcaaagtcaattattacggattcagcgtgaaacaccaatttgtatacctcaaagtttttcaaaaaggaaaaagtctcctaactctataaatattttttgtgttggaagagtttttttgggtgaaagtttttatttttatttttttggaaaaaatggtgaaagtgatttgcgtaagatatgaaatgaaacggaacagttttgttatatacttttgacgttaacttttgtatttttgttgttgttacagacatcaaacggtg

SEQ ID NO: 31783 - DNA, 879 bp, Medicago truncatula
  Intron number 1 from transcript Medtr5g093440.1 (locus Med tr5g093440) derived from phytozome v7.0 (chr-ID MtChr5; po s 36753263 to 36754141)
caaaggaagtgggatagtgttcattccaggaagaggtatgtattttctcattttctgccaactgtggttggcacagatggtttgaacttctgtcacatccgttgtaactttgataagtctgaaattccgcagtttgtagattattggtaaattccattataaatgtttaatgcgatttggtgattcttatcaaaagtacttgtataagtatgcgagttagataaaaaaaaattatgaccatcttgttctcgtggaaatggactctgataattcataaagtctagccaatgattgtaacaaccaggttttgaacttagtacttccaatcaacttgaccttcaccggacctcattgaccactcgagtcgaaccatttaatttcagttagagtatatttaaatgctaagttactctattatttttcaaagtatatacatggaataaattgaactatgattgggtttaaattcaggttacattttttattttactgatatgaaaaaaactacagtatctttttatagaaaaaaactacactatatttgttaatgtatatacagtgtaaacatgtaaaatttaaatagaaggcaaaattgaaaattttcaaaaatatattaattgcttgaccatattatccaatttatgctataggtagaatgaagttgatgaacatgttttattagtgaacctgacattctagtttatcatggatgagtaatcaataaatgataatattacatctaactttttaattgtttgttcctctatgttattgaaaaatgcattaagtgatgtttttttgtttattgattgatatgtttgcattttatgtatgactatttgttcttttgttttattttttattcctttaattttgcag

SEQ ID NO: 31784 - DNA, 860 bp, Medicago truncatula
  Intron number 1 from transcript Medtr5g010860.1 (locus Med tr5g010860) derived from phytozome v7.0 (chr-ID MtChr5; po s 2780573 to 2781432 reverse strand)
aagtggagccgttgattgttccaaatatggcttttaaccgttgatttgtgggatccacttttcctgaaggttctttcttcttcgttcgttttttgtttatatttttttatttgatttttcaattttgtccaacgttatcatgtactttgttattaacacgtgtttcaatgtttatgacgactgtggcccacatcatgcactttctttgtagctgtgtgaattgcaatactcatgtcagctggatggataagaaaatttattcaagacagaaatttaaaagcttagtggtttatcaatatactacataaaaaaaatcaaaaaactatattttctattaaaaaagaactcgtaaaagtttttttttaaccgtcggattctttgaggcgtgagaatatgataatttaagatttgaccgaaagataagtgaagtataataaaaaaattatttaacaatttattttttgtagagttcgttaaccatttgaattaattgtttgaataattcaaggaagctttgataccaaagatataagatcaaacttaaatgttatgttgagtgttggcaacgatattatttgtgaggattaattttgtcatctagaaaggcttaacgtcgcaactagttactcgtttgtttccactcatgtgtattttttgtatacgtctgaaaaataaatatattaattgtaaattaaaaaatgatgatttttttgatgaataaaacaattcatttttataaatgatgatgaatttttaagtagtaatttttatatcgtatttaacttgttctttttagggttttcaatttgtttatgctgagtggagtcctccactggtgggctgagtgagattgaacacag

SEQ ID NO: 31785 - DNA, 461 bp, Medicago truncatula
  Intron number 2 from transcript Medtr7g068000.1 (locus Med tr7g068000) derived from phytozome v7.0 (chr-ID MtChr7; po s 13832537 to 13832997)
aaattccaggtttaccgggtcgggttcgtgacccggttcgcaaaaaaacacattttttcaatcagaaagtaaaaaaaaataaacgtttttcacccttcttaatctcttaaacggtttcaaatcctatcattaaacccattgattattgaagatcttcccaatacagccactaataattagggaaattttccaataaacccataaatcatggaaccttaccaatgcaatttccatattcatagcactcaacttcctctcttacgtttttaactgttttgaagttttttttttttttttcctttatctattaatgaaatgaatttgagttttatttaaagttttttttctctttctattaatttatgttgcttcatatgagtatgtatgaatttatatgcaatatatatgaatttctaaatttggtaggatcttacgatccgtattacgatcccccgattcac

SEQ ID NO: 31786 - DNA, 1030 bp, Medicago truncatula
  Intron number 2 from transcript Medtr5g020300.1 (locus Med tr5g020300) derived from phytozome v7.0 (chr-ID MtChr5; po s 7642784 to 7643813)
acagaacatacatagttgagtacgacacagaagatgtaatttttcgttttccttcctaacctcttgctcttttttttttttttttttttttttaggaaaactatcattttaaggtgatgtcgtaacatgtcattttaggatgctgtcttcctaacatgttatttttcaggacacagaatatgttaagttgtcattttccttcctaagttgtcgtttctgttttattttaagttgtgttttattttttctatatggatacggcggaacaggcaagacgtttctttggagagcaatgtcggctgcgatacgatcaagaggtgaaatagttttaacagttgcttcaagtggtatagctgcattattaatactaggagggagaatcgcacattcgagatttgaccttccctttattatcgatgaatgctccacgtgtaatgtcaaacctaataccccgtgtatcagttggtagtccaagcaagattagtaatatgggacgaggctccgatgatgcacaaattttgctttgaagcatttgatcgttctttcagagacgttatgaaggaggtggacaagagaaacaaatacatcccttttggaggtaaattcgttgtatttggtggagattttatgcagatattatatgtaattcctaaaggcagaagaccagaaatcgttcatgctactatcaattcttcaaaattatggaatcattgtcaggttcttaccttgattaagaacatgaggcttttgaggcgaaaagacaattttcataatgtgttttaagtataggcgatgaatgaataggggaagacaatgaagtggacaagaccattgttgttccgtcatatttgctcatagaaagcgcaagagtgacataacttactttcataatagagctatattgacaacaaaaaatttcatagtcgagaagatcaacgactatatgttggacatgttccaactgagaagaaggtttatttgagttatgattcacctatttagcgtaacttaaacggtgatcatattgacg

SEQ ID NO: 31787 - DNA, 802 bp, Medicago truncatula
  Intron number 3 from transcript Medtr5g024260.1 (locus Med tr5g024260) derived from phytozome v7.0 (chr-ID MtChr5; po s 9622375 to 9623176 reverse strand)
gactggaattggtgggagaaagatgtgtgtactccttcaattttggttctttatcttctgtgttgttgacttgttgctggttgattcatgtgaatatgcgatcattttgatgtgtctgcatgttccttctcttgttagttgtttctgaatgcaacagtctctggaaaaattagtttttttatttttgcaactaaaacaattgcctggttgaagatatgtggtgattgaagggcaatcaaaagacacttacgttattttttaagattttcttactaacaggacagagtaactagataaagttctctttatgtggcgagccacatgaataatcgcgtgtttgaatactttaatttccacggtgaagacagacattggtcatgaagctacacttaccagagagtgttggctttccatgtgggggatggcttgctactgtgttatgaagctacacatatcgcgtgctcaactttctttagcggttatatgcgatatgatttaatattcaattgctttaactgattttttctaattgtcatatatgctgctgtccaacctgtccttcatggtcagtgttatatgtgtattaatagaattttctgttcctaaactctaaatattagttagtaaaggtaactgggtggatacggtttgttgctatgtgtaaagcttgacatctaaaatgcaacaacgagtgggtttctattaggtgtttatatttcatgaattaagtttccattgatcatggtgtatgcatatttgtcaagcagctacatcgaaatttcttaatttggcggacctgaat

SEQ ID NO: 31788 - DNA, 481 bp, Medicago truncatula; identical to SEQ ID NO: 31100
  Intron number 2 from transcript Medtr4g084630.1 (locus Med tr4g084630) derived from phytozome v7.0 (chr-ID MtChr4; po s 17849976 to 17850456)

SEQ ID NO: 31789 - DNA, 944 bp, Medicago truncatula
  Intron number 1 from transcript Medtr4g143730.1 (locus Med tr4g143730) derived from phytozome v7.0 (chr-ID MtChr4; po s 35999241 to 36000184 reverse strand)
ttaatttgtcattatttgtatttattctcattcattatcgcattaaatgatagcaagggagggaaaacttggagtatttagggctaaatgctagcttgacccttagggggttgttatgagatctacggttgagacatagggggttgttgactgacttgattggcattaactacgtcttcaattgcattaaaagtgtgttattcgttttcaattggcattaactaagttatatgagagaaaatgaggagtttgaaaatagagtttgatcatcaacgggtgagattagattagcaataaatatatgtttaggagggaaaatgctaggggttagagcaaattagggtgaattagggcaaacatgttttctaaccaagtctaacttttataataaaggattataaatatctattaaacggaatagtcaaatatgaactccgttcaatggcgaaccctcatatttatataaatactaataaaatactcttttttaatattataaaatttaattttaggtccacttttaaaccaattataagaggttcatattaaacacatccgtattaaacttgtcctttaacatttttcttaagaaaaaacacaaattttttttttgtcaaattagctagtggctagagctcggagaagggggtgtccgaggttgaaactcatactcctgcatatattttgcattgtccgtattaattgagataaactcacaaacactaaaaacacaaactttttttttttttgagggaaacactaaaaacacaaacttattggccttcacactctacaatttcttgttctagtattttccttgagtgcatcttagtcaaaatttgtacgttaaatttgtaaatttgtttatcaaacaatttttatattttttttttatcgtgatcgtttgattttcttctatttttgtatagctatcaatcaactgt

SEQ ID NO: 31790 - DNA, 737 bp, Medicago truncatula
  Intron number 1 from transcript Medtr5g062600.1 (locus Med tr5g062600) derived from phytozome v7.0 (chr-ID MtChr5; po s 22112546 to 22113282)
ctggagtcttatccagagttgtttgcttgaggtaaattttcgaggacgaaaatcttttaagtgggggagagttgtaacgcccactttcgtttaatcgtttatttaatcgagtttaggcgatcatattataattatataatatatgcatgattttgatatgttttgatgatttacgatgatttgattgatgacgtgataagttatgagttttggaagatttgataagattaagggatttattttattgttaaatagaataaagatttgaaaataatataaaatatttagttgagggctgttttgatattttagatagttttgggggagaaagtgagataagataagtaattaagaggagatataaaaaggttagacctagttttagaaaaacatttgtcgtacgtacgttttggagaaacgggagaaaaagccaagagaagagggaatcactaggagtgctgcgattttcttcaaacaaggtaagggtgagactaataattctataacgttaattgctgtaattctgatgattaattgacaaggttaggattgatttagagaagttttggaattaggtcaaaacactaaaaattgatgatcaaacggtaaaacttgattagattgatgtaggaaccgtcctataaccttagaacatgtttaggatggattatggaatcaaaattaggctttgaaccatgttagttggtgaatttccgagaaaacccgtgttctgcccg

SEQ ID NO: 31791 - DNA, 755 bp, Medicago truncatula
  Intron number 13 from transcript Medtr4g156910.3 (locus Me dtr4g156910) derived from phytozome v7.0 (chr-ID MtChr4; p os 38965567 to 38966321 reverse strand)
tgataattttactgacaatcacctccgcaagattggtacgtagttttctactggtcttctctataaattgcattctttaagtgtattactattacaggacttgtttggttggaatggatctatagtttatgaatcttaattttacatggctcgtcacatgaaatttttgtatctctctcttgatgacatgaatatcaataaatattattatgttatggccattttaatgctcatgtaaagaacacatcttttatatgaatgtacaatctatgaagctcctgctgaggtggagttcaagaaagagtgagacccataacaaaactaattgtcggcggcactctgaccttacatatgcaagaggtttaatcatgacttaaacccgtcatatagttctcgggatcaacagaaaaagacattttttaaacaaatacaatatttttcacaagctaaataaagaaatagaaacttctccataaagccactatgataaaagaaaaatgtatttgaagttgtaaacaaacacgtttttttctttttcttccatgtcttgtgtaagttctttttcttaaaaaatgaagagcaagatgcattaaaaattttcgcttccacttgttttctaagggtgggtttaagtttaaatgtcaagtgtctactaattttgattttgaattttcattcaatactgtttaagcagatctttgaagttagacgtttaaccgtgttaaaatacattacgttccttgtttcaggatcaa

SEQ ID NO: 31792 - DNA, 676 bp, Medicago truncatula
  Intron number 11 from transcript Medtr4g156910.3 (locus Me dtr4g156910) derived from phytozome v7.0 (chr-ID MtChr4; p os 38966918 to 38967593 reverse strand)
ctgtaatcttcctgactttactttctttttgatagaacttcatgactttactatatgttacattctgtcattattccttggtctcatgtagtggaattgccagatttgaatttgaaatagttaattatttaacaatccttcacacccacttgctttctttattttcaaaagaatgcttttttattcttttcaactggttcatcttttcagcctttgtcatgatcagatggagttagtttaaaataagatgcaaatataattatttatgatcatacaattccatctgttaaacatgcctttatattttcctcgttttttccgtcattgttaaaacccaatttccttgctccagaagtcctgctgctcgatttttttgttttatgatatgtcatttcctgaagttggaatcctgtaggcttgtaactttgaaagtagatttcttcctatcctaccttatggcactttgtaggagaagttacttcccatggtggttgctatctattatatcctgatgactgtttaccttgtgtttttccttctctagtttttctttatgcaacaaacgattgttcttgctgttctttatataagtgagattatgctttccacatataagttacatgctatcttttattcttcaggtccattttgtttttgaaggaacttgtacgtaagt

SEQ ID NO: 31793 - DNA, 583 bp, Medicago truncatula
  Intron number 1 from transcript Medtr4g106900.1 (locus Med tr4g106900) derived from phytozome v7.0 (chr-ID MtChr4; po s 23187549 to 23188131 reverse strand)
tcttccacaaattttggttttggtcttcattgtaggtaacttcctcttcctttgatcaattgaaaatcatgattggattatttttgtgttatttgttcaatcagtgttttgcatgtcgaatattttaattttccagaaattttgtgggttttggtttgaaatttgcttgcatgttttcagaaaagggtttttttgattttaattgaggttttgattccttggttttgtgttgttgtttattgattctgttttgtaaaaaatttgagagaaatttccagaaaattatgttttcagaatttttttacaaaatatatgttattcagaaaagggttttaaaaatttgagtgaaaagaaatacttggtttgttgtgagagagaaatttgtgttgttgttcttagaataaaaaagaagcaatttactcatctttaattacaatttggatcggtttttatgagttgaagaaattttaagctatgtgtggctgatttgatagtttacttatttgaattgtttggattattattcattttatttaattttttgttgaaatttgttgattgttgtaggctcggtgtgatcaaa

SEQ ID NO: 31794 - DNA, 552 bp, Medicago truncatula
  Intron number 1 from transcript Medtr7g012490.1 (locus Med tr7g012490) derived from phytozome v7.0 (chr-ID MtChr7; po s 3234577 to 3235128 reverse strand)
aatctgacactattccgggagagttcactttatctgtcaccaaattttgcaaaaggttcattcattcgttcgcaaatatatatgattacattcgattaatttattttctgaaatcattattggtgtcaatctatttatatatgcttataggtactagctaatgtattatggaagttcttgaaaatatgtcacaattgaaaagaaaaatacataatcacatgtcattgtttttagaaacgaaatttccctgaagtgttttatagcatcatatactatttattatataggaagtcactaaaaaattcacaaagaatggcacaaaataatatttgagtagggaatgtttctcttgattgatttaaaatgtaatatatatcccaacctataaatgacataataatagactgcatcagaatttgaatattaggatagtcacatactacatctattgtatagaaacaataaggtaacaaacaatctttgaatcttacatctgttgaatgaatgcaatattatcttatggatggttttgatgtatgtatgtgtatgcag

SEQ ID NO: 31795 - DNA, 1025 bp, Medicago truncatula
  Intron number 2 from transcript Medtr4g137230.2 (locus Med tr4g137230) derived from phytozome v7.0 (chr-ID MtChr4; po s 33758329 to 33759353 reverse strand)
cacattgcatcattttttggattctattcagattagtgagtaattttccccctttttgttaatccaatttttctgaacgcttttgtggttgtgcatgctttgggtagattatggcatattaaagtttctatctttgggtttttcctcatctgggtcctgcaaaaaaaatatttttaaatttttgtttaattttttttcttatgtgaattggatttgcttataattcagatagtggtttatttctgtcaagctttagatttttttttcttctgcagtttgttttttgaaattgtgttgttgagttttctgttacattggttgcaaactgttgttttcttgataggtttagtagacacagttatttcagtttgattttttaacctcaatgaatttatgatctcaatttgtttgtaatatagttgttttaggttttaacttaaaaacaattgaaaatgtcgaagattcttatgtgtgaggataggtaatgtgtttcgtactatttcataccggatttgcattcttgtaatgaaaatgcgtggactgattgatatatgatgccgccgtactgtttacacatgggcaattttcttaacgaagtattgaattatacccatttaggattcttgagattactgcgatgttttattgtttcaaaaactatgtttttcaagagcatagggttatggtcgcattagcatttttttattgtgagagcagtgcatttttatgtacatcaaacttcaattatttggaacaattaatggcatacttttagccttataagatctttgtacgagtgtttaagtatcgtgagtttgtggttatttttttgtaataacataaacttatcagctgagaattgttgcaatttggatgacattgttaaactttcatttgaagatcctttgaaaattgtttattgcatctattctttattttatcttttatctttaatgcacttactacttggccaaagtgtttggtgatttaaacaatcttattggacaggtattgatcctgcttct

SEQ ID NO: 31796 - DNA, 759 bp, Medicago truncatula
  Intron number 1 from transcript Medtr5g036990.1 (locus Med tr5g036990) derived from phytozome v7.0 (chr-ID MtChr5; po s 15499317 to 15500075)
atcaataatttccatcccttgttaactttcacatgcaactaacgaatattaaaataaaaaaaaattgaatttgaaaaatgtatttattatatttttatttttgatgtactaaaagtttttcttttttatgagtaaataatcattttgattattgaattgtcaagtgctctcaacaaaatccttgaatgtatttaaattttaaaaaaatatccttgaatgtgttgtccatggtgaattgaattcttaaatgcgttttttgttagttagtttagtcatcaaatgcctcttccgttaatcaatttagtccgtgaattccatataaaaagaaaacttaagtttttttttttttgttgtaatttcaatatattcaaagatttaagtgacattgtcttacacgtctaaagaccaaaaggatgatttactaatttttatatcattaaacaaaaccattaattaattgtttctgtttttctctttttggtgttaaaccaagcgaactggataacatgccaatctagtaaaagcatagataatgaacaatgaacatctaaactaaagtttaaaaaaggacatcatttgcacccttaagcgagatctctatttttctattcaaggtgacaactagccaaatgataacttgtgatttaacataaccctgtctagtgtatgtaaattctttcttattagctattcttttgtatatgccttaccatttggagcctaggttctgcctacctcacgacacggaggaacgattct

SEQ ID NO: 31797 - DNA, 588 bp, Medicago truncatula
  Intron number 1 from transcript Medtr7g012060.1 (locus Med tr7g012060) derived from phytozome v7.0 (chr-ID MtChr7; po s 3037774 to 3038361)
tggtataaccccgctcaatggaggaatcttggaaataatttatgttggcatgagtagtcgtgttggcattgtattttcaagtgaccgtcgaagttgaggacctttagttaccattacccatcttggccttttaggacgtagtgcggtggctaatcaagagtagtcttggtctagttgatacgcgatactacactcagacgagactttcttacgaacgttgttggaccggaagtatttccgtaacccgatgacattcggaagcggttaaagactctgggaacttggtagaacccgtgatacaggtacaaatgagaccatagtccttaccaaatggcgtgtttaccctttgactccatcattgtggacctaaaacctcaccatgttttcaccatttgtgcagcataatcatgcatacatgcattcatccataaaaacttctttcatcaaaatatcgaagggcttatatagttttttttgtaaatatcaaagggatggagagaagaaacactaggaagttcactttcaagaaattggatttgatgaacttaagggatcttgcagttaaggtagccagtccggaagactttc

SEQ ID NO: 31798 - DNA, 915 bp, Medicago truncatula
  Intron number 1 from transcript Medtr5g091160.1 (locus Med tr5g091160) derived from phytozome v7.0 (chr-ID MtChr5; po s 35646089 to 35647003 reverse strand)
tcaacgctttcttcttcttcttcttcagttcttaggtacgtttctattcaacccatttcttcatatgccttcaattttttattttttttcatctgggtcatttttgttttgctttctcttatcagcatatttgattactagggttttgtacgagggtgtttttcttttatttagctgttttatgagatgaatatgttgctattattagaattgggtattgggtttttattttttagttatgttatgatttgtagtatgagaattgtgaatttaattggtaaagttttattaagatctatttactaactaggttatcattaacttgtacaagtctttcatttttgctagtaaaataagcgtagcagagatgaagatgttgtgttggatgtgttgtaaaactaaacatgatggaattaaaaatgacaatattagagagtgagagttggggtaacaccacacctattgtagaaaaatggtagaaactcgacttaggtgatttgggcatgtagagagaagacgtgttgattttgtagcaaggagaataatatatcagagggagatcggagagtagtcgaatcactagaggtaaaggaagacttagaaaagctataagggaaaccatcaagaaggatctagagattaatgagttatgtaggggtatgatatatgatagaacattatggtggcgtttgatccatgtaatcggtcccacttagtgggataagacttggttgttgttgttgtcatcgtcgtctgatattttctttgtctttatagattgacatgaaatttgtttttgatttgaatacttagcacaacttgttacgtttttgtccttgcagtatttgttcgtacccgtactattgatttgtaaggttctgattttgattgagaaagcttaaacttcataacaga

SEQ ID NO: 31799 - DNA, 726 bp, Medicago truncatula
  Intron number 2 from transcript Medtr4g096930.1 (locus Med tr4g096930) derived from phytozome v7.0 (chr-ID MtChr4; po s 20566665 to 20567390 reverse strand)
gttgctactgcccttgctaagcaggtttgtttttttaggccccttttttaattggaaagaaaatattgatgaatatgcatttgtgaacgggtagcttgtattcaaatgtgagtggttagtctcacactagttgagaatgggctaaactaatgatatagaagagagatgattcatatgggtaatgctctaaggtttttggtggaaatgtggtgtttcagtcttttgttgttcctgattattaacttgttgttgctccctgtgtttcgggggctctccaacaagtggtaccagagccaagttaacttgatgggagagtagatctttatattaagtttttcttatagtggagtcattggttagtaatggaagtgaaagtagacattggatataccaatcatctcacttatattttgttcagcatctactttttcattcaatatgagactttgaattcacacttaacacacgaacagacctatatacacccaacaatgacagaagcggaggataatatctgaagcaatgtatgagtaggagggtgcacgtactcttactatgaaattgtgtatacacacagaagaccagtaaactattttggtgttatttgttatgtatcacatccatgactttatgcgcacagaacttttaggatttattgcactgcctttgattagtttatttgtttgtgtaggatagggaggaagtgcagcatcacatatctgtctt

SEQ ID NO: 31800 - DNA, 745 bp, Medicago truncatula
  Intron number 1 from transcript Medtr5g076660.1 (locus Med tr5g076660) derived from phytozome v7.0 (chr-ID MtChr5; po s 28087893 to 28088637)
atccaggcccagtctgtattgggttttggtttgggctggaagtttttttttacgttttttgctttttttgctacctgcaccttgtttctttgctgtttgaacctctgcatacttaatttttcttaaataaaatttctaaaaaattatcacatgtttcttgatgtgctttcatgcttctgtgatacttttcaatagtttaaaaaatggtaaaaatgcatgtgatattttctcgtttaattaggtattttaatacaaatttgtgcatttttttagtagtgcattttatcaaaagatgatggcatatgttgtgaatgataacaataggcaatttcatgataaatttgttgctgatcctatgtgtggcttgctgcttgtgaatatgaatcttatttttcttcttgccttgcaattagtgtgtgttttaataataaataaggtgcaaaatgtcttaaaaatgtgtcatgagttttagcttgaatatgtcctattaattctcaccatatggcacaaagcaagacttctaaaaatttgccataatgacgggatcataagtcatacacatgctagagttttatggccactttcatgcacattttgtcactttattagtctcttttatatctttcctcttaatattttttgtgtgcacttcttttattctttgcttcattttactaactatttcatctcatgtgtcatacatttcatagcattcctctacctcctcccctttctttagcttagc

SEQ ID NO: 31801 - DNA, 796 bp, Medicago truncatula
  Intron number 3 from transcript Medtr5g013880.1 (locus Med tr5g013880) derived from phytozome v7.0 (chr-ID MtChr5; po s 4269290 to 4270085)
ctgatttgaaatttgattttgatttcattatcgtaagtggggggaagtgcatgattttcttggtataaagtaaaataaacatgttaaattgatctgaaaaagttttatatttaatggcctcactgttagtatgtggtattgtttttgttgagaaaattatatggtttagttagttaagtcttggtgaagttctttagagttttaagtattggtggtttcaaattttgtaattagcttgttgggggttaagttgtttcccctttctattgtaattagatttaattggattcaacgatgacatatttctctgctctgctctgataccgtatgaataattggtggtttagttactgatgaattgaataaaattacaagctcgttttattatttattcataagttgtatgatatcagagtagagaaatatttcatcattgaatcaatgatcatctactagagaacacattgcacccacaaatgcctgctatttacatcttagagtaaacaagcttgatagttgtttccccaccaatgaataaaacacaattatgatatttggagttgtcacatgaaatgtgccctagtttctgaaaattgaatcaaattcatcaatggcaagatcaaacaactagctgaagatggtcccttctttgaagtgtgggaaagatacagtggaattatgatttattggattggattgcaggtacggagctaaaataggtcaaatgcgatggaatcgacataacttgaaatatgacacagcataacaagattcgagcttggggggttttgggagg

SEQ ID NO: 31802 - DNA, 991 bp, Medicago truncatula
  Intron number 1 from transcript Medtr4g134230.1 (locus Med tr4g134230) derived from phytozome v7.0 (chr-ID MtChr4; po s 32332746 to 32333736 reverse strand)
actgcatttatcgcactccaatctctacctcccaggttagccttagctaatactctcgcactcttcgtaattctctttcaatttttgcgtgttgttgtttttcatgatcaaactcgttctttcgttaatcaaaacggtgatactgtctacgaacaattacgttgtctttatgtcgtgtttttattggctttgaaaattaggtttttttatattgaaacatgttcgaaaagtttttttttttgtgggtgtatgtttttttttgtttctgcaaattctgtttcttgcgttggtagttaaaaattgtatttttaagaattttatgttgttgattcctccttataactgttgttagaagatttaagaaaaacggtttagtttttgggttatttctgtgcaatagcataatagatattacaggaaagagtaatggagtcctatcagttatgcaacaaatcatttgtattaattgtttttgatcccattgaatatgattgtcttgaccttttagagagccttggatttctctgtattcatctatgttgtcaaccgcagcgctgtagtggaatagcttagcgatggtagggtttggcatgatgcttttggctcgcgagccacggtgaacaatagtggttgtagtggccgctaattgcggccccaaatcactatcaagtccgctattagggttttggggcgaaattcttctaattttttgtttagccctattaagagtataaatgtcaattcaaactcttttaagggtattgttctgtttttcattctgttatggtcttgttgacaaacaaccgacatgtttctgtatttatgttatcttactagcaaaatagtgaaggctgatagctatcatattgttttcatactatttcttctattgcatggctaccaggtctgaagctttagttttttcatcacttaatctcttttttttattggttgtagattttgttttaagtggtaacatcaagtctcaaaa

SEQ ID NO: 31803 - DNA, 543 bp, Medicago truncatula
  Intron number 2 from transcript Medtr5g104690.3 (locus Med tr5g104690) derived from phytozome v7.0 (chr-ID MtChr5; po s 42009636 to 42010178)
ttagatttccgtttgtcatctgctgctgctttcaggtaaattgctcctcccactctaccacttgtcttcttccgtttgttcgtgctatttttttttctttcaattgtcgctgcttttatgtattcatattattccattaactaactacctgattatcgtgtctcgttgttgtagtccttttaatatatctatctttgagtaaagatcaaatttggtctctcgcaaattttcttgattctcattccaaagacctatgaagcacggacacggacaccgaacacgacacggataatgacacgccgacacggataataatttgagaaaatgacatattttagtgtaatcataggtttttgtcggtgcttcatagccgaagaatcaaattaatcggacacacctaatccgaggagtatccatgcttcatagccgaagacaaattatgacccgtttggattagcttagcttattttaaaacacttatataaaacagtctatgcaaataaataagtttacttgttatttataaaggtagtttttgaaaag

SEQ ID NO: 31804 - DNA, 1038 bp, Medicago truncatula
  Intron number 1 from transcript Medtr5g086470.1 (locus Med tr5g086470) derived from phytozome v7.0 (chr-ID MtChr5; po s 33168699 to 33169736)
atctattctatcaacatttgaatatcgtacaactcgtgcgctccttttctttattttagagaagacatcattttagagctatatcaatatacttgcacacacaaatttctattgtccttcaaacagtgagttcaaatcaaattttaattgtatattgatttaggtttttatttgaaaatgaatttattttacttgatctgatttctatgattgtaattcttgttttgtagggataaaattaaaactccatgcctctttatgattgaatgatcttaatccttaaaaaaaaaaatgattgaatgatctttatgttgatcttttattttctttaactaagtgattagggcacataaatggaggtacgagggtacgtaagttggcgagctattcagccaatcttagatcaggctaatccccctctctctcacacacacaaaaaacctataacttggtttctattaagttcttcattcttgtgatagcctaacttttttgtttgtttgttggcataaggcattagataatttgaaaatattaaaggagatacattctagagttttagaacatgatccatttagtttcctaaaattttctccataaaggctaaccggacattttaaacctgcacttttataagaatgtcttttgatagagttttggatagaaaatagttgtgcttgtacttcgagaggagtcagtggtggacaaagttaaactcttagcttggaagtggtttcaggctctgttgtcagtagcggcctaacgcggcgcgatcgctgctgaaaacagcctagcgcgtcagaacgcgaccgcatcgcgcgttaggcaaaagcggctgaaaaccgggtttcgcggccgctttttgttagagcgggagtgggtctaacgcggcgcgtttccgggttgaagcgaaattacataattacccctcactaagtgacattagaagggttaattttgtaattttcaaagccctatttcttcacttcattccatcgtacagagaacagccgcttcttctcctcttctcccaattca

SEQ ID NO: 31805 - DNA, 617 bp, Medicago truncatula
  Intron number 2 from transcript Medtr4g114500.1 (locus Med tr4g114500) derived from phytozome v7.0 (chr-ID MtChr4; po s 26195604 to 26196220)
tgctttaatcctgcttctatattttattcatcaatgtaatcttctcattctcatttttgctttatatgagattttaaattacatacatacaatgtcaatgtaagagtggcattgaataagagtcaactgttttgccttataaggttctgtttggacacaaaaacatacttaagtacttattacataacactaatgatgtaagtgcttatgtattattgtttctgtaacaaaagataaaataaaatttaaatcttttcgtataattcatgaactgttttcataagttatcatttgtgaagacatggaagtttatcaaaataagtagaaaatggcttatcgacatgtcataaactgtttccataagctctcccaaatattcttgcaagtacttatgttagtagatagctttaaataagtcaatccgaacaggccctaaattgaaattgattgtataaagtggctagttcttattggttgtataaatttttatacttaacaatgtatgcccctttaactctttataatttctaatatgtaaatgttgctttgtgatttggatattaattagtcgggtcttttttttgtttttttgaattgtagatactcggagagtttgt

SEQ ID NO: 31806 - DNA, 878 bp, Medicago truncatula
  Intron number 2 from transcript Medtr5g097150.1 (locus Med tr5g097150) derived from phytozome v7.0 (chr-ID MtChr5; po s 38716712 to 38717589)
aaagggtaagagagagaaatgaaagtctttaaggagagcacgggaaaataataataatattaataatgagaggaatattttgtttgtttttttcgtttatacctatttttcttgggcaaaaaatgtgtctaagaacacttgggcgtgtatagtaaatgatagggtaccggatttaaggacaccattttccaatcttaaatatgcattcaaatatacatcttaaaattctcttaaaaaaaatacacatcttaaaatcgttattaataacgtttcgacttttacatatattatactttatatctaccaattaaactgaattcatataaacaacatttaaaattgttattagtttgattttacacatgaataatgagtcacgacatcatacaatataattaatcatgcatttgaactaaattaaccatcaaaattattgtcaaattttgttatgccaacataacaattatattaggcattgtttgccctttttcaaaagtttgattttcatagaaatcgaaagttgataatattatataggtatcttatgtaagaatgaaatgaatatttatcaattattgaactaaaataaactattcaaatcaaaagacctaattttaataacacctgttccttttcacactcaatcaaatcataatccaccttctcatcttttccaatccacgatcttcagcatcagagtttactattggagccgaatatctctaaatcagcgatatttctaatataatcaacaaatgtttttcaatctctctgaacatgattggagattatgttcaacgtctatggttgttgtatgtttggttggtctatccttctttatagttttatttatcttctctttccttcgatccaaccga

SEQ ID NO: 31807 - DNA, 653 bp, Medicago truncatula
  Intron number 2 from transcript Medtr4g159520.1 (locus Med tr4g159520) derived from phytozome v7.0 (chr-ID MtChr4; po s 40257299 to 40257951 reverse strand)
tgtgccagcaattggaggtttgtttcctattccctcatagcgagtaaccagtttatcatcttgattcaaaaggtcttcttttgaagaaataacaactataatatgttgtaacaagtttttcacataaaaattccaacaattttttcaatgtgtgttgcttctttgtaatatatgttttcgttccttttctttctataaaattaagttatggaatgattaaagaaaaatgggtcggggtgttatgtttgagaaactcttacaaaaatcccacaaacagaagaaaatgcagcaagttcctcgtaaagccaaattcccacattcacagtgaaacaaatatcaaacaaacagatttttagcctttgccttggtatctttgactagggcccccctaacagcaagcctctcattccgtcactgattgtaggttaattattatttttcccaatattatcatttgctcacatatttcacaagtcacatccatcaattgtccaccaccacgggtgttgatgatggaacataggatgggtgaatatgaagattagggaaatggaaatatggaaataaaaccaacctttattgtttatattcctcttgacatatgttgtgttttgccaggaaaagacaggagggaaagtcatttacagaagagg

SEQ ID NO: 31808 - DNA, 1008 bp, Medicago truncatula
  Intron number 1 from transcript Medtr5g100760.1 (locus Med tr5g100760) derived from phytozome v7.0 (chr-ID MtChr5; po s 40298827 to 40299834)
ccgcacataaacaaaaacatcgttgtaatccttacgtcatcctctataaaaaaaaaaccatccattcatcttgtagaactatcaattttatttattacataaccaccttcaccttccaccacttggtaaatctcctccactgcatcggagttgtttttagcagttacattatcttcttcttttactcttggcgagttttcttcttcaatttctcctttaaattgattttccccaatttttatttaaaccttctgtttttaaagttcaccatttttaagagagatttgtatctttttattgtttgaatttctttcatttctcaagttatgatttgaaataaaaaaaatggtaaatttttatttcaggtatcgagtttctccttttgtaattgacgagaagagagatttgattggaagttttttgaacttctttcggttgattatgtttatgattatgtttgtaaaaatagagaacatttgtttgatgagtaagaattgattgaggttgtttggaatagatcactctatattattttacaatttttctgtttttgatttgttgtgtatttttgtgtgagttttgattgtagatcttgaagtgtgattattaattattaatattattaatattattattattattattattattatgatcatcatcatcatcatcattcaaattcaatggaagcatctaatgacaaaactctttgctttgtatataatttttcctttccttaaatttgaatgttttttttatttttttatttatacatatgatttttgtctttgttgatttatctattatgattgtagttcccttttctgcaactattttttttcattctatatattttctatttttttatgcttataatttttttctttatttatcaaaacaaatctttagtttattgttacaaggaaaatctcactatgatgcttttcaagattttgcaattgatttgttgtaagaaagtttagtttgaggtttattttatgcttgcag

SEQ ID NO: 31809 - DNA, 624 bp, Medicago truncatula
  Intron number 1 from transcript Medtr5g103910.1 (locus Med tr5g103910) derived from phytozome v7.0 (chr-ID MtChr5; po s 41655960 to 41656583 reverse strand)
caggagaaacaggttttttttttttgtgaatttcttagctcatatttcattgtaattgagttttgtatttgcatgaaaacaattagttctgtttttgatttatatcaaacattggtttttacctccttccttgtactcctgactctctctatgattggctttcacacatttgtgttcaattcttaatggatctatcaaaaataatctgattctgttttaaaatttgcctaaatatcagcagcttgaaaagggattattagtttttaaaaggttgttgagtcttgtgaatgttagtttctgtttttccaaattttagatgatatttgttatgctaagaataaggtatacatctgaatattattgttacattcttaatagaaccaagcaataaaagatttctgtaaagaatatttcatatattttgttttcacagtctaaatcataagtttgtaacattactttctttttctctcctactttcattagtttatattctgttccatcataattgaattacataatgatgctgatcataaatagggttttttaaaacctaatgcagtgttctcatcatggttaaaattatcaggtaaagcactggaagaactaagatcttctctctac

SEQ ID NO: 31810 - DNA, 750 bp, Medicago truncatula
  Intron number 1 from transcript Medtr5g037440.1 (locus Med tr5g037440) derived from phytozome v7.0 (chr-ID MtChr5; po s 15736056 to 15736805 reverse strand)
ccacctcgtccatcaaagcgccctaaaatcaccaggttaggtttctaactcctccattttctcttcttacctcacatctttgtatgttaaggtagtagaattattaaacaatatttttatattttttttttactttttctttgtatttctaaaagtgatttttatgaaaattttagtcaaaaatagtagaaaagagtaatttgttgttagtgatttaacataataaaaatcatacattttttcaaagacatgtatctgaaaaataacattaatgagaagttatacattattttaagtattttttgaaattttattatctaaaaaatacggtagcaaagtggtgaaatacttaaatgactttttaagataagctgattaaacaaatttttcattgttaaaaagttgtaataacaacctgaccttgaatgttaattagtgtaatcattaaagttggaagaatgaagtagattgatgatagctcccacattgcatgatgagtttttatttttacagtttgtgtgatgtagacaaaatgacaaacaccacttaaatctgacatacgtcggatatggcggtgtcatatgtcggatttttggctttccgccatcgataatattgcttagtgttctgctttacttatctggattctggccttcatgctctatggtgattaactaaattaaaaattaatatttcatgattaatagtgatgacggagttgatgatttgaactttgtttcaggggggagg

SEQ ID NO: 31811 - DNA, 427 bp, Medicago truncatula
  Intron number 1 from transcript Medtr5g027610.1 (locus Med tr5g027610) derived from phytozome v7.0 (chr-ID MtChr5; po s 11273686 to 11274112 reverse strand)
tgtcgacgctgtcacaaagcttggtggccctgatagtatgtacttcttctttcatctagttttgttaaagtttttaaattgtagtcgtagttttgttgcggtagcaaagacataaaaaaagttaaatattgcgctctagttcgctgttgcagacctttatttaaaattttagtgtttgatgcacattcaagttaacttgaaagggaagttttttttttttgttagaattgacattgaaagaaagtgtgatggagaatttgggctagtacaattttcaaagcttatcattgtaaatattttcttaataatggctggattgatgtgtgtagtggttcttagtttgtcacaaaaatgatattaatttgaattattttttttttgtttgcttttgtgtttagaggcgactcccaagtctgttctaaggtta

SEQ ID NO: 31812 - DNA, 411 bp, Medicago truncatula
  Intron number 1 from transcript Medtr4g121280.1 (locus Med tr4g121280) derived from phytozome v7.0 (chr-ID MtChr4; po s 28392534 to 28392944)
ttttcccttccgttacgccagaaaaggttcaattttttacagtttttatttcttcccccatcgatcaattgaagttttttgtgttatgaactgaaatgcttgaatttgaattaccatagccaaataaattttgaaaattttgaactttttgttctgataatgcactctatgcaataaagtttaaggtcggattaaagttcaaatagtgggttttctacaatgcggtgaatggtgacgagttaataacatttattattcaagaaaatgagagtgttgatagcacttacttatttattttgatcatgttttattttatcttttgattctggatcattcttgtgatttttaaaggaaaaaacctttgatcacccctctgtaatatgcaggtacaggctgtattgttactcttag

SEQ ID NO: 31813 - DNA, 752 bp, Medicago truncatula
  Intron number 1 from transcript Medtr7g064780.1 (locus Med tr7g064780) derived from phytozome v7.0 (chr-ID MtChr7; po s 13151610 to 13152361)
gacttaagtaccaccgttattgaaggttttgcttataatatactactaatctaagatgtaaccaatcacaccaaaccaaatcaccaactaaaaaaacttatggatgacattgatcacattttatattccctttcacggttgcacacgtgaccacttatagacttacatttctctagttctgtcttgaagaaaattgcttcaattgaatctgggctatacattccatgcaaactatccacttaatagtaatagtaacattaaaatgacaccaatatctatatatctctgaagtgacacatacacattagatagaactctcttactttggcaacaagaacattggttgaaagagttacatcaattcctattagatgcattcttgaatacacaacattatataaaacaaacaacaaatgataactagctagcagcttaatcaatcatagcaaataagcaattgaattttgttaatgactttgacttagacaagaaggagataaaactaaattggatgtctttgacactactctaaagttgttctaactactagtcttgttcaatgacagtaatgtttagttctgcttctctttgaatcatataatatttttatcaatcaaatcaaacaaccactttctttcattcttctatatatacattaacatttttgtcacattccatcaacacacagttcaaactcaaaataaaagctagaacaacttataagagcaatcttactcattcagagagaaaaa

SEQ ID NO: 31814 - DNA, 530 bp, Medicago truncatula
  Intron number 1 from transcript Medtr7g087220.1 (locus Med tr7g087220) derived from phytozome v7.0 (chr-ID MtChr7; po s 18650618 to 18651147 reverse strand)
aaattaaaaagaaaagaatacattgatttttacatgtatgtatccattacaggaattacagattaaagttgtttctttgttttttttttttttttttttttttttgtaaattaagccaaaatagaaagaaatggaaaattggtgcttgctttctctaatgggtatgattcaggagggggtttcgattgtggttatggagtgtgattatttcgacatttaatctttggggatttaagagatttgaagtggattttcgcttggaagagaatgatacgggaaaaaggcttctgatatacatgggggacatggttttgatgagaaagaaaacagtgtagagagatgtatgtataaaaataatatgggttttaatttctctgggcaaatctatgaatatgaagaacaaagaagatgaagatatattgagaatttgtgttgtttgaaacaagtgatgtttttgagtggaataattggttattgattgacattgattttttaattattaatttttgctgggttttcatgttgaaggt

SEQ ID NO: 31815 - DNA, 375 bp, Medicago truncatula
  Intron number 1 from transcript Medtr5g006310.1 (locus Med tr5g006310) derived from phytozome v7.0 (chr-ID MtChr5; po s 646250 to 646624)
ggtttggaagaagaagcattcaacccaaatcaagagtatgttccatgatactttccataccctacaacatgtagttttattttcttctaatgaatgttatttttcacaaaaatgcatgcatcctcatgtacggatatcaaatttgcatcagtatgtatgagtttcctaggaggaaatttactgcgttgacatccttagtttgtagcactttgaatcaatcaatcacatacataaattttcctccttcacatttatttcaatgtgatttcataaaaacaaaaatatatcttccacacaattcattttttattatcttcttactcatgcccatttttttcacacaataattcctttttgttgcagacacagggttat

SEQ ID NO: 31816 - DNA, 415 bp, Medicago truncatula
  Intron number 1 from transcript Medtr5g088400.1 (locus Med tr5g088400) derived from phytozome v7.0 (chr-ID MtChr5; po s 34246299 to 34246713 reverse strand)
acaacaggtaacagaaataattagtatctcacctcaatcaatatgtccatccttaaagaaaagtaaacttcacacatacttaattttaattaatatttaaaaagaattaaagtttaatcattattataaactgttgagaaagttactcttgatgagtttgaattatctttctcttctcttttaattatattcttaaacaaaatttatattgtaaaaacatcaacaatgacattctaactatgtttgtcttttattttatattaaaatcaacactctcttaaaaaataaacatgtattatatttcacttcacttaaatacattgtatattattaatgtagagtacttatgttccaattcatttgtgattcttgtcttgcagctaaacagataggtcccgaccgtgctgctgaattt

SEQ ID NO: 31817 - DNA, 693 bp, Medicago truncatula
  Intron number 2 from transcript Medtr5g040860.1 (locus Med tr5g040860) derived from phytozome v7.0 (chr-ID MtChr5; po s 17462705 to 17463397 reverse strand)
agtttggattttggggtttgagggcggaagaaaaggttagttcctatttctctaacacatgtaattatgggtggggtttaacatgggaaaggctattttttcctaccatgggaaagatgtttttgaaccatttgatttaagaggaacattgatcttatgataatctcttcacacttgatttttttcgtcactctttcccttttccatcctaaatgccaccttccctccctacgacgaatccaccctctccgccgcaaacgacgttgttgtcgactgcaacggcagcacattcgtaacaaactccgcctgaaccttcgtctgaaaagtcaccatcgacggacatgcctcaatcttgtcaaatctccatgaatgccaccatcagtttcttaaaataaaatttcacacgcttgtatcttatatctttattgatgttgtttaaagttgttaaatgatattccagaaaattttaaaaattataaagcttattcatgatggtcaattataaagctcatccataaaattatggcaccgattttcttctcatatctagaatgttaagccatttgttttgcatagtatgtcaacatcattttttacatgataattgaaagttgattcctagctaatagtaattttgcatttgaatttttaaaaacagaaattccttcacgtttttcccctttctctgccata

SEQ ID NO: 31818 - DNA, 894 bp, Medicago truncatula
  Intron number 1 from transcript Medtr5g045990.1 (locus Med tr5g045990) derived from phytozome v7.0 (chr-ID MtChr5; po s 19316592 to 19317485)
gagctttcaacaaaaatctgcaagggaattcgtatgcgatttcagttacttctctctttccaatcgcagcttaagaccaaaatccccaaacctttcttcttccttttttttttttttttttctctgagaatgttaaacattggaccggccggttctttaaaccgaccgagtcaccgatttttatcgagtcgtgccggtttatgccggtctgattgcatgaccgatccaatgagaagctcgaaccggacaccttatcggttcacggtctgaccaatcggaccggccggtccggtttttaaaactatgactccaacatttttagtataactcctcaacggtggtggacaaattagtattatcatataatagcttaattcctttgagatcccctaagtgacaaatcaaagtactaaagagttgggaggtagttcccaacaattagggtatcctataaaatcacttaggaatttcttattatttgtcatcctttgatctaacaagtagatcttcaccgaaccttactcatttgttacaagagtattggtaaaaaaacaaccaaattatataaatgtttgcataaaatatgcagaagattcaaggaatataaaaaccgatttccttttatttaaattgataggcacaaaaaatgccacattttatacttttacaaaataagttaaatgaaaaatatatctcaaccttcagtattattttttttgacaaaagacttcaatattatttatgtgtttgttcagattttttaatttatttttacaaattatttgccaatcagttaaattagattaatttgataatttatttgtattttatatttttattttattttcctactgtgcagttgaagactgttaaaacaaaacaaaaccgaactga

SEQ ID NO: 31819 - DNA, 570 bp, Medicago truncatula
  Intron number 3 from transcript Medtr4g142970.1 (locus Med tr4g142970) derived from phytozome v7.0 (chr-ID MtChr4; po s 35725560 to 35726129 reverse strand)
gaagctcgttctagagccaaattctaactctggtaagtgtgaatgaattaactttcttctgtggagtttcttatggagactgtttcgatgacattaattttggacatttttgaataaacaccttaattaagtgcttatcatttagatatttatgtatcaactatttctataacaacagataaaataaaagttcaattattttcatataagttaaaagctgttttcataagcttttctagagagcttatggaaataaactgaaaaacagcttatctatatgtagtaattcgtttccattagctctctcaaacagtctcacaaatatgtatgttagtagatatcctcaaataagtcgatacaaacaggtcattggtagttgcttactgagtttatagtgtttgccctctttctataatcttcgtataaacatcttatgtggacctctttgatgcatgcgataaagaatgacatactgtttgtcttgaggaatagcatactcattgttcgctcacatttgttttgttacttatttcaggtgttagttctgctaaattaattgctcaaaaatca

SEQ ID NO: 31820 - DNA, 410 bp, Medicago truncatula
  Intron number 2 from transcript Medtr4g143420.1 (locus Med tr4g143420) derived from phytozome v7.0 (chr-ID MtChr4; po s 35899329 to 35899738 reverse strand)
tttgtgctttaacagtggtgatttttttccgctttgtaagtacttcatgtaccttccttttgggccactggttgtattttttgaaagaaatttggttcagattgttatcgtttggctggattaaattaaactttactatggttataaaaataattaatataagaagaccatgattatatgtgttggttcattgttcaatttcaaccagcacggaactttgaataattgaatgaatcattttcaaagttatgactgcaggaactaggaaaacaaatacaatgtttgatcttaatggcatttacataactgattagcaatatttttttcctttcaattttggtgccaatcaaaatctaattgtttctctccgtgtaattggttattgcagtttgtgcttacaagaatcaggt

SEQ ID NO: 31821 - DNA, 991 bp, Medicago truncatula
  Intron number 1 from transcript Medtr7g064880.1 (locus Med tr7g064880) derived from phytozome v7.0 (chr-ID MtChr7; po s 13209641 to 13210631)
tcataccttcaattacctcgttgatagcggattcagtaacttgcttaactcttcttatattgatttgttttcgttttgtgattttgttgtttctatttttagatttgaatgtgtgttagttgttaatccttgatctgtgtacagtagaatggtagtgacattttgtattcggtgtgcattgcttgatttgatttgattaacatttttgaaatatgtgaatggttttgttgtttgaatataaataaggcgtaataggaagtaataaatttgtgtgactgataattgacttgattacattgtcgatatatatcactgagacactacattgacaccgatatgtagacactgataataatttaagaaaataaaagtgagtgagtgattgaacataattacattgctatgaagcacataagcagataccagacagacacaagtacattgaaactggtagtaatttaagaaaatgtcaaaattgaatgtaatcacatgtgttagtgtggagtcagacaccagacatgtcttcgattagaaaagtcggtgctatgaatactacatgtgtcgtgtcagttgaacatgaggcacgccttcaatctgaagcgtcggtggctaaataagttgtattcgatgtaggtgctctgatacttattaactttaagagcaacatttaaaattctggtagtaaaaattatttgttgataaaatagaaaattgaggggaagtttctttttatagctatatagaatgaaatccgaggaagaaagaaaacatttggttgtttcagaaaatttactatcccaaatgtaaattgtgaattaaatctggttttattgttaataacttgattgtttttagaatatttggttttctcttggtgaagtttggttttcctttttctgttgaggtttaaaatattatgagtttggaactgacttgaaatctgctgaatgtcgtagcttactgtgttgttgctgttgagtctgctggacgg

SEQ ID NO: 31822 - DNA, 1023 bp, Medicago truncatula
  Intron number 1 from transcript Medtr5g050090.1 (locus Med tr5g050090) derived from phytozome v7.0 (chr-ID MtChr5; po s 21532553 to 21533575)
aagcaggtaccggtacttatcttctacatctttaaccgagtttgttgtcgaattcacaacattgctatactagttatggtttactagggtgttttcaagattcacatagtttctataaccgatgtaacatagggtgtttcaagattcacatagtttctttaactgagtatgtttcaagaatcaagattgcaagattttaaagttgttccatgttagggtttaacatttagtgtttagaaaaaaatacctatttagaaaacatagatcaagatataatcctgtttagattgttatgtttgtgtgtttccatgttatttatttttgatgttatttacttggaaatgaaaatactattgtgcacgacatattttgtcgttatatttgcacgaatgggtagataagctcatttgatatggttcttttaatatttttttaacctaaatagcccttttaattaatgatgcacttctcctaaaagaaatcacaaattagtgatctttgtggcatctccatatcataaagtgagtgtcttttgtcttgtctaatactaatagtatttatcttcttttttgactaaagatagtatttatttatcttattttattactataatgctttagaatttgtatcatgatgaatacaagtgtgtgtagaccgttgttgtggagtctgtggcgttttacatgtatattttcacaatgcaaattgcatgattttcattgtcgtgctagtcatgtggtaaagggcgtcgtgctacatagcaccgctctatttatttttgaggaaaggtattaccatgttattgtttgaattgtattaatgattgtccatctttccatgttattttttttgggaaagggtattaccatgttatttgtttactagggtatttgttgttttcccatgatctgtcaacatcacataaattatgttaaatttagatgatttttctaggggttttagatgattttctaggtacttgttgatttttttttttgtcttcagttatccaaaagtcattca

SEQ ID NO: 31823 - DNA, 1053 bp, Medicago truncatula
  Intron number 4 from transcript Medtr5g044380.1 (locus Med tr5g044380) derived from phytozome v7.0 (chr-ID MtChr5; po s 18426844 to 18427896)
agtgccctagtctggtggacaactgtggtgccaaagtacaattccccaagttttaagcagaacatggtttactttgtattttgattttatagttactgttatatttctaagagtaaatactcaatttcgtctctcataattttatcccgactcaatttagtttctcttgataaataatactcaagttaatccttgacatgttctattgaatacaagtttgtatctctattataataaaagttagaaattgatttgttttcaatataaaaatgtcactgtctaatttttaagcattatcttttgtcttaaactaaattggaccgtaaaaatttatgaggatcaaactgatttttcgctcttgcatcaaaaatgcatcttcaatggctcgagtcgctgaaatccttccaaaatcacgttttcgcattcgtctgttcaacaaaatgtgtttttccacttacctaggggtccaatgtaatagacgtgtgttaacctaaattttagggaaagtttggtcagtgacgcgagcctgttgctcgtgatatgaggtcaacaaaactgaatcccttgtcctgacactcagtatagtcacaatgttgggctcatagcttgcgaaccaaggtagacaatggcgaacaccttgtatgattttcatatctcgcgatgcggggctcataaagttggtcgatacaacttaaaacaacggacttgttctttaattaataatggtaaagtaccgaattaattcctaattaaatagatacaacttaaaacaacggacttgttctttaattatacacctattagaatcgttaacttggcaagcaaagaatgaaacatgcaacaccaaaaaaaaaaaaaaaaagacacacgattacatagatctagaatacttttatcctccatcacatattataaaatccttgcgaaattgctcttttaagcttcaaaagtttttcactctcacctaaaaattacgttaagtgcagctaggatacaagcatatgatagttaactgcagctgtggagcgaacgacagttaactgccgtcataga

SEQ ID NO: 31824 - DNA, 1058 bp, Medicago truncatula
  Intron number 1 from transcript Medtr6g070270.1 (locus Med tr6g070270) derived from phytozome v7.0 (chr-ID MtChr6; po s 13204084 to 13205141 reverse strand)
ataaaaagggatatttacaacaacaaaagtttgcggttagtaagtgtaatgtggaggaaggcctgcccctccagaggaaggcttctagtaaccggctttaactctttcttttaatcaattaggttcagttgtagaatatagtagatggtgatattaactctttattttgattaattaggttcagttgtcgaataccattgatggatttctgaggaggcgttcgatgttcatgacgctgaactcatgactattaagagtgtaatcttggaatggcgttccactgtccttccgaaagaggaaggggcttctaaaaccattatcattgttctctgtgtaaaataagattatatggtagggaccaagtttttccaagtgaattgtgattattattgttggaaacttatatggctgagaccaaatttttttaagttgaattgggattattatcgttgtagcttgcacctaaggcgcttagacaaactactgaagacactccaaccgaaatataactgaagcaccaattaactgttctgattcaaagctcctgtgaaataataaagtgtctgtaaatgatatcaaaagctgaatcatcaagcttaatgttgggagaaagatagtagaacaatctcttatcactacaaaaaaacgcgttaattctggcggttttataccggcggtccatgttaaccgccactataacccgtgtattgcggcagttttattggctgccgctttttactgtacattgcggcggtttcgactgccggtattaacaaaatattaccgcacaattaaccttgtttattatggcattttagaccgccagtattaacgtttttaattttttcaactccacaacatttggcgcacttacttccctcttttttttttccctaaaattgtagaaaatccctttccttttcttttcctctttttttattttttttttatttttttttcccttaacacataaaataatattttataagaaaaaaatttattctttttctcacaaaccataagggcatcgcgactcatcttctccctctcatcctctc

SEQ ID NO: 31825 - DNA, 301 bp, Medicago truncatula
  Intron number 1 from transcript Medtr5g032280.1 (locus Med tr5g032280) derived from phytozome v7.0 (chr-ID MtChr5; po s 13023170 to 13023470 reverse strand)
cttaggtcaattgtccctaagatcagcaaggtgattcaatatatataatgtatgtatgtgtgtatgtttatgttgtccagctcctccgacacttcagattgaagatatgttcacttattcttttttgtcaaattattatcgatgtcgagtattagtgttaatgtaagtgctcatagtgtgtgttttaattttggtacaaatgtttgcgttttttattattatcattgactagcacttgtatttggtgtttgattttgatataaattgatttgaactaacaagaaaatgtaaattttgtaag

SEQ ID NO: 31826 - DNA, 648 bp, Medicago truncatula
  Intron number 2 from transcript Medtr4g158070.1 (locus Med tr4g158070) derived from phytozome v7.0 (chr-ID MtChr4; po s 39567288 to 39567935 reverse strand)
aaaaaaattgaacgtaaaccagctgttgtaagtatctacttgttttatgaagtttatatatggttgagaaagtagctatgttttattgagagcacttgttggaatagaaatcataaacagtttcctttcaaggggaagttttttaatgttcatataattagtatgcaatgtacgatcagattgttgttgtgtcacaccaagaggaactgttgagaagtcattatggtctttggcattgtgatgctagaacttaaatttctttttatatatctgaaccttgaaatttaggtttccaaatcaaatagaatatctattagttggagtgtagggctgtttggtaatggtgcagaaaaacatatcttatgaaccttggttcagtctattgaagtcaggcatgacgtcaagggatttttgaatctcagaaatatgagaacttcattttgtacataaagtcttcgaaattcattttgtgcaaaatgccatattagcattcaacatggtgaatttcaaagcctgaatcagctttctgtgttagagtaataacacatttgaaggataaaatgaaatatctaaaagtgttttatgatttctgttttcttatgaacattcaatttaatttgtggtattcatatgtacacctctagatac

SEQ ID NO: 31827 - DNA, 704 bp, Medicago truncatula
  Intron number 1 from transcript Medtr6g036130.1 (locus Med tr6g036130) derived from phytozome v7.0 (chr-ID MtChr6; po s 7891312 to 7892015 reverse strand)
acgtgtgaagctcgacggtgagattcagttcggtgagaagctcgacagaatgagaatgcgtgacggtggagggtgagaaggatgaatgacggtgtgaaattcgtcggtgaaacttgacggtggtcgatggtgtgagcatgatggtggtcaagggtgtgcgacagtggaaaagtggttatgctaaattgagatctcggtgagagagaaaagtgattttttaggtaagagagagaaaagtgtttctgaatggcttataacactttttttacttattttattttgactattgttgactaaaatttttaacacgtgaatgaataatgaatgggttctattgttacttgtattttttttttttttttgagggatggtacttgttgtattggatctaacacttttactcaattgttactatatatcattatatcagctaacaatttttcaagtgttgcaatcaccttgttactaaatgtcattattgtagtagtgtcaatgaatgtcgtttgaacattattgagctattcgatagttatcaaatacattgattgattataataatttatcctgttcttttcttaatgttatcttaatgagaaatttaactattattgtgcagtatctccaaagttcatgttgagggactaccgacttcaacggcgtttgattttataattaatcaatagtcctttaaatactcaatccgt

SEQ ID NO: 31828 - DNA, 445 bp, Medicago truncatula
  Intron number 1 from transcript Medtr6g012770.1 (locus Med tr6g012770) derived from phytozome v7.0 (chr-ID MtChr6; po s 2406786 to 2407230 reverse strand)
ttggtcatttcaaggacattgactctcctttgccggtaaggtttctattgccatctatgacttaaatttcaatagcatctttgctagtgtaccgtagaagtttccatttatatttttagtcctgtaaagtttttttcctttgtttatagtcgttgcaaatatataatgtttttgcttttgattctatttgttgtcttaattcatatgcaccgtcaatgtaattaaataatttttacactggcaatctaatgcgatcaggaagatcattaaaaacgtctacttaaatcataattatttttaaaatcacatgtatgattggtcgtagtttcttgacggtgtaaaacaccaacaatgtatcaaaatgaaactcacaaaaataatgctaaataacattttttttttcttcttcttttgtgtggtggtggtgtgaagactgtaccaggat

SEQ ID NO: 31829 - DNA, 868 bp, Medicago truncatula
  Intron number 2 from transcript Medtr4g137440.1 (locus Med tr4g137440) derived from phytozome v7.0 (chr-ID MtChr4; po s 33850184 to 33851051)
agaagactgcccttgttgaagttatttccaaggtatgttgtcataggacggtattccctccatacaatactatggtgtttttagaatctttattttgtatcaaaaccatgggtgttttaaatatccacaagctatgatttgtctgtataccatgttgaattttccctggtaaagagcattgaagaataagctgcaacataatagggctagtgggatcacttaatctgctttttagaattttccttacagatgttgtcgttcagtttcaacattattcatatttctttttggcaacaacattattcatattggttaaacaaatctatgcactaaccttgtagccatttactcattctagaaaggaaacttaggctttgtttgggagtttggaggggaggggagggttttggaaaaaaggaaggagcaagtggaagaaatagaagacattgggaggagagggctttggaggttaattttttactcgtaataaaaaatccccctcatttgggggaactcaaaaattgtattgggggagggttttggggggttatggagggtttatatgaatttttcaaatccaatctatgttgtcataatattcttaaaattaaaagtatattaatcataagtattagtttatcattctctgaaaaaccgttctttcaaaaaatgtgatttttttttgtccatttttctatatatttccaacctcccaaagccctcccctcccttcccctccaaactcccaaacaaagccttaaaaaaagtaaactgcatctcatgggtttatgacttctattcacaatgtaatgttttgtcctagataatacagatcactttatccattacttgtcaggtacacaaaaaa

SEQ ID NO: 31830 - DNA, 1055 bp, Medicago truncatula
  Intron number 1 from transcript Medtr5g044890.1 (locus Med tr5g044890) derived from phytozome v7.0 (chr-ID MtChr5; po s 18676160 to 18677214)
ctttgtgtttttttcttttcttttttgaggtaaaaatttattagtgcaccattttatttttttattgagaaatttttatttgttttttggtatgctgaggagtttgtattggcctttccatatatgataactttgtttagtttgagtaatgatatatgaacaacattttagataatatacggtgacatctctactgtttacagtataaatacgatgaataatatttataatacaaaaaattgagtggtatcgttgactaattttacaactgaattaaccataaaaatatacattgttaatcacttttgaaaacataaattttatttcattaagctcatttactacttggttaatcaaaaaagtataaggtgatgaccaattattttatgtagtttgaaaaaatgaccaaagtgtttatttatgtaaaataagtcgttaatgtttttcatttttttattaataaagttgttagtggttaataaaattcatgttaaaaaatggatataaacatatatttttgtggttaacgaagttgtaaaattggttaatacacaattcatattttgtgttacaaaaatcatcatctatattttaaaaaaaataaataaatagtgacaaaaaattattgttcatggtataaaaatacggtgaacaatgtaggcgacacacattgtagtataaaatgtatattcatatagcattactttttttttttttttttgtcaggtagtctagtggctagaaattcacttttaaagtgaataagtggggtgttcggggttcgaaccccaacccctaaactgagctatgctcacggggacattcatatagcattacttgtttcgcttctttagcatgttgagactgtccaaccaccgcgaatatttcgatgcttcaaagattcactatgttcaataagccaactcttttgctcatagaggaagagactcgttatttttttacttgttgccaaagaataaattagaatgagagatggtaccccaatttaagataggaaagaccttcgggtttaaagagcacttacaaaagtattt

SEQ ID NO: 31831 - DNA, 687 bp, Medicago truncatula
  Intron number 2 from transcript Medtr6g077280.1 (locus Med tr6g077280) derived from phytozome v7.0 (chr-ID MtChr6; po s 15267861 to 15268547)
ttcaactgcacagttcaaattgtctctgcctcgcagtattttcaatcacaattttacctatgtttttcttgcataaaacctttcgaaatgtctttacttgtctcgtaagtcattcaaaagtgtctctgaatcattacattgctttttctacagtttatttcaaaatttgcaaaaaaagtcatacagaagggtattttggtcattttctgcagtgggacccattttcatccttgtgactgtctctgagtcttttcagattgttttttttacatttcatcagtaaaccttgttaggttcatttcaaacttgcatctgagtcagtgtcgagttaatttgattctgtttaggtcatttttaaccctaggggcattttggtcatttcacataaaattttggcatggggaggttactttgaagtaccttcatttaggccattggttcgttttagtccgtcttgtcaattttatttgtgtttcgctttacgtttggtcaaattaccaattttatttttatttttattgtttttattatttttgcatttttggtcctcaaagagttccaaaattgcagttcagtccagtttcttttccaattttcatttcagtcctttttgtcaaattgcagtttagtcctcaagttcttatttttgcagaaaagtccaaagttcatttttcaggtccaagccgt

SEQ ID NO: 31832 - DNA, 433 bp, Medicago truncatula
  Intron number 1 from transcript Medtr5g049910.1 (locus Med tr5g049910) derived from phytozome v7.0 (chr-ID MtChr5; po s 21439816 to 21440248)
atttttcaggtttcaactttgatcttgaggtaattgtgcctatcttttcacacttccatgaaaggaaacccttcatttccttgttgtcactgccgttttttgatgtattagttaccagctagaggtctttgtatacttattacattactccttcaccagtatataataatgttatatcttgatcagctttcactgtaaatttgttgttctgcgtttgtaccatcaacatatatatacaaaagggcaagcttttttttttttacctctagttttgtgatcaaattcaacacatatttagagagtcaaaagttcatggcaaacgagtcttcccttgatcaccttgatttggttaaccactagagtgatggtaatttattggacgctaaaagctaaaacaacaaatgtgagggtactgtccaaaattttaacggtg

SEQ ID NO: 31833 - DNA, 813 bp, Medicago truncatula
  Intron number 2 from transcript Medtr5g049910.1 (locus Med tr5g049910) derived from phytozome v7.0 (chr-ID MtChr5; po s 21440495 to 21441307)
cagaaccagacagtgggtcatcatcgaaggtataatttcaatgcacatacatgattttacacattggattttttgtgcgtttcatatcctgaaccagaatgttttcgcatgcatgaatgattaacattacaatgtacttaattctgcgtatttaataaagatatattcgcaatctatcagtttctttcctaaaataatacacataaattccaaaatctcagcttgctaactgctatagatcaacaagagttaatacaataataataatatacgggaagttggatagctttggcccagtctacaaaatgactgcattgttaattggtggtcatgggttctagtcatggaaatagcctttacaaactcataaggcaaggttgcatgctctaatcccatcttaatcctgcgatgttgtgtgtgcaataagaactgaacttagagccaagagaatttattaggtctgtattacaaggtttgggttttcaatttacaagttcaagtgtaaaggagggatgatttggaaaataaaaattacaaatgagatgtgtccaggttatacctaacctttgtagccctaattaacactgcagtcgacctggttatccgttagcatgttcaactcttacgattcacattaaaaacattttcttaatgaagaaagaagtcaaataaatttttttacgttcgatacacactttccttttgaacttgtcttaaatttagtttgcttttgcttctctgaccatgatattttcttcaaaaaaatatctactgaatattctgaaagtgtatcctttacagaaggtgaagaag

SEQ ID NO: 31834 - DNA, 829 bp, Medicago truncatula
  Intron number 2 from transcript Medtr4g098490.1 (locus Med tr4g098490) derived from phytozome v7.0 (chr-ID MtChr4; po s 21190127 to 21190955 reverse strand)
tcaattcacaagcttccagtaaaagaaaaggtgatgactgattatgcacatactctactagaaagggttaaatatttgttttttaaaaattagttcatatttatatttgatttcttttaattgctgctgcatgttgtgttttgatcatcctagcatttttttgtcatggtttgggatcaaatgatgattgtttaaaaagcattgagtgaaacttttagtagaaagaaagagcttcagtaatgaagcatcgctttcaataacccttatttgtttttgcattatgtttagttgctaaaattgccttatgtggaaaggcttttgttgttgttgtttgtttaattgctaaaaatacatatatgttcttatctctagtaatgaaatctgattgctatgttttatagataatgaatgttacccttgttaattccggactttacaatttatagagttcttgttagtttgtatggaccagatgctttatatatgtatgggttaacaagtggttccaaattatgacaagatcttccagtagattggagaaattgaaatttaaaggtttgaagtcttgaatgattatagtgaacatttttccccactgtatgcaaaagttgagactagattttcttaatgaaaatttgataatatgattttttattgctatttccaaagcaattgtgatcgactcccaaataaattgtgattgactctggtgttataactttagggcattgaagttgcttattcattcttgcttctcatcctttaaattggtctaacatatctttatttaacaggggggtctcgtgcagccaaagccgggtgaagaata

SEQ ID NO: 31835 - DNA, 818 bp, Medicago truncatula
  Intron number 3 from transcript Medtr6g035700.1 (locus Med tr6g035700) derived from phytozome v7.0 (chr-ID MtChr6; po s 7679335 to 7680152 reverse strand)
aaaagcagtggtcaaaattgcttgaaaaagatcaggtaccaacgaaactattgaatgtactgttttcgacctgattgagttcaagctatcataggctttaattttttatctcttgttctcgaggagcaactagtaaaagcttcttcaaacatgcgctttcattcaaatgctcttaatttaacaagctattagtacttttaattatgtggattacttgaactatagtttgagatatgtagttattgcttatcgagcagatttggtttgaccatatcattttggaatgcattctttacactcattggattgaagaattgttgagttgttccagattgaaataacaatctgagacaggtcaacatgaataaatgagtcatttaaaacgacgataagttatgtggtatgtatggagtggaaaatgtaaatcgagtcggtggtttctgttttgaaaatagttgagtaaaggaactttgtttcaattaaaataatagcattttatactgtcataaatatgaaccagcatattttacacaagcattttcttcttaaagcggaacattttcatgttatatttaacaatatatccttgctgcacacacatttaatgtagtttagaaaaccggtggtatctctatccatgtcattgttagacttgtttatggtatggttcctaactggaccgagttggataactatgcttacaagtaattattcaatttagtttgatgagttgtgaaatgtgaaaagcaacaacttcaaaatatgaactcaaatattaaggtcatctagctgattagtaaactaatattttacagctg

SEQ ID NO: 31836 - DNA, 904 bp, Medicago truncatula
  Intron number 2 from transcript Medtr4g076340.1 (locus Med tr4g076340) derived from phytozome v7.0 (chr-ID MtChr4; po s 15146509 to 15147412)
ggaaggttttcaaaacatttcatcttattgcaaaggtactttactgtcaattttggagcttaagtgggtttgttgtttgagatattggtgtttagttttgtgtacagaagagtaacttatcaatgaaagttggtttttcaatgcataggataaacctttaagttattagattatactgtcaatgtagccgaatatcggctatggaggattgcagtggcggattttttgacaaacgtcacagtcaatttctgaaggatggcggtgctatgctatggcgttttatgctgaattttaggctttctgtcatggtcttccatcctccattgataacactggctgcacttttggaattggttgaacttgaacaaacaaattgaagcacatgccatttttttggtaattagtcgtaatgtggccactggtaaaaatatcaaattcgcaaatatcagtttgagataatctgattttgaagacttggaccgtttatctcttcgtcttttgatattacaataaaacaaaacaaccatattcagttcgctatattgatactcaatcacgtttaggagtttatttaaattttataatgcacacaccaatgtgacatgtacgagagcttcatttgttgtagttttataatcttgcaggcatatgtcttttgctaaaagctaaggcttaatgattttttgctgaatgttggtttttgttgtttaaaccagttgttctgtgtttgtgtttatgttgcaagttaatatgcatgttctgattcctattagataagaaaagatgaatttgttggaatttggaacaatttttagttgagggttattagagtttgctactgatttgccctgaattataaatgttcacaggaatctggaaaagacagtcaagagaagaaaaagaa

SEQ ID NO: 31837 - DNA, 188 bp, Medicago truncatula
  Intron number 2 from transcript Medtr5g022410.1 (locus Med tr5g022410) derived from phytozome v7.0 (chr-ID MtChr5; po s 8739121 to 8739308)
tcaaagttctgtggaaagaaattcaggtattaattttgattttagtttttttgctcttcatgagttgttttcacttttcaaattcatagatgaaatttaaattaaccccctcaaattgaattactatttcattatttggtacttttctcccctaagttttctctatcaaatttatgttcttgcagagg

SEQ ID NO: 31838 - DNA, 595 bp, Medicago truncatula
  Intron number 1 from transcript Medtr7g089800.1 (locus Med tr7g089800) derived from phytozome v7.0 (chr-ID MtChr7; po s 19844514 to 19845108)
tggaggcttgtctggtttacaaccttgaggacaaggttgatttcgaagagctgaggtaatgatacgatcataagaaggccctacaaacttacaagtccaaatagagactcattagtgatttagggatcttttaagcatattctattagtttgttattgagcagtgctattgtgtagttgttgtagttatcttattatgagtatgcaaagtctatataagcattatatgccttatgattagaacgaatgaaaaatataatgaattttctttctcttttctctagtttctccctctaaattctggagtgtgatccctactcgaattgggtcgtatcagaaagtttatgcataaaatttattttcataagctctccaagatagtttatgaaaaccacttataacttatatgaaaacaatttgactttattttatcttttgttttagaaatagctacataaacacttaaatgataaatgcttggttaaattatttagccaaacagagccttaataagttagattggttcttttccctttgctgagtgttttgatgattgaaacttattggttctgcagataaggcctgattgggacaac

SEQ ID NO: 31839 - DNA, 526 bp, Medicago truncatula
  Intron number 1 from transcript Medtr6g092510.1 (locus Med tr6g092510) derived from phytozome v7.0 (chr-ID MtChr6; po s 19454439 to 19454964)
gcaagcgacgttgaatgacatgattaagaaaagaaggtagaattgcaaacctcactaatacaatttgcctccttgatttgataaaaataagattaagtaaactactctatattttaggttgtgagcaagtatatgtgaaaacattgtcacaactgtagtgacatttcttgtccttgccaattgccgcaaaaggatacacatagttgactaacaatgatgtttttgttattgtttgagttcttagactataggcggcatttggattgatgaaaatgagattaaaagataaacgcatagcgaatttaaagtaatgtggtgtgaaataaaaagagggaagaataagcctaaagactcagattagaagaattggaagcgaggcaagttttttctggcaatgttgacatagttttttttattcaagtttcacaattttagtttctttgttctttgttcttatttgagttctacaatattaatctctaagatagcagaagaagctggtggagcttattcatattgtcatcgt

SEQ ID NO: 31840 - DNA, 965 bp, Medicago truncatula
  Intron number 1 from transcript Medtr5g066970.1 (locus Med tr5g066970) derived from phytozome v7.0 (chr-ID MtChr5; po s 23735914 to 23736878)
gtggtgtgcaggcttatcagcgcaacattacccttaaacacctctcgaggtcattcaccaaggagttccaatagacttctcactactatttcatccaaggggtactgatcggagtgtttttgtccttgttgtggtcctctagtaaactttatttgtgatttagagccttcgcggtcctcgttcacttgagcttgttttcctcaattatttggcaccgccattggctcttcgcagtttttggtttaaaaatattggatttggttgtttctagattcaagatctggggttttttcattatgccccgctggttccatggtcgacgttttgtttggttggatgactcccaccatctgcgttaaacacgactgctatcttggaccatcaaggagagaatagtaccataccccctgcctaaaacataagattctctatttctactctaccaaatagagtgtaattgacagttgggaagtacaataaggagtcgtggcccacaaaccttatgagaaagtggcatgataaggagtctcttttgcaaaatgtgagttgaaaagacaagtttaaaaatagccattatgatgatgacatcaggataatatcttggaatatggaaaagttttcaaaaatgtcacttttttctgtcatttaaaattcagtcgaaaatgacatttttctggggcaatttgttcgcctgtattttaattgtttgttttcaatagaaaaaatttcatgtggaagctaatttttcttcttggtgtcaatccagaagttcatttcgacagaattcgatagtcttggcaaaacggaaatttcaaaactattcagttttgacaaaagaaatttaaattgtctttgaagaggttgttaagcctgtaatttcaaaagactcatttaatgcagtcaacattaattgactttttaactttgcagaaatcgaagtttgttccttctacctaaggagttcg

SEQ ID NO: 31841 - DNA, 449 bp, Medicago truncatula
  Intron number 2 from transcript Medtr4g041850.1 (locus Med tr4g041850) derived from phytozome v7.0 (chr-ID MtChr4; po s 9990571 to 9991019 reverse strand)
tagagagactggtgggcgattccagttgccttcaaatacgtagatactagtgggctattttatgagggcttattcttctatgtcattgtacttggttttctcttaacttgaaaaaatcatcaattcatatgtacttaccattaacacacacacaatgtacacgcaacaatttgtgtttgtcattcaattttaggcttttaatagttcaacaactcaccagctgcctggtgacatctatataacagtgatgtaatatttgccttgctttattacttctctgtgctgagcttgaaagcgtcaaaattatttgctaagataatatttcattgatccattcctcataatgtctttaacattagccgtttgtttttatatctatttaaagcacaatttcagggtatcatggcgcttttttaaagttcattttttcttttgaatttcagggagtc

SEQ ID NO: 31842 - DNA, 942 bp, Medicago truncatula
  Intron number 1 from transcript Medtr4g025360.1 (locus Med tr4g025360) derived from phytozome v7.0 (chr-ID MtChr4; po s 6006242 to 6007183 reverse strand)
gtggaaaagaaagaaaaaacaaaaattaaagtaaattaaaagagaaattaaatttatatacaatgaaccaagttcacaatattttcaagtaacagacgttaggggtttgtctttactcaggctccaaactaaagttgacagtattttcaagtaacggacgtcagtggtttgcattatgtggttttcgttcaccataggtgcacacatttctttgaaatataacttaatattattttcactataaataaagaataatatagacacacaaacaatatgatctctgaaatataaaattttaaagagagtatatacactctcaagaatagagaagtggtagatagagaactaacttttcaattctttcaaattcgtaagtttttcttcttgtgctctcattttattttgatctgatttttttcatgtgtgttttttttttcctacttggtaatccttttgtttcatttttttagtacaaataatcgtgtagcaataggagagtgagagtcatgcaaattctacttataagggaacctttctcaaaagttattttgttgctgatggattttttttttaaagattgttgatggaatggtgtagaccttaaatttggatatgctacattttgatttattttaatttataataaaagtaacctatgtgtatttgactttcaaaataataagtttttaggacattaaatttttattttttattatcattttttataagatagtatcgtaaactggatactcacttccatgtttgtgatccttgtgtgaaatttgtgtatccataaagcattaatttatgattcaacatgaaatttcttcttcatttgaattaaaatttgtttattgattgaaattgtttattattttttgttgattgtactttacaatttgacatttgtatgcatgtttactcaggtttctgtgtgggctt

SEQ ID NO: 31843 - DNA, 510 bp, Medicago truncatula
  Intron number 2 from transcript Medtr5g038050.1 (locus Med tr5g038050) derived from phytozome v7.0 (chr-ID MtChr5; po s 16050218 to 16050727 reverse strand)
aggttacaaaagggattagagagggggcttgtggtgtaattgagaaaacccaattagaggagagtttaggtccctcgtacacctggatatggtttctctctctcttttttgtcgtcttctatatgttggctctaattggcacgagaattgggattagagtcagcatcattaaaattcaaattctttgctttctttttctaggaaacatagcatttggattattagctcaatcttttttatttgtttttgaaacaagctcaacctttttttaaccatttagtaaataactataaattggtgcgtttatccgtgccacaccagttgtatgctgtagtatatacttatgtggcgaccttatgtggtcatctatacatgttttgttaagtgatgcgaattttgtttatggcagaaagttactttgtatgatttgggaaacttattctgagttctgaccgaatcatgtgcatttgttaagaaaaaaagaaaagcagaaacaagcaggattggggg

SEQ ID NO: 31844 - DNA, 495 bp, Medicago truncatula
  Intron number 2 from transcript Medtr5g067890.1 (locus Med tr5g067890) derived from phytozome v7.0 (chr-ID MtChr5; po s 24205832 to 24206326)
gtaactcagcatacaacattggtatcggagggaaggtaggtctagcttgttgatgctgttgttgttgaactggtggctgttgttgcatttgctgaacgacggcattaacggttacctgaggttgacccgatggcaaaggatactgatgatagaatggtggaaagaagggatgctgagagtatggcgcatatgggtacgacggaggtaactgggcagcattaataggggcaacagtagccatggtgaattcacccttgaaatttatttttgattcctcacatggtgaacttttgattattacgcgttgaggactttgattgaatgtttgtttgttgacgtcaagcatatgaaaacttgaaagttagaagtatcgttattcttcatcagatgtttcttaacgttatttaattagatgttaacttgcttaccaaaatataactttgagtactacttgtagaaggaacttccttacaagaaggaacttgatcttgtaag

SEQ ID NO: 31845 - DNA, 579 bp, Medicago truncatula
  Intron number 1 from transcript Medtr5g090980.1 (locus Med tr5g090980) derived from phytozome v7.0 (chr-ID MtChr5; po s 35564949 to 35565527)
gtgaacattgacaacataaggtaatattaaatctgtttagaatttgtattattttacaaattgacctaaaagttttcaagatagaataaaattattttgccatcaaacctaaaagtttttatttttttattttttacaaaacatcatatctaaaagttgcatattgtaattaaaccatttgccataaaaagaatccaaacaaaggaaaaaaactaatactatcaattaattactaacatttttccgttaatatgttttttaacagatactagaaccaatcgaatctctactttttcttcgtatgttcgtgtatgtattaggagtggttttcaagccctatcttttgttttgattcttaatgtttgtttagttttagagtaggtcaaatactcgttgtacttaaatttggattgtaggttgaatactctttgtacttttctccctttcatcaaacaaaaattctttgcagtagaaaaaaacttatcttaatataagtaactttttattttatttttcgttttaacttgattttttttatgatatataatcaattaattgaatatttaaatttctgtttag

SEQ ID NO: 31846 - DNA, 439 bp, Medicago truncatula
  Intron number 2 from transcript Medtr6g028080.1 (locus Med tr6g028080) derived from phytozome v7.0 (chr-ID MtChr6; po s 6277796 to 6278234)
gtcaagctactgatagtcacagtctagcagaaagggtataatttcctaaatacagcttaattaagtgtttatagcataatcatttattatataagtgtttatttataagctatttctataataaatggtaaaataaaatcaaactatttttatataagatataagttgttttcgtaagcttatgaaaataagctgaaaacaacttatgaatatgcgataagttgttttcataagctcttcaaaatagacttgcacatatttatatggaagtatataagttcaaataagttaatacgaaaaaataataatcattatgaatagatttaatttcttcatcaaattttcttctatctttgttcatgattgatgtatatggatggactaataaatatctatgatttttttttttttgttatccaggttagaagagggaaaatca

SEQ ID NO: 31847 - DNA, 801 bp, Medicago truncatula
  Intron number 1 from transcript Medtr5g014200.1 (locus Med tr5g014200) derived from phytozome v7.0 (chr-ID MtChr5; po s 4494187 to 4494987)
tgaacaacgcaaataggacacaaaagataactgtatgatattttgtacgtggggtttccactatctcaaagataaaaacaaaaccaatcttatatagtagacgaaattgactcaattgataaaaagttcttatatatttgcatgcagaagcgtgaattcatttttcatttttgctataatatatccaagtaataaaaaaaatatctctgtcaatgttctttgagttttaagctgtcttgatcttgatgagccccgtctaatatttttttagagacaagataactaaatgtcctttgttttatctaccggttggtattgttagaagaaactatgggcgattgatggtttggtaagttgtagcgagtactgttccatgtacgattcaacatttattttttcttgatcttaattcctctacgtcatgcaatttgatctaccatctatattcgtaaattgggataagttgttttgacttggatgatgatgacgtaacgtaatattggtaaattggcatcatggtgtctaataatatagtctttatgtgggtggggtatccttatcgcaaacaaaacttgtctcagctctcactaaacctgtgctccaacatgaagattcaattgtttgtatggatggatattggaaactcacatatgcaaatgtaggaataaggtttttgaatccaaatcaaaatgtccaacataagaattttaatattttttctttctagagttgagttagaatttatggacaataataacaatatcagcttttggaaaaaatcaaactcatttccttttggtg

SEQ ID NO: 31848 - DNA, 749 bp, Medicago truncatula
  Intron number 1 from transcript Medtr6g036170.1 (locus Med tr6g036170) derived from phytozome v7.0 (chr-ID MtChr6; po s 7905269 to 7906017)
tactctattgcaagctctatcatctccgggcagtggtgattcaaaattctctgctattgtttctagtattatttatcagttatctttacattccaacttcgaggtgaagtttgttaggagacatgcgaacatggttgctcatactttaactagggcggcctgttctcaggctagtcaccgtattttttattttcatccttcttgtattgaacattggttgattaataatagggtggtcaatatgtccacatgagatctgtcatgttataagtgacatggccacattatcaaaattaaccttaaaatagggtgggatcaaaacacataaaaatttgaaatagaggggtcaaaatgctagattttaaaataatacgtcaaaatttcaaaaaaatgaaattaagggaactaaaagtgcattcaagccaaaatattattatatttttgtctgaattgacaatatcttttactttataaaaatatcttctgttttttttagaaaagtataaaaatatcaatttaaatatgcacattcggatggttccatttaagttacactcttcttcctcttaatatttccatcatttaatattgttttcttttattagaagggttaataccacttttgattcttgtaatattaacgaatcaattttagtccctgtaaaaaaataatttagattttgtctttgtaatttcatattcttccacttttggtccttcatttcaccacgtcagcagaatctgcatac

SEQ ID NO: 31849 - DNA, 725 bp, Medicago truncatula
  Intron number 1 from transcript Medtr5g007150.1 (locus Med tr5g007150) derived from phytozome v7.0 (chr-ID MtChr5; po s 992521 to 993245)
tgaagaacccaaataaagagcaggtcaacaataacaaaatgcttaatggatcgaagaacaagttatttgattcttagaaaatttagcaagagttttctgatgctcatcattatcaactgggcaaaggttaatttcatgatcattggagttctcacgattcaatttctaaaattcttagttttatctttttttgttattttccattagatttttttttttggttacatatttttccatagacaaacttgaagggtatttcgtatgttgaggcttagttagtgtgttctatgatattcccatagaaacgctgtttagttcgtcaactcattctccttttgcttgatccactattttttggaaatttattaagaattatgttttctgctgattcgacctgcacgttcgtctattagattgcaaattgagctgatctatttttattttattttatgatgattgtgtggggaagtccatgtcgcaaatgacatatttctgcacaaacttatgcatccttttagtagtaatagtggataaagcctcaacttatatctattaagaaaaatagtctataacaactacaataaatttaatttgacttggtcttggaggaattggtccaacgatatcactcccccaagttttgaaggtccatgtaatcactatgtgatatgaatgattggtaaacctctgatactctttgattctttgcacaatttctttgcagt

SEQ ID NO: 31850 - DNA, 457 bp, Medicago truncatula
  Intron number 2 from transcript Medtr6g093040.1 (locus Med tr6g093040) derived from phytozome v7.0 (chr-ID MtChr6; po s 19775859 to 19776315)
gggctttgtaagtatatatattcattttcttttctgtgaaatctcagtttcatatataccaataattcatttttcaaagaactaaaatttacgaagcactgacgaaaactggaaaaatgaaagtgattaagtataactacatgtgtaagtgttatgccagacacaacttcaatctgaagtgtcggtgctacatacttgaagataggtgtttgattcacaaatcataattaagtaattcatattcctttttgttgtatttgtatatatacttctattatcatgtttcattcattctcttgttgatcacaaaacttaattatcaagtaaatataattgattgaccacgtaaaaaaatgtttgcacgacgatgcataacaattaaattcttagctcatataaacatgtttaaaatcctattacaggcctttccacgggattctcccctagcaattgacat

SEQ ID NO: 31851 - DNA, 197 bp, Medicago truncatula
  Intron number 1 from transcript Medtr5g095850.1 (locus Med tr5g095850) derived from phytozome v7.0 (chr-ID MtChr5; po s 38037565 to 38037761)
agggaagattgcattggctgtgcctcttctagtttgtaagtagtctttcctacataccctattttttgttttttgaaatatgattttttttgtactgtgcttttggaagattgtgttgagttatctcttattaatcataatgtgttttctatgtattcacagcaaaagcactagagctatttctgcaagatttgtgt

SEQ ID NO: 31852 - DNA, 567 bp, Medicago truncatula
  Intron number 4 from transcript Medtr5g095850.1 (locus Med tr5g095850) derived from phytozome v7.0 (chr-ID MtChr5; po s 38038173 to 38038739)
acagcgacgaggagatcaagagaagtaaagtaatttgagtttttcttgtatgattaaaccttttgctgagtaatattcctgccaccgcacaccactttgcatatttgttttttatgcagtgttgtctatcacagattgaagaagaagaaaataacggcttgttgaaattccgttacactatagggcaatgtcgctgttatagctgttatttaacaacattttgtactaaatccgatattgcagaacaatcacagttcgtgcatattccactatattatagctctatagccatattccactatgttatagctctatagccactatttgacagcattttttacgacgtcaataaccaaaaaattcatttaagagattatggaagttcgctaatggcttgtgaatgcaaatgcattttctgcaatttatggcatttaatagctaccaactgattgttttttttttttttggagtaaaatagctatcaacggatgttaaatgctagtctaatgagtttttttttccctttgaacagcgagaacctgcgcataccagtggaaggggtagggg

SEQ ID NO: 31853 - DNA, 673 bp, Medicago truncatula
  Intron number 1 from transcript Medtr5g087960.1 (locus Med tr5g087960) derived from phytozome v7.0 (chr-ID MtChr5; po s 34056181 to 34056853 reverse strand)
tcatcataggtggttttcgaaaagaccgaagcaaggttttatggtgactcttgtgaatgtttcgttcttgaatatgttttcttcccggtcataaaattatagggcttgccaacatttcttccttgggcagttgatccctcctcccatgtcgccccttcgtaatgagggggtcgattgatggtcggacgagagtctgcgtctttgtggagccacaaatctccttacttctggagttctttctttctctttatttaattttgtttttttttaacaagaaaatttattaaaagataaagtcactattcaaggtgaatagagacaagcaagacacaaacaataaaacatccgacaaaccaaccaaaaacaccctctacatagggctaccaccaaaaccataaaatctattacacaaaaatcaatttcaactccaaaagcaaaagtcaaactctctaatctccaacgtaaagtgccaacattaaaaacaacaacttgttgctcgtaccaaaactcctctaacataaccaccaaaccgaccaataactccaatttcaacacatttgtatctttatttttgtgtttataaaggcaattctcctgctgataaagactaagatgtttctgatgtttagaagtgtcattgtaatggacagattcctccgttggttcgggtgaa

SEQ ID NO: 31854 - DNA, 408 bp, Medicago truncatula
  Intron number 1 from transcript Medtr6g067330.1 (locus Med tr6g067330) derived from phytozome v7.0 (chr-ID MtChr6; po s 12472707 to 12473114 reverse strand)
caattgcatcgaattccgcacacaaacatctttaggttagtttctcatacttctatttattaccaacatttttttcttttttttctttctttcagtttcttgtttcttatttagggtttgtattttcggatcatatggttcaattagattatatatttgttcgattagattggggatttgattaagtgttcgattagacttccgaaaagtaattattttcttctaaaaagtttgtttttatttttacaaaataagctgttcgaaacaggctttataatatctgggatattttagcattgattggcataatgtagaagaattaaagaaaaaaaaaataatgttaaaagtctagtgatatatctgttgtcaatagcggccgctacagccgatatagtggtgctgagcaga

SEQ ID NO: 31855 - DNA, 475 bp, Medicago truncatula
  Intron number 1 from transcript Medtr4g128090.1 (locus Med tr4g128090) derived from phytozome v7.0 (chr-ID MtChr4; po s 30010901 to 30011375)
tactcttggaagcctgattcttgtgctttaccaaggtatttttagttagtgttcatgttttttaaacccttttatgatatgttacataaaaatttctttgtttcttactatatatagtgtttgatctttgctgctaacaatttcatgtttccctagaaacaaaaatatgtttatttaagtctatatatctaacgatctatgaatcacagacactccttggattagacgtgtcccgtgtcggacattcgatgtatctgacacaacatgacacctatgtttacactgaattatgtcattttcttgaattattatccgtgtcgacgtgtcagtgttcgtgttgtgtctgatgtttgtgtctgtgtccgtactgcataggtgacgattaatattttgtaatgtaattagtgtactaaatttcttctcctaatgtatagtgcaaatgtaatgagtaaattatttttgtggtgtaggttca

SEQ ID NO: 31856 - DNA, 386 bp, Medicago truncatula
  Intron number 1 from transcript Medtr5g065520.1 (locus Med tr5g065520) derived from phytozome v7.0 (chr-ID MtChr5; po s 22927329 to 22927714 reverse strand)
gaagaaaagcatctcgaagactgttctgtttccaagttagtttcatttcatttcttctctctttaatatatatttctcatcattcataaaacaaaccaatcttactttattcaccgattcacataaataatactcttaatattcctttattcagtaacgattatgaaattgaatatttggttataaatccttgccttgtgattttcataaacaattgtgttatatacccagtttgctgggtaggtgttatgatttgattttctgatctggcgagtttcttagaggagaaacgtagatataggcagtagtaaatatcttctgtttcaatcaataatacaatatttctatttcatctggatttgggttagtgtggttgaatattagtc

SEQ ID NO: 31857 - DNA, 714 bp, Medicago truncatula
  Intron number 1 from transcript Medtr6g038990.1 (locus Med tr6g038990) derived from phytozome v7.0 (chr-ID MtChr6; po s 8547782 to 8548495 reverse strand)
tcacaaggactgcgtgggcgcgtgagtgaacgtgctcgctatcctttgatattcttttgttctttaaccaaatcagttcgccagtagaaaaggtcatgtccggtatgtgagtgttcagttgacttaagctggaggaaaatattccctcgtctggaagtttggtcaattgtcattccacaattaatacccacgcctttgagggaaaggttgaggagacatgacctttggtttctgagtgacacgtgtaaaggctattgcgatacttgagtacctatagctttcaaagtgctcttgatttgtgtttccaaggtatcatcatcaccgtttatttaatcctgatgtttaaagaaccgctccgacctttgttgaagggagagttgtatgtgaagggctgtaccagatagcgcctcgcgacctttaagaggttttatgaaacgagtataaatagttcaaacgttgtttggaacattactccatttcattttccaagaaacttagagatttttcccaaagttctttcaaaggcgtttccgaaccctcaactttctcacttcaagtcaagatcatccattgtaacaggtaagattccgatgatcactatttcccttttcttcatgcttgaatcatgttagtttcctgtttaagaaactatataaatgcatgctttttagggtaacagttactccgacttggtggtttctgccgtttattacg

SEQ ID NO: 31858 - DNA, 434 bp, Medicago truncatula
  Intron number 1 from transcript Medtr7g047280.1 (locus Med tr7g047280) derived from phytozome v7.0 (chr-ID MtChr7; po s 11844355 to 11844788)
caggtatatgtatatctacatttatcgcatttgtttatagttattccggaaaagtgtgtacatgtaatcaattttgatagttcttaaatctgcctgtatgcgaatacttgtacttgttttctttgtgttggtggtggtttaaagaatatgttatatgactgctaggatcttttctgtttcctatgccactgctgcgacctgctgttatattgcaatatcagttcaaaatgtcttgataccatttttattctctgaggaatgaagaatggattaatcaatttccatgttaaatttttattgtgattgtactacacttatattacaatgaaaatagagttccttatgattgcaatatcttggttacatgcaggacatattctctcttttgattttattttgtaattaccaattttatagagacttgcaagcctcgc

SEQ ID NO: 31859 - DNA, 514 bp, Medicago truncatula
  Intron number 1 from transcript Medtr7g088460.1 (locus Med tr7g088460) derived from phytozome v7.0 (chr-ID MtChr7; po s 19208843 to 19209356 reverse strand)
ggattccaagggccagtaagttagttatctcatcattatataaacatggttgtggagttcattgatgagatccatttgattaaagagattggaaagttcagttttcacatattatttaattattttggtgctaaacacacaaatgtacggttacttcttgtatttgtatattctaacagtttagagtctattctttattactcatcttgaccaattcttcctaatatcaaatgtcaagcatactcatttgcatgagtttacctgtgttaaaaattcaaaatcacacatgtgttttgctttacctcatatttcatctgacggggcataatcatttacaaattacatttaatagccttgacttttgagtttacttggtccttcatagtgtgacattgaatgtgtttcagattttaccttggatcaaaaggtaaaataagaacttatatttttagtttgtttcaatttatttgcttaaggtttggttgttggctgcttttgtttgatctgaacaggc

SEQ ID NO: 31860 - DNA, 214 bp, Medicago truncatula
  Intron number 1 from transcript Medtr5g082290.1 (locus Med tr5g082290) derived from phytozome v7.0 (chr-ID MtChr5; po s 30961962 to 30962175)
acgaccgccgatcgcacaaatctaagctcttctcggtttcatcacttacaacgctcataagctcttctctgtttttttttttaagttttcttttgaataattgtgtttgataattgattgaattttagttgcgaattttggaatgttatgtttttgaatagttgaattttagttacgattcagcaccaacaattttgatttagcagtgaaactc

SEQ ID NO: 31861 - DNA, 682 bp, Medicago truncatula
  Intron number 1 from transcript Medtr5g007010.1 (locus Med tr5g007010) derived from phytozome v7.0 (chr-ID MtChr5; po s 936570 to 937251)
tactcattgtaacgccctagttatttatttaattaattttaaactatgtggagtatatatatatttatatatgatggtttggtgatttatgtggagtatatgcatatgcttatatttatatgtgtgattttgggtgatttatatggtatattattttattatatggtttatttaataataattagaataagtatgaaatattagttattttggggttaggggagttatttaatatttattataattaaagggagttaaatgaaaatagaagggagttacaagtaatgggaagttaggaaaagagaggttagaaagctttgtacgtaaaaactgacaagttgggagaaaaagaggagaagaccaagttagagccaagagtggatttttgctgcacatttcttctgcaaaattaaggtaagggtggggtttacttcaatggtgtagaatttaaagtctgattttgagtttaacaggttttggtaaaaattggggattttgggttttatgttgaaattgtgagttttgatgttgtaagcatgaatttgatgttagaaataggttctaagtgtatacagaaaattaatttgcatctgtaaactgatttggggagtgattggaagaaaaatgggatttttgggaaaaaccagatttctgcccgtacagaagttcatcgctcgcctcg

SEQ ID NO: 31862 - DNA, 678 bp, Medicago truncatula
  Intron number 2 from transcript Medtr5g009480.1 (locus Med tr5g009480) derived from phytozome v7.0 (chr-ID MtChr5; po s 2098496 to 2099173)
gttcttgtagtttgagtcttcttgtgcatttaatatgtattgtcaagtgaataatcagaaaggattggaattgagacttctctggtttggctattttacagatcatgattcatgatccatcagaaagttttgctcaaggattcacacaaatccaagaggaatctatctgtttaattcatctgactagtttataattattgaattgacggtggaaattgattcatctttatcctcgctctaggaatgtagaataatttacgagatttggctcggtgtctaattttaccattctttttcataaatagcagaagaatgaataatgcttaaggacagacttaatgttcgtgtccaagacaaagtgaatatatgttgatgttcatatcagtttattaatttgaattgtctagcttttcaattggttctgtgtgcttcactgcaacattatttatttcctccaaatggacattgtttttttgttccatgtattgcttcccatattttgcttcactgtgttaattgatcaatgtggtccatgcacctatgatttttcaattttggagctcttaaatattgtggtccttcataattattagagtcacgaacttcacatgatttgtattaaatgtcaaatattacttgaagttgcagattcctatactacaaataaaaaattcaaag

SEQ ID NO: 31863 - DNA, 559 bp, Medicago truncatula
  Intron number 1 from transcript Medtr5g021540.1 (locus Med tr5g021540) derived from phytozome v7.0 (chr-ID MtChr5; po s 8234049 to 8234607 reverse strand)
ccacaagctctacctttggacttcaagtttgtttatgtttacactctcgtttttgttcaattcatttttatttttttttgcatgaatatgaatgttttcttagaattgtgaatataattgtcaataaaacacaatttttttgcatgaatatacaacatatgttttttagaattgtgaatataattgtcaacaaaacacaattttttttttgcatgagtacaacatatgttttttagaattgtgaatataattgtcaacaaaacacaatttttattttgcatgagtacatcatatgtttttttagaattgtgaatataattgtcaacaaaacatgttgtatgtagtttattcttttcattttttggtgctatgataggaaaacaatatgggaaaagtgtattatgttatagtgaacattatcaaataatgtcatttaatatgagagggatctatagagtctattatcaaataatgtcacttaatattttgtcatctgaacaaatattttcaatcaaaatatgcaggagcgttatcgaaatattagggaaaaagatcaaca

SEQ ID NO: 31864 - DNA, 893 bp, Medicago truncatula
  Intron number 1 from transcript Medtr5g095220.1 (locus Med tr5g095220) derived from phytozome v7.0 (chr-ID MtChr5; po s 37724608 to 37725500 reverse strand)
gctatgtaagtttttttttctctttctcttatttcattttttcatcttccttgtttttctagttattccgttgttcatgctcatcacgaggctaatcgggttgcatataacttacctgaatttaattagactttagagtttgagacgacttttgtttttatttctttgggtttagcgggtgatcttagagctgtatgattttttcttttcttctagagattttcagttgtttgtcttttatttccacaacaaaacatagttaagatgagaatccaaaatgcaaattaatccacacattccaatctattttcttctagagattttgaataacctttgaccttttttttcaattgtttctcaattttttttattttgtgtgctcccatgaacttgaaaccctaatcgtggtattctcgcttattttgtgtgctcccatgaacttgaaaccctaatcgtggtcttctcgccaccaaccatgcaatgaaaatggtgtatattcttgctaacgagggaatcatccgtataacgttgaaatgttgaatcaaactattgtcgaaccaataattgaactacccaaaaaactaatgtgattgatgatttgaatatcataatattatgattttttgtaagtatcaaagatcgaatttctatcgactgtgatttcagggactaagttgatgattcattaatctatgagtgattggtcactgatataacaagtacctcttcaaattaattattatattgaacataaacacaaaatttcaatgaaggcatgtaaaaccctgatgaaaatgcatcagtttacaactatgtggactactaacactttctacacatcatggactattcaatacttattttcttatgctttgctttgcaagtctttggat

SEQ ID NO: 31865 - DNA, 241 bp, Medicago truncatula
  Intron number 1 from transcript Medtr5g106420.1 (locus Med tr5g106420) derived from phytozome v7.0 (chr-ID MtChr5; po s 42800321 to 42800561 reverse strand)
ttgttgtcaaggcagcttcttctcctcctgttaaggtctatctctcactcaatttttccttaaatatatgtttgctttttcattaataatagtgtctctgatgatcatattacaactctgtctcttgaagttacaaagtcaactctaaccactgaactgacacctcttggacaagcattatgtgctttgagctatgtttatattaaaataactttcttttctctttttggtgttcagcaaa

SEQ ID NO: 31866 - DNA, 633 bp, Medicago truncatula
  Intron number 1 from transcript Medtr7g011470.1 (locus Med tr7g011470) derived from phytozome v7.0 (chr-ID MtChr7; po s 2799260 to 2799892 reverse strand)
cccaccttctcctctctccctaggtatcatcaatcactctaccaatttcattcttcaatatcatctttcaattgtttcacataattcaaacattaaattaaaatgcactctctctggtctcaagtaacaaaaaagtttgtgtattcagtctaaatttagattggatacacgaactttttttatttgtatttaagattagatggagtactactagtttttcaatttatatttttaaaaatatcgctacttaaattgttgattagtgagagaaaacatgaaatcacttcgtaaactgtcattgaattttgcgatgaatgaattagagagaaatttcacattttttcagtcaaaattattatcctttaagtagtgattacatatgataaccaagaagttgtttatcaaccaattatgcaccattggatcaaattccatctatgtaacttcaaccattttcttcttttaaaggcatttaagtgtgttgataatatatgtttttctttcccttgtaattgtgtattgatgctaattttatgatgattttgatgtcaaatagttgagttttttcaaaattttgatgtatgtttatgttatataggtggattggtggaaaattcttgggaaggaatccta

SEQ ID NO: 31867 - DNA, 814 bp, Medicago truncatula
  Intron number 2 from transcript Medtr5g099990.2 (locus Med tr5g099990) derived from phytozome v7.0 (chr-ID MtChr5; po s 40028091 to 40028904 reverse strand)
agaatttgtggagcaggtatggtgttcatatttaatttctttgtatttcccttttatgtttctgcaatgttttatgaacaattcagtatcatgtaaccttgtttttagtgatttcttttcaattttcagtatatttatttaaatatcaatgaccatgaatatcattaatattaaaatataaatttgctccgttcaaaaaacagaggctcatttttttgtctggctgattgtatacaagtatagaagaaaaggcatcagcaatatcttttatcaaaaaaaaaaaaagttgtagcatcatcaagctttaaattagtgtttattgataatagtatgtgattttgcaactcatagtccatatttaggagggtaaatttccaatatgaggatcagaggaacgaacatgcatgattagtggtttgatttgaagtttataacataaaacaatgaaactttaagttattttcacacctaaacatctaggtaagaattgctgctcatggtttgatttttatcattctcttataaaatccttgattagtgttaaattttacattatcaataaaccagtgtcatgtacgtagtaatatccttaaatattcatttttaaaatgtctgttatttgtttcatatttttcattcagttttcttggcatcccaacttggtaacccttacgttttttaacgatattttgaaaatggctcttatgtttttgaagggtgttttgaaaatgattataatttctagataagggttctcatcttactcaaactcttagcagcagccagcagcgcctatagcaccacgtccagctcc

SEQ ID NO: 31868 - DNA, 787 bp, Medicago truncatula
  Intron number 1 from transcript Medtr5g033170.1 (locus Med tr5g033170) derived from phytozome v7.0 (chr-ID MtChr5; po s 13520813 to 13521599)
aacttccaattagaggtatatatatatatccactctaaaactgctctttgaaatttaattatcaaatttctttatctttttaatattccctattctattgattttattcttacataactacatatgcactgcaaagttgatgttaattttagacagaataattgaacagaaaaatgtattcttttttttttccttcttctgaagtttgaattttagatttaaaaacaatttaaatccaaatttaaaaacagaatcgtcttattaagatttcacagtctaaatatggcgaaagttttggtttggcgcatacccaatactttaattttaggcacacacagaaaattaaagaaaaataaaattataatatatcaattgatgtgactaaatactttttatttaattttgttagttttatgtgagtgtgtccaaaattaaagtcttggttactttctctcttcaatgttagttttattctcttttaattttgttaatatcatcatgtatgtgtgcccaactaatattgatttagctacgatgtccatgcaagactttatccatgcaatcaaactgcattgattcaaaaatccatacacacactagaccttattcacttggcatgtttcttttagattttttttttctttctaacccaacaaaattgattatctaatttattttattttattttattttagtaattgtaattcatgcacctaattatttcgatacaaacaaaaacattgctataattgattatttgttgaattaatttttaggagacgaagac

SEQ ID NO: 31869 - DNA, 613 bp, Medicago truncatula
  Intron number 1 from transcript Medtr4g137040.1 (locus Med tr4g137040) derived from phytozome v7.0 (chr-ID MtChr4; po s 33635213 to 33635825)
atcgtcttaacaaacctcctgtcaaaaccattcaggtcctttcttttaactcatttttctctttttttgtttatgtttgttccccatctacattctgatttgtaccagagaaaatagcattattttgaagaaaagttagttttttattttattttctttaatttgaggggatatgtttcagaaatggttttgaatctttcaatatttttcagttcaaaatttaatggacctttatggcaaccttctgctgctctcaagttatagatcttttgtgttaatattcagttttttttttttttttttttaataaaaaaattcacttgcgattttttctacctgtacttctcttccccctaaattgaaagggagaaaaaaaggccttttgatgagtttattgaatagattttgaaacagtaataagaaagtacttaaagaaaaactgggtaatgatttcttttttattttaattttaatattccttaattttaagtagtcactaatttttttttctgaagtagatagatgctagaaagtttggtttttattttggttacagtgtttcatttgctaataatgtgacatgattttttgttgttgttgttgcagagtccag

SEQ ID NO: 31870 - DNA, 143 bp, Medicago truncatula
  Intron number 2 from transcript Medtr4g137040.1 (locus Med tr4g137040) derived from phytozome v7.0 (chr-ID MtChr4; po s 33635871 to 33636013)
ttgatcatcctttcctcaaagatcacaaaattcaggtacattttttcttcattcaagatctgtgtttctattattttcaatttaatgagattttttccatttttattttgattttttactaagtttttgttttggtttattag

SEQ ID NO: 31871 - DNA, 1035 bp, Medicago truncatula
  Intron number 4 from transcript Medtr7g075590.1 (locus Med tr7g075590) derived from phytozome v7.0 (chr-ID MtChr7; po s 15177934 to 15178968 reverse strand)
cagagaaacttcgaccatttgcaggttagacttggcttcatacgaataaattttaaaattaactacgtctttgctttcaaaagaaagatggtgtgtgatattgggtctaggaagtagtggctcttggatgaaatattactgtataagtttcagcatagatgattgttgaattgagacaactgtttcatgtacttgtgatatgcggtgtacataatattcgaatttacaacaacaaccaatccttatcccactaagtaggtttggctacacgaatctaacaacgccatagtgttttatcaaaaaccatgtctttctccaattcattaatctctagatccttcttaagtgtttgtaatatttgaatttaatgacaataaatttcttctgtttctagttccccttcctgccactgttttcgtgccttataatatatttagataattgtccattaccccaggggcactagttaaggaaacaagtatagtaagaatttcttggaacttgtgtaatctaatacttaagagtgtagaaaatgttgttttcaatgcaaaacttaccttttttgtttccttgactagtgctccgggggcactacttagcatgacccttctttttatatataagaaacactggttaaagaacattgtattgggaactgtgttattatcctatatatatatatatatggaattaaaatcaatagcgttatctttcagtttctagcaactcaactggtatctagatttgtgtggcttaaggcaaaaaaaaaattaatcattcatttcttcatttgatgtagtggtatccatatttaagccaagggcatctctctgttctttgtgctgtgtttagctgcttgaaaccttcgcttcgtttatgacctttactcttacatattattgctgatttatttactcccttatcatagcagcacatttttattgaccttattttaatatcttggttaattgtttttacattcactttatatgaagtacaggttgcagtgaacataattgaagattacataatttt

SEQ ID NO: 31872 - DNA, 869 bp, Medicago truncatula
  Intron number 1 from transcript Medtr5g069050.1 (locus Med tr5g069050) derived from phytozome v7.0 (chr-ID MtChr5; po s 24884177 to 24885045)
atagtttcaatccatatcaacgtgaggccataacagtaagtttttactctagaagttgaatgcattaaataaaacatgttttttagctttattatatatcctttctttttattttgtattttcaaagcaatgcagggttgttcctccgtgtcattgttagtaactttatattgtttggaaacaataaacaagagtgtctggaaattagttaagatggcatattgtcaagttgggatttaattaaggatgttgttatgcttaaaatatgtgatatatgacttcaagtgtattaacgtgaataaattattatatagtcttatatttctcttttctccttttcaagttctgcctatactctcaatatgtttcttgtcacatgttttctttcttctgtacatgtttgaaatttcacttgcacttgtcactgttaaaggccttgactttgactttttcagtcccaacattaaaagatgttgtctgtttggatgcagtgttcaagtacattttaacgtttgaacatcatattttgtcaaaattaacttttgcagtagttaattcttttttagctttttattttgatgctcatccatatattcactcttatattgagtgaaaaatgagccgacctagttgatggcagagggatagttgatcacacccttcaaatgataaagaaattaaaacttttggtcaattgtcactcttcactttctcatgaagattttcctcttttttatttgacgcataattcatcaaggcatttattggagtgtagatttcaaagctcatgtaccatttattaattccagatttttttttattttcctgttgcaggctggtctattatcaaaaacctttgttctgataca

SEQ ID NO: 31873 - DNA, 527 bp, Medicago truncatula
  Intron number 1 from transcript Medtr5g105800.1 (locus Med tr5g105800) derived from phytozome v7.0 (chr-ID MtChr5; po s 42513503 to 42514029)
cgaaaatattcttagtttcttttcttaacttggttctgaatattgcttacagaattttgaaattgaactggtttgaaactgaaacagaacatgtgtattgtgtacacaactcttgctcatgttgatcattaaaatgatctttgtcgatgtaaataaaattgttccttgtagattctatgtaagttgtaacctagtaactgtgcagactttaattggccatgactacggtgcacaagtactgagagtattgcatcgtacaacaccatttatcatattaggtcaaaaaggtccaccaatcttgatggtaaatcatccaaactagatctactctcttttcttcttgtttcccaccctcttcaaacccacctcttctgactcttgtcaactccaccaccttcatgtgaatcaaattaagcaccttttttctgttttttcttctttttttatactcattttacattcctcctgcttcgtggtacgattaattttcagggcaagagaagagtgagtgggtgattcaccactca

SEQ ID NO: 31874 - DNA, 871 bp, Medicago truncatula
  Intron number 2 from transcript Medtr5g085010.1 (locus Med tr5g085010) derived from phytozome v7.0 (chr-ID MtChr5; po s 32424660 to 32425530 reverse strand)
tcagcctcttattctagggtttctacaaagacaaggtacgcatttgtttgttacactggttcagagaatttacaaacaacctgtttttttgcttattttcactaaatgatcaagataacttatgaaaatgatttatgtgaaaataattatcttttgttatagaaatactttatacattagcgcttatgatataagctgcaaattaagttgtttattcaaacagggccatataggtagatagcgaaatcctgcaatgtagcagtcaccacttcgatgacagttggattgagatcggtgtagatttcaaagtcagattttaatttctaaaaatattgcataaaatttgaattttaaaaaattggcgggaaataatggtgtgaagttcttccacatgtcattaattgaaacattttctttagaaaagatagatagaagattaactagtaaagattccaagaatgcatgaatgtggagaaaaaaatgttggtttcaaattccaccaccatgtgtcccattaggggattacttttcttaaatagaacaagatatatgtcacaactcattaatcattgttgtattacttcaaaatgcattgatgccaacatcttttatcttgaactctagtatgatcatgtttgatttgcataattaagctacactggcatacatgaactgtatcatgaagtatataatataacagaagtgtgtgttttatttgttaagtgacatttatgaatttttgtttttaggattataaattcatatgtggtagtgttaaatgagagtttgagattttcagttgctacggtgccaagcagagtgttaacatgttgctattgagttattcacagatttactgtctgggtgcctc

SEQ ID NO: 31875 - DNA, 740 bp, Medicago truncatula
  Intron number 1 from transcript Medtr4g045040.1 (locus Med tr4g045040) derived from phytozome v7.0 (chr-ID MtChr4; po s 10645074 to 10645813)
ttattttcctccattcatcaaacaacaaaacaaaggtaactaaccaactcaacaatctcttactcttaccatttttttctcatttaaattaatgctagaatttatttacttggttaattattaattaattaaagtattactattgctttattatttatttttagttttggttatgagttatgacaattagttacgttgtagtatttacttgatcttatagtgggtacttgttttttttttttttttttggtgtatctttgattttttgttgacgagatcacagttttttttcgtctttttctgctttattatttcttctcgtatttttgtgtagtgggaaaccatacttttttgtacttttctatttaataatatttttctctttctttactttactcttaaatcaaactctcaagtctcaaccctgcattacttcattttcaaaattattgctctagctattttaaaggtaagcaatgaaaatttcaatgaacaaaaagttttttaattttattttttacatataaaatcatgttcttcctcttttctcctttttcttcttgttttttggttttttgtttttacaaggttgttttttagttttggggttgtttataatttaggatatataagctattcagattctgctgctataaacttttatacaattgtatgtgatcaaatttttttgtgtttttcctccagttagtaatctgaaattcggttaggaggtaagtaaa

SEQ ID NO: 31876 - DNA, 467 bp, Medicago truncatula
  Intron number 2 from transcript Medtr4g045040.1 (locus Med tr4g045040) derived from phytozome v7.0 (chr-ID MtChr4; po s 10645846 to 10646312)
tcgggttctcttgaacgatttgtccttaagtggaggtcagtaaccacttgagtccgatcacttgattagtgacagactgacgagtgttatctcgtggcttgcaattggagattcctttgctttgatatttaattgtttgagctatagaaggatccatttttattgaaaaggaaacaaagaaatttttctttcatgcctttgttttggtttagtttttaatgcaagtttttagaatttaaattatttcataatctctattttgactctgtcaattataagagagatttttagtatattatattctttcttcacatgttaggaatttttctattcttataacttgttttatttttattttacatttggcaaatggtatagtttgtgagattatttattaactattattggagtctactgttttcttgtgttcagctggtttcattatccattcaaacagcgccccgcag

SEQ ID NO: 31877 - DNA, 937 bp, Medicago truncatula
  Intron number 3 from transcript Medtr6g017870.1 (locus Med tr6g017870) derived from phytozome v7.0 (chr-ID MtChr6; po s 4398128 to 4399064 reverse strand)
aaaggcttagaagacagaatgtaagttatgccttcgtgaatatacattctttttttaatgtacactaattttcttttcttaattgcaatttgatctatgagctttggtatagaaatctttatttcgcatcaaactgtgtcatatttgaaaaaaataaaaagaaattttcttgggatgacgaaaaagttatagcgctgattgatacataatgtgtcccttaagtcgttgccaattgattcattacagaaaactccactttggccatgtcgatatttccttaaaagtatgtatatacatgtatgcatgtatgatacagaaagctgtacgatacatgttatacatctactcagatgcttacctgattcaaaatttaaaagtagttgaggatatatatctataacatcttacaaacttgaacttcattcctcaaactgtaagacctcagatgctttaccaataacatgttgtctatggaccaacatatggtatgtggtgaaatggttctttgagtatgctacctagtaactactgttgtttttcttgtttgttggtttttcgggataattggagacataatgataccattcatgtctctacttaagagcataaaacttaggtttttggcttaacacaaccctacaaaaccggcttgtaaggtgaaaaatgcctaagctttataactctattttaggcttttggaccgaagacaacctcacaaaactgattacaaagtaatgattgtccaatcttcataagttttattcaaactatatctctaatcaaattgagacttgagtttgtagcttttgttagcggaatttctacattgttgaagaaaatactatgaatgtaaataagtacttattcgataacaccattaaatatcattcgagataattcatctctactcacggtaacatttttgttgttacaggag

SEQ ID NO: 31878 - DNA, 802 bp, Medicago truncatula
  Intron number 1 from transcript Medtr7g014740.1 (locus Med tr7g014740) derived from phytozome v7.0 (chr-ID MtChr7; po s 3536402 to 3537203)
gttttggtgcaggtttgtgatgaaatgtttgttgaatcaattatggattgacaataatgattataagttaattttataatataaattagacttaataacagttttagtcctctaacttttttaaagttgtgattttggcctcctaagaaaaaaaactataaaattgccctctaagttttgcatctgtggcagttttagctcccaaaaccaattatgactcggtctacgttgacattgcaccctaagtgaggtgccatgtgttatttttttattttttttattttaccaaaaattggccttgggggaccaaaactgctacagttgcaaaacttagggggcggttttgtagttttttttccttagggggtcaaaatcgcaacttcgtaaaagttagggagtgaaaacagttgttaagcttataaattatgatctattgtattaagcactaattagttgatgaatatatgtgattggattattgtttctaaattgaccatgatgggttgaactatttacctaagcacaatgagaggttcttgccctcaaccgtttagctatttaaacgtcatcccattagacgactaagcattctgaccagtatggtgaaatcataaacctaaacggtgatgagggtagttattcttctcatatttatcggcggttgtcgttcataaacctaaccatacaaggtacataatttcttattccttacttgttactaataatatgctataatttgatttgatttcgtctagatgcattgactattgaccatatatttcattattagtccttagtacag

SEQ ID NO: 31879 - DNA, 492 bp, Medicago truncatula
  Intron number 1 from transcript Medtr4g041420.2 (locus Med tr4g041420) derived from phytozome v7.0 (chr-ID MtChr4; po s 9811155 to 9811646 reverse strand)
gatttgtatgtctatcttctctctatattttaatttctttatcattatcatgttttaattctatatattagaaggattgatctttggtgccgggtctcaaaccgagtttctcgaggttgaagagagatactctcaaccaagtaacttctcgggagacaggattgatctaaatgatcaagtttatgtatgattgatttttataaataaaaataatccttattcgaagttataaatgattaaatctcaatgaatcgtggtagcaaaacaactcaaacacttgcaatacacatgtatatttaagtcatttgcaaagaaatgaagcatatagtaatccaagtttagtttctttcactagcaaactatatcttatctcaattttctatactttatctaccattttgtattttttttgtttttggacaaatccattcttgtatatattgaagttgaaaatttgtttgtttccaatttaggtcacttttcgtgaacctg

SEQ ID NO: 31880 - DNA, 970 bp, Medicago truncatula
  Intron number 2 from transcript Medtr6g089230.1 (locus Med tr6g089230) derived from phytozome v7.0 (chr-ID MtChr6; po s 18198182 to 18199151)
acaggctgattaatttctttaatctgcatcctgaggtaacattttttgatttaggggtgttacttttattgattgtgtttatgtatttgaatgagcaatttacaccatcttaacgagtgcctccatgacactttttaagcattctaaattcagcaattatttttttaaaatgtcaaagttttcaatttccaatgcactttattacacaaactttcataaaaggttaccatttaaagtccttaaccagtgccccgggggcactagttaacatttccctttctttaatctgtactactgtcgtgacatttagattttcattctctgcatagtactctgtgttgtgatttgtgattccatatggtaggtagatggaagcttgttataactagttgaaaatgtattaatcataataataaggtgttgtatgatatttgttgaaaatatattggatcattgatgattacataagcatgttatacttggttttaaatgtaatgatgattatgatttatgagatttttttgctactggttatgcttatcttttgacaactgcttttctttggttctggttccgcgatatttatttttgttcttagaagtatgtaaaagaatcgatttcatcactttaatttttcttttgcattttattgtggatataagaggactgatattccagaggccacactaccagagccctttttgcaaagaccttatgacttgattttcaaagatggaactgtcaatttgtcaaaagaactttcatcaacttccaattaaattgaactgtcgctgaacaacttacatttgtctccatctcttaaaagatcgactatatttatttttgttcttagaagtatgcagaagaattgatttcatcaccttaattttgattttaattttaattttgtgtttgctttttgttgtggatatcaggggactgatattccagaggccacactatcagagct

SEQ ID NO: 31881 - DNA, 767 bp, Medicago truncatula
  Intron number 1 from transcript Medtr7g010050.1 (locus Med tr7g010050) derived from phytozome v7.0 (chr-ID MtChr7; po s 2048540 to 2049306)
caatttcaggtatatatattatactgtatatgctgtttgattttctttttccttttcaatttcataaaatatatgttatttgagtttatctaaatttttagttttaatattcagatggtttgtttttaatttttaactaaaaaaataatatgtatagaaaaggtccacaaaattgatagatatatttcgaggttatttagatactgaactataggaaatgtaaaaatataaataaaactaatcctcaaaagacgtgtatacaatgtttagttttgcatggttagttagttttccctcgttggaggaatgcttgactcgccatgttccactgacatgtttttcctttgggatatgatctgttgacaaggtccaatgtgtatagtcttccacaaaatgttcctccttactcattacggtcagtgatgctataaacaatgagcatggcttgagtgcctcactgttcagtcccactggactttgaccaagtctgatgtcttcaagatacttcttactagactcaagaaataaccggttgacctttgtttagctgcaatattgctcttctaaccctccatcgattaagaggaagtttggaaatccttaaattgtctatttgtaaatttcggtcacgataattatttttagcacatgatcttttaatttctccaacacacacattgtcatagaaaaaagttgaattaacaacaatcacttaatgttttatgtgactttgattttcacaggtgttggaatactatcagttccat

SEQ ID NO: 31882 - DNA, 810 bp, Medicago truncatula
  Intron number 1 from transcript Medtr6g046740.1 (locus Med tr6g046740) derived from phytozome v7.0 (chr-ID MtChr6; po s 9978432 to 9979241 reverse strand)
agtcttctttcattcaaaacccttttgctggctcggtgtgtgttcgacaattttactgattttttattttgtagaattttgatttagtcttgaaacttaagattaggcaattgattgttaatttaatcctcttcttatttatgtaaaatggtatgctctaataagtgtttatttatttttaattaatattaattcttagtgagtgtttggatttaacatgtgtttataactgtagtttactctatttatttagagttatatctcaaagtgactatgacactgtaaattttatggatttgattcatatgcactgtcattgtaaagattttattatattttcagtaaatcattctaagaatgtatgaattggtggaacatggaaggagcaacaaaatatcaattgagttcggtctttagttcatttcttttttatacgtctcataatttttttgaagtttggaaagattggaatacatattcatggactactcatatacactcaatgtcttctaagcttttgtcatctatttgacaagctttgattttaaaccaacatgtggcattcaggtgaaaatcatcttaactatttaatcattatttagttttgtacatgttgtgtattttaattcaaaggcctgcaactaaaattaaatcaaattaagtttagtgaattttataatatattatacacatatttgctagtattcttcacagatgaaaattttgatcagcttaaatacaaagttattggtgttaattttttatgatgccataggcacttcatttcattgttgatttgtgcaatttacc

SEQ ID NO: 31883 - DNA, 806 bp, Medicago truncatula
  Intron number 2 from transcript Medtr4g140500.1 (locus Med tr4g140500) derived from phytozome v7.0 (chr-ID MtChr4; po s 34477106 to 34477911 reverse strand)
cttccactgatctggtcagtaccttcatacatcaatttttttttttttttactttatttctccatgacacatcatttcaatctaatcctacttgatttgggttttataaagttcacaactttaaaagaattatggtcagtgtaaccattttgattttgtatgcaatttatggatcttattatcagtttgatattttctgtttaattcagatttatttccttttgtactagatgttagacagtgttagaaagtttcaaaaaaatttttagatttaattcagtaatatagtccccacttttctgctacttattttaaattgttccttagaaacatatacatgacagttttgcagattgagagaagtatagttatggaaatgaccagaaatatttattgtaggatctctgacattatcaactgagcaactcatgcaggggaaaacatttattattatagaatagcaggcattattatatcagtaatgcaacttggggggtgtagggaaaactagaaaatgtttaattttcttgattaggaatgtaataatcaagttgtgatatacgttggtttacctatgaccgttagaacttgatctcccgttttatcttctctttcttatggaacacattactttagttttccacccctcactatctttatgagcaggacaaagaaaaagaaaaaacaacaaatgcttttaggatgatcagtttatatattttaaaaattggagtagatgcattcaaaaatatgtagacatgccatttaacattccgcaccttcattattttgtttacaggaaagga

SEQ ID NO: 31884 - DNA, 927 bp, Medicago truncatula
  Intron number 1 from transcript Medtr5g050080.1 (locus Med tr5g050080) derived from phytozome v7.0 (chr-ID MtChr5; po s 21530457 to 21531383)
aagcaggtaccggtacctatcttctacctctttaaccgagtttgttgtcgaattcacaacattactatactagttgtggtttactagggtgttttcaagattcacatagtttctttaaccgatgtaacatagggtgtttcaagattcacatagtttctttaactgagaatgtttcaagaatcaagattgcaagattttaaagttgttccatattagggtttaacatttagtgtttagaaaaaaaatacctatttcgaaaacatagatcaagatataatcatgtttagattgttatgttggtgtgtttccatgttatttatttttgatgttatttatttggaaaggaaaatactattgtgcacgacatattttgtcgttatatttgcacgaatgggtagacaagctcatttgatatggttcttttaatatttttttaacctaaatagcccttttaattaatgatgcacttctcctaaaagaaatcacaaattaccgatctttgtggcatctccatatcataaagtgagtgtgttttgtcttgtctaatactactagcatttatcttcttttttgacaaaagatagtatttatttatcttattttattactataatgctttagaatttgtatcatgatgaatacaagtgtgtgtagaccgttgttgtggagtctgtggcgttttgcatgtatattttcacaatgcaaattgcatgattttcattgtcgtgctagtcatgtggtaaagggtgcagtgctacatagcaccgctctatttattttttaggaaagatattaccatgttattgtttgaatcgtattaatgattgtccatctttccatgttattttttttagttcaacggtctaaaaacaaacgattacttgttttcttcagtaacaagtttgcacgcaactccttcccacaaca

SEQ ID NO: 31885 - DNA, 875 bp, Medicago truncatula
  Intron number 1 from transcript Medtr7g032320.1 (locus Med tr7g032320) derived from phytozome v7.0 (chr-ID MtChr7; po s 8007114 to 8007988)
gtcactacgataatcacagatcattgtcaaacattgtcgacgaccactctgattactttcgatcccatctttgaccttcgcaaccaaatgccctccgagcctaccttcttcaaccactccaacacatcttttgaccttcgcaaccacgcaccctctgaccacttaggacgagctcaagggggtagcaagttagatagcctcctttgatccacatttgttaggcctcaaattattttaatcaaatcaatgtattaatttcggtaagatatcatatccttagctaacatcactttggtatcactttgactttaattaaattagtatattgattttggtcctcctttccaatgtttagtctattagcatatggtaatatatcatcatatctttagctagcatcactttggtttttgccaagggaagctatactagtaattttagttttctctttgtaaaataaaaaataaaaaattatcttcctaaaatgttcttttcttttcgtttcttagcttttagttttaattcgattctttaattctaaaaagaaattaattggatctcttattttaacttttccagtttcgcttttattttaatggtcctactttcatcttttgtttcaaaatgttctttttcgtataaattttataaatttgggaacattttgaaacataagacagaccaaaaatatatttgacgtttctcttcatcgctgtttcaaaaaaaagttcattttcaaccttcttacaccagagctaaagtagctgcaagattatgggataaaatttgtctaaaacttataaattaatttatgaggatgggtttcaaatctagaatttggtaaagagataggtgcttctggctacttgtcaacg

SEQ ID NO: 31886 - DNA, 523 bp, Medicago truncatula
  Intron number 1 from transcript Medtr7g043340.1 (locus Med tr7g043340) derived from phytozome v7.0 (chr-ID MtChr7; po s 10682696 to 10683218 reverse strand)
gtcttggggtcccttatttcgtttcacaaatcgtaataatatttcttatgcatttcacacttctttttttctatagctagtttgtgatgtaaattgaaaacatataaacacaattttcatggcatagctctttagggaagttcatttgaatgaatatcaaaactaatgaaaacaactttttcttctttgttttttaaaaaaatatgatagtattaattttttcaatctatgtacttatttaaaaggttggagtagcaatgaaaacaaattaaagacatagaaacatgaaattcatctataatttcgttaccaaggttttttttttttttttttaggaaacgttgctaagtattcttctctatttttcgttgttaattcaactttttctaaaagaaatgatttgatgagatacttgttacgttttagtttttatttaaaaatatatttgttttcatggcgtcaaaattaatgatacataaattttgcaggctggtttagttctaggaccatctttgaagttttc

SEQ ID NO: 31887 - DNA, 903 bp, Medicago truncatula
  Intron number 3 from transcript Medtr4g080630.1 (locus Med tr4g080630) derived from phytozome v7.0 (chr-ID MtChr4; po s 16592743 to 16593645 reverse strand)
gtttgtggtggtagatctagatttggatttcgatcttgtggtggctatttactccagagttccgagttgtggggatttcaattcttagtaggcaaaattacacagttctcccttaacttaatttcaggtaacactttcgtcttttatctttttgtgttccgatttattcctttacgttataaaatgacaatatcttctcattttttatgaattttttcaatgaaatctgattttctaggtttgtatgatgaagatttgggtttgtttgtgagtttaatgattttttttggagtttttgattattttttgataaaaaaggataactatataaatcacgaaattgttacctaaaattaaattaatagacgaatcgtgtaattttacctaaaaagaatcattctctgatattagtttaatttataataaatgatttttcacatcttagatgcgttgtataacacaactagatatgttttcataattatcaaagattttaattgagatctttaggaagattgagttatcagtaaggtaaagagataaacacaatatattagagacatttaacattaatttcaattttataaatggctggtagtaaatcctaagagttaaaataaatttaattgaaattaataaaacatgaaatatttagttatatagggatcaaatttataacatgtaaaggcgaaaaaatatgactcaaattctcttatttgttcatgttttgattagctttctttctctacttcttattgtaactaatagtggtatgttatttttcacaccattttctaattaatcttattcacgatattttatcatcttttggttttagtaacatttattttcttatttgacattgcagttgaaattcctgaaactccttgtgagagtgacgct

SEQ ID NO: 31888 - DNA, 1022 bp, Medicago truncatula
  Intron number 1 from transcript Medtr7g089160.1 (locus Med tr7g089160) derived from phytozome v7.0 (chr-ID MtChr7; po s 19515418 to 19516439 reverse strand)
gtgaagatcggaagcagatctgtgcagattgaagggtattgaaaaaaaaaaaaaaccattcaagcagattcgttcaatcaatcgtggatgattttaattttttttcttttgattttttgaaagaaaaaaaaaacaattttgatgaagaaagagagataaggcaatggtgttgcatacatggtgctaaggaaatttattaattgttatctttttttttttttttttttttttgcaacagagaacttgtttatgcaattaatcttgaatcatgtattgaaattttatatgatatgatatgatgatatttttatttagtttcatgctattgtttgtttgatgaaagtgggggaacatggatttggtaaaattgtgttgctgggagaagactgcaagcaaacgagagggaaaagggagaagatgatgccaagggtattttggtctttttgcaagttacatcagctaatcagtgacgtggcactgattaactgggttgagggatcaatttttaagtgattaaaccttgggagggcaaattgcaaggattaacaaatatatggacaatttttaaacgatccctaattgcagggattgaatacatatttaagcctttttaaaaaaatgatattatcaagtttaaggagtgtaaaagtgtgttcaagcaaagaaaataataataatttggcacacttgtatgacatgtgtcgtatgggtccttcggtgtccatgcttgagaggttagtactccttcggtgtcccatagctgaccaatcgacctgcctgcttgggatgcaaatcttgatcatggaatctgattaggttcaaagtcaataagagaatgagttaatgaaaaagtttcaaatctagcgtctatgattaatttgattattacatacctcatgtgaatcatagcagtttttgattttatgactaagtttttacatgttataaatctaatcgaaaatcatattagttggtagtgaaaataattacatatgaatgtattcattctaacagtttgacac

SEQ ID NO: 31889 - DNA, 467 bp, Medicago truncatula
  Intron number 1 from transcript Medtr7g046540.1 (locus Med tr7g046540) derived from phytozome v7.0 (chr-ID MtChr7; po s 11504266 to 11504732)
ccgggtaatatattctatttccacaactattttgaaatattaggttcccaattacttcttaaaaaccaattcctttcggatacactgttacatacggatacaaaatacatgattgattttcttcggatgcatcgtgctagaagtgaaaacaacaatgtgtttttgtccatccgaaacagagtatccgaaagaaatttatattttagatatggtgtgggatgggaagatgggagaaatagctctctaaataaattattggtttattgtatataccttttatttaaataaagtagatgtatctaattcttatttttaataagttacatcaactttatttgattttcttttcttcttatattcgagaatggagtagtaaaaagttttagcccattaaaaatggagtaattgtaaaatgtatggttcattatccttttttttttctttttttttttttttaaattgaaggt

SEQ ID NO: 31890 - DNA, 602 bp, Medicago truncatula
  Intron number 1 from transcript Medtr5g090140.1 (locus Med tr5g090140) derived from phytozome v7.0 (chr-ID MtChr5; po s 35117301 to 35117902 reverse strand)
tacttctccttctcgttctcgtgtttcttcttcaggttctcttttcataatcgattattcattcattatgcttaattatttcttaatgatcaattatcactatgtgtttctactttctagtattagtgattatgctctgttttcaactctgtttttctttttggtcaaaatcgaagaaagaatagagaattagtaattataatcgttaatttagattttcttgattaattaatgtttagttagattttttaagtgttctaaatttagtttctgcaatttctacatttggatcgcataattgattgaccaaatttgaatttgtgtatttgatttaagttaatttcaattgcatgttgtgttataggatttcaaattattcatagttcatgtttatatcttatatatgatctgcatttttttttctttagttgaatttatttatgtttccaaatttggattatattaagcttagttattacttattaccaagagtgttttatattttttttaataaattcaatcaatgttaaaaatttgtaatgcataaaaataggcaattatataacctagatttttttttgttgcagaatttatcaatccat

SEQ ID NO: 31891 - DNA, 739 bp, Medicago truncatula
  Intron number 1 from transcript Medtr4g041390.1 (locus Med tr4g041390) derived from phytozome v7.0 (chr-ID MtChr4; po s 9789930 to 9790668)
ggtttcatattcgatacattccttggtactttttcttaaccctaaccctaataaactactttgttatcctcgtattcttgtaacattattgtcatcattattgggtaaatagtctttttgtcactgaatgtgttacaagtaacgacaatagtcttcaatgtatcgaaattccaaaatagtctctgattgtgcatcatgttagtcaatatagttagggcctgatatgacattattaacgaaacattttaactgtagtgactattttgactaacataatgcattcaaggattattttgaaatttcgatacattgaagactattgtggttactcgtaacacattcaatgacgaaactgactatttacccaaatgtttggattgacttatttgagtttatctttggatcatataagtactctttgaaatgacttatgaaaaaagcttatgacataagctgtatgaaaataatttgactttattttatgtttgttatagaagcaacttttacaaaagtacatatatgataaatgctcatgctgtaaacgcttaattaagctgtttatccaaacaaagctaaactcaaataagtcaatccaaatccaaatagactctaaaaagtgggtacatgtgtattgaaaacaaaatttgagataattatagaaactaaatatatttaaccctttgttattatgaatattattgcaggcatactgtgaaccgcgttttgaacttacacgctc

SEQ ID NO: 31892 - DNA, 273 bp, Medicago truncatula
  Intron number 1 from transcript Medtr6g062380.1 (locus Med tr6g062380) derived from phytozome v7.0 (chr-ID MtChr6; po s 11354174 to 11354446 reverse strand)
aatctcagccatcagatcaaaataagtctagattaaaatacttattttaaataacaagcatgcctttccacatgctatcatcaacctattcaacttctgatcttctccaaccttccatccgcttccaaatccttggtgtctgatacttttttcttcttcttttcatggagcttttaacctcttttgtattaattttttgccgccgtccacaacaatcaaaacaaaaactgaatcaaattttactttttaatttattttcttagttggtggaga

SEQ ID NO: 31893 - DNA, 449 bp, Medicago truncatula
  Intron number 1 from transcript Medtr5g021480.1 (locus Med tr5g021480) derived from phytozome v7.0 (chr-ID MtChr5; po s 8202259 to 8202707)
tttttgtcttacttatgctattttacatgcatacatatgattttttttttttttgaagaagcatagatatgaacttatatgcacatatataatatatttgacatttatgagttttgtataatcgtacatttacgattttacttccccctactgatcttgcataaaatctagaccttgactaccttggttacggcggttggaatttgtcattttaatagctagaacatttgattttatattagaccatttcaatatggctacataaggataaggattgaaatgaatactccacacacattatagaccgttttaaacatgaacaaattttaggagactaaaacaaaacaagaaagtccaaaagtaaaaactagtatatttgatttgtttggtttctgaattgtgatatataacattttcttgtttgttcgtcagtctctctggtgcagttc

SEQ ID NO: 31894 - DNA, 932 bp, Medicago truncatula
  Intron number 2 from transcript Medtr7g084190.1 (locus Med tr7g084190) derived from phytozome v7.0 (chr-ID MtChr7; po s 18144280 to 18145211)
ccacttttgccctttgtggcttcactcgcgcacaggtctataatcatgtttaggatatttttaattggattgtgtcttcagctatgtttgtgttatgtatgaacagaatttgaattagctttagactctgtttgagtaaacaacataaatgcttatttctataacaaattatcatgaaattaagtcaaattgttttcatataagctacatgttgttgtcataaatgctgttctattgtttttatttttagttttgtgaaggcgatgatgttgaaaactacctattttatgaaggaattgagaattttcctttatgattagtaaaattaccaatggatccttctgagccttcatattagcaaaaaaaaaaaaaaattgtcttgtatgtctggggtggggcttctattagttcagattgtattttatagtccatagattatattacaacttattagtgtgattccaactgaataaagaaggacaatggctgatagaattgtcaagaatttcattgcatcaattctgagtaaatttgaactgataatacttataatctgtggtcgcaagaagagtatgtgaaagtgaaaggaactgacactgtctacttttgtaagaaaaaaacttaactgaaaattgatatgttacaatggtttttattctttagaaacatattgaaatatatatatatatatatgtgcttttagtttatgttgtgtgactgaatcatgacatgtttattaatgctgggttgaacaacaatatttaatctttatattcatgttggacatgctctcaataccatattgtattctgatttctgtcagccattgaacatactatgttgttctattcatacaccttgatgatttaggttttatgaattgcatttctaaggtcatgatttcatgttatatcatttttattttcagggag

SEQ ID NO: 31895 - DNA, 675 bp, Medicago truncatula
  Intron number 1 from transcript Medtr7g076600.1 (locus Med tr7g076600) derived from phytozome v7.0 (chr-ID MtChr7; po s 15635197 to 15635871 reverse strand)
actgtttgggaggtaattataattatgattatcttaatcttattgttttcattttttatgatttgattatttccattaattttgatgagtttttgtttttggttggttttcttaattttgttcaatcaattcttgtgggttgctagttttctttgatcatggatttttgttccatttcaatttgattaatcattaccttttgatgaatttcaaggataatattgttagaacattgcttttttgctttaataataattatcaattttatgcaattatgaattactttgttccccactttttcttcttcttttcacattttgttgatcatagctttattatttgttttgctttttttttttttttgcaattgttctatggcaataataatgtaattgtcaatatttgaaaataaatcaaattcaaccatttatgatacaaatttatctcttacctttaggaatttactactaaaattcttcattatttaccttctcttggcatggtagattttcttagctgtataattctagcaataatgacagaattaggtgattttatcttatggattttattattagattatgttgatgcttgttaattgttgaaatgtaacatgtggctatgattaatgttgaatatgctttatattatcaggactattgtggagaagaaggc

SEQ ID NO: 31896 - DNA, 960 bp, Medicago truncatula
  Intron number 1 from transcript Medtr7g029640.1 (locus Med tr7g029640) derived from phytozome v7.0 (chr-ID MtChr7; po s 7562739 to 7563698)
ctctgctcctgctaaacgactcgttctacttgttggtatgatgctaacactgaaaatatacacatgcacaccaactgtttgatgttatgtttgtttcattttttgaaggattagattagttgttgttgttgtcaaatgccagtagaattgactagtatgtaagcatgtggtggtcacatgcattgttgtgaaaatccccacttatatcctaaaatccaagattttgcgactttcttcaccttcaacgactcaaatctatagtagaattctaaaataggcaaaatccatagattttgattgcgattttacgacttcttataaactaagtcatttatgactatataccatttataacatatatttaatattatcttttttttttgttggtaaaatccattgattttgattgcgattttgcaatttcttatatcgtttctacaaaagtagttgagtaaaatccttcgattttggttgcgattttaccattgtcgattttgctcatctctttcgacctgaagcaaaatccgattttgacaacctttggtcatgggtttgatgcctacttgatatcttataacacggacacttatgaaagaagccgtgttttatgtctgacatgtgtcagtgtttgaaattgacacgacacggatatatatcttttacatttaattatgtcatttttctttttcttcaaattattattgatgtcgacgtgttaagtctggtatttaggtctgtgcgagtgcttcatagtttcataccccttaagaaaagtgaagtagttagaaataaaagatgtaattgtattttccaaatgaaacagaatattctaaatgtgagacaaaatattctaaatgtgagacaaaatattctaaatatgacatttaatgagacagaattggtatgagcattgagcaataagtaaagaaattttgacttacttgaatttggacgcagctg

SEQ ID NO: 31897 - DNA, 756 bp, Medicago truncatula
  Intron number 1 from transcript Medtr6g080500.1 (locus Med tr6g080500) derived from phytozome v7.0 (chr-ID MtChr6; po s 16165568 to 16166323 reverse strand)
ctctccttctattcgacaaaatatttgtaagtttccatcgttcaacatatttttctgaaacccccaaaatcctaatttttttgaaaccccaatttatttatgctccgaaattcaaatttaaccttatatcattcctctgagttagtttgatttgattcttccgaccgatttatgtataaatcataaattccccatttctattttgaatatgtatttcccctcattattagaatccaaaaatatcatttttgctgttagtttggattgttgtttactttcaaatttcatcttgatgagtctatgggtcataacatcaaaatcacgaggaagggaacatttggtatcaggggaagaaacgtattgggcgattttagaaattaacaattgatagatactacccgaagatatataacctaatgcttgtttatttaataaatcaacatttgttttgcctactaataagttatgcatatcttcttgatctcttaagtagctaaattatgtataatgatcatattcttcattgttgttttttagtacaatgatcatgtacttttacatagcaaaagataaattgaggaataatactaggtaaataataatcaacaaatatcatggatgacattagatggttagcctacatgattaaaatatacaaatgacaatatctttgacattagataactatattttgtgcttaataccaaaaaattgtgctgctcatcaactttggatcatgcagttttcttttggttg

SEQ ID NO: 31898 - DNA, 800 bp, Medicago truncatula
  Intron number 2 from transcript Medtr5g100640.1 (locus Med tr5g100640) derived from phytozome v7.0 (chr-ID MtChr5; po s 40237463 to 40238262)
aaattgaatctccgagcagtgacaacgaatctaaggtaattattttattttgttagttaatttgtttttaatttttgtaattatctctttcaaattgttgaattgaatgtgttgaaaatgtatgcaatttggagtaatgcatttggattaggattatgaaatgaaagtgtattagtttgattttttaggttctgatttatgaagcactgagacaaacacgcttgatttgtggcgcgtttgaattgacttatttttgagcttatgcaaataaataagtttttatgtattatttataagcttgtcaaggtattttatgaagaaaaaaaacagcttatgaagatacaatttttgttcctgaaaacttatgaattaacataaaagcttatttatttgtataagctatttttcataagctcaaaaataagccaatccaaacagacccttggttgttaagtaaaaaatttcatgtagtgggtggtaattagttacaaatttgatttttgagtgttaagtttcgagtcaacgcttcatagaaattgctgcattgagtggtgaaaatgtatgcactttgggggtaatgtatttggatttggattatgaaatgaaagtgtattagtttgttttgttaggttctgattgaaggttaataaaggaattcaaatttagattatgtttttggtatttggttgaaaagcagaattttacatgtactgggtggtaattagttacaaatttgattttttttatgggatattattattgcagcttcgtggtgaatcgaagcatataaagtggaggcc

SEQ ID NO: 31899 - DNA, 958 bp, Medicago truncatula
  Intron number 3 from transcript Medtr5g088010.1 (locus Med tr5g088010) derived from phytozome v7.0 (chr-ID MtChr5; po s 34081218 to 34082175 reverse strand)
ctctgtgacataactgaggacccagacaatatctggtatagtgttcttgccttcccgataaattttacgcaaacaatatgtaaatttaccatcattgtcttgtgtgatagaggtttcgagaatagaatcaaggagtaaaaaataggtgcattttacatatatataggttgaaacaaccgggaggtgtagaattaaatagttccttcattgatattaaatgctagactactatattttttgttcatccaaggaaaagagagtgaaactccatttcattgaagctataaatttgtgataaattatgaaaatgaaaaaactatgatctatgaagaagcccgcgatcaataattaacagaaacctttatatgatcaacagctcatcaaaggaagaaagtgaaattccattttcatccagataactttgctgaaggttgaagcgatgattttttaaagctaaactatgactataaaattggctatgcagtttttggaagttcatataaatttattatatatatatatatatatatatatatatatatatatatatatatatatatatatattctgccttttaggtttactgaagcgtacactaaaattgtggacaagttaattttttcttcatctgacctttatggaaaaaaaatagaaacaaataagatgaagagaaaaataaattggaaactgaatgatgggtatttatgactgtggaagtagaatgtgatctaacctgattacacacattagtatagggtttctacctgcagtcccatagaattttatatctagaaacagccttgaccctattcagccacgggaaaaaccagccaagtctatcatttttagtaattaaacaatttgagtaaaactttataatagattttcatgcttgtgttttattacattttacaggcctttgattgagtgttcaattattttctttgtcaatttaggt

SEQ ID NO: 31900 - DNA, 831 bp, Medicago truncatula
  Intron number 1 from transcript Medtr5g095960.1 (locus Med tr5g095960) derived from phytozome v7.0 (chr-ID MtChr5; po s 38087892 to 38088722 reverse strand)
atcttttgtaagttcaagctttccttttttgtctttttttgttggatttttcatcattgcttcaacttgtagaagaaaaaaaagagtacagaaataggaaactagggtttactttcattttgaagatatctcagaattttcctttacttccttaagcttaatgctagtggtaattctattcataagtctcttatttttggcttgttctgttctgttctgttcattcttatatgttgtgtttttttttttttttttgtcatgtacttcaaattatataaaaaaaagggaaaaaagaaagaaagaaagaagaaggaaattagagttcagtttcactttgaagtaatttgaagaaaatttaaaattttcttttacttcaattagcttaatgctagtggtatttctatttataagtctcttatttttgtgctgttttgttcaatactctttgttctattcatgcaatataataagtccatgtttggttctttggtgataaaaattgattttgtaaaattgatattacttaaaatgagtccaatgcaaagtggtttatatttggatacatttacaaaaaagtgagttcaacaataactttggtgtaaaaatcacatttagactcaaaagctacaaattctggcttcaaattagaatcaattctacttgagagcaaccaaacatatcaatatcaattttcactgctccaaacgtggaaccatacatatgttttatgttccatataatgtttttgattctgttttgtacttaactatactatgacctttagctaaaggttgcatttttgtgatttgtagagggaattggttgttagag

SEQ ID NO: 31901 - DNA, 984 bp, Medicago truncatula
  Intron number 1 from transcript Medtr5g094880.1 (locus Med tr5g094880) derived from phytozome v7.0 (chr-ID MtChr5; po s 37604026 to 37605009 reverse strand)
tctccatactcaaagacccatttcttcattttcttgtaagatttctctcatcaataaaaatttcatcttttttagtctacagtttcattttgcttgttttttttatcaatataatttgtggggtgtttttgtttttttgtttatttgttcttgtgtttgtaaagttttgattttttttctttcttagtttagcttattgatcatttgagttgaatttattgtatgtttcttaagtttgatgcttttgggatgtgtcagtgattggttttgtgttagattctattttcatagctgctttgatttgtttcctgattagttttgttgctattcatggaaatttatttgttgaaactgttttgttttgtttctgtgtcagttaccacgtgtttgatgatgggtctaagagagaatccttttaagaatttttattgaagcttgttctatatatgttgttttttgtagttttcatgtttagtttgtgtgtgatttagatctgtttaattatcatagttctgtttttgatctatctatagtgtattgatgattgattcatgttttctgatataagtgttttttttttgttatttcatttagtgattggtcaatttaaaatagatgcttgaatccatgttcttagcttttagcctccgtctatttgatattgttagatgagaagaaaaaagtatctgcttttgaaaattgggtggctagtgaatctgaattaggatatttatttatgtcaatttgatgcttttgatatatttacttcatccagaaggtatcatttgatctttgctctgtctaaattattctttgttttgtggcttttgacaggtttaaaggtgtgaaaaaagcttgagaattcattgatttgagttggttttttagagttaaacgaggcaaatttgaaactccgatttatagtttgaagccgatttttgtgttcatttgggccatcttttagggtgttttcccttgcaaaag

SEQ ID NO: 31902 - DNA, 569 bp, Medicago truncatula
  Intron number 1 from transcript Medtr5g092750.1 (locus Med tr5g092750) derived from phytozome v7.0 (chr-ID MtChr5; po s 36392104 to 36392672 reverse strand)
gagttgggacttcccaaggtatgagtctaaaaaagaaaaattataacctagtagtagtactccactaaaaaaaatatctttgagaactctgataccactcgtgtttctttccttattgtctgtctctcttttgatactcatacgacgtgttatatcaccaccactcatccatcagacttcccttttcttcttccccgattcgatttccgaccaggctactacagattctcaacacaaatttaatagataacacagattctctgctctctttaatagataacacatattctcaacgttttcacttcaaaattctcttctttttcctctcttcaggtataaaccttcattctttgttctaactttccacattcttgcactctttttcttcattttttgattaatgttgtttaggatttttgtttttatgtcaaaaagttcatttttttggtgatataaccctatgtttatgaaattatgataatcatgaatgttagaattgttgaattagatgtttattttcttattgttgtgacttctattggatgatgtgcttccagctttgtgggcac

SEQ ID NO: 31903 - DNA, 483 bp, Medicago truncatula
  Intron number 3 from transcript Medtr5g078790.1 (locus Med tr5g078790) derived from phytozome v7.0 (chr-ID MtChr5; po s 29194957 to 29195439)
agtctccgggggccaaagaaagagagttacaacaggtatcttgctcttcttctagaattaactttatttgccttaagtatctaatgtatgtcactgtcccggtactctttttttccctttgggtaaagttatgtttctaattaaaaaatgtgtaaagaattttgggtgaggtgaatcaaaagaagtgttctgttatcatttataattttgttttcaacattggctagaagtatagaaatagtggaagatgcatttccctttaaaggttattgcattgttgctaatattgacacaatttgtggcgatagtgcttgtaactcatatcacgtctgggtttgattatgcataactgaagacaaaaatccattaattttataatttggtttacttcatctgaactagaagacttcaaatagtgtgatgactctgatttaagttcggttgcagtaatcactgacatcttatattatatttttaggcgaa

SEQ ID NO: 31904 - DNA, 1035 bp, Medicago truncatula
  Intron number 1 from transcript Medtr7g064730.1 (locus Med tr7g064730) derived from phytozome v7.0 (chr-ID MtChr7; po s 13129614 to 13130648 reverse strand)
aaattcctaaacaaaccttaaggtactatcactctccatatctctgtaacaaggataggttgtagggaccatatcacacccttcatgggagacatatatgtgtctgccttctttggcttctttcacttaacgtgtgagggcaattgctaatatatttcatagattttattatgctttatttttgtgtgcctttacctattctaatttatttccaaaaagcaaaactataatagtacttccattcccactctccttttaagcgtttgcacattatatttttgtggggtttaagttgtgggtcattgacttagtttattatatcaatgtcaaagtggcagaagagaaggaagaaactgttacagtgcatttgaccattggtttgattttatgtaattagatttaatgatggttttgattagatgcaaagatttctaaaaagaatttgtgtatttagttagcttttatgattttatcttcacaatcatgtcttggttgccaggttaaaacctagcattcgtttacttgttttggtttgtgaaaattgtatattttaaacttgtgaatcgtttcacatagtttgtgaaaacttgtgaatcgtttcacttctatgagtgaatcgtttcactcatttttgaagaaaataatttgttggtttttaaagtgaatcgcttcatttgtgtattaatcgttccactcatatacggaactttagtgaatcgtgtcacttgacaatctcttatctcaaaccctcttcttcctactctttcaaaacttagatattaattgtgaagttgagaaattgtgagttacttaaatagagtattttttttttatgtcagattgtgatattctaggcttttcaattttggaaattgaaaacctaaggaaacattgcgacctttcactttctttagggaattgagcgtttttcttcgttgaacatctcaagattatttgacagctcgtccaaaatcaaaggagaataaaatgtttaatactcaagattgaaggagaccctagggttttcgggtgctc

SEQ ID NO: 31905 - DNA, 980 bp, Medicago truncatula
  Intron number 2 from transcript Medtr4g080780.1 (locus Med tr4g080780) derived from phytozome v7.0 (chr-ID MtChr4; po s 16654301 to 16655280 reverse strand)
ggaggttagaatcaaatgataatgcaattttaaaccctactttgggcatctttggattgacttatttttgagcttatgcataatagcttatgcaaataaataagcttttaaataagtttaggtagtttatgaaaaaacagcttatgaagatacaatttttgttagtgagaagttatgaattaacataaaagtttatttatttgcataatctatttttcgtaagctaaaaaaataagctaatccaaacgggccctttgcacatttcacttattcagcatatatgaaaccaatttttataatttttattttttaatatttagtactaaatttctgtgttagttaatgtggttgaactttagtggttaatgagtcttagttaaggttgaattgatcgagagcatttgagttcaatatctgggtggaacaattcttggaaccagatattgaacttagatgctctcgatcagcataggtgaaaccaaatgtttctttttattatttaatatttagtactaaattgttgtgtcagttaatgaagtgcttgagccttagtggttaatgactttagttaaggtcggtttgatggagagaatctgagtttgatatctggctggaaattcttggttagattttagttgtctctctgtcgaactatggattacttgggacttttttccctaggaatcagagtattaagacccaaaaatagttgttaatttgaatctttttttagcttatttgttagaattgaacgctacaagtgttttcttttcttttcaattattttgttgtaaagcaaatgttttccttcttttatgttggatattacactcttggtaaattgtgattcctcggaagtgctggttttagtagtaaactattaaatagcaataatttatgaatcataattgtgttagaaatatgaagttgaaaccccatctctcggaaaataatgggctcattttgtgtcttaggttcct

SEQ ID NO: 31906 - DNA, 642 bp, Medicago truncatula
  Intron number 1 from transcript Medtr7g035100.1 (locus Med tr7g035100) derived from phytozome v7.0 (chr-ID MtChr7; po s 8527244 to 8527885)
actgcttcatacaggttctctctctttctctccctctctctctacattctagcatgagacactcaaacacatggtggatgcatgatgatgttgcatgcgtacatgcatggtccacttggaaattaatgttttatagtatacattcaaattagttgtaatgcaagttttgataaatttttgatagatctgatgccatcttataattttggattaggtttaattgagtgaagattaggtctgcacttttttttttggtgtccagggttcaaacctcagaccttgcatatgttatgcactgtctttatcaactgaactaagctcaaagggacgattaggtctgcacttataaacatatattcatatcataaagtgcaaagtatcattcatctttcaaatattgttaatatcattaatttcttagaacgtgagtagccatgtcaatacgacgtcagtggttgctcaactatttattgtcgcaaaaatgtccaccgtatgtggtgtcgtgcaatattatgtcatcaatcaactacaactataggacaaacaaactttatcaatgtattgcttccattttctacattatatagtttattcacgttaacatatgtgacattaatatttgtttatttttgtccactaggg

SEQ ID NO: 31907 - DNA, 950 bp, Medicago truncatula
  Intron number 1 from transcript Medtr4g154470.1 (locus Med tr4g154470) derived from phytozome v7.0 (chr-ID MtChr4; po s 37926771 to 37927720 reverse strand)
aagaatagtaagtactttattataacttttccgaaagaacaaattacttttgtctgacactaaattgttccataatcaagtttgcttattaattagtatattggaaatttggaacttggattcttcatagagagattgggaagatgtatacggattgagagaccctccatatttagaattttgatttcaattcaagtttttgaagtcttctcttcctcttaccttaacaaaaatcataagtaacttctctcatatatcatcttttactcctattcttttccaataaaaaaaaataccattcgatcatctaaaaaactcaattgatgaaataaaactctctgaatcaaaattttaatcacttgaatttatgaaactgaattttatcaagtttttttcctgtgtgttttaaaatcaatctaattgacatgttcaattattgacttctgcataatatgtggattggatatgtattttaaaaaattatttataatttgagaatgagaaaggtaaacaattgaactaaaaaagtttctctgtgatgaaatgcttctttcatgtattagagactttcatatcaagcatgtatcacgaatgtagaaatactcatcattgggttataatatgaccaattataattcaaaataaaaaatttgaagtttttattcttaaagatattacattttaaagattttctaatttatgatggagatttctggttcccgtcaagtatgtttttcataatcgtttatattgtatgtttttgagagaattagtttttcatatttagtcatcttaatctatatctttatctatacattataagaaaaattacaaaggatgtgaacctttgatctgaatttttgtcattcaaatttcatccttaccaaatgatctttattacatttggttttgtagagatagagaaaagatcaagaaataggaaaggagtg

SEQ ID NO: 31908 - DNA, 540 bp, Medicago truncatula
  Intron number 3 from transcript Medtr6g104360.1 (locus Med tr6g104360) derived from phytozome v7.0 (chr-ID MtChr6; po s 23015806 to 23016345)
atctgctcagaaaaatcaaggtatgctcttgagatattttgcaatacttttttaaattgattttgtcactttttatttgatttgtctattttgaatttcattaactttttccataattttgtgcttattttcaaaatttgaatgtatcaaaatgtttgtgaaattattttgcttttctatttaggtaagaatttgaaaaatagtatcatatttcttaaatggaagtaatttggattttcgaacagaacgttatcaaaataataagaatcatttctgaatctctgattactgatttgggatatttccaaaattttaaaaaaaacaaagctcaaaccaaaactgttcatggacagcctaatcttcatatatctttttatttttatttttttttggcttaattacactttttgccccctaacaagcaccctaagtttactttctgttgcaattttagtccctcatgccatttttaactccctaagtttactttttgactcgaaattagggggccaggaaagtaaacttagggaggctaaaatt

SEQ ID NO: 31909 - DNA, 756 bp, Medicago truncatula
  Intron number 3 from transcript Medtr4g029150.1 (locus Med tr4g029150) derived from phytozome v7.0 (chr-ID MtChr4; po s 6905972 to 6906727 reverse strand)
agtagtgttgcctaggtctacttgtgatattcaaggtcttgttctctatcttctttagtctccctcatgcacacaaaagcacgaagaaatgcaacgaagaataatctagatgttatatttgtttacaaatcataacatttatataattgattaaagttaatcatttttagctaaataaacttctaaaatagtcttagccttatctttataaaaacaaaacatgggttgaactaagcctgctattcagcattcaaaagttgttcatgagttcttgttagtttatgtttactgatcaaagtggatgttgtgctactagaaatattagttatatttttttattttattatgagttatcaattgtaaaaggtacttacatgtggtggcaagttacgtttaaactcgatgcttttgcacgccttagcctaaattaagaagttttcgtgtgctttattttattgagttatatttgtttgtacttatctttatccttaatttactatttgtgataattttgtgcctgatttttccaagagtacttacataacaaataattgacatgtttcctctaaaaaaaacaaatagttgatgtgttggaatatttaattcactattttttcgtcaactattgtgattgcttattttatcccccaatgtttgcatcgtaaatcttgtataatgtcaagtcttccgttcttttatactcgtcactttcattgacggtttgcatcatatttacattttcactttgtagttaca

SEQ ID NO: 31910 - DNA, 786 bp, Medicago truncatula
  Intron number 3 from transcript Medtr5g026390.1 (locus Med tr5g026390) derived from phytozome v7.0 (chr-ID MtChr5; po s 10653410 to 10654195 reverse strand)
aaaattaaagccaataacctcaattacactatctcgtaacggtgtctgaatctaggggcttgtctatgcatagtctataattttttagatgcaaaatagatcttgtcctggttgaggaaggtgaggtatgaccaaagtgatgtattgatgcattgcatgggtaatggattccatttgatctgtgtgcaattgttgtattcttctggtatgcactatttgatgggatagtagaggaatgaggaagaacattaattgtggggatagaagaggaactagtgaaacatttttttctgtcaaatgcaatgctgaatttttgttttaagtgttaggcaatggtggaggctagggggattaaggcgcttttttaattttctctgagaaaactattgttttactgtcactatttgttggtagtggaagtgggagaattgttaaggggagatgcactgttcatgctcttattttgggtgtaatatttgttcacttaacatgtcctgtgctagtgagtattaaccttagtacaaacgcgtatgatgtgtctgaaattcaaagttaaagccatgcaacaagtcttcatgaacttcgaatcagaagtatcagatatatatgatgtggctttcggttgtgattcataatgaaacaaaattttcataattaaacaacacctaaaaagatcttgatgactgaatttacttatttttcaactacattatattactcaatagcatcatgaattatgatcttgatctcaaatcatttttcatttttaattccttatcaggcaca

SEQ ID NO: 31911 - DNA, 840 bp, Medicago truncatula
  Intron number 1 from transcript Medtr5g096400.1 (locus Med tr5g096400) derived from phytozome v7.0 (chr-ID MtChr5; po s 38300416 to 38301255)
gtgtttccaccaaagacaagtaattgatgatatgtaagtgatttttatgaaattagggttcttcgatgttttagggtttttaagaaattaactttgtaaaattatgaatggatacttcattttgtaatgagataaatcgtgattattgttactttagtgctttatatttgaatttgtcactatagatgatttggtttgagattaagggttgtttggattgaattattttagtttatagctaatgcaaacaacttattttcggtattctttaggatagcttgtgaaaacatattatgtcttatgtgcatgttggatcgacttatttcagcttatccaatgaataagtacttataacactgttttggagaatttatgagaacaacttataatatgttggttgtgaaattatggttttcgagaaatttagggtttcttttgctgtttaagggttttcgagaaattcagtgtaaaacaatggttggatgattgatttgatattgaatagtgttatttatatattaagatagttcatgatgcatgttactttttctgctgtgctgttgaattggccactaaaatatgatttggtttgagattaagggccttctggattgaataatttgagtttatgtactaacatggaacttatgaaaacagatatgtgtgcagtgtgtttgttgcttgatcaaaacagatatgtgtgtttgtagtgttaagcccttacaagtgttttaagacttttgtaatttaaaacactagaacagtgtttgggtttctcctctctcaatttgtctcactcctgctgtcattttgcagtcaccgctgaaaatccactgttga

SEQ ID NO: 31912 - DNA, 698 bp, Medicago truncatula
  Intron number 1 from transcript Medtr6g038900.1 (locus Med tr6g038900) derived from phytozome v7.0 (chr-ID MtChr6; po s 8494735 to 8495432)
gagagttctaaggagggtacttttagagagagaaagttttttgttctttcaatttggtttagttgatatatatatatatatatatatatatatatatatatatataaggtttttctatcatataaaaattataagacttataaacaaataataaaaagttttatttattattttcagtcaaaaaattcaaagtttatttttttatttaattaatctgaagatacataaataatttagaattttttaggtagattctcttaaactaaaaaacttgtaatcaaatactcaaagtattatattatttgaaataacttcttcggttaatttgaagttagtcgatatttaatcaatgttgatatggatcatgatatgtcaaccaaattgtacacatttttatttaatttccacctcattatatatttttaactattatttactaaatccctattattctaacaacatacgtgatattgctaagaagttgtgaagaaggaccgttgaatttgaagaggtaaaccacaggaaagttcatcatcatcactcgcccttcttcctttatttaattccacatttcatatatgctattagttacaacttctctttccactccttttcttttcctttcttccttgtttcctattttgcatattttcactctagcagcaataatttcaccgatcatctttttgctgccctac

SEQ ID NO: 31913 - DNA, 953 bp, Medicago truncatula
  Intron number 1 from transcript Medtr4g084480.1 (locus Med tr4g084480) derived from phytozome v7.0 (chr-ID MtChr4; po s 17759546 to 17760498 reverse strand)
gtatgtaccgtgtatctgctcaatatgttccaccgtagactaacttttttgaaccatcagattaagcacatcactaatgttatcgtgttgcctttcacactatatttattccctttctcttgtttgactttttcttacttctatttcaacaacatatttattccaatttatttatttatttatggcaaaattacactataaattctgtcataaatcctttgtattaaaattttgtttaaattgaaaattcattattttaataaagtttaaattcattactattatttaataacgtttaaatttgtttttggtcattgcatatttttttcatagcaattttgatatatatcttaaatcattagtttcaaccatcaaaacaatcttattatatatctcaaattatgattagtttgtgtcaaattataaattttcatatttgattatcaaaactataatgaattattttcctattatctcttgatatagactatgtttttgtaacacattagtcctttttcattttttttattataaaaatgctgaaataatagttttttttttgttgaaaggatgctgaaataatagttttattaataaccttatttgttaaaatatttttaattaaaaagataaagaaattcataagtcatatgaatatcttcatcatcttcctccttgattaaaaaaaagtacacttaaatacacatctaaattaaacatctctactttgatcttcttataatctcaaaatccctaaaactcaattaaccacaaatagttcaagtaatttagatgctaacaatggtttgaagagaaacccataattttcaattatcataacagaatcttcagataaactcaattataaaactagatacagttagattaaatgaccaatcatcataattagggtttcggaacaagaacgattgaaattagataatatagaatct

SEQ ID NO: 31914 - DNA, 767 bp, Medicago truncatula
  Intron number 1 from transcript Medtr7g070670.1 (locus Med tr7g070670) derived from phytozome v7.0 (chr-ID MtChr7; po s 14345703 to 14346469)
atctcatctgatcccaatctatcctcgttcaacaagtgtgtttagtgttggtacttaggaaaatgtaatttgaatcccaaggactccaattgcaagtagtattaagaaaatgggagtacaagaagagcatgagcaaatactctaggaagaatactttagttaggtttgattgagagtcatctgcatcatcataggagtttatattgtgcttcaaatatattcgattaagattggaccaatcattttttttggattcttaacttgaccgctttcctgaaaagtataaagatcacttgttcttgacaaaatgtcacattcaaattcaatatgtaggcttatactgaaatttttctttttttgggatcagaatagatactagcagatgcagagccacaaggatgcaccaccctgcaatgagattatctagcttcatggaaacacttaattccataaagaatatatattaacaaatgtaacacttttggcagatgttctatacgtgaggaccattaagagtgttattcttgaagtttatttgaacggtatagaatatctcaatttgttgaggacaagcccataattgtcacggtcgggaggagggccattttttttttttttttttgaaggaaggaggaccattttattatcattattaatttatcacaaataaaagtaaattcacgatcattatttttgtgtgtaacaagttattgtcattgtgtatctaaacagacaaattcatctaatcgggtacgaaaacagtggac

SEQ ID NO: 31915 - DNA, 1009 bp, Medicago truncatula
  Intron number 4 from transcript Medtr7g084310.1 (locus Med tr7g084310) derived from phytozome v7.0 (chr-ID MtChr7; po s 18185752 to 18186760)
cagttgtcttgagatcaccatcaagaagtcacaaggtaaataatagtcctcctccatgcatcctaacaaaaaagctgctcctagtacagaaaatgttacaacttgtaattctaagagacatactataaatgatctggtctagaatgttgttatttctataatggtgtgaagtaacccttgcgaaggaaattaggttccacttgtgtacgttagaaaggaatctcaaactggatgagaaataactatatctcataattcaagggattgtagtcgaccattctgttttattattgttgctaacttttaggggttcctagttaattttaggaactttttccgtttctttgtttagcctatatatgtgctgttaaatcagttgaataaatgcagagaagaaataatttctccataatctaatcttagggtgcatatgatttgcacactaaatgtaagggactggacaacacaactctagttgttccatgtttgattttaaaactggtcatgagactggacaaatgggggacaaaggactaggcaatatgccgtcagttagaatatatcatagattgattttttttttgaccattaaaaagtttagcagttagtctaaatcatcatcccagagctacctgagctcaagccggtgcaaattgaacctaaggccctctattaacatagaatcatttgaggccttgtgatggtctttgtaagaagcatgctcgagtcggtacaaatttaacctacattttgtgcaaaagtttaagttagaattttgtgggttttctagaaggtaaacatccagttttgactcagtggataaagcaatgcaatttatgaactctagtgatagaagtcctatttcctagcattctcatgtttcttttgttgttgttgtggttgttgatgagcattcctggcttcgagcctagaatttcaaagaattttaaaatagttccctaaaaatctaacaggttgaagaagttactactaggaaaacaagttcgac

SEQ ID NO: 31916 - DNA, 866 bp, Medicago truncatula
  Intron number 1 from transcript Medtr5g028790.1 (locus Med tr5g028790) derived from phytozome v7.0 (chr-ID MtChr5; po s 11916833 to 11917698)
tgatcacttggacaacaccccagatattgagcaaggttatcttatctgatctattctaatttaaatgtaacacacttttgaaactttatcagttgagaattgtttttctcaagtccatttcctaaaaacacatggaaataacaaacaatatctcaacagtaattaactaccgctaacttataattagaaaaccgacggtaattaactgcgttaggtttttggttatttccatatatttctaaaaaacactagatgtgaaaacagcaagcttcttatccattaccaccttacatgtgtccttaatttgtccttgtatcagtttcactaagcccagtggatgttttatactaaattgaacccctcgattacatgtgaagtaaaagcgtgaagacacgcgttaatgttcgagaaaaacagtgaaatttaatttcgtaatttttttccccaaaagtgatgcaagaagcaccacacaaaatatattaaccaaaataagagaaagacaagaaattaattcggtcttggagaaaaaataaagttattgttagtctacatgaaccacggtcataaagagataattttatccttgacaataattaaaaagagataatttgatcattgacgataagtaaaaaatatggaacattatttcattaataactcatcaattttttattttttttcttcttctttagtattcaaataatgtcattctatggtaatgcttgttcaattaaattttaaccatacttgataattctaaaaatgattcaaaacatttccaaaagatagtagcaataacagagtaccaatttaaagttattttttttattttttactttttactttttaaggattcggctacgctt

SEQ ID NO: 31917 - DNA, 733 bp, Medicago truncatula
  Intron number 3 from transcript Medtr5g018830.1 (locus Med tr5g018830) derived from phytozome v7.0 (chr-ID MtChr5; po s 6952819 to 6953551)
caaccttctccccacctctttccaccaggattcaggtaattatgtatattatcacatccttgtctgattagcaaatccaaatactgtttatgaaaatcaccgaagctcgctagttgcacctaataaagtggacgatgatgcaatgattttgccaaaaaatattgccaaacagaatatgttatgaaacctcagttattaagtatttcagaattatgctcagctagcctcagagatttagtacatacgcggactaaagattgcagattccccccttgttttccttttcacttttttgtcctctttctcatggatgacattttgaatcattttatataatcgggaaatttgctgcttttttatcaaacagataatcaatgaaatgaaccatgataaaaaatattgccatcgtgaaaggggttttgtgcgttacccgtagttaatgaaatctaagtagagatgcaaaagagcgtttaaaagagtgccatatagatataatcttcataagttttccgttatatctcacgattttttttatactaacatatggtagtcattcttattttatttttcatcgcctataaattgaattatttacctttgtcatgacaacatggatcatatagtagacatctttggaatccctattttcatatgttcatggatacttttttccatattaaaaaacaaatgaacaacatacatggttctggattctctgcagaatctgtgctgg

SEQ ID NO: 31918 - DNA, 636 bp, Medicago truncatula
  Intron number 1 from transcript Medtr5g066350.1 (locus Med tr5g066350) derived from phytozome v7.0 (chr-ID MtChr5; po s 23340116 to 23340751)
tccctttatatcgttctgaagttcttgtggttgaggttagtttcttaaaaaaattcagtcaatttcttttcatcgattatccctttatttatatgcttttcattcatataacctagataatcatttcagcaatcaagcttgaggagtcccttttgtgggttttgaggaaaagataccctaagcttaactagattgttgactgattgttaactagattggtgactaagaacaaatggatctggtttgttattgattgattgtcaaagtctatctctctaaatcaactagatctcatattctgtttcgtctcacgacacatgatttcaccattcttttttaacactcaccaagactaataaggtttgcgttcctctttactgcagtgtctttttttttttttggtttatatttttttatcacaagttaatattaagtgaatatatttttctcaccatgtgttcgacaaaaatattttgacaaatttcttacctacaaatgtctcaggtacaaattagggctctataccacacattgattatcttttggacttagtttgataattatatatgtagttcccattattttaaatgtaattctttagaccacaaaaaataaggcttttttgactatgaaagc

SEQ ID NO: 31919 - DNA, 960 bp, Medicago truncatula
  Intron number 2 from transcript Medtr5g078470.1 (locus Med tr5g078470) derived from phytozome v7.0 (chr-ID MtChr5; po s 29092591 to 29093550 reverse strand)
gcataatcatttgcgtcctgatattaaggttcgatatatatgtacctatttttttatttcatataatttttattacaagttttgtgcttgaatttgaccctatgattacatagttttgcacattgataaattttgcttctacatagttgcatggaattgctttcaacttaatttcaactatgtttttccgagattatttcttgaaataatattttcctatttatccgatgatctagatttagattcatattttcaaggatctttgttttttagggaggatctaggtttgtcatccgcatatataggttgattgatacatctagagatctaatttctttgttttctttatagtcttttttcagttattttcttcttatagttatagcatatatcttgttaatataaatcaatcttgatgtgggtttcatcaattttttagcacaaaataaaaatgtaaaattttgttttgatctaccctttgataagtgatactttttgtctcttaacatttttttttgacgaaattgtcccttaacatttaaaacatgtcatatgtgattcttgaaattcaaagaaatatgtcatttgtgatttgtgaaattcaactttattaattaatttaatttcttccaaaacaaacaacatattttcaagatacgcaaaaaccataaacaacatatttcaaagtacaagaatatcacttttcaaaaattgtcttcaaccaaattttaaacattttaaaggacgaaaacatacttaacctaacaagtctagaacttttcattgaagctcatatgcactttagttttctttcctccgcaaataattacatacatttttatttacggatttttcgttagtattttactttcaataaaaatttaagtaactttcaaattccttggaaaacttatatttattacagaaagatagttggagtgaagaagaagagaaaatatt

SEQ ID NO: 31920 - DNA, 418 bp, Medicago truncatula; identical to SEQ ID NO: 30551
  Intron number 2 from transcript Medtr7g073470.1 (locus Med tr7g073470) derived from phytozome v7.0 (chr-ID MtChr7; po s 14907028 to 14907445 reverse strand)

SEQ ID NO: 31921 - DNA, 707 bp, Medicago truncatula
  Intron number 1 from transcript Medtr5g079350.1 (locus Med tr5g079350) derived from phytozome v7.0 (chr-ID MtChr5; po s 29521415 to 29522121)
tgtatagtgttgtctcccttttaataaactcttagtttatgattttgagagtggaagtataagtaactgatagaacaaaaatttcatattctgcaaatctatataagcttgatgaatgagctatcagagtgtaaatcacaagaatttatatctatgcaccaaaaggatctcttctgctaaggactgttcatgattcggttcatgaaggaagactgaaccggaatgaacctttacaacagtttagtaaaactgaactgaaccatcaatgatataaatcagtttgttaaaccgaactgtttctttgtgaaccttgcaccttttcgaactggacaagctaaaggcacacaccgtgcgcattaactgattttggaattttaacaagaaccaaaaaccgaactattaaaccaaactgcaccgcaccgagaaaactgaattttgatcgacagttcatgaattgaactgaactgagtaataaaaacaccagttcagttcttgaactgtccgtcataatttgcttcttttcagttcggatcggtttaacggtttagttttttgttttttttaacagtcctattgtgctggtaatctttttctttgacttataattttttgctggtagttcatgctaaatacctaacttttgcatatattctacttgtgttgacctgtgaatgtaggacattgaccacacctgttgatttgatcaa

SEQ ID NO: 31922 - DNA, 455 bp, Medicago truncatula; identical to SEQ ID NO: 31013
  Intron number 1 from transcript Medtr6g096250.1 (locus Med tr6g096250) derived from phytozome v7.0 (chr-ID MtChr6; po s 20926862 to 20927316)

SEQ ID NO: 31923 - DNA, 900 bp, Medicago truncatula
  Intron number 1 from transcript Medtr6g076630.1 (locus Med tr6g076630) derived from phytozome v7.0 (chr-ID MtChr6; po s 14795758 to 14796657 reverse strand)
cttctaactctcttcgctcttctttcaaatctaaggtcactttcatattcaattcaattctattttttttttatttttttttatttttcatgataataaacagttttcagcttattttcataagttcttcaagatagtttatgaaaacaatttataacatatacggaaacaatttaactttttttttttatcttatgctatagaaacagttgatatactgaggaattatcatgataaatgtttgtgctaagctgcaaataagctgtttatccatacacggtctttattttatgttttgttataaaaatagctcacctaacgactcatatgataagtgtttatgctataagtgtttacttaaattgtctatcaagattcaaagcaatgcctaagtctttatttgagctgctcagctcatgcttggatgaacttatttgagcttatctattgatattcaataattatttagaaattattcataagatatttttaggaaaagcagaagctgtttcgtgtttgtctaccgtagtgaaaatcacttcttttaaaaaaaaaaacacttcacagaaatgattttcatgaaatgcttctaaaagcaacttctcatttgaagcaccttttagatttatttctttcagtttatcatcttttcaaaaagccttaacaaagagatgaaaactttctaaagtgagcatattttttttgagtgtttttttttttttttttctttttttattttttaagaaagagctgtatcaaacaggtcttatatgatataggattattctgtaagcgcttaattaaactgtttatccaaacagtgcctaagttgctcagctcttgtgcttctctcagtgatttttacatttatatttttttcttcttaaactgtcaaggttc

SEQ ID NO: 31924 - DNA, 716 bp, Medicago truncatula
  Intron number 1 from transcript Medtr4g118280.1 (locus Med tr4g118280) derived from phytozome v7.0 (chr-ID MtChr4; po s 27447167 to 27447882 reverse strand)
cttggtattttttggtgcctctggataggatttcggtgacgatttgatttcaaccattgagttaatgcatctgtttctcttatgttttctcttatggtatccgatcatttattgggaaattatgtgaatacatgattcgaacattttttttttttgttcaaaaatgaatcgaaggacaaataatagcttgcttcgtatataaacattgttgtctgtgagagttatatgttgttcatgtatcaatcggacataaataattagaatgtttttttcaacaatctaatatcgttcaagaatgccgcaatatagttagtttttttttttttttttttttgtttatcgtttgttttttctgtttattgtttgttgtttgatatcagtaatgtagttgagtagagttctcaataatcataatgttacaaaataaaagtactgattttggtcttcattcaagaatgccgcaatttagaatatttttttttctttttatgaatattgattgttatttatagttctcaatattcataatgttacagaataaaaggactgaatttggtcttcattcaagaatgccacaatttagagtttctttttctttttctttatctaaatacttatcgttatttagtgttaaataatatatgattgggccgttttttataaacagcgataaaatgtgattgtacttgcaacaatttgcggtatcgagtccaagt

SEQ ID NO: 31925 - DNA, 1012 bp, Medicago truncatula
  Intron number 1 from transcript Medtr5g013550.1 (locus Med tr5g013550) derived from phytozome v7.0 (chr-ID MtChr5; po s 4112510 to 4113521)
aggtagtacttttttggttcttttttattagaatacattcaataactaatgtatctaagtatgaaaaggtttttcttgaactattttaattagaagagatatgaaatatgatgtaagatatacatttattcatatattataaagctagcattcaacatgtcatagtggtgtctttgtcgagttataaccggtgttcctctcaaaataaatttggtattgtggcctatggaaactcacacataatccaccgtgtcttaagcgcaatttgacgacacggacacgtggagagcatgaaatgaattttccgcgttccattgtattctcttttgttctacggtgtttgtattttttctttctttcaatttttaatattcactatactcctcttgtaacaaaataaaagtcaaaaggatatatatatatatatatatatatatatatatatatatatatttatcaaatacatttgactttttagatttaatttatgtatattttgttagagaatgagtacataaaccaatccataagtttagcacaatccaattttaatcgtgatatccaaaaagtacattgcttttattgcacaatccataaggacttgcatatatttattatcttctagcacataatcagtctttttcatatttttctactaatatatttagcttttaaaaaggaaatccatcacagtcaatttatcgaagtgtttttttttattgaaataaaaagaaaatgtactttgtggaattgcaccattgtgtgctggctttatttttactaatgtcgtttcctatgaagtcaaataaattgatgttttttatttattttttatttatagaaggaagttgcatctttagttttgtttgtgtgtattctgatggttggtttatataactaaatgtgtatcagtttaattttctttctatgttgtctcttatattataggacaagtttgaacttttatccctctcaaggtgtctctacttactcctaattcacgccttttggg

SEQ ID NO: 31926 - DNA, 817 bp, Medicago truncatula
  Intron number 1 from transcript Medtr5g033930.1 (locus Med tr5g033930) derived from phytozome v7.0 (chr-ID MtChr5; po s 13851478 to 13852294)
cgttgtgctcgctgcaaagctgttagatactggtttgtttcttgattctaattttgaagtttttgaattgaaaatagcttcttttttatgttatgcatgtggtttgtttgaaattgattaatgggtgtggtaccattaggttaggaacatagaaattttgaagctttttaaggggagataatggaaaattagggtattctggattaagggttttggaggtctaactctatattttggtatatatttgagaattttaaagaattgaatgaataacatgaatgaatgatgatcatatagcattttatgacacttaggttattatcagaaacatattcttagtgttttgtgtatgtgtttgttgttgaaatttgagtaatgctatgtatcccgagagatattttcacaaagtggtctcagaatgcatatatatatatagccaaagaaatttgctgctggccgggaaacacggggcaagaaagttgccgctggcgggaaaacacggggcaagtggggttagtttatgagagatagtatttagtaattgtctcgtgatattgtcgtggggctttctctcgtgacaagtagcaatttccttgaaatttatctcttgaattttaattttaattttttattgtagtgtgtagttttacaagtgatttgacattgttgcatccctgaatatctttagttttttttttgtgcctatgtgtcttctctcttcagttacatatctccagacatctctagttgttattcatttacacaagcatgctttcttgtagttcgggtaagtgtcaaattagtcactggagacaag

SEQ ID NO: 31927 - DNA, 413 bp, Medicago truncatula
  Intron number 3 from transcript Medtr6g014200.1 (locus Med tr6g014200) derived from phytozome v7.0 (chr-ID MtChr6; po s 3233092 to 3233504)
ctgttggtatgtcaatattaatgatttgtttcagtctaccgatctttgatcttcttcatgttactgctttataactctattggtcttgctgttagttatagtttcatgtcagtttggttcagttttgacaaccttggttttaacggaatttagtagtataattactttcttctagcattgtattaatttcataatcagaatatacagaagttcagtccctcagaatatgttaaggttttatacatgcacgagcttaagcattgaattataaacttcattgtttcttcccctgcatgctgggtctgttttgtggctaacttatcttcttggttctgttttgcttaaatgtttctctttttcttgactcttatatttcgcttggtggtttgaattatgcagttaacgttggaaag

SEQ ID NO: 31928 - DNA, 479 bp, Medicago truncatula
  Intron number 2 from transcript Medtr5g076810.1 (locus Med tr5g076810) derived from phytozome v7.0 (chr-ID MtChr5; po s 28163830 to 28164308 reverse strand)
tgtaggttcgaacccgggtgaaggggtccaacctggtaatatcggcattttgtagttaatctggagcttacgtactagttttttatttgcttgttgttattttacattttaatggtgcattttttgatttaatgcttatgctatttgagaacctaagtcaaaatgttaaatctttttttgtgttcttgtggctccatgttgtgcttcaaattcaattctttgacatcattagtaattgggaaatgttaacttgtgcccttgggtataagttaagaagacaaatgtagaaagtttttcttgaaacttgcacattcaatgtcttaaaagttgcaaaagttatagtttcaatatagaatttgtttttaatttcctttttaagctccttaacttgtgccctaagggcacaagttaacatgacccttagtaattttagtatgttataagtataacttggtttttttcttggttttgtgcagtgg

SEQ ID NO: 31929 - DNA, 544 bp, Medicago truncatula
  Intron number 1 from transcript Medtr5g076810.1 (locus Med tr5g076810) derived from phytozome v7.0 (chr-ID MtChr5; po s 28164269 to 28164812 reverse strand)
ctctctctctctccctgtctctctctctctctcaggttccaattcaaaaaccctctcttttttttttttggtagataaccctctcttttgattattagcggttaatgtctttattctatgtttttgtgcgtacccttttatttcatattgtcaaaattcagttaaagttttgtttttgtgcttaccctttgctttttacttgcattttttgtttagttttcaatttttctacattgaatgaatgtgtatcttttgagttcatgcttaattattgtttagctaagtgaatcacttacgggcacgacactgacacatagacactgtaataatttaagaaaatagaagtgattgaatgtaattatatgtgtaagcatggtgtcgttgtccgttagacacgggatatgtttttgaactgaatagtcagtgttatatattagtttgttactttattttggtatgtagaagaaatagcaatcacctcatgaaactcacacacttcgagattgtaggttcgaacccgggtgaaggggtccaacctggtaat

SEQ ID NO: 31930 - DNA, 644 bp, Medicago truncatula
  Intron number 1 from transcript Medtr5g017900.1 (locus Med tr5g017900) derived from phytozome v7.0 (chr-ID MtChr5; po s 6498672 to 6499315 reverse strand)
tttctattgagttacttggattacaaaatgtcacaagttcaaatcatgtcatccctatccctaactactagttatcgtatgagcagtaacaatagatcaattgagaccgattcaaattgatacatactcaatagtatgaatagttctcatattgagtatgtatgacaacgtcctttatattgtttcaacgttgcttaatgtttttttttgtgtttcttctttttggtgtaactctactgctctttcttggcacatcttgcgctgagaagataatattttatcgtttaatataagtttatttttattttttttggtacaaaagagggccaaagcccaaatataagtttattttagattattaaaaaaatgtatgaacggacgaatgttgaagaattctgctcattatccaaatgaatatgttcattcccaaaataaatgaccaaaatatccctgcgtgagttaatttacgtgggggcaatttgaacaatttacgtgacttaaactcatgttaatgttaatttcaaaaaaatcaacgtgaattaactcacgtgagttaactaccatttcccttcttttcttcttctttcttctttctgtacgcagcgtgagcagttttctaagcgtagtccatagtggattcaagc

SEQ ID NO: 31931 - DNA, 695 bp, Medicago truncatula
  Intron number 1 from transcript Medtr5g028150.1 (locus Med tr5g028150) derived from phytozome v7.0 (chr-ID MtChr5; po s 11573355 to 11574049 reverse strand)
aatacacagttgaaccaatcgatcaacaagagatttttgatatccttttttttttctttctaaattccatttttttgtttcattatcacttttattgaatttagctgctaagaaattagagaaaaattgatttagagcctgtttggattgacttatttgagcttatttactggcagaagcatttgagagaacttatcaaaatagattatgacatgtttataagttgttttcagcttattttcaaaagctctacaagatagcttatgaaaacagcttatacgaaggcaattcaactttattttggttccgtttgtattggcttatgcaaaacagcctatgcaaataaataagcttttatgtatcattcctaaacttgtcaatgtattttatgaagaaacaacttatgaagatacaatttttcttttttgagaacttatgaatgaacatagaagcttaagcttatttatttgcataagctatttttgataagctaaaaaataagccaatcgaaatgggccctttatcttttgttatacaaatagcttatcatgatagacgcttttgctataagctgcaaattaagttgtttatctagacagagtcttaatagtactattaatatttccttaacaattctcaaatcatataagagatatcaaggatcctgagcatccttactctttggaagaactcaa

SEQ ID NO: 31932 - DNA, 642 bp, Medicago truncatula
  Intron number 3 from transcript Medtr4g098590.1 (locus Med tr4g098590) derived from phytozome v7.0 (chr-ID MtChr4; po s 21286778 to 21287419)
cggtatatataataaccataaaactgacttgtgccgtgacacattggcctgaatggcatatagataaagctcttcaatttgatttcagcttgaatcaagcataactttataataataataattttatcagtttcatagtgcttcttaccaacatttagaattgaagattgttgaacttccttttaagcattcattgtatcattctgtaagtattgcatggtgttccaagcttactttaacactgaagagtaatgtgtaaacatggagacttaaaaatatcgttcttttttcttcttcatacctttcttgtcgtgtagcaaacgatcattgtggtctattatatgttttagtgtcacacatgctttgtttgatagacattacactccttaaaacacatggtaagcaatcaagacatgtataattcatattattgtatttttgtctgcagcatggattttttaactgtaatgatggtagatatacttgcatccccaatgtatatcttagaatatttaatctttttttttttttttttattctgcattcctggttcagtattttgatagatatgtttactgtgtcctatgtgcatctctcttttttccgtaactcgattctttatctcattctccaggttctatc

SEQ ID NO: 31933 - DNA, 369 bp, Medicago truncatula
  Intron number 1 from transcript Medtr5g010670.1 (locus Med tr5g010670) derived from phytozome v7.0 (chr-ID MtChr5; po s 2710093 to 2710461 reverse strand)
atatcaactaaggttagtcttttaaattttattgatctggatttggcatgaaaatgcattcaattttctatagatttcatgcgttgctagttttgtttgtttagttaatgattatatgcaagaaaacttgtaaaaaaatcaaataattaaggaaaacatatcatgttgtgattctattgaattatctcttcattcaattacttattttctaatatcattttcctagttaaatcaattctagtttcctcttacattatcctggctcttgtaatgttttcgaatagctgtcaagttgaattttaatacaagaaagactttcacctttttccttcacgatggggaaatgatagaaagataaaagggcaatcc

SEQ ID NO: 31934 - DNA, 858 bp, Medicago truncatula
  Intron number 1 from transcript Medtr6g059450.1 (locus Med tr6g059450) derived from phytozome v7.0 (chr-ID MtChr6; po s 10723050 to 10723907)
agctgtttggctgcggttttgaagtctgtagtggggtgggctgacaatattggtgttttctttctttaggtgttttgttactcacttgcacctgctaggtgttttttcttctattgccagttttggcctctctgtaatattggccttatgcacttcttgtgcaaggcatttaatcaaatatgttgtttcaaaaaaaaaaaacataatagggataaatggattaacttgtcttatttacaattaatcaagtggaaataattttccatagaactatcacttgaactaaagttgctagaattttgaccttgaaattgtcatgaaccatattttaaaaggatagcctcataggatattaaaatactaagaatatgtttggttgagccgttggtttccacgtttataattgttgaggttagaaacaccgaactaaacacaagctaaattagtaaatcacattattatatgaaagactttaatattgtgtctcaaatcaatcagtctaaatgtttgaactgttgaaagggaatgtgctgaagctattattttccaaggctttagatgaaacaataaggtaagtatgagtaatttggacctccacactctcctgcacatgtgattggactttcaaaaaattctctactatgtacaatatccatttattatataatgcttttgtttactttttaatcattttattgttttaatgcatttgtttacaccatatataatgagtttttttaaatacaatttattattttaatgcattggtttatacatttgcttggtctttaaatgtatttgtttacactataataatttttttgtttaccatttttttcttgttatgtatagatagat

SEQ ID NO: 31935 - DNA, 715 bp, Medicago truncatula
  Intron number 3 from transcript Medtr5g012060.1 (locus Med tr5g012060) derived from phytozome v7.0 (chr-ID MtChr5; po s 3380176 to 3380890)
cggcagcaaaatccttcgtatcctcaaagctcacggtatctctctatgctgtattgtattgttttggtttgttaggccttgtttggataaaccgtttaacaaatgataaaatagacgcaaactgtttttgtttaagttataacttgttttcacaagttattaagcccggtgaacagcctgtgcaaagtgggatacaacacagggccttggaattgaggtcccaaattgtaaaaaaaaattacatagaaatgtttaaccgtccaaattttaatgaaatatgaaattctgaacttaattatatcaataaatcccaaattattagggtccaaattcctgcatataccaatttcggtggccaaatattagaacagggactccaatttatttgggacggtactgcaagttattctggagagcttatgtaaataagctgaaaacagcttacaaacatgtcataagctttttaagttctccaaaatagtctcacaagtgcttatgtcaattgataataaactcaaataagtaaatcaaacagaccctaaatacaattataatcttcataaagttacattcaagtttagttagttttataggtaatgcataaaaaagtagataattttgaggaactaaaaacataaatataaccctttgaattcatacattgttttgtttaactgaaggacttgcacctgagattcctgaggatctgtaccat

SEQ ID NO: 31936 - DNA, 574 bp, Medicago truncatula
  Intron number 3 from transcript Medtr4g023740.1 (locus Med tr4g023740) derived from phytozome v7.0 (chr-ID MtChr4; po s 5263239 to 5263812)
ggtaggtttgatttttgtttgtttttgtaattgtaatttttcaagacctgtattatagtatttttattaatatttctataatctttgacaattttaaataggtatcgttttaaatgtactctttttggagagtatgttgaggagctgagctctttaatctcaaaatgctgttgtagccattatgttggcaaaagttaaattgtttcaaggtaataatttatgactagcaattgtgcttgtttgtttatatgaatatatatacttgattcatatacttttgaatcttaataataggaaaaccagcattgcaaaatgcattttcttccactagaatcacattcaattctaaaattggtgaaacaaggaactaaggaaaagatatatatattttttttaatataacattttttttaagttataatattattgattgatactttttattatagctttcttagtgcaaatacaaattctcctgcatcgggattgatccaattaccaaatttatctcacatacctgtaaatgaagagtttctcttacttactcctaggaccactattgaggagttaaata

SEQ ID NO: 31937 - DNA, 752 bp, Medicago truncatula
  Intron number 1 from transcript Medtr6g030990.1 (locus Med tr6g030990) derived from phytozome v7.0 (chr-ID MtChr6; po s 6983995 to 6984746)
tcatttcaagggaataaaatttgtgtatatatccacatgcggaattagtttagaaacattgaatatatgagttggttgttactcattagaattttggtcgagcttttagatgtcatagttgagtgttaccttagattctggcattcctaaatctcatagttgtgagaactgtctaaaacaaatttttattgttcttttagtccactattaaattgggtgaattttttttattctgctgcccaaatctgatgcatgttataattgttatataattgttctcatttttctaactgaaaccgtaaactaatctctacatgcacgccatacttctacacgaatatttgtaccctcaattcaagcctaaattcttttgatttttttttttttttttttacttctttcattggttttctttcatagatagacatattgaagaaacatcctgttctctcaagaagtctttcagatttttatttagctttcttgttttaatttaatattttgtattttttaacgtatgcctccaaataacaaaacgacaacatattataaatatcatttagttcaagcatgaagcataggtgtatgtatatcaaatatcaaataccgttaaatattcaaattgatttgaggataggaaacttgttttattatgttccatttccatacctaattaattttggatattcatttcatttttcaattttgtttttgaactaacatatttttattggatttgttttacaaggaaa

SEQ ID NO: 31938 - DNA, 375 bp, Medicago truncatula
  Intron number 1 from transcript Medtr4g095460.1 (locus Med tr4g095460) derived from phytozome v7.0 (chr-ID MtChr4; po s 19874120 to 19874494 reverse strand)
tctttccctcatcaccaccaccatctactttgctggtttgttcttacattactctcttacctttttagttacattcttttttccttaaaattaaaaaaaaaaaaaaaacaaaaaataactttctttcattttccaactttcaatgaaaaacaacattactttctgataactttctctttgtaacttatcacaaaagctaaagtttgtacctttctctcattctgttaatcaacaaacaaaaatgctatgaccctttaatcaaattttgattttcattcaattttcaactatttaacatttttagaattgatttagcttaatgggtcatcttatcttcttctttttcagattcacaatccttcatcggagtaaact

SEQ ID NO: 31939 - DNA, 915 bp, Medicago truncatula
  Intron number 2 from transcript Medtr4g067020.1 (locus Med tr4g067020) derived from phytozome v7.0 (chr-ID MtChr4; po s 12896876 to 12897790)
gaaatgtgagtatagccctctctcgatttctttctgtctatctaatcttttctattcctttgtactattcatgacttgttgtagttattgcatttgtacttttggctttatttgtataatcacttagttcttatgttctttcctccacccatgctgccaaaaaaattaacctgtacggaaagcatataattttgttttctacggttcaccttgcctgcatatttttggtttatattcctgaaatccgaaggaagtgtgtttgattaatgtaattgagttcattttatcattcaaatctgtatattaaggcgaaatgcgagagaatgaaaagattgtatactatatcagttaaagacctgaaattttggtccatccttgttaagttctcactacaaggctgttatcaaccttcagaacggtaaacactggctatctggctgtaatcaactctatgttctgctatcagagaaattgtgtttgattatacaaaagaccaagcactaaggactgatttatactgatattgattaaataagaaaattcagcatacaccacaatacaattcaacccaaatatttcaagatattttccatatattcttatagttaatagcagaactttcaccttttttttttatctctgtgattgtgaatgacgagagagtttttgggaatgctttacaagttatcatttctgaatcatacttccactttcatattgttaaactattaatgtctaagttattctatgctttttgcatagaactgtataacgaactgcttgacaaacttctttatggctattctataattccatggtacttatcataaaaaacatgttcttcaaaaataaaataatatttgatattttcaataatcagcaggctagcaagtttcgccatcggagaaaaaattc

SEQ ID NO: 31940 - DNA, 789 bp, Medicago truncatula
  Intron number 1 from transcript Medtr5g026640.1 (locus Med tr5g026640) derived from phytozome v7.0 (chr-ID MtChr5; po s 10760160 to 10760948 reverse strand)
gttcgcctgggaatagttcttcaggtagagctgcatgcttttccttgatctttcatttagtctcatactaagcttgctctctctttttgtttctgtttctttgattaatgatgtattatcttttcatataaaatacttctactgaaacatttgagctttcagctctatagatattcggcttacttattttgagaaaaggtggcaatttgactcctcaatcgcttttagatgaagctaaaatgataaggccatatgaaggtctatacttcatttttccgagggtgtaatggtggtaccatgaggcattttagtaatacctctatcctggactgatattcttttctatcaaaatgaagtattgaagctaaaacttttcttttcgggggtgcaatggtagtatcatgaggctttttaataatacctatatcgacctatgttgtcttcctggacctatttattacctatatttatgcatggctaatttgataaaaagaagaaattttacaagtgttttagaagagctaaggaagataaattatcctcctaaatcaatcaatagaaatagaaaagtttaaaattcaagtatacgttaattctgtttaaattgataaaatgtcgtatttgtctgatttttgttatattggcacatccctgtttggactttgattacttctagttttcccaactatatttttgacagcgtagtatatagtatagtcactcagatcaagttgtcattatttccatttttgacttctattgttttactccttatagaccaaactcaaa

SEQ ID NO: 31941 - DNA, 735 bp, Medicago truncatula
  Intron number 1 from transcript Medtr5g021170.1 (locus Med tr5g021170) derived from phytozome v7.0 (chr-ID MtChr5; po s 8039023 to 8039757)
taacactgatcaggtttttttatatacttgttttttttgtttttttgtttttgtttacttttcttttgaatgtgttgataaaataagcaattaccatttagaaccgtgattcaattagggaccctgtttggacggacagagtttattttactggcataagcacttatctgactgtttgagagagcttgtcataagctgtcttcagtttattttcaaaagctttataggagaggttatgcaaacaacttactagttcgattttattttataattcgctccaaaattacgtatatgtaagcacttactaatatataataatcatgtatgctataagcacttaattaagctatttattcaaacagagcttaagacctgtttggattggcttatttgaacttatctttcggcataagcacttgatagaccgttcggaagagctcatggaaacagcttatgatatgtccataagttgttttcaggttattttcataagctctccaggatagcatagcttatgaaaacagtttatagtttatatgaaaaagtatgactttgcttaatcttttgttattgtaataattcatacataagcatttaaatgataagcgcttatgctatacggtttattaagttgtgtatccaaacatggcctaagtatttgaaaagtagctttcttctgtgttttattttttcgattttgcaggtttctcagattcttaaatattgcaactccag

SEQ ID NO: 31942 - DNA, 577 bp, Medicago truncatula; identical to SEQ ID NO: 30679
  Intron number 1 from transcript Medtr5g071720.1 (locus Med tr5g071720) derived from phytozome v7.0 (chr-ID MtChr5; po s 25425500 to 25426076)

SEQ ID NO: 31943 - DNA, 419 bp, Medicago truncatula
  Intron number 4 from transcript Medtr4g141080.1 (locus Med tr4g141080) derived from phytozome v7.0 (chr-ID MtChr4; po s 34747446 to 34747864 reverse strand)
gtggtacgtaagaagattcagaattcatattctattctttagccctcatttttttgtttgtaaaaaatagtaaaatactaattcatttgattaattattagagttatcatagaccatgattatatagccctctcttttgtttatatcctaaaactgttttaaagttataaatcaaaatagatttacagccttatatatttcgtcgaggcttcataaaaaatatggcccctataaataatttagtgtcccaacagaaatgaatgtgttgttatcattttctcagtgctttatatcgaagcttgaaaaccataaatttatgtttctacggttaagtggcttataaggctattttctattatgctacacttttctcaaaagtatcattcctatcaattttcacacggttcaccgattgcagg

SEQ ID NO: 31944 - DNA, 599 bp, Medicago truncatula
  Intron number 1 from transcript Medtr4g107300.1 (locus Med tr4g107300) derived from phytozome v7.0 (chr-ID MtChr4; po s 23395475 to 23396073 reverse strand)
ttgaagatacctgctgctgttctcagcccatatcggtaccaagcctctttttgttagatgctttttttctttttcagtaatgtattttttaaaaatcataaatccatttcatgtttcatttttttttctagtgatcaaagtcatgcacttcccctttattctgattgaccattttggcttcactatatttgaccaatttgaatgcaatctattatgtttgaaacttcaaaaaaaattgatggataaaagtttttctcttctctctctcgttcttgatttaaatgcttttgtcattatatattgaaagtaatagaagaatggaaattggatggaagttttagggctgattcagatgattttggagaagcaatctggtttgcatctgtttattagatcttgcatgtgattgtgtagtcttcaataacactattaaatttaccatattatttcagcttgctttatgtactgcttgtaattctaaggttcaacaatgcaatttggtcattgacttgaaagttgaatgccgcatgtgtgttctgacaattacctttctttctgttacagtctcatcatttttatccgtttggttgctcttgtgt

SEQ ID NO: 31945 - DNA, 445 bp, Medicago truncatula
  Intron number 1 from transcript Medtr4g095390.1 (locus Med tr4g095390) derived from phytozome v7.0 (chr-ID MtChr4; po s 19831209 to 19831653)
gattggtatgaacaaatttgtaaaatttccttgtttgtttttttgtgatttttttattgtttgaatgtttttttagaagtagttatgtttatagtcaaatgttttaatgtttcgatgattatgattggttgactgtgtaaaaaaatattacaccgaaattgaatatgaattatagatcctataatgttatacgatatccgtgtaatctcaaaacattaaaaaatgacattcatataatgataaactcttcttctaatcattcctaccattcagagttgataaaataagtggttaagattataaaaatggtcatgagtaagcttacaaacagtatgaaaagccatgagtgtgtaaataagtacttttctacaaaagttcttattagaacaacattttcttgtactttacagaacagtacattgaatactctcctgctgctgcaaat

SEQ ID NO: 31946 - DNA, 366 bp, Medicago truncatula
  Intron number 2 from transcript Medtr5g008900.1 (locus Med tr5g008900) derived from phytozome v7.0 (chr-ID MtChr5; po s 1787853 to 1788218 reverse strand)
tctttggtcgtggtatgtttctttggatcatcatatttgagtttatctactcatataaacacttgtgagaatgttcggaatagcttatgaaaatagcttatatgaagcagttggacttaattttacattttgttataaaaatagcttatatataggcacttatatgataagagcacaagttgtaatcgattaattaagcttattgcactaaggtctagctaaagtttatactgtaattgtatacattattagtttagtttgattgcacatttaaattatatcaccatgactcttcaaattattaaagaaaattttgtttgtgtgagtgcagtagatcaccttgtaaatacagtaagtttgggacat

SEQ ID NO: 31947 - DNA, 830 bp, Medicago truncatula; identical to SEQ ID NO: 30617
  Intron number 1 from transcript Medtr4g069650.1 (locus Med tr4g069650) derived from phytozome v7.0 (chr-ID MtChr4; po s 13340319 to 13341148)

SEQ ID NO: 31948 - DNA, 268 bp, Medicago truncatula
  Intron number 1 from transcript Medtr7g021340.1 (locus Med tr7g021340) derived from phytozome v7.0 (chr-ID MtChr7; po s 5185186 to 5185453 reverse strand)
aacggagcaatttcttccatctatctgtctgcaatgtgagttcactatctttctcgagataatctcgctcccaagtagaacaatagtgataatacatgtctatttatgtttagaataaattatttgtgaatgggttttggcttagaccacaaattgtaaaattcttttttgattaataaaatttgagtttatgaagaagaaaaaataccctagaatttaacttttttttagagggaattcataattattgacgaaggtcctagcgatt

SEQ ID NO: 31949 - DNA, 432 bp, Medicago truncatula
  Intron number 3 from transcript Medtr5g093170.1 (locus Med tr5g093170) derived from phytozome v7.0 (chr-ID MtChr5; po s 36610282 to 36610713)
taactgttgccatatctgcaaccatagctacagtggtaaaattttcaagctttgaatatttttataaactagtatgtatatccctatttttattgaatttattagcacacacttttctaattctgtggaagttgtattcacaattattattattaattaatctagtactaatgaccatttttagaactgtctccgaggggatttgaactccatcacttgaggttacgagattatgttcttaccactaagccgatatctcttaaacaaaagtggtattcataaattcatgcaaataacatattaagaaaatagaagaaattgaaagtaactgcatgtgtttctatcgtgtcggacaccagacacgcttttaacctgaagtgctgttactttctactttttttgacacttgttgtgttgcaacagggtgtgtgt

SEQ ID NO: 31950 - DNA, 899 bp, Medicago truncatula
  Intron number 1 from transcript Medtr7g089530.1 (locus Med tr7g089530) derived from phytozome v7.0 (chr-ID MtChr7; po s 19718550 to 19719448 reverse strand)
ctatccctcaaggttctctcttttcatccctatcatcaccgatcatcgcttaattcttcattgtataagatctgagaatcttcaataaccgtcactctcttcaaaccaactacttttttttattggttgagttgcagttccatgcgtttctgttggtaaataatgttcatgttcatgttcacatgttttgcttgtttttgcagaatacttttctttaattcaaatttaatattattcaatgtctttccttttttcaaactagtaattcctttgcttttcatttttttttttattttttttttaattttctgctaattttagctttatatgctttcttacatatgcatgcaaggctgcgatcgcagctttgattttgcagaaaattacgaacaattgttttttattttattttaattatgaataaatgttaagacagttgatttcatgataaatatttttttttttgttgaacaggtgttaatcattattcaagttgcaaattgcaattgacggaaacttttacaccattttttcatctatctatatttttaaacctttttgtgtgagtgaagaaattgtagtgtagaccatgacactacagcttttgaaaagtcgtacaaaggggttaactttttcatcacagagtgggcccatcaaagaccctgccagtgtctgtgacttggagctttctatgcttccatttttcagatacataatgataaccatgagttaaagccaagttatgtaacactgagataatcataatgacaaatacaagagtccgagtttccgtgtatttggaatgtggtgaaagtgaaattgatgatttatgatagatatgttactcctgtttttcttttcagaaattgacttgtaaatgttttggtatttcagaggca

SEQ ID NO: 31951 - DNA, 848 bp, Medicago truncatula
  Intron number 1 from transcript Medtr4g095480.1 (locus Med tr4g095480) derived from phytozome v7.0 (chr-ID MtChr4; po s 19882673 to 19883520 reverse strand)
agaaagagcttttgattaagctcaaacaaactcaggttcgttgttttctgtgccgattttttattttgtttattttcttttttgattcatggatttgtatttcgcatgtcacattgtcaatgataatgacattgcttttgcgtgttatttttttgttttgttgagttatatagatactttgttaatggtggtggaattgaatctaatatggactgagctgaatgtgatggattttgtgaatttgttgcattttatacatgttattttcggtgaatttgtggatattttggatgtagaatgatttggggaagtctaatagagaatcaagcaaacagatggaaagaaataaaaaatagtcattttagttgttagaaagaatgcaaatggactaatgttgttgagcatttggggttgccatctttctggaagttatcttttgttcttctttcatgattgtgtaattttactgttaaatttgtgtttctctgaatgaatgtactatgttctcatttgggttagtttttaggaggaaaaacactgatgatggaaaaatataatgtttaaaaaatgagattttgaaattgggtttgtgagatcattgtaagtaatatagaccatagtgaggtaccacttggtggaattaatgttagggattgattatagttaggataaaagcacatagatacacctctgcttctcgctcttcaactatgtcataggcaaccgggtgtttgatattgctcatagcctcatacttaaagttttgatgttctttggagtgtatatcctgacatatcatcatccattttgcagaaacctgaccctgctgggctggcggaatttctgaa

SEQ ID NO: 31952 - DNA, 776 bp, Medicago truncatula
  Intron number 1 from transcript Medtr5g029110.1 (locus Med tr5g029110) derived from phytozome v7.0 (chr-ID MtChr5; po s 12098565 to 12099340 reverse strand)
aacaaggtatctttctttctttaattcaagattcgcgtctcgatgattaatttgaaaaattaaagaaacatgattatgattatgattatcaagtttagttgtgtgttttactgaccgatatgtagaaactagaaacagataataattttgagaaaaatagaagtgattaagtataatcacttatttgagctgtttatctattggcataagttgaatataattatgaaacttatttgagtttatctattggtataaattcctgagactgtttgggaggagaacttgtggttcttaagatgtgtttagtttattttttcataagttatcaaaaaatagcttataaaagcagcttattgcaattttactttattttattttttgttatagaaataatgtttataataataagcgtttgtgctataagttgcagataagttgatgcgtgatgtcgtgtttggcatgacatcagacagaattttaatctcaagtgtcattgctagatatatattttcttttgctagagttattgttgttgaagtttatttctgctgacgctgatagttttatgtaaataaataataacatttaattcgtttgaactttgttgctgcttttttctttttgtggtttgactattgttaactaaaattgggaccaagaaggcatttttggtttgtttgtatataattttgtttctggtttgattatttaaatattgaagattgattagtattattagtgttaattttttgtcacattgatttgtttgtttgcag

SEQ ID NO: 31953 - DNA, 827 bp, Medicago truncatula
  Intron number 1 from transcript Medtr4g042790.1 (locus Med tr4g042790) derived from phytozome v7.0 (chr-ID MtChr4; po s 10291361 to 10292187 reverse strand)
actttggagggagtttctactgcaattggttcaaggtaaaaattggggggaactattcaaatttcaatcttttttctgtaattaaaaattcaacattagggtttcatggggtctatataaagagggctttaggatttgtgataaccacaccgcaattacaattgcaatctcaatctttctcaatcctaagctttattcttgcaatttcactttcaattttctgcaatggctttaacttttgaaccaatttcacaaatttcttcatcaaaaccagcttggaacattaaggctagagttgttagattatggaaagtttctgatttcaacagaaacactttaccattttctattgaaatggtgttaatggattctgaggtttttatttttcacttaccattttacattcaaattatgatgttttcttaaaactgttgtttttgaataagctaaatgttattagttttaattttataagctatcaaaaattaagttttgttttatgtttagtgctaatatttgttgagatatagttaaggattatgaggttcttctttttaattttacattttcactaattttgaaccttataagtaatgatttggttttacttatgttgttgatatataacattgtcactctaaaaaggtgtgttatatgttttgtgcttatattataaagatgatgattaaagttaaagaattagtaatttttataatgaatcagaaagctattgtattatgaagaatggtgaatgttagattatggttttaactatatcttgaaaactaattctaaatttttgaactttatataggggagtaggattc

SEQ ID NO: 31954 - DNA, 678 bp, Medicago truncatula
  Intron number 4 from transcript Medtr6g005480.1 (locus Med tr6g005480) derived from phytozome v7.0 (chr-ID MtChr6; po s 337177 to 337854 reverse strand)
gagcattgttgatttcagttgagattttggcgaaggtagaatttagattttattgattgttaatttgtgttttattaatccaaattgtgcttgtttgggtttgattaatgttattttttatttagggtttagtgttatgggtttgtgatgaagaactttaattctgttttttatttcgaagctgtgtctctgttttttaaaattttcagaatttgaggttagaccttgtttgggttaacaacttatttgcagcttatgaaatatgatgtattttatgtagaagctatatgtcagtgataaaagacaaaaaaagttaaattgttttggtatgagctattagctgtgttcataagctatcttggggaacttatgaaaatgagctgaaaacaaacaacttattggaatgtttcaagttgttttcataagttctcccaaacagtctcataagacttatgctttagttgtgtgattctgttttttatttttacagattgagattttttttttctaattttttgtgttcagttttaggctatgtttggattaacagcgtaattgcagattttgaattttttctttttaattgataaattttacttaattctgcgatcttttttgtatttttttttcgtgtttcatgcagaggttgaagagcattattgatttcagtggagattt

SEQ ID NO: 31955 - DNA, 181 bp, Medicago truncatula
  Intron number 2 from transcript Medtr6g005480.1 (locus Med tr6g005480) derived from phytozome v7.0 (chr-ID MtChr6; po s 338617 to 338797 reverse strand)
gagcattttcgatttcagtggagattttcacgaaggtagaaattcgtggaagattttttgatttttttttcttttcattttgattattcgttgttaatttcgttcaattattacttaattatgcgttttttgtgtgtttgatgcagaggtggaagagcattgttggtttcagtggaggttt

SEQ ID NO: 31956 - DNA, 206 bp, Medicago truncatula
  Intron number 1 from transcript Medtr6g005480.1 (locus Med tr6g005480) derived from phytozome v7.0 (chr-ID MtChr6; po s 338771 to 338976 reverse strand)
tttcatcttccgctctcgtgaaaacagtggaagaggttcggtttcttttctttttttaattttttatttcattttgattatttgttgttaatttcgtttaattgttgcttaatcgatgaattttacttaattatgtgaattttttttgtatttttttcgtgtttgatgcagaggttgaagagcattttcgatttcagtggagattt

SEQ ID NO: 31957 - DNA, 663 bp, Medicago truncatula
  Intron number 1 from transcript Medtr7g043440.1 (locus Med tr7g043440) derived from phytozome v7.0 (chr-ID MtChr7; po s 10737521 to 10738183 reverse strand)
ttatttgtctgaaaaaacagctcaggttggctctgagtgttgtttagacaacgaacaaagaatgcttggtaccgtgttgaccaattctggtattgatgaaaattcaaattaagtttctgtgaatatgatgggaaattttgttattcaactgcctgaactacctcatcctttctaagaaattcttgccagactttagaaggttcatgtattcaacaaagtacctctgaacaactccctgtttttcgatctgactataaatcagaaaacagatgtcctcaacatgttcaaaatgaacctggagaaatgagtgatgcagtaactggccttgttgctgaagagcagacacaatctgttcctgctcaagtaactcaaactcggtgaatgagctattggatccaccttctggcgaaaagtattagtttctcaaaacaaacctggtgaaatgtttgatgcagtaactggccttgttgaagaccaaacgcaatctgttcctgctcaagtgaacacagattctgtgaactagccttccggagatgttgtgaaaaatattagttctgattgttcagaaaggaagtcctcaggtcatttgcgagtgaaacatggggataaaaaaagatcgaaattatagaagtatatattaaggttgctggggagcagtgacag

SEQ ID NO: 31958 - DNA, 506 bp, Medicago truncatula
  Intron number 2 from transcript Medtr5g021890.1 (locus Med tr5g021890) derived from phytozome v7.0 (chr-ID MtChr5; po s 8451033 to 8451538 reverse strand)
gcttgctagaggtatgccttgtgtttgtgtgtagagaagagacaatgatgcttctagctttttttataatttactaaactagcttttagtttatgttttgagtgtttctaattctggtagttattacgcttcatgcatcatccagcaaaaactataagaaaacataatattatttttatagcttgtcatatagactaaaaactagcttttagtttatatcttgagactttaatgtacatattgtcagagacccttaaggcattatggaaggttgcatttctaaagaactttgtggcttgatatcagagtagtggaaggaaacgggctggcaaaagtgggaagaactttgtgactttaattttttttttgaaggaactttgtgactttaatgttctttatcttaagtccgtcttaattaattgtgttaatgatttttattggtatgtgcttaacatatgtttgtgcatgtagacaacaaataaaaatttaaggtggttttcaacact

SEQ ID NO: 31959 - DNA, 504 bp, Medicago truncatula
  Intron number 2 from transcript Medtr5g099330.1 (locus Med tr5g099330) derived from phytozome v7.0 (chr-ID MtChr5; po s 39704440 to 39704943)
atatagtgttcattgagttctcaaaggatttacatgtaagaaattgtgtttgacctccccttttaattatgtgatttaagaacattgtttgaatttgaatatgacgtctatgatatattgggggatgaaaatgctactatatatatttgatcctaaatccacatctttgatgatgttgttcgtgtaaattttgctaactttgttattccattatatatttagtttgtttggatgtgaattgatatttacatagattttacaattatgtattataatcaatttgaagatccttttatttttttgtttgacatgaaattagctttgcagtcaaagtgaacttacttgatgccattgtgttttccattatgttactttatcatattttatgattaattatttccttttaacagttacttttgattatcataatttttctgtgattgttgatctttccttttcattgtttcagccctcctaaagcaacagggtatcctagattttgaa

SEQ ID NO: 31960 - DNA, 472 bp, Medicago truncatula
  Intron number 1 from transcript Medtr5g094370.1 (locus Med tr5g094370) derived from phytozome v7.0 (chr-ID MtChr5; po s 37324697 to 37325168)
ctgatatagcatcggagcaatgtaggaacgattactagtattttgttgagaagtgtacgtctaaatttttattagaaattcgcaaagtggttttataagattgcaattctggaataagccatatgtttttgattctattgaatataattatccaaaatcgaaatgaaaggatttactttagaacaaaactttgattccatttcctaatcggggctattgaaaggaatcttgtttggaagatgagttagagagatttaccagttcagctatttctgggaggggggctagcaaagtgaatcctgttgcgaattacattctcttcattttcattacatttttattctctcatgcttcttccttatgtttattccatctaacttattgtgaagttgtttcaaactaatgtgccttgatggtatttcttagtaacatcaatagtatctgtttgctcatttttttgcagttggtgcta

SEQ ID NO: 31961 - DNA, 915 bp, Medicago truncatula
  Intron number 2 from transcript Medtr7g040850.1 (locus Med tr7g040850) derived from phytozome v7.0 (chr-ID MtChr7; po s 10201507 to 10202421)
agttaaaatattgttggtaggaatatttattgagttaaaggatacgagagagctagcatttcatccaaaattttacttctttattcagacatggtaagaaccatggcagtaagtatattgcacaatgaacttttctgccggcgataaatatcgcagagtgtatcataattgaaaaggaactacagttaaattatgtttttagagattgagtggaacatttgcttatttattatgacttgaaccttgatttttaagttaatatctgatattttatctaatgtttttacttaggttacttatttttacgtctaaatatgatttggaaaataggttttcaaatacacacttatctcgatttgataaccatggtgagaaccactgtttatgatagttaaagttgtgaaaaaagaatccaattaggaactatttgcccttgacacatttcttagcatggaattagaattcattgggatttgtttagggatataacccttaaatctacttgaaccttagatcaactttgccatgtagtaaattgtttcaagggacggagcttgcattggtcaaattctgaatagcttaaccacactttttttaccttgaaccttgactactaaactatttttaacttttcagttgaaagttaataactttttaatattgccagcatgcaggaagaaattgctttagatttttaagattgacaaattcaaaagtacagcaggaaaatgtttatacttttctgatgcatgtccttgtatttttatgaatttgggattcataattgtgtttcaatactttttctatctcactgaagaaatttactttctcattcttgtaaattagtatctttcctcattgttcataattaattctgtaggggtgagcacttcaacctctactgctccagccgtt

SEQ ID NO: 31962 - DNA, 482 bp, Medicago truncatula
  Intron number 1 from transcript Medtr5g016950.1 (locus Med tr5g016950) derived from phytozome v7.0 (chr-ID MtChr5; po s 6038114 to 6038595)
actgtgaaagtgaggtattattattactattttctactcttcaagtttcaacctttctttttatgtattcatgtggggtacctagtttctatattttcttcataacaaagtatcttttactaattttgttagagtactatcataaaataatgacactgtttttttttttttttttttattttttattttttattttttactcaatgtcttggtttttaatgcaagcaataaaacatagtaatttattgtttgtatatgtattttggctatgtctctgactcaaattgttaactgggattgttgtgtgtcctaaaaagactataactttggttctcggtctgtttctagtgtggatctttgtttgctacattttgatttagatgaatttgtcgttttgttgtttttgttgggatttgattttagggttaaaaattgcatcttttgcaggagggtgttgaagcattgattgaagaagttccaac

SEQ ID NO: 31963 - DNA, 849 bp, Medicago truncatula
  Intron number 1 from transcript Medtr5g032270.1 (locus Med tr5g032270) derived from phytozome v7.0 (chr-ID MtChr5; po s 13015551 to 13016399)
tttcgaaactggtatggcctatttttctcttttttatgtaaattgcacttttagaagaataaatgattttaactaagtaaaagaaaatttaattattcatgtatgaatatttgtatagaattatgtgtcagaacgaggaagagttagaaaaactatatgggaaactattaaggaagacctagagattaatgtgtactatagagatgtgatatatgccagaacattgtgaattcgttcgttccatgtagttaattctacttaataggataaggcttgattgttgttgttgttgtgtccaaatgacttcggtaagctaaatttgtttggtatactatgaaattcgtcaagtatcagcaaggttcaacacaattggtaaatagctggatcatgtgtcctagatttgaactagttagtggtgtgtttgtatagaaaggtcttgtcaagagagtcaaaacacaggcgatgccttaatctcagagcggatttgtctagtctggaattgtgagatttgaaatttctgggtgattaaccatttgtcccacaataatcactcaaagatgacgactttggtttatcatggccttatcttatgtcttgcaattgcatgaggcgacatgttagatataaaaccattcacacctctttatgaaatcactgaatcacttttacttttcggataactggttaatcattgttatttgtaaccatcgcaaaaaaaatgtaataaaattataatttgttgatggttaattgattgccagataagtgcttatttgttctgatcattgaaattgttgttcaaaatctgttgcaggtacctgggaagtctaaacaagattgcttcgatag

SEQ ID NO: 31964 - DNA, 759 bp, Medicago truncatula
  Intron number 1 from transcript Medtr4g086870.1 (locus Med tr4g086870) derived from phytozome v7.0 (chr-ID MtChr4; po s 18126062 to 18126820 reverse strand)
ggatcctagcatagaactcagaggccattttgttggtaagtttatttcattcattacctgtttcatgttcaaccagtgttttaaattgtggtcatggtaacagttgtggccacgtcgtgatctttgacattgcaaagaatcgcagtaaaaacacaggcctcaatcgttgttttgttgtattttccgaaaaaatcaaaaaactgttatgttgaagcccaaatcatggttgcgaaccttttatttacaacctattaacctttattcccataagtctgtctttcatgtaaagctttttccacttttacgtgtagtaattagtcagagatttgagaagattaaaaagtagaattgaataaaaattgcatctatatataagaatattccattttttatgttttgctacctaccccctcccccaaacaggaaccaaagttctcaagcttttggaaagctagccttttagacttttcatgtataatctcaattaagtatgtaaaattccttggaatccatgtattataatttataactttattgtcctaaactgaactctgcttagtttgaagttggcacatatctctctcacacattgtgtagactctattatacacaaaaatgcatgttctgttctgttctgttacaattacttctgcctgcaattttcaacttcagcaattcacttttgaagttttaacttataattccttttttttttttttttttaaatgtgaagggcattacttgagtgcatcagctcta

SEQ ID NO: 31965 - DNA, 815 bp, Medicago truncatula
  Intron number 2 from transcript Medtr5g037220.1 (locus Med tr5g037220) derived from phytozome v7.0 (chr-ID MtChr5; po s 15629725 to 15630539 reverse strand)
gcccagtctgtattgggttttggtttgggcttaaggttttacgttttttttgcttgcttttgtatgctatttacaccattttctttgctatctgcacctgtggcctgctcatttttgtttacaaaatttctaaaaaaatcctagtggtttcttgatatattcttggtatttttagggtatctttgcatgtaaaaaagatgttaaaatggtgtgaactaattccatgtgtttttatgttttttgtatgcattttgctatgttttgttcttgacattttgatagtatgacatggataaatgatgcctaatatggtgatgaatatgcctctggaattgtgtttatttttgctgtgtttggatgtgattttatggatttcttgttttacaagtaataagcgtttatttttaggaataaagtggtaaatttctttatgtttggtgtgatactttgcttgcatgtacttccactaatttcatgtcatggcttgaaacaaaatttctttcaaaattgccatgatgtgatgattatgggttacaagcacctttaggtatcacatcaaaagttttaggtttattgccactttattacctttcctttgccattcttatacatttccttttgattatttcctactattttgtgctttatgattactaaccatttcatctcatgtgccatacatttcataagcattccaccaccctctccactctccaccctctttagtctagcatttatttttttttgcaagttttgattcatttagtgatgtaatttgttatcattggtttgtagcttggcaaagaggccataga

SEQ ID NO: 31966 - DNA, 918 bp, Medicago truncatula
  Intron number 1 from transcript Medtr5g083950.3 (locus Med tr5g083950) derived from phytozome v7.0 (chr-ID MtChr5; po s 31908715 to 31909632 reverse strand)
gaagagaagattgagtgaggaaggaaaaacaaaaccctaattttctcttttctttacccttttatactgctgacagggttttccatctcatcaaatgataggcccacgtgtgatgccaacaatgacaaacttaacgttttttgaaaaaaactaatggacgggaccagtttcgtaaacggagagatacttaagggaccaatttgagacaatttaaagttaagggaccaaattgaaatccaaaaataagttaagggaccaaaacatgtattaagccttgtttttatttctttcgtcttccttttcccatttgccctaatgtattgctttttttcttcttttctttttctcttagatgttctcttctgttgatgtaatcttaataaaaactttatcaaaccaccaaactcaatccacattggtgtcatatataatctccctttttaacggtttaaatttagaaaataaaatacatttttttaaaataaataaaaaagctccttcaaaaaaaaaaagttacttaaacttatttttttaatattttcccttcttattattttcttctctatatcaatttttccaaaaaaataatccaataaaaatgatagtcatactaagatcatataagacacaagataaggcttaaagaaagatgaagattccctaccttaaaataaaaattgaacatacatatacagtcatattatgatagtaccaacaaataaataagataatgaggttgtcattatcaatcacttacctacttacaagttgcaataataataatctaaaaataataataaataatagtttggataatgtcatgatccaaaatgaactatagacaaggcccacttcacattttttgtaagatttgaggaacaagtcaagtgttcttgtcagcctcactcaccacctcaa

SEQ ID NO: 31967 - DNA, 958 bp, Medicago truncatula
  Intron number 2 from transcript Medtr4g142340.1 (locus Med tr4g142340) derived from phytozome v7.0 (chr-ID MtChr4; po s 35392704 to 35393661)
ttgctggagatcaggctcagaatattgaccctaaggtctacctgcaatttatatctttattctttgtattcaatctgctcaactaaattaatattatgtgtgtcagtcaaatattccgagctttcagttataatatggtctttgattaaatattatgagtttcagtcatactgaaacaatgttttcttcaattacaatactactttcagcattagtttttccggcctgtattaataaaaaattgtctagtattaatgattacacagtaatttttcggtccacatgggttagtctggtggtgtaaccttgggaccttggactgtgctcatctcaaggtttcaagttcaagtttgaatcctcctaatgccaatttttgtgggctagttcatacagaactttgctctagctttaaatagggtcctaagtagacggtaggattggtcctcccagattagtaggtccctaggccggagaccgtgttttaaaatatatatatatatatatatatatatatatatatatatatatatacacttgatatttgtttaattgttgttgattagaaattaatatagataagatagatatagaagtgccaacggaagttggttcagttggtcaagagttgacacgtaaaccacaagggtgcaaagttcaactccggctgttggcgtgaggaccttgttggggggtgatttgtaaatacgtaggttagtgctctctgtctgtctctgagacatggggactgtattgacctttggaagcccccagatttcatctcactttttattacacaaaaagaagaaaatattaatatagaacttgtaatgaacaattttgggagacataaccaatgaatgaaaccaaattaaatattttgctatacgatgttgctcttgactttgtttctgagattttgattttgattttgtttttgtgggcttggatgcaggtaact

SEQ ID NO: 31968 - DNA, 955 bp, Medicago truncatula
  Intron number 1 from transcript Medtr4g158810.1 (locus Med tr4g158810) derived from phytozome v7.0 (chr-ID MtChr4; po s 39970272 to 39971226 reverse strand)
agatcagtcaggtcttaatttgttatgtttctgaatttttcttgcaatatcatctaatgtttttttagatgaatcttaaattgtttatttaatcttctttgcaatgttaattagtaataagtgtttggtgtgtttatgtatttattttgctcaaagtattttgttgaccaatgtatcaatttgacatgcataatcaaagtttagaatacatttttttttttacaaattgcttggctttttgaaaaagtatacatatttttcaagattgttttgtggacggtgctggtcagatattaaagcttttctttttcatattgaagacttttgttagctcaatctgcggaatggctaatgagctttttcttttgcatatctttatccctaatgtaaatgtgaatattttatccctccaaatgttaaagtacactttaatccataactcataaattgttcaatagcatataagtgcagtgaagtctgaaaatctttgactgtaacacaaatataatgtcatgtttggacatttggatttatctagtctagtaaaaaaaaaaaaaggtacatttcatctcatttgtgtgagcctaagttcaatccggacattaccttaaaattcccgcgtcaatggtatgccaaatagaacttattcttactctccaaagctaactatatttataaaacaccattggcgtgtattaaattaaaaataattttccaaaccttggtctccttgaatccatcgcttgttttcaatccaatgatccttcaatcattgatcattccctcccgtggtgaacatcactatgaggatgcttcataacaatagcacgacacacactaactgcctcatccattctaccttaagcttgagcacaaagtgcggttactagccttgcaaaactatgtttacagtattgtgatagggacaacactaggaaaacaattggtttgaatc

SEQ ID NO: 31969 - DNA, 430 bp, Medicago truncatula
  Intron number 2 from transcript Medtr4g134480.1 (locus Med tr4g134480) derived from phytozome v7.0 (chr-ID MtChr4; po s 32439775 to 32440204)
ctattactagttttcctctttttcataacttctctgttcaacaccccgatgcaagtttcttttctttttatatagttttcagatcaattctaatatggaccaccttcacaaatgagataatgacttaattgatagcggttggtttgattaaaataatggtaaataaatatgtagcctgtatagaatcgacattaatcaagtcattgtcttagccataaatatgagaagggtcatgaatttttatttctaaatagtattgtcgaccctttggaatttctgataattttaagttctggtccatggtggaccacatatgaagaaggtccactgtagaactcacaatagttttcattctatttctgtaatgtagtttcaacctctcttgtatactgcaggtgtactggtctcttgttctaaaggaactttctat

SEQ ID NO: 31970 - DNA, 433 bp, Medicago truncatula
  Intron number 4 from transcript Medtr4g062070.1 (locus Med tr4g062070) derived from phytozome v7.0 (chr-ID MtChr4; po s 11923572 to 11924004 reverse strand)
caaggctaagagaagaggtactttagttttgcaacttttttgatgtgtgaaatttgccattttctctttcttttcttgttttgaacaaaaaatctacttgtgcaagcctataaaagcagtctaaaaaacaactacttcaatagacttagggttaaataatcatatcctctacggccgctgtatggtgcaacaaccataacaaccattacatttagagagagaaagcttctctttataaatttaatggtcggtatgactgcagcaccatacaacctccgtaagggatctaagtacgagtgccaaatgaaaaccaaccctttcttattttccattttctttgaataatgggacacatgtattgtgttgtacttgtataacatatgtctactataattacatgatttttaattttcagattgatagaatttcaaca

SEQ ID NO: 31971 - DNA, 501 bp, Medicago truncatula
  Intron number 1 from transcript Medtr4g062070.1 (locus Med tr4g062070) derived from phytozome v7.0 (chr-ID MtChr4; po s 11925756 to 11926256 reverse strand)
cttcttctttcaactctttatatcattcatttctggtaagtataaagtttttaccaaagttcatttgagatcatcttagtttttgcaaaatgagactagctagggatttttttttatgtaaatttgtttatatttctaataaaaaaaaaaaaaaaaaaaaaagaatcttgtgataagattataattttccagtgatttttttgtttttttttctagggttggctgaatgttaaagaaagaaaacgttaggtttgaaagaaaaagataacatatttacttaaaaataggaaacgttgtaagaatctgcgagatcttcgtgtgagttactgttattctgtaaaaaagaaataatcagaaaaatcatacacaatatattttcattctatttgtttctttcatagagaaataaatatggcatattattcattatatttcttatttattgatgtatttatttttcttctaggttaagttttgtaagaaagagataatcctgaactg

SEQ ID NO: 31972 - DNA, 535 bp, Medicago truncatula; identical to SEQ ID NO: 31154
  Intron number 1 from transcript Medtr4g110200.1 (locus Med tr4g110200) derived from phytozome v7.0 (chr-ID MtChr4; po s 24879456 to 24879990 reverse strand)

SEQ ID NO: 31973 - DNA, 570 bp, Medicago truncatula
  Intron number 2 from transcript Medtr7g087540.2 (locus Med tr7g087540) derived from phytozome v7.0 (chr-ID MtChr7; po s 18799980 to 18800549 reverse strand)
aggtatatttatattcattcttctaaggaatttttatttcttctttgttacaaatgaagcataaagttgtcaaagcgaatttcttctctcaagcaatagtattatataaaagttaaaacgaagcataaaacctcgtttataattgttatacataaagatgcttgatagtgtcaattacttggattcttttgttgattattccagttgtgtacaacaaattcatttttactagcacatcataaggtaacactaattagtcatgatactatgtttacccatacataataatgttcacatcagaatgaacttgacttacacttactttaaaaatgaaggttatgacttatgagtaaacttttgtgcaatgtaatattttattttctttggttgaaacatgagtggtaatgtgattttgaagagctaaacttttgaatttcctcatcctatacagaaacataaatctctctacaaatcataataggtattttgtgtaactaatagtgatcgttttaatctttaaaaataatcttaacattccaatagtgaccgtttccacaggcaaggagcagg

SEQ ID NO: 31974 - DNA, 829 bp, Medicago truncatula
  Intron number 1 from transcript Medtr7g087540.2 (locus Med tr7g087540) derived from phytozome v7.0 (chr-ID MtChr7; po s 18801397 to 18802225 reverse strand)
cacccactacgaagatcgtgtctcgttcatctctggttagtttcattcttatccttctttcttattttctttcattttaacgcgtaataattataattattatctgttttctgttgatttttttttgttctatgatcatgcaactctatgtagcgtgtttaatttgttaatttgtgctgttattggatctttgtttgtgtagatttttttagttcaattgcatggttatattttgacttgttatttgaattcagtgaattgatgaagtttatgattggttttttaagtgatttagtgaaaattaatgtgaattttgtgattcgagtgagtgaaagaaaaaggtcatgttattttaatttattattagatttagggggatgaagatttagaggtgaattgcaagagattgatgtaactatttgcatgaaatttttattattttagtttttttccagtctaagagtataaccttataatatctcgtactgattttaatccctcttggaaatgtttgtagaatgatcattagtgttactctatttatacaaggaatgactctcattttttcattatttatttctatcgatcattttgtgcacatgcctgtgaactgtgaaacttttagtttttttctttcttcccaaaagtagtagttttcttgtagatgtatgcattgttgtgatgaaatcagacaccttttttggtcaacctaactgccctacctctcccctgcctgcataattgtttttgctacgtgcgtttgtttttcactttttggttttgtagtaaaattagaactctgatatcaactttttgatgaagacaaaag

SEQ ID NO: 31975 - DNA, 592 bp, Medicago truncatula
  Intron number 1 from transcript Medtr4g132990.1 (locus Med tr4g132990) derived from phytozome v7.0 (chr-ID MtChr4; po s 31723268 to 31723859 reverse strand)
tctctaccatttcaataccagagaagaaaaacaaagtacttatccccaaaccatatattatattttattctaatttatatctatctatacacaattatatacctaaattaatacataattttctgtataaattattaaggttaagattaaaataattcttattctctctttcttataattgttgatgtgaaaagaaagagagagatcttgttgttctacaatgtccactttgtaggtaaatctcttcaaaacaaaaattttcacttttaactctctttcatcacttcaattttcacgttaacgtttcgaatcacaccttttttcctcttttcatcgattctgattattgcttttctacctcaaacctcttttgattctcttttttccgttcaattttgcacctttttcataattgggattaggttttttcttcttctgcgtttttagttggtatttatgctcatattttttctgttggtgtttttttagggtttcattggatcatactttggggggacagttgctgaatttggaaaatttcccaattttgtagggtttggatcagagactgtgattgaatggaagactgtat

SEQ ID NO: 31976 - DNA, 955 bp, Medicago truncatula
  Intron number 2 from transcript Medtr6g093500.1 (locus Med tr6g093500) derived from phytozome v7.0 (chr-ID MtChr6; po s 20150659 to 20151613)
tccaacgctcctggtgaatccgggtcctttggttggtttgggctttgcttttttcgttttttttgctattttcctgctatctgcaccctgcttttttgctaattgaacctctgcgtgctcaattttttctctaaaaattcctaaaaaaattgttatatgtttcttaatacattttaacacttttgtgatattttccagtggtttaaaaaaatgataaaaatgtgtgtgttatttcttcttgattaattttgtgtttgatctaagtttgtgtatttttgtggtatattttctcataaaatgttggcatgtgatgtggatgattggtgtgtaatttcatggtgaatatgttgctgatcacatgtatgttttgctgattgtggatatggattttcatttctttcttgttttgtaagtaatgtgtgttttgatcaagaaataaagtgcaaaatatctttgaaaatgtgtcatgattcttggcttgaatgtgtcctatttgttcccacattatagctcaaaatcaaatccctttaacattgctataatgaggggattataggtcatgtgcattgtctaagtgtcataaccaattttaggtatattttgccactttatttcatttcattacttttttttcttctcttgctattctattcaattttgtttacctttctactatttttatgccttatgatactaaccatttcatctcacatttcattcatcccatagttttggcatcaattttctattcatttctacatcaattgggtttgtaataattttagatagattagttctttttttaattccttgcaagaccatagcatgtatttaggactcaatgtaaaggactatggacactataagtgatgtacaccgacacaagcaccgacacgcacacacgttgcatgattaccgtttagatgtatgcttaggaaacgcgatttttagacaa

SEQ ID NO: 31977 - DNA, 707 bp, Medicago truncatula
  Intron number 2 from transcript Medtr5g094050.1 (locus Med tr5g094050) derived from phytozome v7.0 (chr-ID MtChr5; po s 37071217 to 37071923)
tatcaaattttggaacttgtggtgtggagccttttgttgtctttgaactatgatgttggattatgttaaggcctttaatgccatagacttttgttggatgttcatgatgagatggattttgaaaactattccgctgctatgttttcatttataataagttgattcgatttaaatagttttattttctatttaagaattttgaaatgacgtgtagcatgcccgttgcgggattactctgatgtttatatgctatttaattgcttttgggtaacggggtgttacattgggaccggtgcaggaagatatagtgggattctgcatcttcatgcccatgctttgagggattgtgtggtccttgtactgtaccaactcccatatgtgtctatctcttattgatcaagacagatttgctttttgcttttcacctactgtactgttcataaagtaagcatgtgctgagctgaacattctgaccatcagaatgtttaatattcataatgttcttcatctgggttcatcaaggatgaatgtctgatgagtttctgggtccatccaatacgtgacatgagatttgttcaagttttatccttcaaaagttacttctccattgcatcaaaagttgcttgaaaaagtaggataaagttgattaaatctgtcttggatttggtgcaggaaagagaggatagtggatctgcaatcttcaggcc

SEQ ID NO: 31978 - DNA, 871 bp, Medicago truncatula
  Intron number 1 from transcript Medtr7g084130.1 (locus Med tr7g084130) derived from phytozome v7.0 (chr-ID MtChr7; po s 18126647 to 18127517)
ataaacgaacgatgtgagcgatgtggtaaactaaacatggaaaccttgcatgcttttcatcttagctctccccaggtgaccaaagataaaattatttatgagtctagtttataatattttgttcccctcattttcttttcctatatacattgaatttttgttcttttttaatttagacgggactgtaagaacttatagacacaaatttctgtgatgccttgtttctatcccagatgggtactttactttactttactacatggaatatttttccttccctttatttttattagttgctactctattccccaaatgatcttgtgtgtttagaatgaaatctgttataaaaatacataacacaatggaagaatacatgaaacgcaacaatagtataagtaacaaatgtaaaatatgagtactatatgaaagagataaagttgagtccttttgacaaagcttgaaaaactaagtaatatatatagagagcctatctggtgagaactaatgtttacataggaagcgtatccggtatataaatataatacattgaaggagccagagaaaaattagtatcacaataaacattcattctcacttgatacgctcccaatatataaatataatataatatatgagattagaattctaatggtaaacataaaaatttgattaaatgacaaggatgtgtattagggtaaagcttcccatgaagagtggaatgaatgaatgaattggtggaaaagtaacttgggatgaatttgacattttatattgttggtaggatggattgtcacatgtatattgcaacttcttattcttagtttgtaggttaaacatcatatatgaaggaaaacgtgttgcggagcctgca

SEQ ID NO: 31979 - DNA, 795 bp, Medicago truncatula
  Intron number 3 from transcript Medtr5g074350.1 (locus Med tr5g074350) derived from phytozome v7.0 (chr-ID MtChr5; po s 26810907 to 26811701 reverse strand)
cagcagttccctgtgataattgtggtgagtaaagctaatatgttctgggaattgtgaaaagcccgggtagaacacacacacacacactccctccggtcttaattataagcaacttttcaccttttaggttcattgaataaatgatgtatgtggtctcaataatagaccacatacatcatttattcaatgagtctaaaaagtgaaaagttgcttataatcgagaagtacctgttttattattgtgttaggaaatggtaaaacagtgtctgcatattttgattatgaaagaagacaatgcaacattttgtgtatatttcattgtaacaagagctttagtcaagaaccattttttgcttagctgtggggtggaggttaaataaaacatatgttttatagttacctatctgtgtatcaaaatagaaaaaaggcaggctgattagcaaccagcagtaatcttataaaattatttgtgaatggtagaacctaggcctgagctgtggctggctgcattacgttagggaagcttttcttccttccctctcacccttgactaattgtagagtttgatccacgatgcacaaatattactaatgaaccaaattctttggacgaggtttactaatatctaagctgtggaacatttttggggtaatatttaaaagtgtgtgccaccggtttaattaagtgttgtctgttgtgacatctgtttgtagtgaagtgagccagaacatttgttgtttcccttgacttaatgattatcctttttgatggttataatttgctgtatcaaaccag

SEQ ID NO: 31980 - DNA, 908 bp, Medicago truncatula
  Intron number 5 from transcript Medtr6g093210.1 (locus Med tr6g093210) derived from phytozome v7.0 (chr-ID MtChr6; po s 19924129 to 19925036)
ggtgcaagttgcatttcaggtatgctttttgggtctgtaaactgaagtcctatgatatgattaacttctttggtagtttgatgtaattatcataccattaacataaaagaaatggtattaatcagggatagaaggggttcagtttgttaaggaaagagtttaaagttagtaataatattaatgaagtgaaaagtcttgggtgtgcggtgccacttcaattgttatgctactcctacatactccatccgtccctttttataggactatctaacaaaaatcacagatattaaggaaaaaatgttggagtaataaatttgttagaaatgtttgtgactattattaccaaattaccctttgcgtatagatatattcaatgttaagttttcatattccaagatacattgatagaattaataaggggcatatgtggaataagagtaataaaagcatttataaatttgtagatgctcttatatttagggacaattttttttcctttataaacgatcttgtaattagggacggagcgagtatattgttattaggttaatggaacctttttgaagattgacacacacattgtcattctaggacgctttccttccaattgcagatactgcaagggaccagagagcttcacttttttaacattattttttgtctcttgcgttttcttgtatttttgtttacaatataacatatcctcctattattttttgctttcttgtgtctaataattcatatgttatccaaaaaataattttatctgatattttgttggcttccttggttaattaagagtcttctttgattgttattgcaattctttttcttcactattttgtttttgtatattacaagattcattatgcatttaaatatatttctttcttgaatctgtccagtgc

SEQ ID NO: 31981 - DNA, 502 bp, Medicago truncatula
  Intron number 2 from transcript Medtr6g009170.1 (locus Med tr6g009170) derived from phytozome v7.0 (chr-ID MtChr6; po s 1439355 to 1439856)
tggagagcagaatattgaatagcttcatcgtgagttttgtttagttgtagtttatgcaataagcttcattcaattgattttatgcccatttggtaacctaaacctgtaagccctgattatatcttgctcatttgaatatatgctcatttgatgattgaatgacagatgcagaaacaggggaagtgtgatttcttaccgagggataatcatatttactctttaaatctataaagtaagtcaaatgtgaaattaaaacattaaattatgtttaaagtatttgttgttattctctttcttttgttacggcgatttctacttgaaggctacaatatcaaatacctatttttaagtgatgacagtaaggcattttcttcatttcattaatgatctgaggtctggtctgcacttttctttattgcagtgttttaaattacagtgatacatatcctaacattaatatgctttcaattctcggaaactttgatgcagcagcagcatcgta

SEQ ID NO: 31982 - DNA, 495 bp, Medicago truncatula
  Intron number 1 from transcript Medtr7g085160.1 (locus Med tr7g085160) derived from phytozome v7.0 (chr-ID MtChr7; po s 18530623 to 18531117 reverse strand)
ccaactcgacaaccaccaggtgctgtaatgatgttttatggtacattagtccagggattcctttttcatgccaatgtgtagatattgcagaaacctgcgaatcaacctgcaaaaagtgtacttgtaaacaacctaaacagtgtagttgcgatgattacaatgaatattgtatacaatgttagatgaatgagcaagtttcattataactatgtaccatatgcatgtgtgtaatgagacaaagcccttaggttttgtttttcttttttgtgtatggaaaatgattaaataatcaaattgcgtttgtcctcttcggatattttatttaatattatatttcaaaatatattaattgtatttttatcaattacgtaataaggtttactaaatttttattgaataattagctatgatgcacaatataccatatataaatatattgtctctttctcttcatctaaagaacatctaagacattggaagttttagttgatacaa

SEQ ID NO: 31983 - DNA, 707 bp, Medicago truncatula; identical to SEQ ID NO: 30299
  Intron number 1 from transcript Medtr4g118120.1 (locus Med tr4g118120) derived from phytozome v7.0 (chr-ID MtChr4; po s 27335829 to 27336535)

SEQ ID NO: 31984 - DNA, 681 bp, Medicago truncatula
  Intron number 1 from transcript Medtr5g019410.1 (locus Med tr5g019410) derived from phytozome v7.0 (chr-ID MtChr5; po s 7225894 to 7226574)
gcaagttcttccttctcgccatttctactcttctggtaataataaattactttatttatatatttattgattcgactgattccactaattaagcctatgattcatttttgacatttgattagggggccatttgggttgacttatttttgagcttatgaaaaattgctcatgtaaataattaagcttttatgttaattcataacttctcactagcgagcattgtatcctcataagctgttttttcataatttgacaagcttatgaataatatacataaaggtcccctttggattgagcttattttgagcttatgcaaataaataagcttttatattaattcataagttctcactaacaaatattgtatcttcataagttgtttgttgataaactaccttaacaagcttatgaataataaatagaagcttatttttttgcatcagctgttttacataagctcaaaataagctcaatccaaatgggcccaaaagcttttttatttgcttaagctgctttgtattagctcaaaaataagccaatccaaacaggccctaggtccttctggatggatgtttcattcttccatttcctgattgctaagtttttcatgatgcttattaagttttttttctttatcagttcttagctgctacttcacttggttctcctgttaaaactcag

SEQ ID NO: 31985 - DNA, 765 bp, Medicago truncatula
  Intron number 3 from transcript Medtr5g019410.1 (locus Med tr5g019410) derived from phytozome v7.0 (chr-ID MtChr5; po s 7226779 to 7227543)
tggaaaagtaagcgcgtttaattacaccaattcaggtatgaatgcattctctcaaacttcgcttgtttgattttatactagtttagggttttagcgcttgtcttcctgtaacgttccttgccatgggacaatagcttcggttgttcgccacatctattttggtgcatccttatgtagaaactcatggaaagataaatagttggtttgggcttgggttcgccacatttattttcgccggagactatgttacacttgattaaaaaatgatttgtggtattgataggagcctggtgattagaaatgtaagtcaactagaaaaaataacaaaggtgaggaataattataaatttattgattgattgagagtagggtagacatgtagctgtatggagattcctctcaatcagtaactatcctaactaattggaattaacacaaatgacatatgttcaagtcttattctcctattatttgtgttaattctgagtgctctgatcgtttgcttctatgctattcagttacttagtagctttgttttagaatattcagaactatgaattttgtttacatccacaatttttcctgcattgttgccaaatgcatgagtagttattttttcgctttaatcgtttgcaataattttagcagcactagagtgcgaattggctaaaacttcgcagttcattttgaaaattgagtacatattattttctaatttgttgtatttcaggtaatattgcgaattatctaaagctgcaggaagtt

SEQ ID NO: 31986 - DNA, 780 bp, Medicago truncatula
  Intron number 2 from transcript Medtr4g157600.1 (locus Med tr4g157600) derived from phytozome v7.0 (chr-ID MtChr4; po s 39323390 to 39324169 reverse strand)
tctccttattggatcaaatcgaagacattgccaaggttcgttttttagtttcaacagtgcttgatctaattgtgtgactttggtcagttgattggaataaatatgtctgtcaaccagcatttaaactcatgctagctggtctggttttgtatgtcccgggcatgattttctttaggctacttatgcattttgtttttttgattgagcaattatatgaatttacatgactgcatttgcagtttcatcataccgtatgctccttcaattacaaaagcagaagtagtcatgtatgctttgccatttatttgccatatttgttcagtcaaggaacaagaattgtttgctgctttaaacattacaacttgtgtaaaagcacaatgcacttggagtggatataaatggaggccaataattatctgcttccgaaactaaatatcatgaattgaaatttgagtttaagattggggaaacaatgatggcaaagaactatagacgtttggtcactttgtcaaagaaactacatgacctgaatgctcaagcactgtaataagaccgcacaatttgtgtaaaaaatactgtgagaagttatctgcataaatgcatacatttgtgtgtaatgagttaatggtatttatgttgaatgttttttcatatgataaatttagcacatgctttcttttaaactactctgtttaaaactattactgttttatataggttttgattataatcatctaagttgcaggttccagctcgtattgagaaactcattgcagagaa

SEQ ID NO: 31987 - DNA, 531 bp, Medicago truncatula
  Intron number 1 from transcript Medtr4g157600.1 (locus Med tr4g157600) derived from phytozome v7.0 (chr-ID MtChr4; po s 39324274 to 39324804 reverse strand)
agttgggtagagatatgatatatgataaaacatcatcgcttcgtttgactgatatacccaagcccacttaatgagataatgcttggttgctgttgctgttgctgtatttgatcaaatattttattgattttgtatgatcttcattataacaatataaaggcactttctgttaatgtcttatatgattaaatacaaggctgacatataggaaacaatgaaacaatcttagttgggagttcttgcattttaccaaactaaagtcgtgatggatattttatgtcgatatttaatttaacaaaaatctaattaactgtaatcagaactattttggttacaaaaatatcaaacatttattggtttcaaattccaattataactggatttcagtagccacttcctcctcctttcatcttgtttaaatcttgagtgttgctgaattagaactgtctctttatattataaattacagttttctaaatattttgtttatctccagatcttgaggctttttagtgaatccactgaaagtat

SEQ ID NO: 31988 - DNA, 682 bp, Medicago truncatula
  Intron number 1 from transcript Medtr5g010610.1 (locus Med tr5g010610) derived from phytozome v7.0 (chr-ID MtChr5; po s 2680835 to 2681516 reverse strand)
gttaccaccaagggtgagaggaggaaggggtctttataatagtgggtggatcctctcaattgtttattaaggttgtagtctctatagtgtgtaagctggtggatgtaatctagtttcttctattctgatttgactctctgcattttgtgtgtatttgagttagggcagcccttgaacgcttcatattatatttatataaataaaaatcctctgctgcttcaaaaaaaataaaaaaattaggcctctggaacttttgtttctcccaaaaattagcataacatggttgtctgagattcacatgattcgatcctacaaagaaaggttgtgtgtgttttgtgaaatgtgatgatggactatgaaagtgttggggcacaggaaatggttttattagttttttgtaaaaccgataaaggaaagatttgtaagtttaagcaaaccctctcaccttaaaatctgcaacagtgcatgtatgtattatcaaatagtagtactttttttaaggaggcttgatcttcaaatttcttttatatctttgttttctttcttgattatatgggtatgttacccttttcaatgggttttgcagattgaaaaattgaatatagtttcttatttttataattatttgactgcttttccataatcgcgactgaatattaaactttggctataggattttcag

SEQ ID NO: 31989 - DNA, 756 bp, Medicago truncatula
  Intron number 1 from transcript Medtr5g048620.1 (locus Med tr5g048620) derived from phytozome v7.0 (chr-ID MtChr5; po s 20573533 to 20574288 reverse strand)
agcaatatactcaacaaagtcgttgtagtatagtggtaagtattcctgcctgtcatgcgggtgacccgggtttgatccccgacagcggcgtgttttttttggttgttttcacgaacaatctattttaatgcacggttaatcactttgcgtgccaagaaacaacagtcaaaggcttagagaattgttgttgacacattgcataaggctgaggcacacaaataaaatacgtttttgccccatcggcagttaactgtcaagaaattcaataaccaactgcagttaactgccgaggaaaacatctgtagttaactgccgaaattggttgtaagaacagaacaaatataggagtttccaaaactccattgttgcggttttcattctcttaggtgccattttctgtcattccaagccaatttcaatcacaaaaacaagtaaattttttgaatcttattgcattgttgttttgtgatcgaattctttgttttttttttattattaaatttcgattatataggttcgatatataggttttattgattttatgattttatgatatgttatgatagtttaggttagaattgttagagaacttttattgaattgttaggtttaggttttgatgaataggtgtagaattgtttaagtttaggtgtaggttttgatgatagtttaggtttaggtttagtttttgattttacgattttatggcattgttgtttagttaggttttgatcgccatttttttttaatgtagat

SEQ ID NO: 31990 - DNA, 705 bp, Medicago truncatula
  Intron number 1 from transcript Medtr4g096580.1 (locus Med tr4g096580) derived from phytozome v7.0 (chr-ID MtChr4; po s 20367120 to 20367824 reverse strand)
ttttcaagagttgtttgggatttatttattttaatagggaataagatctgtttggcgtgatttaaatgctttggatctggaaattagtaaataatatcaacatgaccttttaacaaaccattggttctggtgcatgaaatctctaatgcttgtgtgtatattagtgtggttttctgtaagtttaacttgtcagttcgtgcagaggagatcttggtgtgtcacatacaaccataaattaaagagatatcctaccaaaaataaataaataaattaaagagaaataattttttcgacatcaagattttgaagttgaagaatatgctgttctttggtttttgtatgtatttttgaaaggcaagagagatatatagataaacacatacgatgtcagtattttgatgttcaaacaagataatggtcatgctaacaagtgcccgcggcaggtgcttgttaaggtaaccaaaattagtagctttacattggaaacaacaatttttaaactttttacaagctgacttgaccactttttaccacttttcaacatcatttttctatttttgcttccttatccaatgccctaagggcactttttagcatttcccataatataattggattaaattattgttgcatattggaaggagagggttttactttatacaatttcatgcttattgattgttatactttttattgggacagggg

SEQ ID NO: 31991 - DNA, 925 bp, Medicago truncatula
  Intron number 2 from transcript Medtr4g110780.1 (locus Med tr4g110780) derived from phytozome v7.0 (chr-ID MtChr4; po s 25219482 to 25220406 reverse strand)
ctgcttcctcccacccttccatctcgaaggtaactcactcacttcacctctttcagttacttatatgttctggaaccatgcaatttagttacttaatttaaattactatgagctcgagtttccttaattaaggtattcaaatgaagtcttagttagttgtaattggtgaaattggattcactgcagtcgggaatttcctgcattcacgcagtcccaatatacttggtcaacctatttaagaaaaatgtagatttcattttttgttttataatttacaataccaagtttgaatctggactgtttgatcttgattgaatgatcaccaccgtcccaaatgagtgaatttgtgaagaaatgattgttagggacctggattgcgaagttgatacattgatttgactttagattcattgatttctaatactgaggtttattaaccaatcatttgggctcagttggttaatgagctccaccaaaggacgaattgttcaggtgaactgagtttgattcctgagtgaaacaattctttgttaggctatacttacctcatggccgaactctagattatcaggggccctttccctaggaactggagggttaacaccacaaaataaaactaatgctgaagtttattattattattattgctgatgtttttttggtaaattattatgttagttagtattatgtttttattgggtatagttgctaatgtgctcaaaatgattgaactttttattttgaacttgaaatgataaaaagaggaaaagaaaatgtacatgctgtagttgagaaagggtggagattgtgtatgtgcagatatgtgttggaaagggagatttaatttgggagttttcatagtttgcttgggtatgctgcttgtggtgtaggtgctcgtggcggattcagatacattcaagaacca

SEQ ID NO: 31992 - DNA, 947 bp, Medicago truncatula
  Intron number 1 from transcript Medtr4g023370.1 (locus Med tr4g023370) derived from phytozome v7.0 (chr-ID MtChr4; po s 4981422 to 4982368 reverse strand)
aaattctcgacttcgaacgcgacaactgcgatctggtaccttattttttcattcatattaatattttaattctaaattgctttcgccacggttttagttacgctgcaaacttctacattgcctatgcatcgtgattttaaattgcgattgcagtcgatgctgtctcatgtgtttgtgaaaatctctaaaacctttattttatggtcataattgccgttgcagaacacagtttagaataatgattaatatctttgtacacaagagattaatgatgttattttttcttctacataatttctgatgattaatggtttagttaattaataccaatcctcatcaatctttcataatttattcatagttttggctcctatgcattacaattaggctattttgacccataacaaaataaattacaactcaacccctaaagtattgtccttttgcatttttgactttccaacatataagtggcacctcaattaagtaaacatatttaaatttttaattaaaaataaataaaaagctaaaccagcaacaaataaatgaaaggaatatggaagaaacatccaaaaattaaagcatttgattttgatgaatctgtttttcttttctggctttcttttgaaaagctaaaccagcaacaacaaaacaacatgagaaattgtgtttgttttctcagcaccatcaccaccaagattcttcttcttgttgtctactactactacttggacggagcctttgttgttcttcttatatgttactctttcgaacaacaacaatgaaagaagaagcagctccttccatttttcgactgcgtttagcggtggtttgttgcttttccttcttcgctaactcctccgctccctccgttgcgtttgttctctgtttctttctagaataataataaaggataagaggtttgttaatcgtcgtcactgtgtttt

SEQ ID NO: 31993 - DNA, 890 bp, Medicago truncatula
  Intron number 1 from transcript Medtr5g046960.2 (locus Med tr5g046960) derived from phytozome v7.0 (chr-ID MtChr5; po s 19787592 to 19788481)
aaggttatgtttttaattttgttatttttgtctcttttgttgtttttttaatgggtttgtgttttttttatgttttttatgctgacattgttctagatctgtttattgttgtgatttgggtttgaaatgtgtgttaagatgtaaaagatttgatttttagatttgggtatttattatattgtttatagatcaatcattttctagattggataaatttaaatttaattactattttattttaatttgtttgaattaaattagattagactattaattgtttattgatgtgtcattgtgttggatttctgtgttacttgtttgatttgatgcttagataggaaagaaaaatggatcttttaaattgagaaatttggtaaaatatgttatcttcaatattggtaagaaattcaacagttgatgttatgttatgtgtacattcataataactaatcaattatggatgtgttggaacatttccctttgattgcgacgttgaaattgagattatgtacttaacttttaaagtaaattgttcaattttaagaagctaattcaacaaaaattatgatgtgaattatgtttggaaacagaaatgacttaccaaagtgatgtcatggacccaaattcgccagtctattattaaactcgtgtttctgccttgtctggagaagattaatttgttaaaagttttgttttgttcaattttttctgatttaggactggggtaaagaaaatttgatttgtactcgatgataattgataatgtatattacctgaacttaattattgcataatacacagcacctggaagttatttgatgttgcaaactgtttatagttttcaaataatattgtcgacccttctgaaaatttgtattcaatatgcagaa

SEQ ID NO: 31994 - DNA, 655 bp, Medicago truncatula
  Intron number 1 from transcript Medtr4g133070.1 (locus Med tr4g133070) derived from phytozome v7.0 (chr-ID MtChr4; po s 31753347 to 31754001 reverse strand)
ggagtacccctgtacagtacaaggccggccctagggtttattagggttatttatagtacacatcaaggttcaaagaatgcaaacattcaatttactttttttttttttattttttttattttaagaaattcaattacttgttatatgtaatacttatgatttataataatatggggcttaatacatacgcatgtcccttaatttattttttcttctcacttcagtcccttaacttttaaatgtgtcaatttggtcctgtaagttctcttccgtttacccagttgatcctttctgttaactttttgaaaaaaaaacgttaaactctgcataagtggctgtccacgttggccaatcacttgaggacatggcaaatcactatcagcaatataaaaggggatgaaatgtcaaaaattagggttttattgatctcattcctccttctctcttcttctccatcgtgagtctatctatcatagccaaaaccttcactcttgttcttcttctttcatgacccagaatccagaaaaggcttaaccaagcatcaccttcacctgaatgtcgaaccagacatcaaaaacacagtgggttcacgagtagtcttatggatctgttggatctagtttgagagaaaaaccaaaataagaagttctaggtg

SEQ ID NO: 31995 - DNA, 253 bp, Medicago truncatula
  Intron number 1 from transcript Medtr5g103070.1 (locus Med tr5g103070) derived from phytozome v7.0 (chr-ID MtChr5; po s 41279947 to 41280199 reverse strand)
agagctatacactcgacgagttccattagactacagtatgccatttttgagttttattgtaaacagatagtagacgatatgcacaaaaataaattcaatagtcaagaatatgattaccttattagtaagagcaaaaatttcctttgtttgtctaacagctatgttgttttttttttcttggcaaccaacaaatggtagtgttcactctctaactagagcattgaagtgttttaaaaatttgtttcaagtggtt

SEQ ID NO: 31996 - DNA, 296 bp, Medicago truncatula
  Intron number 2 from transcript Medtr5g017880.1 (locus Med tr5g017880) derived from phytozome v7.0 (chr-ID MtChr5; po s 6482543 to 6482838 reverse strand)
caaggtttctttgacttcttgtgttgcagcttctggtgaattctttgaattagatttcaatttcaagtattattagcaacaatatactattacagtcaattatgtaatgggggtttcttctatttcctcaaccatttctctattaattagtttattatataaagttgtggttttagttattgagacttgtagaacattatgtttttcctttatttttgggtccctttccaaactctgttgtcagtgttgtgttgtgtacagttacggaggatcctgttgctattctatagtaaggc

SEQ ID NO: 31997 - DNA, 844 bp, Medicago truncatula
  Intron number 2 from transcript Medtr4g096150.1 (locus Med tr4g096150) derived from phytozome v7.0 (chr-ID MtChr4; po s 20151444 to 20152287 reverse strand)
cagccaaatctggcggtggcaaacagaagaagaaggttcgattttctcctttttaagtaatgaatactgaattacttagatttgttttataagtaatgaattttgagatttgattcattgtttgatgctgctcctgtcaatcaattatatgggtctgtttggattgaattatttgagtttatctacttacataagcttataacatttttcgtaagctgtttttaactcattttcagaagttctccaagatagcttatttaaataggtcatgcaaaaacagttaaattagatttttggcctttttggatcaacagctcatatcacatgcacttgtaataatcacttatgtataagcagctatttttatagcaaatggtaattttttttttgtgtgtatgctataagttgtctttattggagaacttatgatagtaagatgaaaaaagctcttgaaagttgtcataaattgttttcataaattcttccaagcagtctcacaaagttatgatagtgggtaagctcaaatgaataaacccaaacatcctttataagtagattatacaaaatcatgataattaataagtgcttatgctataagctgttttatccaaacagggcctttatacattctggtaaaggttagtttttgcaaaatgattgctttttaattttaaacaatctctttggaaaccgaaggaaaattctttgttttctaatgctaatttaaaaattaaagatgcaaatttttttgatttaaacaatgtgatttggtagagtgatattaagggtcattttttgtgttttaacagaagtggagcaagggaaagcaaaaggagaaggtgaa

SEQ ID NO: 31998 - DNA, 790 bp, Medicago truncatula
  Intron number 1 from transcript Medtr6g086400.1 (locus Med tr6g086400) derived from phytozome v7.0 (chr-ID MtChr6; po s 17628290 to 17629079 reverse strand)
gctgcaaaaagataacgatacttcatattggtattttctttcttttctttttgcaagcttaagtactaaaaagatttcttaatttggaaatatatatatatatatatatatatatatatatatatatatatatgctaattaaataagtaattagatttaacataggttgtattttcatttatgtttgatccttccatttccatagaaaaaatatattaatatttttctaattagtttttttctttttgtcttttgagtttggtatatatatatatattaaatttcaaattggtttttactttcttctactagctagctaaagaactaagtatatcattttgaaaatgggtttctagtacctcttaagaactaattattcatgctttataatgagtttcaagtaccctttaatataagttttgcttatagataaaaatatcaattaatttatatatatatatatatatatatatatatattttttttttagaatataggtagtattttttttagtagcaaaaaaatatttacttccataagaagaaaaaaaattcttaaatttatatttgtagggcttatgtatagttaaatttcatatgggtcttttttccttttgctagctaaattactaagtggatactttaatttagaaacacttttttctttgaagggtagaaacacatatttattaggcctttatatataggggatatgtactttaatttttaattgctcattccataagaaaaaaaacatgacactaatttttctttttccgatttaggtttac

SEQ ID NO: 31999 - DNA, 905 bp, Medicago truncatula
  Intron number 1 from transcript Medtr5g068510.1 (locus Med tr5g068510) derived from phytozome v7.0 (chr-ID MtChr5; po s 24517932 to 24518836 reverse strand)
gattcttccactgccaccaacaatcaggtactaagttaattacttcaaaacaaacaaacccacagtttttttttatcttttcaatgataaaaatttgattttttatttcatttcattttttatttctattggtgtatctttgaacttgtgttcttttttaggatttgattagtcataccatattttgagcttgtttgataacattctcatatgtcaaaagatgacatttttttatcagacttgtagtgtttattttactaacttgtagattattttgataagctaagtgtatattggttctgcagcgacaaaatggatttttagtgaattgattctgactaaaaaaattgatttatgattggatacatttatgtaaggttacttgaatagtgagttaaactataaatttgtttataaaattcaattctataatcaaaagctacaaatcccagcttcaagaacaatcaattcttattcacccacataaaacaagtagaatcaattttggaggcaaaatcagcaaacatgtaagactcaatttttgtccctctagaagtgaaaccaaacatacaataattcaattagcttatatagcttatcattttttatcttcattatactctctcattttacttgaaaaaataattaaatattaattaagcataagtttttatgtcatttcatatttataagctagttcaatctctaattttatcaaaacgttgcaaattcaatcggctaatttatccgctataagcttttaagctcatttgcggtaaactagcttatcagctatccattatttttgccaaacagagccttagcatctgagattctgagtatatcatatggatttttgacaatatgcaggagaagtatagaaaaagtggcaacaacaacatcag

SEQ ID NO: 32000 - DNA, 753 bp, Medicago truncatula
  Intron number 1 from transcript Medtr5g017610.1 (locus Med tr5g017610) derived from phytozome v7.0 (chr-ID MtChr5; po s 6313168 to 6313920)
aagacttacgggcaaggtttcaataaatgtccaagacatgtttggttttcttagtgctcaaatggacctattattttctaaaagcatatacggtatttccattttatgggttggatggatatgatatgagagtcaggactgttattttttctttaggaccccccctcacattttctaaagtaaaggactttttgcatctttttcttcttttaattgtttcaaaagtcatgtgaaaaattatgattgcatgcacaaatgatcacaaattagatgtgggtctatatactctttttacgttgcagcaaatgtttttgaaaattgaaactttttcatcttacagacctttatcgtattgatcacatgatgccttgtgtcattcatgaagtggaattgtgatctacttcattttttttttttaagagagggattgactacattatcatggtaaacgttgcagataaattaaaataataagtattatcaagagaaaaaaattaagtttaaaataatgttactaaattgattattcgtgggcagtggcggagccaggaaatttatagagcttgagcaaaataaaataatgataagttttacctacggaaaaaaccgtaggtaaaggtggaaaacatgtcgtgacagcatttgacactgataaacgaatttagctacataaatttttcttatattgacggattttggccgtcacaaaaattcaaatttgttgtaaatttcttgtagcgatacaaagaaagt

SEQ ID NO: 32001 - DNA, 817 bp, Medicago truncatula
  Intron number 2 from transcript Medtr5g016930.1 (locus Med tr5g016930) derived from phytozome v7.0 (chr-ID MtChr5; po s 6026107 to 6026923 reverse strand)
ttgaaattggcgactcgcaaggaactattggtaagttttattttttcttctctaaattttaaggtttctcctcccactttgtgtttagtttcttaacttaaatcataattattctatgagagtaataagaagattataagtgaatagatgattgtttgtagcaatggaagacattaacaaacatattgaggaggactcgcttcttgcatttgagacgcttcttactggagtgcaaagttattccattagaactttacttcaagaattgaagacttatggactcatcatcagaccttgaccatcttgtatctaattacgagtcaaaaattgaagtcgatttctctttttcatggattgaatcaacatcgaggactattaccttctgatgtgaaggagtttgttgagatagtgcagaatttcttcaataacaacattatcagacaagacagttatcaacaagtactaaggaagcacaaccaacttctttattcgaaaactgatattatgaacaagcttaggagtgcaaagagtacactaacccaaattgacagtgaatcttcaactacaaatgctcagatacacaaactctctttacaaattgatgatcttgtgaaacaaagagatgatttgaaatcagtagtgaacaaatgtgatgttcagaaggagaggttgatggctaaatgcactgaatgggcacaacaaagtaaagagttactttctgattgtgcttccttagtacttgttgagaagtgtcctgtttgataatgttgtcattgaagaagttctgcactatctcaacaaactccttcacatcaga

SEQ ID NO: 32002 - DNA, 747 bp, Medicago truncatula
  Intron number 1 from transcript Medtr5g016930.1 (locus Med tr5g016930) derived from phytozome v7.0 (chr-ID MtChr5; po s 6026987 to 6027733 reverse strand)
tgtcaatctcagagcgtcaacaccgctattaacttgtatgtctctcttcctctttctctttctctaattttctctttttcccaattcttaaaccctaaacctaattttattcaattcaaatttgggggttttgtttttaatcaaatgattattcaatccacagttttgtaatgttgctatagttatgaattgattataataacttctttcttgctgttaatttctgttttcatttattaaagtaattcgttttttccttcttctttgaattaatgaatttgagtctttgaatgttgattaataataatgatgatgataaagggttccaagaatctttgagacttttttaattttggataaaaaaaggaaaaagaaaaattgaagaggaagattttaattgtgacaatggagtgttgttagatacgcttttagtacaaaatattgtggcgctataacattgttgcgtagcggaattcagtatatatatgattgttaaaattcggccacgattaagtggtatagcgctgttatagctgttattcaacaacattgattgttactttttaatgttacgatttaacttttagcattaatgagctgaggtttaagctggtgaagtgaaattcaaataggggctctgttattgagtagatttgtcttctttgattttctttctcatgttcatcctgaattgtttattaatttgatcttatttgtttataaatttgaattgctaggaagttggtg

SEQ ID NO: 32003 - DNA, 664 bp, Medicago truncatula
  Intron number 1 from transcript Medtr4g062270.1 (locus Med tr4g062270) derived from phytozome v7.0 (chr-ID MtChr4; po s 12017276 to 12017939)
cttatactcacgaagccaactacactaagatacatgtatgatacaaactggaaaaattttctttagatatttattgtttgttacatctgaaattgatgaaaatacctccaacaacaattaactattgttcacttgagaacagtagttaataactgttttcaacaacgtcaattaactaccgttcacatgaacgaactagcagaaaaatcatattgatgtgttaatttttggtgattaacaatgtcggcctccctcacaaaaatttacagctttgatgtgatgttccttgaatatttcctcagccatccaaataagatgtgaatacccttcgtaccatcacacacacctctagaattagggttcacatcaaggaattatgttagaagaacagcatattgctcttgggaaattttagtctaatgggtgaccaacttaccatgaatagacaagtgaagaagacatgacatatcatctagtgtgatggtcatctaaccaactagcaagtgaaagttgttggtctcctgataccaccactcagtcatattcgtaatttcataaataagaccaagatatttaaaataattgtacttacttctctcatccaaattttggcggtaatgtgatgataggattgtcagccggttgcagtgttggtggtaggtta

SEQ ID NO: 32004 - DNA, 890 bp, Medicago truncatula
  Intron number 1 from transcript Medtr4g143460.1 (locus Med tr4g143460) derived from phytozome v7.0 (chr-ID MtChr4; po s 35920797 to 35921686)
atagcatacaggttcctcttctctctttgtttgaaacataatttgttttttgttatcaaccatgtccatttgctatcttatgtgttggaatcaataagctgttatagttgactaggtagaggaggacctagaaaaactataaagagaaactattaggaaagatctagagattaatgagttggatagaaataagaaactatttggtagaagattatggcgtcgtttgatccatgtggccaaccccacttagtgggataaagcttggtttttgttgttgttgtagttgtagttgacttaggcctgtttgaatcgacttatttgaacttatctactgccataaacgcttgtgagattgaatgagagaacttaggaaaacagcttaagatctgtccctaagcgctcatcagcttattttcataagctcttctggataatttatggaaatagctgatagcctatatgaaagaagtttgactttatttgatcttgtgctataaaaatagtttaaacataagcaatgcttagttaatctgtttatccaaacaggggtttaatgttacattcctttccttggattcaagtgtgctccaactatgaagttctatagtctaattttatcgtatgtgtttatttatcacatgtaaaacactgctaatatagtttattttgactcaaacacagttaatatagttacttattgaaataatatcattttatcggctgatctctatcttactctcatctatgaattatttgcttataccatgtttaagatgtcagaaaaaaaaatgtttcaatttactaaactgtaatatgattttgttatgtttataccttcatgatatttagtcaacatgatctttttgcagatagattggggtgaagcaagc

SEQ ID NO: 32005 - DNA, 340 bp, Medicago truncatula
  Intron number 1 from transcript Medtr7g026840.1 (locus Med tr7g026840) derived from phytozome v7.0 (chr-ID MtChr7; po s 6956418 to 6956757)
ccaggcttcctctaacccatccaatactgtctttggtaacttatcctcttttactcctgcctggattataaactactttagttagtattatttctctgctgcgtttttggcctatagagcacatgcaaatgacatggcaccgacacttacacgtatacattaagtattttaacgttgcttcatgcctcggtgtcatgtttgtattggactggacattgacatgtgttaattattgcacatgcctttgatgtaaagtgcaagtgcttcgtaacttttagctgaagaaaacaaaatatatgttaccgctatttttatttatttgcagatgtaaaaaggttga

SEQ ID NO: 32006 - DNA, 713 bp, Medicago truncatula
  Intron number 3 from transcript Medtr4g159360.1 (locus Med tr4g159360) derived from phytozome v7.0 (chr-ID MtChr4; po s 40198793 to 40199505)
tgaagactcacattttgttattgaactcacatacagtaaggctcgttttttatacatatttcaataagcatttctacagaaataaggtcctatttgaataaacaattaagttaagtgcttatgtatgacctatttcgataaataaaaataaaatgaagtcaaacagttttcatatcagttatatcttggtttaataagctgtcctaaagagttcatgaaaataagttgaaaatagctaatgaacatgtcataagttgttttcataagctgttacaaccagtctcacaaatgcttatgttagtagataagatcaaataagtcaatccaaacaggtcctaaatgctaaaccaggtttgatatataactttgagttctttaaacaatgactttttgtataagttcaaattagcttttgcatctcaatattttcaatagctctctcgtttaacttcttcattaacatatagtataagcttataaatactttttctttaatgaagaaccataaacttaattggattgagaaggttctgtaagttaaaagctaatccaaattgacgtatgggttttgactatgttgacattcctcttaagatgttagaattattaagaatttagactttatgaagtaggtttttcatgcttgtgcaaagaaagcttctaattagtatttatttttcatttaacaataacagattacggagttgataaat

SEQ ID NO: 32007 - DNA, 801 bp, Medicago truncatula
  Intron number 2 from transcript Medtr4g108060.1 (locus Med tr4g108060) derived from phytozome v7.0 (chr-ID MtChr4; po s 23798107 to 23798907 reverse strand)
gttgagcaaggtttaccattattggtaatttgtttacttttattttagtctctgttgtgtttatttatgtttaataacgtcctttgcccaatttttttttttttttgtgggagggacaatatttaatgttctaagaccccgtttggacaattaacttaattaagcacttatcatataagtgcttatgtatatgttagttctataacaaaaaataaaataaatcaaactgttttcatataagctataagttgttttcataagctaccttagagagattatggaaataagctgaaaacagcttacagacatgtcatatgctgttcttataagctctctcgatcagtctcacaagtggttatgcctgtagataaaatcaaataatccaatcaaacaagaccatcatactgttgcataaaaatgtatttcatgctctatggtgccatgttttttctgattgaagatgctagattctattttctaatttcttaacaagttatcgtaagtcaaattgttcatgtaataatcattacacctttgtaggagaattatgcttttggatatcaaatttagaactcgtccacaatgaaattatctacaaacacttcttcaatagttgacaatgagccaagtggttcccatggcaagccaaatgtggtccattgacatgtttccttctttatgcatgtcttgtatgtatataataatatataaagttctcaaaaaaaatctctgtactttcttatcagtgaatcagtatacatgacaggttcacggagaggttacaaatccagaagttgatat

SEQ ID NO: 32008 - DNA, 992 bp, Medicago truncatula
  Intron number 1 from transcript Medtr4g080150.1 (locus Med tr4g080150) derived from phytozome v7.0 (chr-ID MtChr4; po s 16389526 to 16390517)
gattctccgttctcgactccactcactcaatcattgtaagtcatcatcgattcttttactctatttcttgttattcttttcaatttattccaattcaattcgatcataacagtactcaattaggttaaattttaggttagattcaaccttttgttcattcgttatagctaggttttaatcattttgtatccaaataaagggaatgagagtttactcttccatgaaactatttgatatgaagataattaggaaactgagattagttatgatttggatttgattattgtttgtttgattgattgaaggtaattcgtaagaattagtgaaaatttagaacacatttatcttatctcatgtgaaaactaaggccctctttggataaataacttatttgcaggttatagcataagcccttatcatgacaagcgtttatgtataagctacttctattggaaaataaagttaaattgttttagtataagctattttcatgaaacaacatcttgcaaaacttatgaaaataagctgaaaactgcttgttttcgtaagttctcccaaattgtctcacaaacttatgccagtagataagctcaaagtaagtcaatccaaagaggctttgcgttgtttttattagttctttcaaatgctcccatgctttacaactaggccatatatgatggaaaatatattcgttttcatgcatagtaaagtactagtaaatgggagtgtgtataaaacaccaagtaacaaattgatcttttgaacagtttgtttattcaattattcattattttcctcataattttcccacatttatacggacctttacctttagcaaacatttttgaatgtctatgttgtgttgcctaaactagagcaccaaatagcaattactgagtcgttcccgatgcatgcttttttttcttcccataaagtagtgagataaatctaacttagccgaatctgaacttgttttcttcaggctagcttct

SEQ ID NO: 32009 - DNA, 320 bp, Medicago truncatula
  Intron number 3 from transcript Medtr4g160220.1 (locus Med tr4g160220) derived from phytozome v7.0 (chr-ID MtChr4; po s 40552775 to 40553094 reverse strand)
tggaatttgttacacccatccagaaaaacttccaggtttattaattaattaattctcattatttcaattactacaaacaattaatgaaatatatatttaatcataaatttaaatttaaattctcagttaggtttttttttttttatatatatatgtcgacactagctaagaaaatagcttcttagatatttatttattattatatttataagaaataaacttgagcaagagggtttaatttgtcttatatataatatagttcacctaattaagtcacctaactttgattttggcaatgaatttttcaggagtgacaagag

SEQ ID NO: 32010 - DNA, 675 bp, Medicago truncatula
  Intron number 1 from transcript Medtr4g079850.1 (locus Med tr4g079850) derived from phytozome v7.0 (chr-ID MtChr4; po s 16179010 to 16179684)
gtattttctgtaaagaacaaggaaaaggaagagaggtagaaccaatttttattcttgtgataaaagtaaattagtcagtttttaaaagtaaaccttttctcactcggtggacaacttcttctccctatttaaaaggtaatttatatgtactaattaattaataataatgataataacaaaactaaatgagaagtttatggaaaaacctaacgtacacaagttactgagagaatataccaagtcaaattcatttagcacacttaaaacacattgaacataattaaagtatagctaatatcacctattaaataggtagattatttcaaaaaaagttacacatgttggtaaaatggcaacgtggtgttctatcaaaatgagcttcttatgcatataagtcaacaaagttaattttctcaataaaattagttaaaccatttatttataatgaaatagtaaaaaaataaattaaacatttaactctagagtaactaaatccctgattttgatacacaatcactatgtgcagaatatagacatgaacatggggtccattggagttttttatgttcataaccataaattgaatctagagcattgtcttgaagtttttcacgtagaaaagatgcctacctactcacagattcttctattacacaaaactccaagcttcttctg

SEQ ID NO: 32011 - DNA, 702 bp, Medicago truncatula
  Intron number 3 from transcript Medtr5g096680.1 (locus Med tr5g096680) derived from phytozome v7.0 (chr-ID MtChr5; po s 38463158 to 38463859)
tgagcagtttccgtgttcagaagcagacatctttcacgttttcaaggtatcatcatcaattacactatgcaaatggaaaattaaagaaaacggaatcttgttaattgaggattgaagtacaagcactaatgtgattatattgactaagcctactaaatcataatcaagaaaaaccagaatcagatatgtcctaatagttacagatacaactaaataagtactgagaatactaaattggtgccaatcacatatttacaacactctcctcaagcaggtgattggatgctaagcattcccagcttgcaatatcatggaaccgctttgtgggaagtccatctcaaatttttatacccgaatgcatgagcaaggaagatgggaaagtttagtttgtgaactgctaaagaacaaacttttattttagatgcatcctcatagatttatattttttaagaaagtactaaaatattaaaagcatgatgctccagttggaagaaggaaaaatattcgtcatatgataagagacctctatgaataatatgtggtttttattttgtaatttataatattataataatttatgaagttcttgatggtgatgattattcaaccgaggtgttatttttgtaagtttgatttctctgtttgattgttaatatgtgttatgtaggaagaggttgctaaagagtttggcataccagctca

SEQ ID NO: 32012 - DNA, 754 bp, Medicago truncatula
  Intron number 1 from transcript Medtr7g087510.1 (locus Med tr7g087510) derived from phytozome v7.0 (chr-ID MtChr7; po s 18787978 to 18788731)
caacagaagcttcatcacttcttccattgcttcaggttcattttcctcaaccactgttaattttcactcaactcattttatttttttcatttattattatttaattttaaacaaaaaaatatggtggctgccaacattttatgaattgaattatctacttttttcttataatttgagttcatttttgtattaaatttttatgcttatgaaatttgtttagtgcataattgagctgtagatggtaaaagcaaattatcaagttagttagttagttaggcataaatttattgttttcatgtagttccttatgatttttatcttcaaaacaaattttctcacaatcttttcatggtaagaggagcaacttgtccaatgctgatgatccttttatggattgtggcaatatttgtttatgtggatatgaattgatattttgataaaactatggttagagagaagattgcagttcactttctttgtactttactttaattagagtaatgctgctgatgttcagaaaaacatggatattattttaggacttctataaattagtttggattttgctcctcttgaaaccctctagatttggattatgtggaaaatcattataatttaaactaggattaaatgtagttttgatcccctatttttaccgattcacggttttagtcgctgtatttgtaaatatgattttagtaactctttgatattggcaggaaatttatatcaattaagaaaggatctatcactt

SEQ ID NO: 32013 - DNA, 395 bp, Medicago truncatula
  Intron number 1 from transcript Medtr7g087750.1 (locus Med tr7g087750) derived from phytozome v7.0 (chr-ID MtChr7; po s 18871910 to 18872304 reverse strand)
cttttctttacatccctcgcttcacctctatagttctctcttctcctctctctaccacatgtgcaaattttatgaaatgatgtatgtgatatagttgttcatgtcattcattgataagctaaaggatatgttcattgctataagaaacaattattagcttttacataattgctttgttttaaagtattttttcatttttttttgtcttcctatgattttttgattctctatcttacatttatttgatttgctactacataggaatcaccaaaataaagcataaccttttctgcactatataatattcattcatgatttgataataagcttctttgaaaatgaatgtacgcaattttatggtttggtaaacatttttaacgtttgagagcaggttc

SEQ ID NO: 32014 - DNA, 762 bp, Medicago truncatula
  Intron number 1 from transcript Medtr5g067430.1 (locus Med tr5g067430) derived from phytozome v7.0 (chr-ID MtChr5; po s 23921592 to 23922353 reverse strand)
tcaacgagagcaaaaggtacatgtaatttctcctcacagtccttgtttttgcttcattattaatatgaatttttatggttactttttttccaatatgttgagttgaagttgggagcttgaaatttagtcttccttttatttttgcaattgatggatcatatataaataatattttcttatttcgttgactttaccttgatatgtcattttcaaggttgtcaaaatcggaactttacttcaggttgaaagggaatagcaaatcgtaatcaaaatcgaagaattttactcaaagacttttgtagaatcgatataggaaattgtaaaatcgcaatcaaaatcgatgaattttacccaaaaaaattaatattaaatatatgttacaaatggtatatagtcataaatgacttagtttataaaaaatcgtaaaatcgcgatcaaaatcgatcgatgaattttgtctattttgggattctactatggatttaagtcgttgaagatgaagaaagtcgcaaaatcctaaattttaggatttaagtcgggattttgacaacaaatacgatgatcattttcaggcttcttttgtttatattaatatatatttaagagaaatgcttccttattatttatatatgttaattttttttaacgggaagattgacaataaaaacgaggttttagatcggattttctagcaatttgacacttctctgtaatatcacagtaaaggttatacttatggaaaatgcctttttcatatgcagc

SEQ ID NO: 32015 - DNA, 637 bp, Medicago truncatula
  Intron number 2 from transcript Medtr5g035570.1 (locus Med tr5g035570) derived from phytozome v7.0 (chr-ID MtChr5; po s 14696829 to 14697465 reverse strand)
tggtattcttggtgcctttcttgtaagaatcattttaatgccatgaaaattgttaaattggcttgtgtgctgaaggatttaccatgaaagatatgaactttatcagttcatggccttactatcacaaaattacttcaaaagaaaataactcatctttattgtcttcctatagattcagaataaatgagattcacatcctcagctaatctttgttgcaattgaattgtttttctcttttcccctctcttatgtatgttcttgtcatgtttatttcttctactgcattcgatgctgctaggattattatttatttttttactgtatgtcttgtatggttgctttaaagtacacatcattgtattatagagattcagcacatgtttggaatcatgaccagtttaacgaaatcacggtggaaccgtgattttgttgaagctccgaagtgtagcttttggaaaatcatggtagcacacgtgattctgccaatcttgccatcaatcaaaacatgtagtcaattctttcgctgtcttcttttgtggaagtgaaacaaagaatttggtctgttaagatgatttacagaaattgaaatttatttgcgacgtgtctttcaattatccaggagaagggaaccctctat

SEQ ID NO: 32016 - DNA, 852 bp, Medicago truncatula
  Intron number 1 from transcript Medtr4g108340.1 (locus Med tr4g108340) derived from phytozome v7.0 (chr-ID MtChr4; po s 23984008 to 23984859 reverse strand)
ctccttctcgtaagcatcattctcttctttcaattatcaatttaatcctcagaaattaatttcgtaattagggtttcttttcagaaattcaattgtaagatagtagaattgagggaatatatggttttcttctttgaatcactggtttgtacgtgaagattgttggaaatttggaatttttatgtttggatcgataaagttgatttttttcttcatgtcaaaatgaaattgtgaaagagacagtgaaaggtatttagggttttgttcttgattgatgattttgtgtttgtaaattcttctttcattcgctagttaggtttattctgtagctttcaatggttttcagattttttgttgcttagggtgggtgagattttgattttgactggtgattgggatttcaattctatgattcataattttgtactaaaggaactctatatgattcatactataggaaattgtgtttcaattatgttaggtacccaatctttgattatgaagaaaataggatagaatttctgaagggtttccccttcacaatagtgtcactactctattcttacaaatagccttgtgacaacctcaactaaataactaactaactaactactaataacaaatcttaactactttaattactctagttagtcattattctatatcctaattatgttgcaccagcactcagaatacatagatgaaatgaattactttttaaaggcttttcatcgtcatagttttatgttttatcaatgtcatacgcttagtttatcaatgtcatactctttagttgtttctatggtgtataaagggttgacttggttggatttttattttgttgcagcattc

SEQ ID NO: 32017 - DNA, 697 bp, Medicago truncatula; identical to SEQ ID NO: 31394
  Intron number 2 from transcript Medtr4g107830.1 (locus Med tr4g107830) derived from phytozome v7.0 (chr-ID MtChr4; po s 23652307 to 23653003 reverse strand)

SEQ ID NO: 32018 - DNA, 987 bp, Medicago truncatula
  Intron number 1 from transcript Medtr4g121520.1 (locus Med tr4g121520) derived from phytozome v7.0 (chr-ID MtChr4; po s 28530722 to 28531708)
cagggtcctcacaatcaagcacagcctttgaagtcgtatctccatccgctgcacttctacataaataatagtttgattgaatttttttaatctgtattttttcctttcttttggaagctttattttctgctttgaattgagatttatttcacttgcatctttcattacagatgctttagcaataatctattgaaagatgcaagtaaaataaatcatcataatacatcagtgccacaaataattttaagtctttaatatgtattcctctaaaaaaaagtcttcaatatgtattgatccaatgcttttttcttttaccttcaacatcaaatgtaaaaactaagggcgcaacacaagtgctgagaagcaggcctcttgacaaatcaatgtctcttttgtgtgaatcttttctaattaattaaatgttctatttgactgttttctaattttctaatcaaatgttttatttgactggttttctaattaaacagtattgtactgttgtttatccttatagcatcttggaacgaactaaaaacctatatgtaaatcttccttttcaaacacgccatccttatttcttaaataaatattttagaaaaatcctatttttgttttcataagtttcaactctcttaattttaatatacaaatatagcatcaaattttgacaatgaatacgagtattacaatgcggtgtcgcagctcataaactaaacacatcatcaaattttgacaacttgtgtatggttaatgaatacgagtattacaacgcagtgtcgcagctcattaactaaacatatttaaccacagttttggacaattctcaagtgataataataagagtgtgtttggatggagaaatattattgtttgagcaacttttctaaatattaatttgaaaaatgaaaatattaactttccttgccgcgattcactttccccacaaattcagcattcctgagcacacgtgtggattggaaggagact

SEQ ID NO: 32019 - DNA, 1020 bp, Medicago truncatula
  Intron number 1 from transcript Medtr5g017230.1 (locus Med tr5g017230) derived from phytozome v7.0 (chr-ID MtChr5; po s 6167877 to 6168896)
ttgagagagaagtattaaaaaaatcagaaagtatgcgcaaactgtatacactacggtgtctgatgttggttttgtgttctaaaaattgtttatgattctattaactgttacattttcaaattgaacataagtgaattaaaatttggaaagcaatgaattggttcatgaaacataaggaatcaattcatgttgaaatcaaggaaatcatagaagtccatgaatcgattcacatatgttgcaacatgccaaaaatcgtttttaatgcaaatgatatgatacttcttatgtatggttggaattaagtttcacaaacattccctgattcttacacctcgtgaatattgagattattacatttatcatcatagctatataaagacttactctaagcctaagtttgacatacattgaaataaatataaacctttaataaatctatgcttagggtgaaatggaatcacaagatacctctactagaacatccttagcaatgcaaaagagagagacaatgatcacctagacaaacacctctttttaagaaaaatagtccacatactaaccactaatgtcgactgattttgctactggttttgaatttcttctctcccaattttccactccatttgtttttgcctttgaagatttatgttgcactttcaggctgctccataacaattcctcagtttggagggtaaacaatgacgttattgttggataatactatcataacctatatgctgatgtctaatttggtgcagaaatgatagaaggcatacaaatattttgcgatcagttcataacaagtctctagtatcatgtatcattggtctgataactctttactatctaacaacatcaataatgcagtaaccaataaatattccaaatttccaattaacttcagagcaaatagaaatattccaattaacgtggccttcattatttgttaacgtgtaaaatcatgtcacgttgccatgttgaaaagctcatttgaacttcattggtggaaggtaccaagga

SEQ ID NO: 32020 - DNA, 539 bp, Medicago truncatula
  Intron number 1 from transcript Medtr5g022470.1 (locus Med tr5g022470) derived from phytozome v7.0 (chr-ID MtChr5; po s 8763243 to 8763781 reverse strand)
aaatttgggcagaatacatcaaggtatgttcatccatcatttgttttgttgttattaattgaatacaacaaaatggtccttcttcggggaggaaacttttgaattgtttctattaggatttacccctcttctaaagtaaggggctctacttaagagggaaaagtggggagtatagctattaattgaaaaatcaacagttcagattataataatatgcattgcacattcttgacaaactatgaagttatttaaatcttaaccgttgatcttctgataaataacaataatccccaatctttcctttcactttagagaagccaaatcatttctagtttcattgtacttgacaaacacaaaaaaaaaaaaaaaaaagaattttagaaacccatttttgtttttttgagaggaggaggggtattcggatatatttttttgtattattttggcgataatctattcgctgttctgtattaaatacttgatgtaactcttgaaaaattacagaacaatcctgacgccgagactgtaaaaagtggtgg

SEQ ID NO: 32021 - DNA, 692 bp, Medicago truncatula
  Intron number 1 from transcript Medtr5g044200.1 (locus Med tr5g044200) derived from phytozome v7.0 (chr-ID MtChr5; po s 18344206 to 18344897)
taaagagtctactgattgttgagcattgtttgaaggtataattctcaagcctatgaatgttgattttgagtgtagtagtgactcacctaatgctagtattaaaacatattcttattaaagcaattcttctgttttgctttagtatttggctgcaggtattgttccagtagagcttccgacacctattattgatcttagttctcttcttttggaaataaatttcaatgacttgagggaaatttcggttgttccttgtttgctcaaaagctcacctaatcttcaaagattaagaatgattgtgagtactcatttactttggcttgactttgcttttctttctgatttatccttctttggtttttatgtgaagttactaagctttagaatttgccaacattttttgctttaggcatttgtgtagtgtctagtcttggaaatttgtttctgaacattgtatatgtgagttacgattcctaacagaagttatgaatagtttcaatttatatggaattagttacataattagagtcctataaattagacttgtgtacctcattttcatattttaatcaaagcacttttaacttcagacttttaagatgcatatgaccattcctctcctcatctaatctatgaatttgtaacaatttcatgtaggcacgtcttgaggagcagactgaccttgtaacacc

SEQ ID NO: 32022 - DNA, 762 bp, Medicago truncatula
  Intron number 1 from transcript Medtr5g046790.1 (locus Med tr5g046790) derived from phytozome v7.0 (chr-ID MtChr5; po s 19701233 to 19701994 reverse strand)
tccttcttccaatctcaaccaattccttaactaaggtacctaactttttctttttcaatttctcacttcattgttcttcttcttcttttttctatgattatcatttctacttaagaagtatggttttttcttccaacccatttcatttattatcattctctttcaatatcacattctgggtatttttagttttgctctataattaaatgatcacattctttgtttttatttattaattttgtttttgttgtttttatgttttttttttgttgaacatttttgtgtgtgtgtgatccggttcaattgttgtctgaattgtggttggatctgttgttttggctttttatgtttgatttgtcgttagatctgatatttgattatataatgtaatgttttggatttttcataatttgtcacttgttttgtgtgtttttatgtgtgcatgtgttttagaaaacagagaatgttgattgagtttaacattttaatattgtttattcaatcattttgtattttcttcaactaattttctctggatctgtgagtattttattcatgaaaattatagatctagctctcaatgtgatcatactaatgatttgtgaaaatacttttgtttatgtaatgttgttatatatgttgatgttgtatggtttggtttcataaattaatcagctatggatcttataatttgtatattttaatgatcattttgagaatattttggatttgtttgtgtttattgcaggttactgagaaaaa

SEQ ID NO: 32023 - DNA, 638 bp, Medicago truncatula
  Intron number 1 from transcript Medtr5g087080.1 (locus Med tr5g087080) derived from phytozome v7.0 (chr-ID MtChr5; po s 33552373 to 33553010)
cttacttatttgtgaagtagatgtttaagctattattgacaatgactttttactaagtttccttttgaattgtgtttttttctttttatatatttcttttagtgttttgtttattaagtttgaattaaattagttcaaacttcacccacaattcaaactcaaaattcaaacattcacactttcaatctctcactctttatttcttattcttctctctctgtgtatggcataaatcatattgaatattctctaaacatatatttcaatgctaacctcaaacaaatcaatatttcctatacatgggggctataaatatttgatggtagtttgaaattttatatttctctaaatatgggatgctataataagtatttgatttaagtcctaaatttcatattcttcaaacatggggctataggtattttagttaatgtgaggctataataagtatttgatttaagtcctaaatttcttattcttcaaatattgttgtgattaacaattgtattagtgttaaaatcacaaactccactcaattaaattataagacaaactccactcacaattcaaatacccacactttcatcctattctcactttcactctcaaacattataatattgcatatggacagttgt

SEQ ID NO: 32024 - DNA, 626 bp, Medicago truncatula
  Intron number 1 from transcript Medtr6g070390.2 (locus Med tr6g070390) derived from phytozome v7.0 (chr-ID MtChr6; po s 13258943 to 13259568 reverse strand)
ataagtttgttattggacaaggtagagccaagaaggtatgttgttcttcccaaatctatttactattatcaatattggcggaaatacgggcatgtgtgctattgcgtgcccgtctgtctctgttttctattgtgcttcgttgtgtatatattctatcgtaggattgtaggacattcattttaatttaatttgctagtttcagtttcataatatcgatgtttattaaaacttatctaattttagtttcaataatcatgttgtaagttttaattatagatttggaaaggagtcgtgtctttaaggcaaatctgtatagaaaacggttcgatcatatttgtctatctttttttttcgtcaaatagcgtagtgactagaaattcacctttataaggtgaataagtggggtgttcggggttcgaaccccgacccctgcatatattatgcaatgtccttaccaactgagctaagctcacggggaccgatcatatttgtctatccatttactgttttcaagacatactgcaaatgcattttctaacttattgcctttgattgtacctcattaattaatggtttatgtttctgttgaaggtgctttctgtagctgtttataatcactataaaag

SEQ ID NO: 32025 - DNA, 669 bp, Medicago truncatula
  Intron number 4 from transcript Medtr7g014730.1 (locus Med tr7g014730) derived from phytozome v7.0 (chr-ID MtChr7; po s 3533817 to 3534485)
gaaactcatttaactgcagttaagagaatcttcaggtatctgaaaggaactaatatgtttggcttgctttataagaaatctaaagattataagatgaatatgctggagacagaattgaaagaaaatcaatcagtgaaaattgtcaattcattggtgaaaatttgaactcttgggctagtaaaatataatcaattatcgtattgtctataacagaagtaaaatacatctcagctgctagttgttgcacacaactactctagatgaaacatcagttagaggattgtcatattattgaaaacaataatctcatcttttatgataatactgctattatatgtttgtgtaaaaatcccatgatgcattcaaaagccaagcacattgaaataaaacatcattttattattgactatgttcagaaaggtgttttagatatacatttcattgatactgatcattaatggactgatatattaacaaaacctttaacagaagaaagatttgattttaataaaaagaatgaacatgcattttatgtcaaaatgatacttgcctctgaatgatagctcagattctggtggtgttcaaaagtaactttgattagagcttctgaaggagtgcttctgataagaagtaggttctaaagcctagagcctctaacgctccgaatct

SEQ ID NO: 32026 - DNA, 1039 bp, Medicago truncatula
  Intron number 1 from transcript Medtr5g084380.1 (locus Med tr5g084380) derived from phytozome v7.0 (chr-ID MtChr5; po s 32119078 to 32120116 reverse strand)
tgtggtcaaaattttaaaaacctttatacatatctcatatgcgtttatatgcaataatatatgcatgcttgctcaaaaaaaaatatatatataatatatgcatgcaaacttttttcccctaaaaaaaaaaaaagcatgcaaacatttttttacgaggaaacatgaatgcaaacatcacctgttagcatttcaaattttgattgtgtcaaaaagtttaaatgacaatttaattcatataaaagtactgtttagttacaatttaattcatattttgcaataatattttgcaaacctggtatacaatattttttactctaaaaattattttgcaataatatttttgactctaaattgcagttttagttacaattatttttttcaattgccaaagatgcataaactaacttcttattataatcaaaagactaaataaaacaatattttattctagcttttaaaatgttattttaatattattatcttcatgacagaggatagagacacatgttagtatgatctttatatttaacattgatacttcaaatcgaaaacatgtttagtgcaatattaattattaaatagtgtgcaacacatactatcctatatgataaaaaaaattaaggaaaagaatacagtgcaaaaacatcattttgtatttctaatattttaaccatgtttacattcgagcaacacgacaatcatcaatacttcattacttttattttatcaaattattatttatgtctacatgttaacgctagtatcttatgtctattttttttggtgaagtcttatgtccatgcttatgttgatatatagttgttgtattgcatgcatgtagaggtaggaagaaagaatggtccttcaacatcgtttaagaaactaaaagaccgaagataacaacctagttcgtgatgcaagagttctaagaaatatattgtctgcatgcaattcttctttttcgtattttgttggtttcaatgatcttagtaatagagggccaggaaccattgatcagctgatcaatcatcaccatcca

SEQ ID NO: 32027 - DNA, 716 bp, Medicago truncatula; identical to SEQ ID NO: 30258
  Intron number 2 from transcript Medtr4g101200.1 (locus Med tr4g101200) derived from phytozome v7.0 (chr-ID MtChr4; po s 21911397 to 21912112)

SEQ ID NO: 32028 - DNA, 775 bp, Medicago truncatula
  Intron number 1 from transcript Medtr7g076300.1 (locus Med tr7g076300) derived from phytozome v7.0 (chr-ID MtChr7; po s 15471635 to 15472409 reverse strand)
tgccaactgttgttactgttgtgcataaggggaaaaaaatgttttttctaaatcttttaatcccaacccttaattttatttttgccacatgtcatataaatgtgaaatgaaaaggagtaaatggaggattgctaaatggagtgaagatgcactcgttttgacgtgtttttcatatcattttataaaagtctgtttacgtttgttgtagtcaatctcttcgtggtttgggaggagtgacatatgttagtgaaaaatcgcaacgtgaatgataatccaagcccacttatagttcagtgccgcttcaggtgggagagcgggttcctggttcgtgtagtccgattcccggttccaactcgtataaaatcaaaattttgcccttaaaatctaaactctttgaaagggtaatttgggtttttttgcacaaccctaacccttttctctcttctcgtttccattctctctttgtgtacgccgttttcaacccgaaaccttctcgtttccattctctctttgtgtacgccgttttcaacccgaaatcctttcattcatcacatgttttatggttttttttcttatcatatgtttttttgtttgtgacaatggaatcaactactacttgaatatacatcaaaagacacatttcatctccccccaattacattgaatttttatgcgttttttttttacgatctctcccctgttgttatacaacctatcctttgtgatctaaacgatttcagtacccgagatcttgttatcccctttttggggtcac

SEQ ID NO: 32029 - DNA, 442 bp, Medicago truncatula
  Intron number 7 from transcript Medtr5g094100.1 (locus Med tr5g094100) derived from phytozome v7.0 (chr-ID MtChr5; po s 37111273 to 37111714)
aaatacattctgcactgttctagagtattgcagcggtatatacacctcatatgttttatgaagataattattttgtttacttttgttatagactatgggtctgtttggattgagttatttgagcttgcactttgtgagactgtttgagagagcttatgaatacaacctatgaaatgttaataagctgttttcagcttatttccataagctctccagaataacttatgaaaacaacttatagcttatatgaaaactttttgatttgattttatcttttattatagaaataacttttgcatagcacttaaatgataaacacatctataagtgcttgatgaagttgtttatccaaacatgcttataaatattgtatgtttgatttcttgttttgtctactgctccttcatttgatcctcctctgttctaccagggaaagatcttg

SEQ ID NO: 32030 - DNA, 928 bp, Medicago truncatula
  Intron number 2 from transcript Medtr4g079160.1 (locus Med tr4g079160) derived from phytozome v7.0 (chr-ID MtChr4; po s 15788990 to 15789917)
atagaactcttcgacttgagttctgtgtaacagatgtgagtgcaagattactgatactgtgtttttatagatgcgacatttcaaattaaaagttcatttgatcatttttctcacttactaatttcggatatatatattttccagggtgcagttatgttgccaaaaacctttgtctttgattttggtgcatcactagccttcaacaaaaaatattgtatagatcacgaaaatcatgctatgaacgacatttcaaataaggatatcaaatggttaacaaaatattggtcaatatcttttttgttagtttttctgtttccattatttacattgatggcacttattttgattctcttcatttgtctttatgatgtaattttaaatcaagcagtgcatggctatgtgcgattctgctaacaagtagtggatattattttgatactcacatttacatgcaaggatgtctttttaaggagacgcgttaattgtgcaagatatgagtattgttagtatatacaaagtcatctcaattaatgcatttggtgaagaaaaaagtaatgatatttcataaagaataaaatgaaaattatcacgtagttattgctaatcgaatttgaatttgattgtcatccatgtaacaagtcaaatttcaaatatttatgaaacttaatgatgtttcattgtgaataaaagaaacttattgctcatacgaaatagaagaggttagtaatgctaatcgaataaaagaaaaaagtaatgatatttcatgaagaataaaagaaaaattactacgtagttattgctaatcaaatttgaaattgactgtcatccatgtaacaagtcaaatttcaaatatttatgaaacttaatgatatttcattgtgaataaaataaacttattgctcattattgctaatcgaaatttcaggtc

SEQ ID NO: 32031 - DNA, 722 bp, Medicago truncatula
  Intron number 3 from transcript Medtr7g021140.1 (locus Med tr7g021140) derived from phytozome v7.0 (chr-ID MtChr7; po s 5103404 to 5104125 reverse strand)
aagtgggagacttgcaaattctaaaccttggtaaatttttaatattactagtactttgtctttaggaatttcttcagttagccttttagatttctgataggatctctctttttggttgatgcttgcttcatataactgctttctgcttttccttggtgattccaagagaaccatcaaaacataacctctcagtatttttagttcacttcaaacctatctattctgccactcataaaataaattgagtgtttaggaaaggccacctttaaataatttgatcattttatatgatattagctagaaagagcggttaggaggcttgttaataatacgccaaacaattttcatttatcaaccaagttatatgatggcatgtgtataaaaaactgttaactttctattgctagttcaatggtttagcaactccatcagtgtggctttcttgtttcctgaaagcgcatagagttttacactgaaaatagataaaacttgaagtttttaatattgtatccgagattgaacaagccatacagtacaatatagaggatgctgcattttcattttcaacaaaatttgagggcgggtttttggggtcactgtgttacttcttggtcattggcaatggcaatttggtgaagtcaaatggacatctaaccacaggaatgttaaatattttttctttttcaggaaaaatagttggagattctacagcttttcgggat

SEQ ID NO: 32032 - DNA, 508 bp, Medicago truncatula
  Intron number 1 from transcript Medtr5g032140.1 (locus Med tr5g032140) derived from phytozome v7.0 (chr-ID MtChr5; po s 12935382 to 12935889 reverse strand)
atttcacttcgcatcgcatcgcatcatcaatcacggtactttcttcctaaattttgattcttttttcttcatcgcttcacccattattccaatttcttcttttcccccttttctttttcccgattttttttttcaattttgccccaaattttcattcgattcagttttttccgattatataacacgtctttcttcatattcgctattcgagatttcaattccgcaaggtgggttggtgattatattggtgtgtatcaatctgggggaaaaatcaatcgtagattttgaaaaccctaattttactaattttcagaaattttgtttctggggtgtttttttgtgcaattcagtttttttcaacactgttagttacagtggatgcgaaatttaggtttgaatctaatgttaattgcattgctatgtgtatcaatagattagtgtttttttgtcaattggattctgatttgatttattgatattttgtagctgttgatttgattctgtagct

SEQ ID NO: 32033 - DNA, 1030 bp, Medicago truncatula
  Intron number 1 from transcript Medtr5g038970.1 (locus Med tr5g038970) derived from phytozome v7.0 (chr-ID MtChr5; po s 16462297 to 16463326)
tggtggcaaagggggaggaagggagagttttttcggtgaagtcatcatataagttgctccaagatttgttgtttttggatggccatttgagtcattcaaaagaggtgatgtttggggcaaaaatccgacgccgtctaagatagtgtctttttcttgacaacttctccttgacagtatccaacgaaagataatctagcaaggagaaacgttttgcatatggatgccactctaaattgtgtttttggtggtggtgtagatgaaacccctactcatcttttcttgcgcaatgaggtgtgtggtccaaggtgttgggttggttagaaatcaacttcaccacccctaaaaaaatttgagcactttgaatgttggaacggtgaagtgcagaataagaagctttgtaaaggttttcggttaatttggtatgtcccctttgggtgatttgaaactcaagaaatgatatattttaatggggactgctaacttacacccacctagtcgatgtacaagaactttacactgatctttaacctctagccgttcaaagtaatgtaaaacaaacgtgcttggttacttgcacgaattctagagactattatccttcaatcgaattaccaatccaacttctttgtttatattgtttttgaagtaaattcccttctaaacctatcatattttgaataatgaatgtcactgcactatatggctagaattcagccgcatttcataacgagacactgcatttccaatttgtgcgcattatggtaggtcgaaaatattaacctccaaaacgtatacttctattttaacacccaaccttaacgcatgtcatagtccttacacataaaaaaagtcaaaagtatatgagtataaaataccgtcctgttcctatcaatcatgttagtctgataatggaagacttacagacaaaactaccaagttcaagactaacatgattgatagaaacaaagttgagaactttcttttttgcatttggactactatgatatgatgacatgtgataaggttgaga

SEQ ID NO: 32034 - DNA, 308 bp, Medicago truncatula
  Intron number 2 from transcript Medtr4g111090.1 (locus Med tr4g111090) derived from phytozome v7.0 (chr-ID MtChr4; po s 25337671 to 25337978)
gaaaggccggaaggtactatacattctcttattattaattttcttccccttttcaaggtcagtttataatgtgaacaccatgatacccgtagagtattgttggttatgtactcctcattcaatcatctaaagcaatgaaataaactcaaatgttaaacaaaatttgcattcggggtaacagtatctaaccaaactctaagatatccaaaaatttatcaatctataaacaagagaaaataatgcctctattttggttggtctttcatgtcacagtatctgccgaatttgataactttggatctaagcta

SEQ ID NO: 32035 - DNA, 700 bp, Medicago truncatula
  Intron number 2 from transcript Medtr6g012970.1 (locus Med tr6g012970) derived from phytozome v7.0 (chr-ID MtChr6; po s 2595794 to 2596493 reverse strand)
gtctgagtcagatactcagcctcctgtcacctttggtaatgttgtaacttcctgattagtgttcacagattattttgcttcatcatatgcattgtttcaaatgaggatatagatagttaacacacacacatgaacatttgtttaatcacccttgctcgacagttagtgttgttaaatagcggctataacactgcgatagcgtagcggaattcaaacaaatcactattgttccgtgatatgcaatttggtacaaaacattgtcaaacagaggctatagcggcgctctagcactgttgcatagcgagtttgaacaaattgctattttccgtgatcttaacaacactgacagtccattgaatcttctgtagctcaggtaccctatgtgcatatagttattcatctttgatatatctttctgtttttggactgcatgttcggttattctcttgtgttggcctaatcttaatatgatttcgattcaggattgaaatttgttttaatttagagtctgatactcccgaattaagtttaaatcaaatttgagaaacatctgtttgataaattaaactctatttatctttatgaagttggaatttttttgtggaggagcatcgttctgttttcttgcagtttatttttggatttaatatgcttatgcctgttctaaagttttatatccttttctctattatagtttccg

SEQ ID NO: 32036 - DNA, 628 bp, Medicago truncatula
  Intron number 1 from transcript Medtr7g009110.1 (locus Med tr7g009110) derived from phytozome v7.0 (chr-ID MtChr7; po s 1549448 to 1550075 reverse strand)
tggaacctcttccaggtaaagcagcgatcttttacctcctgtctttggaaatttgtttgttaacattttttagttgaaaacttttgattacttagcatcttctttcgtctcagatagttggttatgagacgctttttctctaataatctatacctcattatctattgacaaacatttgtgagactgtttgagatagcttatggaaacaacttacaacacatccagaagttgttttcagttttcacttttcagcttatagctcatatgaaaaagtttgattttattttatgtagctaatacattagcacttttatggtaagcgcttatgctataagtgtttaattaagttgtttatccaaacctgacctaagtttttcagaacttttagaaaatggacttgcagataacggaataagttcattttattgtttgacagttattgttttggacttttgtattcaaaaaataagtaccctaaacagtcaaacttatatggtatcttacttgttgctctatcttttcctgtatgagaatattatcctttataacatctatatgcatttccatggccgaattttctttaattcttaataatttaatatttgtaggcttcaaagcagcaaaacat

SEQ ID NO: 32037 - DNA, 957 bp, Medicago truncatula
  Intron number 3 from transcript Medtr6g069660.1 (locus Med tr6g069660) derived from phytozome v7.0 (chr-ID MtChr6; po s 12913353 to 12914309)
gtggctaccgttagttttggcttttgtttctttgtagcatttgatgtttgttttggtggcccgtttaatcggtgttatggttgtaattcatttttttagttgtgaatccctgttgaggtatttcattgagtgtttcaattttaagaaagagatatctcatattgtgattccttcttgctttttatattttttgattcaccaatgtgatactattatgatttgcattgctcttgaaagatattataatagcatctccataagagtttgtgttgtcgttcattttgatgtatttttctgtaaaaagaaatttgattacatgcttccattacatgaatgaaggtggttttccttttcaataccatcttattcgaaatgattatctgtctccttaagatgaattggtggaggatttagttactcaaatgtcctattcagcaccaatttattagtgaatttatgtagcatacttcgtttcgatgtatatttggtatagtgtccttgacaaatgataaacaaaattcaactctaaatctttctactggttttatattagaatgaacgaaggattacaattatgcacctaatttgcattgataaatatcagtcatcccaatatgatgacagaagataaagtgtaagcaatatgtacatgtcgtaaaacttacctctcttttgaaggaattaacttcaacttgctccattcaaagagatataatgtgtacaaaaaccttatttatgaatggaagtggattgagatagtgctcactgatatgactttaaagtggtgtactctatataattcttatttagagttgatgttaattgccttaaaaatcattgcatctttggttttcatcctccttagagcataccttatgcttctttttttgtacgatatcatatgcttctaattaaggatttttttaacaagatattatatttgactttgtagatcat

SEQ ID NO: 32038 - DNA, 685 bp, Medicago truncatula
  Intron number 1 from transcript Medtr6g083480.1 (locus Med tr6g083480) derived from phytozome v7.0 (chr-ID MtChr6; po s 17025668 to 17026352 reverse strand)
tataatcaggttaattttcaattcttctacaattttttcatcataacaataattgaaaattcaatttctttttcttatatttatttgctaacttttcttgatgttgatttaaccaaaccctttatttttattttttttgacaaattctattcaattttcttgcttttgatttattgaatcaagggccactttattttattttatttttttgaaaaattctcaatagtgaagaaataccactcaattttcttgttattgagtcaaattgtgcacaaattctactcaattttcatgcttttaatacaatgaattgaatcaagggttataagtattgagaaattttactcaattttcttgctattgaattacgcactttttattttattttatgaactgctcttaattatgaagaaaatgagtagaaactggttttttagttgttgacactttttctatacaggacttgacagttgtttgagaaaatctgttaatttgtatgaatgattaaattgatgttgaatgcaacataggttttagttattgaagggttttaaatgcaatatttatcctagtagacactagatattgtgtatttgtgttgtttaaatattatgcacaatcatatgatgtttttgttttgtgaattttatttttcagaaacttaagactcacgttaaaaaaaaga

SEQ ID NO: 32039 - DNA, 1040 bp, Medicago truncatula
  Intron number 1 from transcript Medtr7g080030.1 (locus Med tr7g080030) derived from phytozome v7.0 (chr-ID MtChr7; po s 16794273 to 16795312 reverse strand)
gactgtgacaagtatatctctcactatcatccctcttttttcaatttcatatatatatatatatatatatatatatatatatatatatatacacactctccctccgttctaaaatataagtaaaaattagtcaacaaaagttaatgtatttgatacaaattttaaactaaatatggacccgttttttcttatattttggttcagagggagtatatatatgtatatgagtaaatacccttaaacttattttcatcaaagcacatgaaattaatatgaattccctaacttcttataagtagtccatcaaatagtgagaatctattgttatatatatttacaatctgttacttaaaaaaagtttttacatattaatcttatagggtttaggatttttattttttaaagcaaaaattaggatatgcatcatcatatgaaaaaaagacatcccaattatgttgaaccccaaagctaccacagttagggttatatgaactagttcaacataatccaaatactatagtgactaaaacataataatgagattgtacggaaaaaagggaatcaaaggcatgcaatttattttatttatgaagaagaacaacacaagggtaaataaaaaatgatttaattgcatatacaacatcaatataattgtttttttttaattacagtttcaatcacaggtaataacaacaaaaattggagaacccgtaatattttattaaaactagtaacattcatctttggattgagtttgtattgatgttgatcaattgcaatcctaagatcataaaaagtatttgactttaatggcaactacttcaaaaatattactcggattgtttatgaaacttaaattcataaaaaatattccaagaggggcttaaagcatttgaaaacctttttatcttttttttttttggttgaaatcgtaaacttttttatgcctaataagtaatagatatgtaaagtaaactaatgtcatatttactttgctgattgcagtttaaactagtgttgagcagcttccagggtttgtg

SEQ ID NO: 32040 - DNA, 885 bp, Medicago truncatula
  Intron number 1 from transcript Medtr4g101240.1 (locus Med tr4g101240) derived from phytozome v7.0 (chr-ID MtChr4; po s 21927466 to 21928350)
aacagaaagcgaaaattacccctgcaacctcaccggtaactaacttcttcatcttttctaatttctctagggttgcacatgttttgcatgaatgataaacccggcgtatccgacatttgtccgggttggacacagcacatgtaattactgagaaaacgtgtagtagaaaagatggtggaagataggcttaggtggtgtatagagaaaacttttagttaagaaagtagatcagatggaggatagtcaaatcatcattagaagcaaatgaagatgtacaaaaattttaagagaaactcttgctgttggggggtgttgcgtatctcaactggtttgagctaagggattgtaggagttaagggttcagtgttcaagtcatgacaaggagaaaaatattaacataacaattaacatactaacatttgtcattaaaaaaaagcaattaggaaagattttgagattaatgagttggatccaaatacggtcttcaatagaacattattgcgtaatttgatccatgtacaaactcttatggtgggggggtgttgtgtatctcaactggtttgagctaagtgattaaaggagttaagggttcagtgttcaggtcatggcaaggagaaaaataccaacataagtacataacaattaacatattaacatttgtcattaaaaacaaagcaattatgaaagatttagagattaatgagttggatccaaatatgatttacaattgaacaatatggcgtaatttgatccatgtagctgacctcggttagtgggatacagtttgtttttgctgtagcactaatttatatatgtttgacacattttttgtattgaatgattctaaatgcagtgaagagacttcttctaagaaggcaggggaag

SEQ ID NO: 32041 - DNA, 348 bp, Medicago truncatula
  Intron number 1 from transcript Medtr4g142760.1 (locus Med tr4g142760) derived from phytozome v7.0 (chr-ID MtChr4; po s 35652811 to 35653158 reverse strand)
cgaagttggtcttcgtccgccgtaaacagtgagaacttcgtccatctttttccttttctcttttatttttccgatttaccttctcttcttccttttttcatctttcatttgttttgttgacacagaaatgttcaactaagtacttttcattttcattggataataaattaataatgaaactttgattttattttttccattgttgagatgcacgcttccattgataaagttaattcgtatttctgtttttgtgccacattatacaatgcttgttttctgtttgataaaatgcttcaaccgaactttatgtgttttgacgcagagaaaaatagagtagcatcaatctga

SEQ ID NO: 32042 - DNA, 412 bp, Medicago truncatula
  Intron number 1 from transcript Medtr5g011300.1 (locus Med tr5g011300) derived from phytozome v7.0 (chr-ID MtChr5; po s 3046633 to 3047044)
attctcaagccgacattgccattcttcttaggaaggtacatccactcttacattctcttcattcatctaaccagtttctacaatttgacttgataaaaggagccttgtttggagtttttgcatggtcactagaaaataaaagtttcaagtcatggctaattttttggaactaggttaataatctcagggtagagtctgtttgttactttttgttttttggggtttgcttttccttgatttttttattccgttctcagtttttgttctctattcctaaaattttgttttacagtctaccttgagatctcggcgaaccgctggtcagatcagttttggttacattgtttgaaagtggaatttttcagtattatataaaccctaaacacttgaatatttttccagctaatccgtg

SEQ ID NO: 32043 - DNA, 895 bp, Medicago truncatula
  Intron number 2 from transcript Medtr5g081940.1 (locus Med tr5g081940) derived from phytozome v7.0 (chr-ID MtChr5; po s 30795554 to 30796448)
gagcgagcctcttagttcatgtgagatatcttcatcatacatgtgttcgtctatcttgtttttgctggaaacctaagagttgtggaaattccaattttttatgttggtgacatcgaaattgctacgtgagttgtttctgatttgttacttgaaattggaaagttttaatttaataatttaagaaatgattgttgcatgagcttgtttttgttagtgatttaacaagtagaacttaatgagagcctttgatttgatgtttgatgaaaaggttggttttgtgtggaggatcccatcaatttagtccataaactatgtaaatatcatggtagtacttaaattatataaaattcgttaatttagtaactaaagtgtatgaaattccatcaatttaatcactaacaactcaataacagagattaaattgacggatattatatactttatttttttgatcaagtgaatattatatactttagatacaacttattatacttacgtaatttagaaactaaatttgaaaaaagagtgatagttagagaccaaattaacgatttattcatcatttgaatatgcttttttctaatatattgggaatcaacgggtagtatttactaacttgtatgattggcccccctcaaaaatcaaaaacttgtgtgattggctgagttaaaaaagaaaagttatgctgaagggtgtgaaggcaatccaacaattaggtgaaaacggacccttcttcatagtataaaaacacatatattataccgctaaaaggatcatattgaaaactttgtgcaggcacatgccttcacacaactctacgtgcatccgtccctgatttgttatgtgagatttataaaagttttttcctttgggtttaaagaaattgaagggttaa

SEQ ID NO: 32044 - DNA, 452 bp, Medicago truncatula
  Intron number 1 from transcript Medtr4g121950.1 (locus Med tr4g121950) derived from phytozome v7.0 (chr-ID MtChr4; po s 28769267 to 28769718 reverse strand)
gaatctctgctcatcttcacccttcaaatttccaggtttttttttttcttcctttggtttccttcagctaacgtagctagaaagttcaatgatattggtttgtattacttgcatgataaacttgagttttcactgttgccaaatattgttttttttcttcttacaggcaaatgttagtaattaattgttgccaattattattgattaatagtgtgtataaggttttaaattttgcgaattcgcatagaaaatcttgatattatggataatcacggtctaaattagggcagcgttgcggttgcagagacatcaaaaccaagaactttgattcgcagcctaaatttcggtccaaatgacggtggcagacctaaattatatcaaaaccacaataattatcttaaaattagtgtgtatgaatgttatgtctgtttttttatgacaggaaggaggtg

SEQ ID NO: 32045 - DNA, 946 bp, Medicago truncatula
  Intron number 1 from transcript Medtr6g041150.1 (locus Med tr6g041150) derived from phytozome v7.0 (chr-ID MtChr6; po s 8765977 to 8766922 reverse strand)
ttgtctggtagaattctttaattacctatattttgaattttgaattcccttagttcacacttttgttgttattttttagggtttggcctagtctcctatctgtatcgtttttctctttttcaataaaattttcagagcaggtggtagaggatgggagcagattttttatgccttccatgctcttttgattcatcaaaaaataaatttaatctttttaaatcaaaatctacttttttcattatttttatttttcaataaatttttcttcgttattaaacaacatatcttttttaggcaaattagggttcgtttattacggattaaaataacaatgattttgacatttaataatatacagatgtaactattagcaaaaaataaatataaaatttagaggtaaaagattttgtaataaaattacctcaatcttttcatatttatttagagtggaattattttcactaaatgtgataaagagctttggtgtagaaagaattggatatttagaactaaggtttgaaaatcggaatgtttgatgaagtggttgaattgaaaatatcatgtttaaaataggaaaactatttcttcgttatatcttgagactttttgaaaacaatcggagaatttgagtgttttgattaaggtattttaattttaaccaaggactatctaatttaatttcgaggttatacaaaagttaattcaagaaaaagtgagccctagggtgtgtttcagactttccaactagttaaaaggttaagatgagtacaaggatcaatgacttattttgttgaaggtgtaagagttaacttgtagcataataagctttgcttgtattaaggaagcgttgcaaggtagcagcactttctaagtcttcttgcaaagtcaaggtggaacttactccaggctgctaatccactttgaaaaagggttcttgaggataagt

SEQ ID NO: 32046 - DNA, 1033 bp, Medicago truncatula
  Intron number 1 from transcript Medtr5g008790.1 (locus Med tr5g008790) derived from phytozome v7.0 (chr-ID MtChr5; po s 1733572 to 1734604 reverse strand)
ctttgtattgggaatctcagatagcacttcttgaggtatatgaagatacttttctctttatcattcattcatagtttttctttttgttgttgtttgattaaccaaattaaaatcaaatagagccaattaggtttcttggcatgcaattctaaatattttgtaaaacaaatttgcagcctaacatcaagcttaatttaacaatatagaacatcaaataaatttgttcttaaatccaaatattatgtgcttgattaacttttatttgtttctccctttgaaggatttgatcttggcttattaatttagttataaattttttgttacattattacattaaattctttaaagtaatagaatatgatcatatcaagttggtttattatttatttgactaagttggtttattgttgatgtcacatgaataaattactcatggagtttgaattaaacaggaagaaaaccttggtaaaatctgttttactattctcaaacatgataaaaaatagaacaaggtcccatgaaaatgaattctttaaataacatttttcccgaaatatctggtggctttgattttagtccttgcaaaaatagatgttttctgtttggcttcttttattggtggtaagtgacaacttttttaatgacaaatcagtgacaacttcgtaaagttgtaccacatgttataattgcctttaaataaaataaaataaaatcattttatgtaattaggtattggaatattcctttaaggatattcttagattttttttaaaaaaaataaaatttgtggtacatatcatcacacaaccgttacttcaatcaacatatgaaattatgacaacatggtttttcatacatagtttaaaaactatactattatgaaagaaaaaaaattaaaagaatattttgagccacatacaaatgtagtatttgattatgattatgaaatggatttttcttcactatatcttgaaaaataaaatgaaagtacttattgcattatttgtgttaggaaattttggagcgacatcat

SEQ ID NO: 32047 - DNA, 776 bp, Medicago truncatula
  Intron number 1 from transcript Medtr4g097850.1 (locus Med tr4g097850) derived from phytozome v7.0 (chr-ID MtChr4; po s 21010229 to 21011004)
taaaaaggatgtaagttgaaactaaatatttgatgatgccaatgagttgtcctgtttgtgaaggcgagaggaagtgtatttatagattttgaagttctctcaaaatcaaatttcaacaaaaactattattgaagggtttgatggatagagagcatagggataaggtctcatgtggtgttgtctaagagtgtaccctaccttcttaaacaaatgtccaatacaaagcttccacttgctaccaaatgagatgtgctcaagtgcagcctcatatttcttcatgatttaattggtgtacttcataattttgtaaacatgcttcagacatgttttcttcattatgataatgccgatgtgaagctggtaagtgactataaggccatggataacaatagatcaactcaaaccattctacatgtctgtggttctactttcaagtctatctatcatatgatgcttctactcaagaattatgcattatctatctactacaccatttgaagtatatccattcatttagagacaacaccatgtgatctttcatatgctcttgtctggccatgactcatatctcatggccctccttcattgatcattgtagttgctgacggattcattatttatccttcatctatatatattaatggctgcaaaggcatttaggaccaacaaaaaaccattcacatcccaaggcatttgaaattcagaaacttgagtcttctatatacaactctttcttttttagaccaagcttctcttttaaacacatacatacaaca

SEQ ID NO: 32048 - DNA, 614 bp, Medicago truncatula
  Intron number 4 from transcript Medtr5g039940.1 (locus Med tr5g039940) derived from phytozome v7.0 (chr-ID MtChr5; po s 17008747 to 17009360 reverse strand)
tgaggtaaacttcattccctatgtatcaaagattctctttcataccatgtgattgccattggagttttattttggcggtccggaatttgatcagaagatgagtaaagtctagtttcgggcaccgaagctcattaaccacttgatgttggagcttaaccacttgatattggaactcggttactcgattgatttgacactaaagttcattaaccacttgatgttggagttaaacaagcttattttataatagtggcctaaataaaatttaaatatgaacttcatcttttgttttttgttttttgtttttctctctgtcttttccctcagtgagggtaggtttcaatccatttatgtatttagtgtgtggggttctccggtgacaaaacatgtcataatcaattatacacgtctcaatcaaccatgtctcgtgaaaagtgaaactaaacatacacttaagagtaccaattaaaagtcttttctttttttttgcatcaaaatctatcctatagtaagatttggttacaaccaaaactaacttaatgtgatttgtgagctaatttcttgctattatctctttaggctcaaaaaatatttggaaataggtggacagaaat

SEQ ID NO: 32049 - DNA, 875 bp, Medicago truncatula
  Intron number 1 from transcript Medtr5g099700.1 (locus Med tr5g099700) derived from phytozome v7.0 (chr-ID MtChr5; po s 39877492 to 39878366 reverse strand)
ggattctaaatcccaaccttaccctcaacaggtcaaactctctttctctacttttcatcaatcctattattattattagtttcttctgtatttgtctttgttatttttttttgaatctggaattgttaattaagtaactattgtttaattgcttatattatctacagtcatttgtttaaaattaaaatacaagttattgttagaagaaattatacaagttatctataatttccatatttttgtctagaacttttttttaggggagtcaagctagaacttatgatatagtatgtgattgtttgtaataataaaagtacttttttaataattctcccagctaacacacatttaaatgagattttttatttatttttttaccaaaatatgaaaaaaaattcagaagctactaaaactagcttataataaaaccattatttttttattatgattaatttaaaaatattaaagaagcaattgtgctaacactctatgtatgtttatttatttatttatggtacctattaaatttcagattcttagactacaaaatcttgagtggttttctgtcttgcgttttgaaattttcaaaaaccaaaagcagttatatgaatttcagttatgagttttgtatttcaaatctaagttatgtttcagtttttgtttttgagttaagtcactatgaactgtttgtgtacatagaatccaaacataattccaacatttcaaatatagacactcataaaaatccaaacatgaacaaataagcattcattttgggactgtttccgtacatctaagcagaatggttgtcttggtttgagcataacatagttgtgatatttcaggtacatatatctttggcaggagacagacac

SEQ ID NO: 32050 - DNA, 587 bp, Medicago truncatula
  Intron number 1 from transcript Medtr4g160350.1 (locus Med tr4g160350) derived from phytozome v7.0 (chr-ID MtChr4; po s 40632660 to 40633246)
agtgtagtagctattaaatgtcatttttcttatgcattgggtacatgcatcggcagactaaaagtggtgtgagaggaaaatttggattttgaacctaaggtgatgattaggaaaagcattaaggagaatttaatgttttgatgatggagggaaaatatcctttattactattaacgctagacttgatgagctgtcacttaaccctaatctctccctaatttccctcttaatcccatattaattgctaatctcaactgccaaccatcctagttaatctcaaccgttgtatacctgatgtttttccctcgcatttaattcgctcatagcgggatgttgcaagctccttggcattgcattgtttgagaggtacatatatatgcttattgtgttttaaaatagcaaaattatgtgcttattgtgctttaccaactcagaaaacctcaactcacataattatgtgcttattgtgctttactgtcatgtctaatgcgcttttgttctgttttttttttcactggactttcactgaattatcttctgtttgatccgcagctccactggatccaaatccagtcactgagttggac

SEQ ID NO: 32051 - DNA, 675 bp, Medicago truncatula
  Intron number 2 from transcript Medtr4g072490.1 (locus Med tr4g072490) derived from phytozome v7.0 (chr-ID MtChr4; po s 13921378 to 13922052 reverse strand)
tttcccctattgaagtatctctcgtacacaccatcgtaagtttgtattacagctttattctaaaaaaaattaatcaattaataaaacaaaatgtgaagaccctcgtatgcaattttgtcaacaaaaatcatttttattgtttgtttataaagaatgagaaaaacaatcttaaacttcattgaaaaaatcttaaacaatcttaagcgagaataattgaaataataaataataaagaatggagcctaaaatctcctattccctttatatataatatatgaaatttaagttttatattttattttattttgcttcctaattataatatgtttttaacgatattgtgaataaaaaaagtttaaaaataatgattttttttttgagagataaaaataatgaatattagaaggttaattatacaaaatgacctaagagtttaacttgggagaagagtgtagagtttaggatagaaggggagagaaatgtaactcaatcatttcttaggagagaagagtgtaattttgtctaatatactttgaaatagagaggaggggagtgtaattcaacattttttttcttaattttatgggaatattttcttattaaagttcataagtggtttattcaaaatttggttttacaggtttcattcgctgcatcacacaaaatttaggtcaa

SEQ ID NO: 32052 - DNA, 1022 bp, Medicago truncatula
  Intron number 3 from transcript Medtr7g021300.1 (locus Med tr7g021300) derived from phytozome v7.0 (chr-ID MtChr7; po s 5156358 to 5157379)
gttatcaacttgattcttcaatatctaagtaacaggtagctgattaattctcatcgtcattctatttcattgattgcatctctggtttccgttcattgactacatgtgtgctgttccaattaatgtaggactatgcatatttaagcagcaaattttgagcatgttgagctcactagggtgctttataaatgcttaattgtaatggaatgtcttggtgttcttaattttaggttccacaacagatatgtgacaatgtcaatagtttttttaggataggattacttgctggataattttgaatttccctccttatatcgatgtctcattcacagtacttatatatttatatattgattgatatattgatacactattgaaaagccacgtaaggtactacaaacaaagctatatttgatttgcttcacctaattacaaaaatactttattccatttttagtcactctgcaaagtctatggtaataacttgtttctaagtgcatcgaggatctgggcaatgaaaactggttgttgtccgttaaggattttacaaaaaaaattcaaaatacctaaaacatgagcctggccattgacaagttcagatcttaaagctgatgctttcagcaccaaacttggtcttgagtgtataaacgaggtttttatttggggtacgggacgggaggtcacataagtccactggagtgcttttgtgctttgataggttctcatgtagaataaggtgattggcattgttcttatggtcatctacactgatactaggaaaatgaaaaccacatgcttgatgctaatacatttttcctgtagtagttatcctcgaagtatatatttcatttctaaatttccaatcagataccgacaagtttttgtattctggagagaaagggcattttaattttagaatattagctgttatgttgaatgcatttatttgctactgctgagttgcaacacattaattcttcctcccttaaatttttaatatatgcagtatttcaaggactagc

SEQ ID NO: 32053 - DNA, 798 bp, Medicago truncatula; identical to SEQ ID NO: 30841
  Intron number 1 from transcript Medtr5g106990.1 (locus Med tr5g106990) derived from phytozome v7.0 (chr-ID MtChr5; po s 43147204 to 43148001 reverse strand)

SEQ ID NO: 32054 - DNA, 832 bp, Medicago truncatula
  Intron number 2 from transcript Medtr5g098190.1 (locus Med tr5g098190) derived from phytozome v7.0 (chr-ID MtChr5; po s 39133821 to 39134652 reverse strand)
tgatcacattggtctgacacactatgcatttcactatttttttttattgcaatgataaaacatgctattggattaacggaacattatgaacacattatccatgttatattttctctttacattattctgtacaatattttaattttattaaattaccttcttgtcctgccttatacaaaaaataaagactcgtaacacttgggtttgtaaacacgtgatgtttttagtcatgtgttcctaaggcaattattctcaacacaaatagtaaataatgtcaattggtcccacaagtttgtaccacttataattgtgaccaattatagcaagtaaactaatgagatccactaatgtccctttaaattgatgttcatattaggggctccatagtttttttaaattcttatcattaccattattttataactatgttatagacttgactattaaacagtaatataaaaaacaagagatgaccgttaaacaacataaatctttgttagttagatctatttaaaaatatctttgttagaaaatttccctctcaaatagagtcatagatcggatagcatgtttccctctcaaatagagtcatatctttgttagatctatttaaagtcaccacagtaacaacaacaacctcaaaatagcaacaatactccaacaaacacacaccaaactaaccgcagtcacaaaaacctgcttacggcatcccatgggcaatcaaacagaaacccgaacccaaaccgggttcaagttagttggatttaaaaacttcgtctgagccaacccaaaatcagacttattcaaattcaaacgctttcaccacgtcgag

SEQ ID NO: 32055 - DNA, 752 bp, Medicago truncatula
  Intron number 1 from transcript Medtr5g104830.1 (locus Med tr5g104830) derived from phytozome v7.0 (chr-ID MtChr5; po s 42081784 to 42082535)
gtacacgtggcgatctgggtcttcttcaaatctcagtgagtgttgtgttttttatgttttttgaattttgaatttttttgttagcgcttatttttactgaatctgggtggggttttgttttgtataataataaatcacgagtataaattttggagcttttttatatgggttttcgatttttgttttgtttgtttgttaaatctagctaaattagttgttgacaaaaaaaaaaaagttttttttatcagatttagtttttttttttttttttttgtatctaaaaatgatgaattttgagatagtagtagttgattttgaatttggaaagtggttggctagttatgagatttaggaaatagatggaaaagaaagtgaaactttgtgatttactgattttatatggaagatagaaaattgggtttcaactttgaatcaacttaatgccttgatctgttcattttaatccacaatttggatttgtttatatgcatgtttggagtttggaatcacggtgagttcgacaaaatcatgttggcaccctgatttcttcgaagctcaaatgtgtagtttttgtgagttcacggtagctcaatgtgattcggccaaactcgctatgagtccaaacatgtaatgtgtcactttattttggtgacaagatttgtgaattagtgtttctgatgagagttttgttagattcaaaagtaaaatttctcactttttttgttttgtttcattttaatattgtagaagac

SEQ ID NO: 32056 - DNA, 367 bp, Medicago truncatula
  Intron number 3 from transcript Medtr4g087040.1 (locus Med tr4g087040) derived from phytozome v7.0 (chr-ID MtChr4; po s 18195410 to 18195776 reverse strand)
tagaagggaaggtcagtcgagaaaaggccgccaaggtaaacttaaaacatcgaattaataactcttaggcatggttttaaattacagtcgcaattatgctgcaaataattatattgcatttaaatacgaccgagtcaaatttgttggtgaaatcttgttgcagagacatcaaaatcttttatactgcagttgcataccgcaatttaaaacatgcttttagggttttttttttacattagaatagttattgattttgaagttttattttagctaatattatactaacacaattcccttgtcatgtttggcttctgtttcttctcaacttttctttcagtctatttgggtaagtgtctctatttaagat

SEQ ID NO: 32057 - DNA, 517 bp, Medicago truncatula
  Intron number 1 from transcript Medtr5g105870.1 (locus Med tr5g105870) derived from phytozome v7.0 (chr-ID MtChr5; po s 42549661 to 42550177)
agtcaaccgaggaagtaagatcatttttgaagaaggaagattttgatttcaaaaaggtataaccttcaaaatttggtttctacggttgcacatgatgttttatccttttttttttttttccttttaaagtaatgtttatatatatggtttgatatttaagaaaccaaattttggatattttaatcttgttttatttttagaataatatgtttttttgtttttagatgatgtttaaatgttaaattttgggtttgcattttttttttttgtgtttgactgtgttttggtttgtaaatcaccataatgatgttttgtcaaattttggaattttccttttcttttgtgttttgtattcaattcatagagtatgttgattgggtttatagatgaggttttcatgttaaattttgttttgtttttgattcaccagaatgttttttagttgactttttaatttattttaaattttaggattttattttttatttgaactgacaaatgttgaatgggttttcag

SEQ ID NO: 32058 - DNA, 705 bp, Medicago truncatula
  Intron number 1 from transcript Medtr5g034320.1 (locus Med tr5g034320) derived from phytozome v7.0 (chr-ID MtChr5; po s 14082210 to 14082914)
gaaggagaaaacaggggaaggtgctgtggattttggtatggcgccttcaaatctatttgtgctgccatatgtcccttatttatagggatatttttctctagggggattagtaccctacatgacgttgcttattgaagaatcttaaagtttgaagaaagaaaaatagaaactaaaaggtcaaaaaagaaaattattttgaaatttaaaaaattcaatatacaaaattaaactccataattaacttacaatttaaaaaaaaaaaaatattattatggttagaaaaaattatgattgaatattcttttttttggttggctaatattccttttcattttaggtatacaaagacacctaaattcaaagcatgcatgacttttttgtcaaaaaaaaaaaaaaacatacatgactttggtaccattcccaaagctttgagattattctcaataaaaaccgtttaaaaaatttacaagagcacgtttgaatttttatcaaaatatttaaacactctaatcgaagagtgtcattgattgactaatactttttatctgaatagatggcaactttgggctgagcttactaatttgctaggccgcttctaaggtctttgattgtttattggtaattttaatgttgtactcgaattgcatgagaaaatatggatgccccttctcgcaacctcttgtcgtgattttttagcttggtcgg

SEQ ID NO: 32059 - DNA, 764 bp, Medicago truncatula
  Intron number 1 from transcript Medtr5g091960.1 (locus Med tr5g091960) derived from phytozome v7.0 (chr-ID MtChr5; po s 36039422 to 36040185)
aaggtttttttatacatcagttattctctgtttgcaagtgcaaccgtataaactaattcttaaatattccgtaaacataactcaatagatagagatattatattataatgcatgagtcgggattcaaacattggactcctcatttatttactttaagagttgatttttaacaactaaattatttgaaaaaaaattcctttaattttgtgggactcaaatgatcgataaagtattcctaaaattttgaaggcttctacatgacatcgtaaaacttttaggaaagtttgtggctcatttaactccaacaaattcgaaaaattaattttcagagttgtgtcggaagatacttgattcattaaaaaaaaacaaatcatatcagttggttctcattatcataattaaaataatgggacaaattttattgtaaatgcgatcactagtataaaagtttagttagataaaaataatgaatgttacataaacattaatttagatcatttgatcaggttttgaaggtccaaaagactttttctgtaaagcgctctaactaatcggcgcatgattatttttttggattttggtcctctgaattttgaagggttcactactacaattttggcctttaatagcacaattttaatagcacttatggataaatgctattaaaaaggcaactcatagacctgttatagcactttcaaaaaagcgctaagaaaaatttgttaaaagaatccagcccttgttcgagttgtgttagcctcgtc

SEQ ID NO: 32060 - DNA, 930 bp, Medicago truncatula
  Intron number 1 from transcript Medtr5g101370.1 (locus Med tr5g101370) derived from phytozome v7.0 (chr-ID MtChr5; po s 40568704 to 40569633 reverse strand)
cgattgctgagaagtatttgtttgcaaaatcaaaggtaattaatctctcatttcttcttaattcaattgatttcaatttttatgaactattcattgtgtagaatcagaattaattgcagtgtatgtgttgctggttgttttgaataattgcttagtgtgatagtgaaacattgtaatagatgcataagtgacattatgtatatacaatgttgtcaattgcggattgtagaaaaataatggattgttcaaattcagtatagtcgctattccacaatatttttttagttaatagtgtattgggggacagtagcagtttgttcaaattccgttattctgttgcgctatagcctctatttaacaagtgtatatatcttcgtttttgggagtatgtgttcagaagatgaggataagagtattaggtcctttgctacttcttatgcaattatttgtagttttttttttttaattggggggcagtgctgtcgattgtggatgacgggaaaatagcgggttgttcaaattcagctacgcaacagtggttctattgccggtatttcacaatattttgtgctaaataggcggaacaaaagcgatttctcaaattttgctatgcaatagccgctatttaacaacactgttggggggattatttaatactactttaattgcttgcgttaagtattggattattttcctttcagtttatttcttgttaccactcattttaatcttaaactaccttattgggaatgcactttgcggagtttgttggaaagatgatgaactctgctaatgtgaaaagctttttacttttttgtttttacataaataagagcatttgtttgttgtttatggcatgtgggtaatgttgttaatgtgaaatgtttgttcttcaccgtttcttctgctatcttttttttttttttctag

SEQ ID NO: 32061 - DNA, 747 bp, Medicago truncatula
  Intron number 1 from transcript Medtr5g014270.1 (locus Med tr5g014270) derived from phytozome v7.0 (chr-ID MtChr5; po s 4521137 to 4521883)
agaaaagaaaggaaaaagggtcatcgattcgttctgtaagtaacttctcactcatcaacattttacttcattgtttcttgggttttattccattccgtttattctttttttatatttcaattatcaataattcttttaattaagcacttcttattgaataagtgcttatcatgatcaattttggggacacgttataaaccttgtttcgataaacaacttaattaagtgcttctgtataggctatctctataacaaatcatacatacaataaactcaaaatgttttcatataagctattttcagaaatgatccctgagagtttatggaaataagccgaaaacagtttatggaattttcataagctgttttcatacgttctctaagacagtgtcaaaagtgcttatactagaatataagattaaataagctaatcctcacaaattctgctgaaaagttgcacaagtgcctatctcataagtccaaataaacagtaagttcttccaaacacatcctaagttattattgctattaatttctgtctacaaattgaggttagcttaactattcaaagttcaatttgtttgattagcatgtcttatccatgttttgatagtttcgattcacgactgatatgtattcaataatgtaaatgtctgtttatgcagaaaacatatatagagggcattgaactccattttaaattttggttgagggattaaaccacagttatttgtaggtagagaaaga

SEQ ID NO: 32062 - DNA, 990 bp, Medicago truncatula
  Intron number 2 from transcript Medtr5g007820.1 (locus Med tr5g007820) derived from phytozome v7.0 (chr-ID MtChr5; po s 1311715 to 1312704)
acgcaactcagagagaaatttcagcgcatttgtaagtattcttttaatctattagtattatttttagatactttccattaacatttattttcgatctctagtattcttttaatctctagttaaaatctatatgaataggcaaaaccatttctgaatttgtaagatgttgatcaatatatatattttgttaagctttctgtcacactgcatgagttagcacgttaagtgtttatatgacagttgatcatgatgggtatttttggtggttataaaagctagactatgcagctttataataccatggtggttcaggtccaattttactcagtttcgattttataagcgatttaacttgaaattcatatccaaaaatgtgagatcaaatcattatacgagttaaaacgtgattttaacaccttgaactttggtaatagtttcttgatgaagcttgaactttggttcccatttccttatcgttaggtaacgatcagacaaaagttaacatacttctatttaagtcttcattctcttgaaatttgacatagaagaaatcatcaataattagacacaatcatatattttatttattattttatatttttgtcttaagaaacctgctagttataaaaaaacaaatttatttaaagacaaatcgttaagttaggtagaataagagtttgaattttgactgaagcaattactagtcatactttacttacgtttaaactccagatttttaggccatcttctcatgaaaacgggagggttaagacaaaaagatgtaaaaaaaattaaatacagaaaacaaatatatgtttagctcataaaaaaatatcattgttttagaagtcacttgtgattataatttttcctactatatcgataataaatattgcattacaagatcttattatatgattgattttggtattgccaaagattttgttatactaatgtcaattatttataattactttaggtgaaaaatca

SEQ ID NO: 32063 - DNA, 714 bp, Medicago truncatula
  Intron number 1 from transcript Medtr4g122080.1 (locus Med tr4g122080) derived from phytozome v7.0 (chr-ID MtChr4; po s 28827386 to 28828099 reverse strand)
gtaaagcttccaacaggttcgttttctacaacatttttagattcataacatgcaatatttttaatatgaattttgagatttcatcttcttttttatccataggcttttttttatgaagtatgaattacattagtcattaaagttgttagtatatttctatttaagcaacaaaaagaaaaggatcgaggctccatttacatgttacctgataggaaatatttcctatctaatgttttacttttttatttatctaaaaaatatagaaaactatgtatttctagcatcaatttttctataaaaaaaaataaaaaataaaaacaaaacaccatcaggcattcattgttcatgttgtaattgataataccgggaggaaacaaactaatcgatcatgtaggcaaaccagataatattgtattttttgaatttttggcaagagtgctcttttcggtttttattctccgtgtccattccgacgggttagtttgactttttccataaagaaaacattaagaaaagttctattttatgtgaaatggggatagtaaaaattactctccatctcaaattatatataacctttgtagtatttcacattattgagaaatgtaattaattttgacaaatataattatctgttatgaatagctctcttttaacattccaaacaaattagtttatataatctattttggtgtagggagactgaaaaaatat

SEQ ID NO: 32064 - DNA, 647 bp, Medicago truncatula
  Intron number 2 from transcript Medtr5g035490.1 (locus Med tr5g035490) derived from phytozome v7.0 (chr-ID MtChr5; po s 14668305 to 14668951 reverse strand)
ctcttcatcttccagtccttctcttcgaatttccagtaatcctctttccttgctcgttaattattatcattttcgtgttgaatttcgtaattggatgaatttgtaaaactatgtttgaaactaaatttagatcttgctgtttgttttgtattttaattatattttttttagaaactatttatagctatgtaatgcaataatttcaatttttagggaaataatttctatgagtaatgttagtggagtatttttgttcaatttttttgcaacatgctttatcggttatgttggaggtattttcagtccaattttagcgaatagaaaatttaagaaaatgacactgacacgacacattgacactaatagacatagtgatttaagaaaatgacactgacattgttcacactaatagtaatttaagaaaatgatagtgacacattgtcaccggaagtaatttaagaaaacaatataattgaaggtaattacatatgtcaatatgagacacaggacacgtcttcattcaaaagtgctggtgctacaaaggttataagacaaatgtatctttttatttttatttttgtaataataatattcaatttttattgtaagcagtctctgatactggcattggaagcagcttagaggaa

SEQ ID NO: 32065 - DNA, 248 bp, Medicago truncatula
  Intron number 2 from transcript Medtr6g090350.2 (locus Med tr6g090350) derived from phytozome v7.0 (chr-ID MtChr6; po s 19179594 to 19179841)
aggaacaccattgctagatagattccttcgtccaggtacatcattatcattattataaactacttaattgtttctacctgcataagtttttcaaatgatcaaagacacgatgtaagattctgtagcacattttcttttcataatgccttgtcataatttaagcaattttagcacattttgactacaaattcttctttgacaatacattgtcaggaaaccatctgtagtcgtctggctttttgcgttgt

SEQ ID NO: 32066 - DNA, 802 bp, Medicago truncatula
  Intron number 2 from transcript Medtr5g099930.1 (locus Med tr5g099930) derived from phytozome v7.0 (chr-ID MtChr5; po s 39991489 to 39992290 reverse strand)
ctgtctttgggacaaagagtggacacaactgtgaggtatggttcatcttattacttcaatcaaaccaatacaagtgttacattctcatgatcaaggattattgaatttaggtcttatacatgtaaatgacccaagttaagattatatcctgtactgcatggttttctttgttgttgttacctggttacttatgcaatttacatattttcatgatttattcatcttactgcaagggggtatggttttataaagtgaggctgtagatatcaacatactatagtcatggccaacatgtttgtgatttagtagtggaaatatttaataatatatgtggccagcaccccccacctcccagagggtggcttaattgaactttgaaataaataaataaatagcaatgttattcaagccagaagaacctatatgtttaaaacatgatttcaattgttgatttatatcacattgtatattttttaattttttaattgtgtactcatttacctatgttttttataataaataaaacaatagatgagttgggtcatggggcttgccttggtagttaccagataataatgattgttgcatagatccatgctatgtatgtagatatttgtgtactctgacttggacaaaacacttgttatttttcattcacgcacatccacttgttgaaaatagcatttaaattttttagctcagctaagggtttaagctttaaagtgaaggaataaacaagtaggttttaatttctgtgtaccatgttcttcagctcaaacctttccagttgctcaatactgaa

SEQ ID NO: 32067 - DNA, 472 bp, Medicago truncatula
  Intron number 1 from transcript Medtr5g099930.1 (locus Med tr5g099930) derived from phytozome v7.0 (chr-ID MtChr5; po s 39992384 to 39992855 reverse strand)
aagttctctacgtgcaacctggtatagttaaaattattctttgtaataattgtagaaatgagttgagtggggtttgtctgtgtagatagataagtgacattattttatcgtatactgtacttgttgatcagacagcatatgcccagactaaatttattgttgggtcatgtttggcagagttttaaacaaacatggtgatctgtaggtttgctggtattgtgaagccacatttttttatgcttgtttataaataagttgcgactttatttggatttggtgatttatgtttttttgatgtacgatattcagttattaggtatttgtgatatccagttgaattagggaattgaacatttattagctttcatatgccattctcttcattttcagatattggtagttggtttccgttatcaaattgataggcttgtagtttagttttagcatgttactgatgtcacttgtctgcaga

SEQ ID NO: 32068 - DNA, 793 bp, Medicago truncatula
  Intron number 2 from transcript Medtr4g079630.1 (locus Med tr4g079630) derived from phytozome v7.0 (chr-ID MtChr4; po s 16084452 to 16085244)
gtacaattgtaaaaatactgaagtgcatttgtaaggtatccatatcttcagatattccttatctactctggagtttgttttttctgctttattttcatcaatacaatgattctcttgttttagtcatttctatcaaatttacttataactacttacagagcatgcttatgttgatgacactatttttatatgtttagtcttaggaattagtcttttgaagaactgttaagtttcctgctgtaagaactctaactcaaagtaccattaaacctttggtttggtggtcatccacttggtgataatgggacaattttccttgtttgggatcgagcctccatttgcaccaggaaaagagcgaaaatttataagaatgttgacattgctatcttgattcaaatttgagctttgtttagtttatgcttttttgtagtctgttgctttcatcaacttataaaaagagctgcgtgaccaaacatgattgctattttatctgaaaattttagtgtttatagacatatattatgtagtacttagacaaaaagaaaattagaaaaaaaagttaaggtcacaactcattcaaagttagttgtaatgtgtaaaaatccatttatggatttcatactcattacatgtggaaattctattttacccatgtattctttctttttcatgctacatttgtgtaatacaaaattatgcatgcttttcaggtttcagtacgtagttgttttgaatttgtgtttcttaataccctgcttgaactatatgacattgtttgaagttttttccagaa

SEQ ID NO: 32069 - DNA, 649 bp, Medicago truncatula
  Intron number 2 from transcript Medtr6g094030.1 (locus Med tr6g094030) derived from phytozome v7.0 (chr-ID MtChr6; po s 20566185 to 20566833)
aaggagagcctggagctgtcattcgtgggaagaaggtaactttttatactcatagggtgggaatgaatcgcccaacatatcaaatgtttctgcaactttttaccaaatgagttatgcatttggaagaatttatttggatgattcttattagtacagcatctttctcatacaaacgacatgaaaatgacaaatatattgttggacgagccaaaacctatatatttttgtatgcacattgcgcatatacatttactatgttatattcgtatatttaccttgaaaatctccacattgagttaagttttattgtgaaattcaaatgtgatttctgaaagtttgtgacatcatgctagatgttttacaattaatccaattaaggagcttttctatagttgctttgctctaaaataacaatatgaaacacttacacagacacaaaatacgacactcgtactcacacatagacgctaataataattttaaaaaaagaagtgactggatatatgattagtgtgtcagtattagactgctacatatcgggcactaacacggttttggtctaaactgttggtacttttcatagaagataaccgacacttgcatttgttttgtagggatctggaggtataacaataaagaaaactggaca

SEQ ID NO: 32070 - DNA, 699 bp, Medicago truncatula
  Intron number 2 from transcript Medtr4g026310.1 (locus Med tr4g026310) derived from phytozome v7.0 (chr-ID MtChr4; po s 6415257 to 6415955 reverse strand)
ctcgcagactcgtgcaggtcatttttaattcattctttatattcagttttgattaatttatttggttcaattcatttgttactcattctgtccatattagtttttacaaattgaatttaacagctaaatggatttgatacatcagattccatgtgggcaaaaaaaactaaaaaaaccaaaccaaactgttgaattgaagtgaatcgaaccaaacaaaaaaatcgtaccattgctaacaattttggaactgaaacaattcggtttagttcaaaacaataaggtttgattccaaacagtttggttcgattttaaaatttctaaaatttgtttttgtttggtttttatatttttttttaacgttatcaataataacaattcggtttgatttgaaactgttcggttcgatttgaaaaagtttggttcaatttaaaatatgaacagttcggttcagttattttaaatttaacaaacaatttaattctgtttgttcagttttcatcctgaatcgaaccatacccatccatgcatttatggagtttttagcttttattctttaatttctttcaatagctaaactttgtgcaagttcttcactgtagtaccaatttctcttaagacagaaaattatacaacatactcttcaatcttcatgccattattacattaatttatttcaggttggtataagatcaataacaa

SEQ ID NO: 32071 - DNA, 963 bp, Medicago truncatula
  Intron number 2 from transcript Medtr5g106380.1 (locus Med tr5g106380) derived from phytozome v7.0 (chr-ID MtChr5; po s 42784734 to 42785696 reverse strand)
tggttttaggcttgttcacggtatgtttgtttggactttcttgtgtacattttgttctcttgctatgttttgttttcagtattttggatttttgtatttgttatttaatctcttttatgttgtttgtttttgctatgtttcatcttttctctcagtattttgtatttgttatttaatctcgtttatgttgtttgtttgttgaatcatgcaagaatgcacgttggcaacacatgctatatactccaccaccaaaactagaatttctctcgtaactgcagttgaaagagagaaaagttttctgtgttggcatctttaccattctctctctctctctctcaagaatcaaatcttctgcggtggaagtgtgattgagggaaatggttatgctcgatgaatcccttccccaattgttttttcttagagatccctaattgcttcctatttcgaattatttttgaaaaaaataaaaaagaggagcaaaataaaacagtaaaggagagtgggatcgtgtttcacaaaaataaataaataataataattggagtgatcaagggatcatgaagcaatgaatgcatcctgtttcccctctttctccattattccaatttggggggttagtatataacatgtgatccatccgtgtgttcttcaattcttgcatttcttgcttgttacattcgtaaatttcagcattttcctttcatatattctgttattatcctatttattatagtatactttatatcaacaccaattttaatagtagtggtttgcttttgttactcatggtttaaaatcattgttgtagtttaatgatttagtgtgaaattacaagtattaagacggaacttgtccaccttttcttttattattttgttaaaaatccctttaattaaatctgccattattgttttggctctaattttactactttacttgaatttaggtagtgactatctatca

SEQ ID NO: 32072 - DNA, 379 bp, Medicago truncatula
  Intron number 2 from transcript Medtr4g069910.1 (locus Med tr4g069910) derived from phytozome v7.0 (chr-ID MtChr4; po s 13455795 to 13456173 reverse strand)
ataagcttgaatattattaccgtataccagttgaggtacctccatgtttgaatgttcgtaataatttttgggagattcttgtgaaccatgaccatttgcgtccaacccataagcttgtgagcaaattcgatttttttaaaatacaaatagttatatgaaaatatattaaatattgttaatatactacttgatttaaaaaaaattgcattgaattcccaatcatatagtaggagatcgttataatccaactcaagagactttgacattgaatttacttgattatgaagaagaaacagtggatttgttttactgttacattgtactcgaagatggtgatttgttgaagaaattcataggcagggttggcatacatttgtga

SEQ ID NO: 32073 - DNA, 836 bp, Medicago truncatula
  Intron number 1 from transcript Medtr4g142610.1 (locus Med tr4g142610) derived from phytozome v7.0 (chr-ID MtChr4; po s 35541318 to 35542153)
ggtcactggtgggtgccatctaagcttttccacacgtaaggttccattcttttcaatatttcaattgtaagccagtagtgttcggttcgcggctatgtgattgtggccccaatcgtgaggacatggtctttgatttgatgtatatgtgaccccaactcaattgtgtttgagttgcatcagccatatttgttgtagttaattttaatgttattcattgccatactcttcagtcttcttatttcttgctaatttttttatcagtatgtttaaggggggaaaacttttcatcgagttttcgtaactgttgacttagtagttcacaacatccattgttctcttattagtttctccgtcatgattttgaagttcgtgattattatttaagagaaagactataagggtagttttagagttaatataacaggtgatgcgtgagctcccaaaacatttgaccaaaagtctgtttttttatgttaaactaagtatttctcaagagattgttgtcatgattctttccttgccactgcttgaaaatcaagatgatagacacttaaattttggtcttctgatttatgctcgcttggatctttttgtttgttaatgaggcctatcaggagcctcctagaaagggtggacatagtgatgttttgtttttcattctgattctaacttgagaaaccaactctgccactgttttgagcaagtataattacccttaacaaatctgtgttttcatattttggaatctatttttgtttttggattattgtgtcaaaatgatcctcttcttgcattcaacaggggttgttatttccaggttggaagatctctgaagc

SEQ ID NO: 32074 - DNA, 585 bp, Medicago truncatula
  Intron number 1 from transcript Medtr5g046350.2 (locus Med tr5g046350) derived from phytozome v7.0 (chr-ID MtChr5; po s 19489885 to 19490469 reverse strand)
ctgcttcttctttttctgttaccaaccttttcgcggtaatttttttccttctttcactgtatatattttcttcaatagttgttgcatttgaagcctattttttattttcgcaatatcaaatttgcatgtctactcaatacccacatgttattttctgctttcatttgtaattctttaatttcatcttatacccagataaaattagttcagttagagtctaatttggttataaaaattgaatttttaggttcaaattgaattttgatacaacatgggtgcatttaattcaatatatgtgatttctaagatgattatgattaaagttcattctttttttttaataatttgacgattataattgattgacagtgtaaaaattatttacgcccgtatgtaggcgttacatacctgttaaatctttgattttatgtgggggagtttgcagataatactgttgacgcttcatactttcaattcttgtgttgccaataatgcaggaacattctcttcagaaaagggtaaatttgtgtttcccatttttggttgagaaactgaaacaaacattattctttggattcacaaaaa

SEQ ID NO: 32075 - DNA, 877 bp, Medicago truncatula
  Intron number 1 from transcript Medtr4g156590.1 (locus Med tr4g156590) derived from phytozome v7.0 (chr-ID MtChr4; po s 38826313 to 38827189 reverse strand)
ccaaggtttgttctttttcgcttgatttcattactgattcttgaattcaatcaattgtcttattgaaaaatggtatttttcatgtttacaatttgtcaatttatgtagagcgtgtttggttagctgacataaaatgattttgaattaattcactttgtaaaattgattatggctaaaagtaagtttgatgagttattcatgcaaaagggagttaagcaaatagatgattttgaaggaattgactttgtaagattgacttttgctaaaagtgagtttatatatttatgtttggatattatgtaaatctgaagctagaaatcaattctagaggcaaaaacttggctactacggtagaatattcacgtggtattttctgttcaagcttcaacttagaatcaattttgaagagtaaaggtgtgtttggaaccacgtttggttctttttaattgtacgaaatttcaactcttcaatttgtagcttcacaaatatgtggtggaaatgtctagggaagtgtgacaaacttgagtttgggattgcaaggattgcaaacggtgaaccaaacacatattaaatatattctattcagggacatccaaacatttcaaaatcaattttgaacacctgaaatcaattttgcctcatatataaatgaaatcaaacttacacttatggtgtatagtgtttgttgagggtagggtttaggtgccattttttagtgtgatttagtagtttgtgtgctttctctggtttatttactctatgtgtttgataggggtagggtttaggtgctaatttttagtgtgatttttttagtttgtgtgctttttatggtttatttactctgcgtttgatttgataaatgctacaggtgttgcgt

SEQ ID NO: 32076 - DNA, 874 bp, Medicago truncatula
  Intron number 1 from transcript Medtr5g050070.1 (locus Med tr5g050070) derived from phytozome v7.0 (chr-ID MtChr5; po s 21529409 to 21530282)
aagcaggtaccggtacctatcttctacctctttaaccgagtttgttgtcgaattcacaacattactatactagttatggtttactagggtgttttcaagattcacatagtttctataaccgatgtagcatagggtgtttcaagattcacatagtttctttaactgagtatgtttcaagaatcaagattgcaagattttaaagttgttccatctatgggtttaacatttagtgtttagaaaataaatacctatttcgaaaacatagatcaagatataatcatgtttagattgttatgtttgtgtgtttccctgttatttatttttgatgttatttatttggaaaggaaaatactattgtgcacaacatattttgttgttatatttgcacgaatgggtagataagctcatttgatatggttcttttaatatttttttaacctaaatagcccttgtaattaatgatgcacttctcctaaaagaaatcacaaattaccgatctttgtggcatctccatatcataaagtgagtgtgttttgtcttgtctaatactactagtatttatcttcttttttgacaaaagatagtatttatttatcttattttattactataatgctttagaatttgtatcatgatgaatacaagtgtgtgtagaccgttgttgtggagtctgtggcgttttgcatgtatattttcacagtgcaaattgcatgattttcattgtcgtgctagtcatgtggtaaagggcgccgtgctacatagcaccgctctatttattttttaggaaaggtattaccatgttattgtttgaatcgtattaatgattgtcaatctttccatgttattttttttagttcaacggtctaaaaactaa

SEQ ID NO: 32077 - DNA, 533 bp, Medicago truncatula
  Intron number 1 from transcript Medtr5g072660.1 (locus Med tr5g072660) derived from phytozome v7.0 (chr-ID MtChr5; po s 25924757 to 25925289)
ggtttttgtcagtttcttcatctttttgagtgttttcttccttgaaacttgtgttggggcttttaataaagtttatcctctttgtattgtcttaagaggcatcttgaatcttcatctattgtcttcccaattcttcataaggtgttttcctctactgaattacttgattttgcagtgaattgcatcaaaagcacctaagaattgcttagtttcaggaaaacttgaattacataactcaatatgaaaacattacaaaatgtcttttaaaccatttgaaattattctacaactccactaatttgggtcaaatcataactaaaatgactggaaaatatgctgaaaataatgtaagacgacctgtcatcacaactccaatactaaattatcattagggttaaaaaaagatgaagtctttaccttattctgaatcgacctccctaatttttctacttgaactatcaattaacaccttgaacaagaatcattaaagttttctaggtttataaggttgaggattctctccattctaagca

SEQ ID NO: 32078 - DNA, 921 bp, Medicago truncatula
  Intron number 2 from transcript Medtr6g071480.1 (locus Med tr6g071480) derived from phytozome v7.0 (chr-ID MtChr6; po s 13808643 to 13809563 reverse strand)
agtaagcaacattcaattccttttgtacaacatataatcttatttactgtaaaattgatggttgaaaaattcaattataaacacagaaggacaaaaagattgatcagagttcggttaattgtgcctaggtctctgatcgcattgtggcttctgtagttttctattattttcttcgatcacacgcttgagcgtctgcccaatattcatgttttgttatcctagttggtcgctatgagattaagttgcatcagacaagtttgtcgttagtgtcaaattttcaactcttccttctagtccatcattggtttttttttttttttttgatatgatttgttttagtaacatttattgattgtaattatgcattgttaccacttaacctcacgattagagtaataaacaacaatttttgtttgcattatgtaggctgaactacatgaattatgttctgtttggattgacatatttcagtttatgtactgacataagcatttgtcatactgtttggtggagcttattgaaacaacttttgacatattcatacgttgttttcagcttattttcttaaactccgtgatatcttttacaatggcttaatcttcgatggaaacaaattaactttattttatcttttttaaagaaatagcttatacataatcacttataggataagtgcttatgctccaagcgcttaaaaaagttctttatccaaacaggaccttaataacaaaacctatatgaataattcatggtgatatgtcaaaaacaaagcttttgaaatcttataactatttatcggcctatgagaattacgattagtgagaactttggaaaggtttttaatgtgttggaatatcaattactgatggaaagagtgatgatgtaagtatacttattccgtaattttcagggtttttgata

SEQ ID NO: 32079 - DNA, 745 bp, Medicago truncatula
  Intron number 2 from transcript Medtr5g036810.1 (locus Med tr5g036810) derived from phytozome v7.0 (chr-ID MtChr5; po s 15425092 to 15425836)
tgttttagagaatcaacgagacagttattatgaaacatgccatccatagaatgaatgagagaaaagtaactaactcattgtattgatggaaattgaatgttacaagctatttatactacttaactattaggactaatatgccactagtttatatttccaatagtgcccagcaagttggaaggtgttcacagcacttccaacttgagatgaacaatacaaaagtacatcaaacaaatgaaaatacaaggagaaatgccaaaaatacatcagttgtcaacatagtcatcaagcgaatgcttatccaacaaaaagaaaccacaacttaaggtttacccgcttggaggaagaagcaacaaatcaatgtttaactattgatggtcggatttaggcaagtgtaccaaatcgtttaccaagtaataaactgtcagtagagtatcgtatacatagggattatcgttcaaactaggcaatccgcgttacttatttggaaacaataaaataaataaaagataagtatttagagttttgcaatttaatttgtttgcaacatagcaaaatttacctattttgattgcaaaatgttagcggcagttaggattcctcgaatcccctctatttaattgttagaattacgtaacagtcaagtttcattcatgcttttaatgtttcctatttaagtgataagttcgtggggttttactacctagcagttgtcgagctgcacctactgatcacacgggtaggt

SEQ ID NO: 32080 - DNA, 928 bp, Medicago truncatula
  Intron number 1 from transcript Medtr4g165760.1 (locus Med tr4g165760) derived from phytozome v7.0 (chr-ID MtChr4; po s 41839882 to 41840809 reverse strand)
aaaaacaagcaatatctgacattttgctctacaaggttggtcaccattttactttactattatttttttttttttatatacaaaaaacttagatgagtcgagtctgagtgttaatgccgagtcaataaatttcaagagtaaggatacccatttcttccgtttatagaacaccggtccgattggaagagtaatgttagcaacactttcttttgaacactctctctaataatcattcttttattgatttaaatcattatgaatctacactttgttgaaaattgaactcatacaaagtagtaagacatacattgatttcatcaaataaaatagtactcccccgattgaaaaataaaatgttagagagagtgttgaaaaataagtgttactagcattcccccgattgaaatacttatatatatatatatatatatatatatatatatatatatatatatatatatatatattatctaccaaaaaaattctcatcttcacaatggaattcatactatggtcttgtggattacattcaaaagtttgtgtcagcaaattaaggggtgagagaatgtttgatgaagtcacattagcaagtcttcctaaacagaaaaagaagtcgcattagccaacaaattccagataaaatatttcacatcgtaattatttatgccatatcttatcttttttgacaagttttttttaacatattctcttttttaaacaaatttgttttatatagttattgaatttatttgactcattataatgattactactagtagtgaatagttttggataagatttatcaggtcagttattatctgatgttctttttaatgatttgattttttattcttgatgacaaaaatgaatctaagtccaattaatgaatgcaggccattgtacacaccaagttaaaagataaggaagc

SEQ ID NO: 32081 - DNA, 708 bp, Medicago truncatula
  Intron number 1 from transcript Medtr4g134210.1 (locus Med tr4g134210) derived from phytozome v7.0 (chr-ID MtChr4; po s 32321835 to 32322542 reverse strand)
agttcattcctcaggcacctcctgaaggacctccggtaactactcccttcgatacatttttaaccgtcgcttttgaagaaaaattaactcttattccatttgtagttttcaagttcaatgcaacattaactattgttttgtcagttaccaacttaacaattgactgcaggaatagaattagatggaatgagataacaaataactcatggtattgtaggaaaaacaaacaattctatcaaaagtaacaaaatttattagatttcttgatacgagtaaataagcgtaaaacaacaaataaaaagaaacagaataatagatgttttattgctgttatgtggcttagaaattgagtactttttgtgcttctttccttgtgtagcaaatggccagaacctatgaatcaccgacacaaacatcaaactcaatactgacatttacatgttgatactgataataattgaatatatggaatgactgaatgtaactacatgtgtcggagtcgtgtcagacactgaatacgtcttccatatttgaagtgtcagtgcaacatatcggagaacacatttagatgtgtaactactaaggactgccaactaaatttcttctagttgaagtaaattgattcttcacattgtttgttttgttatcttgtaatatgcatttacttttgcataaaaataatgtgcagattcatacgtccaaaaaagc

SEQ ID NO: 32082 - DNA, 625 bp, Medicago truncatula
  Intron number 2 from transcript Medtr6g077810.1 (locus Med tr6g077810) derived from phytozome v7.0 (chr-ID MtChr6; po s 15527501 to 15528125)
ccagctatatcccttcagtccagaactcttaaaaggtgatggaagcttttcaactgacgtctaataaattgcggtggatcatatagatgaatgctgttacaagtaagatccttatactttgaaagcataagttcttataatcataatattttcgaaacatctttttaaaaagaagttgatcattatccgaaaataatatattttcaaatagcaataacttgtcatttcttaggtattatgaaaagaagtagtatgaagaccattaatgtaaatgtgtacctttttccggcaggtaaaattagatcaaaacttcatcttatatgtgtttcataacaaaattgtagtttagtacatcaaaaatagaaatgaaattctatgactacatagattgaaagtccttttatctgatgaaattaacctctctttttttttcttctcattttgaatgcacgtttccttttcacaattgtagcaagttaggtttctggttttctgcataatggtgtgcatgagaatttcagactgtccagtcagttatttttggaacttttctctaactatgacctaagcattcatttcttcttttacagttcattaccagaaatccatcgattgttgtctggct

SEQ ID NO: 32083 - DNA, 621 bp, Medicago truncatula
  Intron number 2 from transcript Medtr5g086100.1 (locus Med tr5g086100) derived from phytozome v7.0 (chr-ID MtChr5; po s 33001138 to 33001758 reverse strand)
atttacaaggtgtcactgttatcatttgtaaacatgtgagtcatgaacggttacctctacttttgaagccttaagaaatgatgatccagaaggaagtttctcgtaacctgtatatcagaagagagcgatccaatcttgagaaggtgaaatttttaggggggtatataagacattgatagatttgtgctgggggagatataattaatatatagttaggtattgggggctgtcgggatggaatgattagagaaataaggcttgttgccaataaataagaagagggagaggtattcttactgtattaactattaagggaaattctttccgaattcttctaatagagatactagttccgatcaggcattaaatggttgaaagtgcaggatctgtgctaatgtctcagaatgaagtaacggtcttttaactaccctcttcatctgcttataattgacttaatccaaagcaaaagtaaaataaagtttcttaagaatgggttagttgtgttatctgttaactttatataattgctttggtagtttgatattatttacagagagaagtttttttttgctttcatgtttttcagattgcagctttgtcggtggcattatttagagcttt

SEQ ID NO: 32084 - DNA, 884 bp, Medicago truncatula
  Intron number 1 from transcript Medtr6g020260.1 (locus Med tr6g020260) derived from phytozome v7.0 (chr-ID MtChr6; po s 4722117 to 4723000 reverse strand)
cctcatcaattctggttctgaaaatcttcgtcctggtaaatttttacaacttgtacttttatgttttttaccttttatagattatgtccctatgatctatgtggggacatcaaacttttttttttatgtgcctctgatatgttttggtatcacggtgaatttgtcagaatttcaataaacaaatgtaatttgagcaaatctaccgtgatacacattgagactttgtcactactcaaatctaaaacattggaattttttttttctttctaattttcttttaaatttatcattttatcacttgagagaagtataaaatttagatcaaacccaaattctctggtttaattagttttgtaaatgatttttatatgaatctcttggtaattgagggtttggtaagatccatgtggtgggtgtttgttaattgtttttttatttttggtacataggtgtatttgttagttgttattgttgaaagttatgatttttttcatacaatgttgaaaacttttagaagaaatatggaccatgaaaaattaaggttttttttttggtaacccttttgattctcccggtaatccggagtttggcagaaaggtaactaaatgctgataaacctgaaaaaaattactacgatttatgggacattaatcattatgataaaaaaaaaaaaccaattatttactcattttccatgttttgtactcgttattttttgacaaagttttgtacttgttattgtaatattgaccagcaatttcaaaccttaattccatgtcaaatttctaaagaatttggggttcttttgaaaaaattatatctatattcatattgattgtgattttggttttttttttttccagcaatttttcgttcattgctct

SEQ ID NO: 32085 - DNA, 692 bp, Medicago truncatula
  Intron number 1 from transcript Medtr5g034500.1 (locus Med tr5g034500) derived from phytozome v7.0 (chr-ID MtChr5; po s 14175175 to 14175866)
ttctttccctccaaaaactactcctactaccaaaggttcaacctttactctcttagtagttctcactttggtcttaatttgttcattttattgaaaaaagtaggtttttttatgtgaaattctactacatgttatttggacaagttttgtttcatttttagaatagataattggattaaagttactgctgagtttgagtttatgtatttatttggagtatttactattttggtcttttttcatgtactaggttagtttttcgttgtactttatgagaatttggttgaataagtaatggaatttttagttggtaatgtgtagtttatgctgtccttttgtgtgtgttgtgtctttccttcaaactttgatgtgggatagagagtagagacatgttatgttcttttggcttctttgaggcgcgcttcacaggcgttgctaacatgaatttgaagagcgattcagaagactaaaacttaagttgttagtaataagtttaaagcgaacgattagcttaaaatctcaatcacaatcatttggtttccttttctgtatttgttgaccctttattcctgtaagtatgttttgtttcgaaggatttaatgatttatgatccccttggtagttgttcttcattccaatatgttctatcaagttttctgttttaatcactttctttcataggtatcccggtc

SEQ ID NO: 32086 - DNA, 114 bp, Medicago truncatula; identical to SEQ ID NO: 30816
  Intron number 1 from transcript Medtr5g066710.1 (locus Med tr5g066710) derived from phytozome v7.0 (chr-ID MtChr5; po s 23563005 to 23563118)

SEQ ID NO: 32087 - DNA, 701 bp, Medicago truncatula
  Intron number 1 from transcript Medtr5g046900.1 (locus Med tr5g046900) derived from phytozome v7.0 (chr-ID MtChr5; po s 19748714 to 19749414 reverse strand)
ctaataagagtgtgtttggttcagcttctacacctcttaaaaacacttctggtagcttcaaaagtgaaaacttgcaattccaacgtgtttggttaagcttctcaaaatcaattctcatctccaaaagcaattctggatgaagctacaattcctaacttttgagttagctagaatcaattctctaataaattttatattttgattattacaacctattattttcctttatgccctttatcaattctccttctttttgctttatgtacctaattcattgtgtttctatgatttagaaaaaattatgcttcaattttctttatgatgaattcttgattcatgtacggaatgctcgaatatgacaagtagtaatgcgtttgtgcataaatcagaatgctgaaccaagcatgtttgtaaagtttttgaaaatgtgtaaagaagattttttttttactaaatgtgtcaacaaattctatgcatttgacaaggactctttctataaggaacttaaaccagaaaattatgaaccaattggatttgttgtgtgataatactgttttgtactgggccttaaagatgtgtttactttctacagggctatttttatcatatactgtacttaggaaattgcatttaatttagttgctgatgttgtccccgatttgtatgaaagcgtgccgattgatgtttcaggcgtggtataa

SEQ ID NO: 32088 - DNA, 880 bp, Medicago truncatula; identical to SEQ ID NO: 31344
  Intron number 1 from transcript Medtr4g107580.1 (locus Med tr4g107580) derived from phytozome v7.0 (chr-ID MtChr4; po s 23533528 to 23534407)

SEQ ID NO: 32089 - DNA, 267 bp, Medicago truncatula
  Intron number 1 from transcript Medtr5g091650.1 (locus Med tr5g091650) derived from phytozome v7.0 (chr-ID MtChr5; po s 35865702 to 35865968)
tttgacacctctaagtcacatacaagcaaggggaagtaaagatcaagtatgcatgcttatagtttctgttcagttttttttattatattagaatcaaatgaagatcacattaattaaaattttgagtacattagttcattataagaaacagaacatattatgataaaaattagataaagacataaaaaaaaaaactataatattgaacaaataattgaaactcaagtgttagaacacccttaatcccgcctgaagattcacttgctt

SEQ ID NO: 32090 - DNA, 659 bp, Medicago truncatula
  Intron number 1 from transcript Medtr4g080370.1 (locus Med tr4g080370) derived from phytozome v7.0 (chr-ID MtChr4; po s 16489605 to 16490263)
gattttgataggactctagggcctagtaacaatgtcaccctaagcctgtatttaaagagtttatttcattgtagtatatatgtatgcctttggttttactcttgcaagttgaaaggtttaatgtatttattatatttgtttacagtttgtcagcctcttgtttttgctttgaagatactactcactgtatttttgttggaattaagtattaaagtagctttgagaattaggagaaataccttatatttagggtagcaatggatttgtttgaggaagtgttctcccctctcacaagcataactaatcagctatgctatttggacacacgattttcgacgtagtatctggacaccgtatactactgagtgtgtggacatagaacccgaggtgagagaacaagcaactgatgtgagagagtaaataatatagaactcggaaaccctttaaacatatggtgtctgcttccggaaaatatttctcataatatggttgcaatttcagaacaaacggaacaattttatgtttgtatctttcatgtgtttatatagggaaacagaagagtagattgaaagttcctcttaacactttcattttgtgctcatgaaaatatcaaaatactccggaggtgcttggtatttttgcagtgcttgtgaacaaaa

SEQ ID NO: 32091 - DNA, 882 bp, Medicago truncatula
  Intron number 1 from transcript Medtr4g144550.1 (locus Med tr4g144550) derived from phytozome v7.0 (chr-ID MtChr4; po s 36423788 to 36424669)
tggacataggttttcattttaattggttttcttctcacttttctattttgcgtgtcaactggtgcactagtgtgctaaactctgtatactcaatgataaagttttctgaaaaattacaatgctttttgtggagaatttcaaattttcagaaaagaaaagagtgatggtatttttgaaattttgaggaacctatactgttttagaaaccagtgatagcccaatgcatttgtaggcctgaacgaatttgaattgaggatttttaataggttgacaaagaaacattaaaaattaagaatcataaatatgtaattttatttgaggcatgtcgaacactaattattggtatcactcacgatcagcatttgaacatttaaactagaaggttaatacatacaaaaaattaaaacatttaagatcaaacttgcaacataaactacaaatctacaactctccatttaaccaaattaggtgctaaaatgtttaaagaatttgattcatgaaaatatatttaaaccaaaaaacattccgaggcctaatgtgaggcctaaattttttggaggtctaaagtccttattttagtggtaacccccttggtctggatcggttagaattaatgtttcaatggtttaatttttctaattttgcttcattgatttttggtttggaccggaccggttagaaaaatgaagtggtcggagatgacgtgttcgagattatagcaactgaaaaagacatatgccgttctaataatcgtagctcaattgataaaaaaaaaaaaaaaaaaaaaacatcgcatataatatatagaagttagggtgtcgttcgttgtggggaagtggaaacaactcaacatttattcgtttgccccattttcagcgagtt

SEQ ID NO: 32092 - DNA, 646 bp, Medicago truncatula
  Intron number 2 from transcript Medtr6g070450.1 (locus Med tr6g070450) derived from phytozome v7.0 (chr-ID MtChr6; po s 13280860 to 13281505)
tttaaggttatatctacccttgcaccattcttcaggtgtgtaatgggatatgatgccttgttttatacatattcatgcacaacttctggaaaaaaatttgaggcaagatattgagaaaaccaatatttgggttttactaggacttgttctcctaaacttttgatttgttgaaatgagtaattgtttttaccccaacatgactttgaaagtacatatttggataaaagaaattgtgtcgtatggaagtgtatttatgaagaaattatgctgtctgaaggtgtacctttataaaatgtgtagtttttttttttttggtgaaatatggggtgtgaaaagtagtgccattgtttaattttttttttttgaaggattgtttaaatttgttggttgtgtttgaaatattaaattaatttttaaattttgttgtgaaccgggtattctctacacgcaattgttgagactattctttgagcaagataaaatcataataagtgacattttttaatggttggtagaattaccatacacttcacataagagcatatccaataagaaatgttttgtctaatagcacagagggtttttttttttggacaaataatagcacataggagctttttagctactttcattggagaagaaataa

SEQ ID NO: 32093 - DNA, 595 bp, Medicago truncatula
  Intron number 1 from transcript Medtr5g094740.1 (locus Med tr5g094740) derived from phytozome v7.0 (chr-ID MtChr5; po s 37514886 to 37515480)
cgactgtggctgatgtttcaattcacatgtaattttgcgatgtcactgagctagtttttctgtttgagaattcttttgaattgaattttgtaattgtgttttgttttcaagagccacggtagagaaagaagaagtaaaaagcgatgttttgagggatgaagttatttggattttacaagctattacatccacagggaggttttggtgagtgagagttacttaactttgtgtgcgtgtgttggttggttattagattattaattatcatggtccaattgagttagagaagaatgtttctttacaacaacatgtagaagacgtaaaaaatggaactttagcatttccagttagtttcaccatgggttttgctatgaaaaggaaaagtatgaaatggttgaggaaaagtgtggaagataaggaattttgttcttactgatgaacaaacacgttggataaatttgagattgttgaagatgaatattgttggaagacaaacaggggtttgttgtaatgaaaatggatgagagaaagtatgctggtttcagttttgattctaattttgtaagtgaggaaggtgatgaataatcatgtgtag

SEQ ID NO: 32094 - DNA, 887 bp, Medicago truncatula
  Intron number 1 from transcript Medtr5g040500.1 (locus Med tr5g040500) derived from phytozome v7.0 (chr-ID MtChr5; po s 17282666 to 17283552 reverse strand)
aacaaggtcagtctagtcttttgcaacaatcatgtgtttcatcataaactacatcttattgcaaaacaatttgggtgtgatgatttcaaatatgagaaggtgtttgatttcatggagcacacattaaaaactaaggataatcgcaaagtatcaaatcatagatatcgcaaaatatactagaaagagctctaactttatgatgattgcaaatgtcttgatgactatttttcaatagagaatttgaaatcttaattaagagtaagtcaacacacttctgcaactccataaaaagtttggattctgaaaaccatgaagatatcgacacttttgaaatgattaataaaaaagaaagatttaggcaagagaacgatgataccggtacttttgagatattgagatactactaactgataataatactctttgtttttttttaggttatgaaattagaacttattgttattcctttttttttatcaaagagaataacaataaagaggagaagtcgtgacaaaaaaaaataatcaaagggacaacaatagtattattatcagctatagtacctcaatatttcataagtttcggtattatcgttctcttgcattggtcttttctttttattagtcatttcagaagtgttggcatcttcatggttttcacaatccaatctttttgtagaagtgcaataatgttgacttttctcttaattgagatttcaatttctctattggcaaatagtcataaagacatttgcaatcatcccaaagttggagctctttctagtatatttcgcgatatttacgatctgatgctccgtgattatcctttgtttttaatgtgtattccatgaagtcaaaaacctcaaatttgaaatcatcacacacaaa

SEQ ID NO: 32095 - DNA, 609 bp, Medicago truncatula
  Intron number 1 from transcript Medtr4g134060.1 (locus Med tr4g134060) derived from phytozome v7.0 (chr-ID MtChr4; po s 32263844 to 32264452 reverse strand)
aaatagcaccaactcttatagggtttgcagatcaggtatttcatatatctcttttgtttaccaccattcagtttttgcttattcattcctattgtttacgtttcagtctgtttttttcttttcctgacatgacaaacaaagctgtttctgtttctgttcttagatttctttcttcatttgacttggttcttgttcttttttgttaaccttttgccccaattttttttattcacgtttttctctctctcttttattttaagaaagtatttaaaaaaacaactttgtataaaaagagggtggtatttttttcattaagaaaaattatgtacaataatgtgccaatcctttctcattgttcttgattccagaattatcttttcaccatgataaactaaatttgattttgtatatgcatcaattttagctaagagcacatacatgcatttgaaccttgcttcttttctagttttattacttgttttttgatgtataaattttgagtaatctttttttatatgttgataattttagccgttttaattgtgatttcatttttattgttgaattttgacagttagggctttaccttgcagaagtattggactgaac

SEQ ID NO: 32096 - DNA, 721 bp, Medicago truncatula
  Intron number 1 from transcript Medtr5g104470.1 (locus Med tr5g104470) derived from phytozome v7.0 (chr-ID MtChr5; po s 41900585 to 41901305)
tgttagttgtagagcctcttaggagaacaggtaactaactttgcttatactttaatttactctttaaattattatgatgattatgtatatatgatgattaatgatttgtacttcctctctcaaaagtgcttttgtatgtagaagagtattctgattaattttcttaagtccttctaacaacttctacatctacttttcatgcacaagctctagtctgtaaccagttgatagtatgttgattagataaaaacagtgaatattgttggaccggttggtgtatatgtgtgaatggtagctaccatgtcactatagtaggacctttaattttatttgtaagtttcaaaggttccaaattaatttccaaataaaagaaggaaaattgtttaaatacacatggaacatcatgtctcttatataatgattatgatgcttatgtaccattcaaagcttttatattagttaaattcaattatttgaattacgtactaaacattctttatttgcttgtgatgtgatgtgatcagtttgaaaaaatcttttcttttgttttttgagaggtgaaaaaatcttgtatggtcacaaaacttagacgcatcatttatacaccaaaaaaagttaaagaagaaaaaaaatgacatatatttttaaaataattaaataatatgtatttttttaatgtgcgcaaatagttttcgttttgagttgttaccgttatcaggta

SEQ ID NO: 32097 - DNA, 352 bp, Medicago truncatula
  Intron number 1 from transcript Medtr4g108530.1 (locus Med tr4g108530) derived from phytozome v7.0 (chr-ID MtChr4; po s 24057865 to 24058216 reverse strand)
aaggttgtttcttcaattcattcgaaacactctaaataattctaatttagttgcttttacaaaataatttttttagatttgtacttcagctagggattttctggttttctgacgatgaagaacccacaagaaaatttatttgggacttgaacgacaaatacaagaaaataaatcttgaagtgaagatcttatactatcatgcattaggattagaaataaaaagctcaatattagaaatttgatttctgcaaactaaattctagttaattacatttgatggaaattcttaattttggaattaatcaattgattacaagaagctgaattatataaccaaaacaatagctcatct

SEQ ID NO: 32098 - DNA, 669 bp, Medicago truncatula
  Intron number 1 from transcript Medtr6g077890.1 (locus Med tr6g077890) derived from phytozome v7.0 (chr-ID MtChr6; po s 15703570 to 15704238 reverse strand)
ggtcagttcaacttctaagatatccttttggcttctttaatttattttttttagtatgagaggatcttcatttcatcttaattttccatggatttggggtggaaattttttactctataacctaacaattatatccttacccctacaaatcataaaagatatcaattttaacccttcacaaacgaatttgatagggtataattttcatttgaggttcatatgtcctcaatactctcttcttcctccaacctgcccaactctcatcaacatagtggattatttattaaacagaatatcattttttcttcttatttttgttagagcatttcttctaattttttgtccatacttttcgtataaaataacaaagctctagtaaagaacattataatcaatctctaaaaaaacattataaactttattttttttgcctcagataataacaacatagaaggtttataaagatatttgattaaaattgtatgttaattttattgattactatattgatcctccatgtattagttacaatgatgacaatttcttattcgaggaatatataatttgattgttatattgatcctccatgtattagtggaggattgggtaaaacgacacttactcgacatataagttaggacatataactgaaggaattccaatcataaa

SEQ ID NO: 32099 - DNA, 816 bp, Medicago truncatula
  Intron number 1 from transcript Medtr7g087540.1 (locus Med tr7g087540) derived from phytozome v7.0 (chr-ID MtChr7; po s 18801410 to 18802225 reverse strand)
cacccactacgaagatcgtgtctcgttcatctctggttagtttcattcttatccttctttcttattttctttcattttaacgcgtaataattataattattatctgttttctgttgatttttttttgttctatgatcatgcaactctatgtagcgtgtttaatttgttaatttgtgctgttattggatctttgtttgtgtagatttttttagttcaattgcatggttatattttgacttgttatttgaattcagtgaattgatgaagtttatgattggttttttaagtgatttagtgaaaattaatgtgaattttgtgattcgagtgagtgaaagaaaaaggtcatgttattttaatttattattagatttagggggatgaagatttagaggtgaattgcaagagattgatgtaactatttgcatgaaatttttattattttagtttttttccagtctaagagtataaccttataatatctcgtactgattttaatccctcttggaaatgtttgtagaatgatcattagtgttactctatttatacaaggaatgactctcattttttcattatttatttctatcgatcattttgtgcacatgcctgtgaactgtgaaacttttagtttttttctttcttcccaaaagtagtagttttcttgtagatgtatgcattgttgtgatgaaatcagacaccttttttggtcaacctaactgccctacctctcccctgcctgcataattgtttttgctacgtgcgtttgtttttcactttttggttttgtagtaaaattagaactctgatatcaactttttg

SEQ ID NO: 32100 - DNA, 431 bp, Medicago truncatula
  Intron number 1 from transcript Medtr7g005590.1 (locus Med tr7g005590) derived from phytozome v7.0 (chr-ID MtChr7; po s 494500 to 494930)
attttcctcaagttagaaacagtaattttctacaggtaccgtacctacctccatctccatctccatcaccatgctattattaaagtcaaactcttttcatataagttataacctgttttcaccttaatttcataagttctttttaagataccttataccaaaacaatttaactttattttttcttctgttataaaaataacttatacattgtcctttaagctggaaataacctgtttattcaaacagggcctagatagagcttatggaaataattgttaaaagagtttctggacattccataagctcaccaaccagtctcacaagtacttatggaagtagataggctcaaataagccaatccaaataggctctacatcattcctttttctgatactcacttttgtgtctctttcaggaaacaattgttagc

SEQ ID NO: 32101 - DNA, 328 bp, Medicago truncatula; identical to SEQ ID NO: 31145
  Intron number 1 from transcript Medtr4g142160.1 (locus Med tr4g142160) derived from phytozome v7.0 (chr-ID MtChr4; po s 35273726 to 35274053 reverse strand)

SEQ ID NO: 32102 - DNA, 681 bp, Medicago truncatula
  Intron number 2 from transcript Medtr5g077970.1 (locus Med tr5g077970) derived from phytozome v7.0 (chr-ID MtChr5; po s 28839443 to 28840123 reverse strand)
tatgtatatacaatgattgcttatgcaaataaatatgtctttatgtattatttataagcatgctaatgtagtttatgaaaaaacaatttatgaaggtacaattttcgttagtgagaatttataaattaagataaaaacttatttatttgcataaactttttttcataagctcaaaataagctcaatccaaatagggccttaaactctcggcagatagtgtcttcaataagattagctctcactaatatttatttatttttaaaaaatcatctatcactaaatgaaacttataaaaaatataattaatttgtctcaaggtaatttatagaaataatttttttttagagtaatttaatgttaatggtcactatgtatgttgtccgagagaagatgacatgcaagataccatatactaaaaaaattggtcaccgaccgacagtggcgaaaaggtccaatcaattgaaaacatcaaacattttcatcttgggatggttatcttactgatgatacattttagttatattctatttttgatgagagatttgagaaaagggtcaaatattaaattagattcgatatattagtactgggggtatgattcttgctttaatattttagatttcggtagtgtcaacaaaattctttatcttctttgtccatttgaaaggaatattatatatt

SEQ ID NO: 32103 - DNA, 605 bp, Medicago truncatula
  Intron number 2 from transcript Medtr4g086780.1 (locus Med tr4g086780) derived from phytozome v7.0 (chr-ID MtChr4; po s 18090387 to 18090991)
gaaacaagaaaactatttcacaaataaaaaaaaaagtcacatagaaaaaaaatagcttgaggagatgaaagtttattcttggaactggttgtggattaaaatcaaaatattcacgattacaatattgtgcagtcgtgtttgagtccgtttgcttgccttgacaatattacattttgaaaatttagatggttctggtgattttgaagtgcataattgacttaattcataccctctaattcaactcagattttatttgtctcggttgtgtctttatcgtagcagtgtgttaggtttgcagcagtttgggtggtactgtgctctggtatttttttatttttttttggctttgggattgtgtgcatattattagcaagttctgatagaattcgatggagtatggatattatatcgctcagatttgtggtcgatttgggtggttttaaaattgaagtggagggaattttttgtttgtctttttcggctatgtgtaattcaaatgcaacaagtttttgaggatttgttcattgtgtgctatctaaaattccttgtttgtttatctccgggtttatagaagacgtttttgttttcattttctatttgtatag

SEQ ID NO: 32104 - DNA, 1015 bp, Medicago truncatula
  Intron number 2 from transcript Medtr4g157310.1 (locus Med tr4g157310) derived from phytozome v7.0 (chr-ID MtChr4; po s 39173140 to 39174154)
gctctcatcaaaaagcttcgcaaagcggtacaatactacttttctttctttctttcttttattttatctgaaaaattaaatatcaaacaacaattttcgtgtagatcagcattttaggcgtgttcaatttagtccattttatttgcaaaatactaacaatttggtaccaaaaattggacaatgtcaagtcagtcattagcatttttgcgattttgtccaaatttagtgcccccattttaatggtttcatgtcctgatgcaataattgcatctagagcataagttagcattcaagtcttttgttgattattgattttggtgagttcggtctaaagatatattttgattgcgggactaaattgttattgagggattaaattgctcaaactttacaacataccaatttagttcctttaatttgtaaaatagtaatttagtcccttaaattgatcatcaatgacagccacctttttttttttgcaaagttgccactaccattttcaacgttatatgcttattcaagttaatatggaagtcttatattgattttagtggatctttactaaagtaacattttgcttgaagaacttaattaatttgttattctttaattttagtgattactcgaattttcaaaatttcactgtaggcctttatatttgcaaattagcacttaagtaccttaatttgaacaatatgagtcacttttttttgctctaaatttagcactaccattttaaaggttttatatgcgtctaatgcaccaagagactagttaagttaatatctaagcatttattgattttgatgaatgttaactgaatagagatatatagatacagggactaaattgattggtggtttttttattttaaaggactactttgtgaatttgagggacttaattgctcgacccttactatcttttgtactggaatgctggctgagtcatattgttataattttgtgaattggttgtagaaaagggaggcaccacctggtgagaagccagaacc

SEQ ID NO: 32105 - DNA, 360 bp, Medicago truncatula
  Intron number 2 from transcript Medtr4g025050.2 (locus Med tr4g025050) derived from phytozome v7.0 (chr-ID MtChr4; po s 5895070 to 5895429)
tttgaaataatacaaaggaatttatgccaatctgcagttagagatttcggttgaattggctgaactttgttatggtcatcgcttgtgtttttcatatattcattcttttcaattaggattgctgttctaacgaagtccaacgcttactgtgcagaactttttttttcacggttattcaatcagatcttatcattatactattttgcagtaactttttttaagtatctcaacaaatatttgcacgacaagttctgattggatgattgtattcaaagttttacactgcaatgcatagttctttgatgtagttatttgtgtgagtactagcagattggaaaagcagtggtgtgactcacaaga

SEQ ID NO: 32106 - DNA, 752 bp, Medicago truncatula
  Intron number 2 from transcript Medtr6g027730.1 (locus Med tr6g027730) derived from phytozome v7.0 (chr-ID MtChr6; po s 6064003 to 6064754)
attcagcaaaaggctttccctcccaattttcacaggtatgaaacttacattggttacaagatttgaattccaacccttagagagttacataaacaaaagttgaaacttgaaatagtgacggaagtttagagatagaaaaaggcaaaatcgatctccaaggccgttcctatgaaattgtaggctcgacttttataataaaaataggcatgtaataaaataaaaacacaattctgtgaaaaatataacattattgtgattctttgaaatagcttttcaattgattgattaagtgattatacaaattggatggtttgatagcattgaattcttgtctaaaaagtagaactagagtctaaaggataaatgtatgttggatttgtggtggttaccagtgtgtggcggcgcgcggctgagagaacgcaagagaggttgagaagaacaaagaagtagtgttgttgctggaagaaagaagaaacaaagacatgtattgactataattagtttttgagtcccgtctttttgggtggcccagctcgattgaaccgtttccacatcccaaagaatgggcctgtctatctctaatttagtcgctaaccgtagagttgttaaatttgattaccaaatttatactcaatgaaaagaatttcatcattattaaatttttcttgtattggtcaaacttttaccattgagttaacttcgttccaattttcacaggtagtagaatactcgacgctgaaggtaagcctatc

SEQ ID NO: 32107 - DNA, 460 bp, Medicago truncatula
  Intron number 1 from transcript Medtr5g099680.1 (locus Med tr5g099680) derived from phytozome v7.0 (chr-ID MtChr5; po s 39869862 to 39870321 reverse strand)
ctctcagtaaaatttcaattgtgagtcgacttctctttttctacaagaagtctaaattggatagaaaggggaggtcaaaataattagctatttgcattcatagagtcgaatcaaaactgatttctttttttcatatatagaaaaaccaaatattagaaaatttaagctaaatcattgcaacaaattagttctttaattttttaacgagttagtccatataatttgtaaaagtgtaagttattaaccgtttaaacaaattatgttacaaaacagttgatgtgcttgttatttgctctttgtgactagaacatatatagtgtgtagctcatcctacttttttatccatcaagaactatggtcggtttacatgaagaaaatatgtattgatgtcttgtttgttaccaaaattgtaaagaatttgtgtttacgtatagtgggttttagtagggtagagcatcgg

SEQ ID NO: 32108 - DNA, 982 bp, Medicago truncatula
  Intron number 1 from transcript Medtr5g094900.1 (locus Med tr5g094900) derived from phytozome v7.0 (chr-ID MtChr5; po s 37613734 to 37614715)
gaaggtatgttactctcatgtgttttaaatatatacatatttagaagactttttttacacaagttggtaattatgttagagtatgcagtcaaaaagtacacaagtctttgataattgtgtgtccataaagaaaattcataggttaatatctgcagaaggaagaagaaacaaggcttatgtttgtgaatttgcaacttaattaatgatataatttttatattgcagaaaatgtcatatctattagctgcagcatgttaaatagattatgtcatagaccttctgcatctattagctgcagcatgttaaatagattatgtcatagaccttctgcataaagccggtatatcacattgtactacaaagttatgtgatagatatcaattttttgctgctatgacattcttgtcttggtttatttcaacaatttgatatctttttaatgtttggtttttagttttaccttctttgtaaaaaaattatcttgcttcttgttgataaatatgaaatatgaatgaaaaggttgcacatgacaaaatcatgacttctttggcatatattcattcattttcttgtgaatataatttttatgacaataggtataatatactacttgaagaactaaatgtatgatttttggtaagaaaaaaaatctaaatttttaagtttatggggcattttgcacataagtgcaaaatttcagggggagtatttgatcataaccgtaaacaattaacagaaaaatttgacggagggggtaaattgattaacattatgcagtttcagaggataattgaagttttgttaatttcaggagataattgacgaaacttacaatttcatgaggaaaattgactatttactcatttgtagacggtctatcgttcataatcattatatcaatttatattttgattttaattccttttcttttgttctaaagattctagtcgctcactcatatcaagtgttgagaagttggtaa

SEQ ID NO: 32109 - DNA, 987 bp, Medicago truncatula
  Intron number 1 from transcript Medtr5g078810.1 (locus Med tr5g078810) derived from phytozome v7.0 (chr-ID MtChr5; po s 29210686 to 29211672)
ctcattttcattggttggtgggtaatttttcaaaggtaatctagaaaaaacctcttaataatgtgtccaaaaatttattatcgaagaaattagtgatattttttttgccctttgttcctaaaaatgtgcctcactgatataaaaaatatcggtgatatttattatccaagaaattggaataattttcataacaaaacaaattctattttagttgaaaatgggtctactagagaaattaatcttaatcttgtttttcaaagatttcaaaaaaataaattatatcaatatagtaacgtcaactttcatgaattgattaagagggttgcacaattgaatatgataatgtaagatcatgcgagacacattcatgatcatgagaccgatgtgagacgcatttgggatcatgtggcccactaaactctttttgttttgttgttctttttatcaatagctgcatttgacatacgatgttttgtggtgctaaaaattcagtatacgcaagagctattgttctatacttctacgatattttattttgttttggtatctatagaatatttgatttattttcagatgttgcctaaaaaaatatttatttgcctaaaaaacatttatttaaaaaaagtttgtacaacctagaccttatgtaaactagattttagactcatgtcatgtcggtcggttcgacttattttcactttgaagtattatcttactagatagttatggtggagtattatcttacatgtgatcaatggctgttctaaggccttgtgagcccaggcaagtgctttggctctgacccaaaatttttacaatttcttatgtaaattcttatgaatttcttatataaacctttataaattgggcaatttctttagtttttgattatttgcttttaatttcttatgtaattccctataaacgtgttgattttttttttttttttttgccaaggctttacaataatccaggctccgcccctgc

SEQ ID NO: 32110 - DNA, 792 bp, Medicago truncatula
  Intron number 1 from transcript Medtr4g121790.1 (locus Med tr4g121790) derived from phytozome v7.0 (chr-ID MtChr4; po s 28674765 to 28675556)
atgtgtgaatttacatattatccaaaattataaaaaagagtgttgttgtaattgagttgccgaaaaatgattgatactcatatttacatcaaatgaaatcaagcaaagaagtagcattagtgagtgaggataatctactctaaaattagagttaaggtgatctgttgaaagtgcgcatcatgaacaccaaatctttatttgaaaacgacttgaacctgcatatttttaggtggcttctctagataaaaaactaatatatgttctcggtaaaatttgaacgattggccacctaagtattttttgtaacttgctctctttgtcgttatcaagcgacacttataccttttttgagcttgtttgtcgatgagtgtgatggttttccgtgttcctcttagaaatatcattgatatctcatttgagaagtgctagatacaaaacaaattgcagtgttaattagattttatatatatgtacatttctaaaacatttaccaaagcattataaagatttactgtaggaaaatagcatgttttattttgctcaagagattaggaaaacaaccttacaattaacatggtactaattggaaccaacgaaggaaccaacaatgtgaaattaacgttacataatagttaggtttataaaagagattgtaagtttcatagactaaccaaaaagagatttttgccaatacttacattagacaaaatgaaaagaacaaagtacatcccaaagtcaagatagtttacaactacagtccaaagtgatacgtcaaaatagtagaagttcaaa

SEQ ID NO: 32111 - DNA, 658 bp, Medicago truncatula
  Intron number 1 from transcript Medtr4g136130.1 (locus Med tr4g136130) derived from phytozome v7.0 (chr-ID MtChr4; po s 33181286 to 33181943 reverse strand)
tgaacagaatacccttatctttaattttgcttttggttgttttgctagacataatattccaaacgtggatgctaaattgattcctgaaacttgaaaatgagttctttcctggaattttgcttttatcttcaattctgttttggttgtttaactctgtgatttaaatcttaaaagaacaacacatttcaaatatttctcaaatgccttttattgttaacttgaatattttgatgatttgctgctaatttttgatagttaagtgaaattaaaagcacgacaaatacaaaacatcccacatcatacaattattaagcaagtgggtactagagagttcggaggagttgatgccctacgacactgtgtacatgtgattgttataattggcattcacactagagagttcggaggagttgatgccctacgacactgtgtacatatgattgttataattggcattcacactagagagttcggaggagttgatgccctacgacactgtgtacatatgattgttataattggcattcactaatttaagtttggctttgatttaacataactgtttaaattttgatttggatttggtttgtgaggagttgagttaaattgtgttaattgaaatgttttagaatatatttgcttcatattttcaggtttc

SEQ ID NO: 32112 - DNA, 545 bp, Medicago truncatula; identical to SEQ ID NO: 30215
  Intron number 1 from transcript Medtr4g097330.1 (locus Med tr4g097330) derived from phytozome v7.0 (chr-ID MtChr4; po s 20805408 to 20805952)

SEQ ID NO: 32113 - DNA, 749 bp, Medicago truncatula
  Intron number 1 from transcript Medtr6g005290.1 (locus Med tr6g005290) derived from phytozome v7.0 (chr-ID MtChr6; po s 216653 to 217401)
cttttgtgtgattatcaacgacatcaagacttggggtatttaataatttattttatgtttattaacagttgattgatttaggctccgtttggattgagcttatgaaaattagtttatacaaataaataaacttttatatattactttataagttttcactaacaaaaattgtatcttcataaactattttttcataattgtatcttcataaaccacctttacaagtttataaataatacatagaaacttatttatttacataagttgatttgcataagctttaaaataagtcaatccaaacggacccttagtccttcaaatttgcgaaagactccatctgatcttagatataaccaaaaggtcaaatgtattttatccaaatttagatcaaatacatttgaactttcgcttatatataatacaaaagagattaattactttttcccttaaattagataaatttctatcaaattagccactttttcaaattttgatgcaatgaaatattattttattcgttttgatgagtatttactatagaaatactttgatggatgaactaaattgattgacattctttaatttgagggactaatttagtgtttcatatagttgaggaactaaattatccatcctaacattttcaagaactaaaatgtcttttttctcctatatatacatttaaacacatccatcgtattataacagtataacttttctttgatcaatttaattttcagtgttggtga

SEQ ID NO: 32114 - DNA, 320 bp, Medicago truncatula
  Intron number 3 from transcript Medtr4g141140.1 (locus Med tr4g141140) derived from phytozome v7.0 (chr-ID MtChr4; po s 34786837 to 34787156 reverse strand)
tccaggtctgctttgctctctattttgagtgactggatacgattgctgccttttctctacagttttgtcttattgattttcgttcaattttattcctgtctgatactgattctttttaaaatattttttgtttttatgtcatgttaggacagcttcattactgaccttttcttctctctttttgttgctttataaatatcttaatctatcatgtagtttgcatgctactgcagatacattgcatgtatatgctatccaagttatgtagttttctttatattacagggtcctcttggttgtcaatcattttcagcgttccc

SEQ ID NO: 32115 - DNA, 589 bp, Medicago truncatula
  Intron number 2 from transcript Medtr4g118230.1 (locus Med tr4g118230) derived from phytozome v7.0 (chr-ID MtChr4; po s 27405304 to 27405892)
gctccagagccactggcaagaggataagaccaagagtttgtaacgctctaatcgttattttattatttttgattatgtggagtcttatatatgatttttggtgatttatgtggtgtgtttattttattatatagtttattttaataataattagaagaagtgagaattagtattattttggaatgtggggagttaagtaatatataatagaattaagggggagtaattgaaattaagggagttacattttgggagttaaagaaaaggaaaaccagagaaaacagttttacgtaaaaaacaagacttttgggagaaaagggagagaagagcaagtagagccaaggatctttttctgtgcattttcttctgcaaaactaaggtaagggtgaggtttaccgcaattgtataggttctgaattctgattttgtttttaacaggtttatgtgagaattgggagaagttaggttttgttaaattaatgggttttgagagtagggattgtgtttttgatgttagaaatgggttctgagtgcatataacctttcattgcatatctgtaaactgatttggggagtgaattggaggaaa

SEQ ID NO: 32116 - DNA, 961 bp, Medicago truncatula
  Intron number 1 from transcript Medtr6g015150.1 (locus Med tr6g015150) derived from phytozome v7.0 (chr-ID MtChr6; po s 3738457 to 3739417)
ctctctaccaaaccaaaagaacactactgtgacaggtttgtacaatacattgccgtcaattttttttgtagatatttattttttcgtacatttgttttattttatagatatatgcttctaattagtaatattgatttgacaagaaacttgccaatttgtttgtgacctaataaccaaaagaaaaagaaaaaacgaagaagcaacgcatgtaccaatttagtttgtgatgatgggttaaagttaacgtgataaagagaaaaacatcacgaaacttagatttattgttctgatgcattttccaaaggccaaatatgaaacctgtcgttttatgtcttctcttgcgggtaaagcaaagtaaactcaaccaacaatcataccaaatagaatagccgtgtgggttagggttgtttatcgccgctcgtgggtttgggtcgtttatggccgctcgtgtaagtcacgaggcatgtgttgcgttaaagtttgagttcggctagtgccctaaaagctaaaccctaaatgtaaatattttataagtgctctttgagcccttggatctttccagctttggactaaagcaccaccccaccctagattttctctatcaaaaaattgctaatattcaatttcactagtttctaatcacttttattttaaagaggttctaattactttcttctcgaaaaccctccttcccaattttattttcattccttcctattctattctatgcctaggtaaggataataataacattaaggatatgctatattatttctttgtgagtacattatgatgtaatatgattattgttttaaagccttggatgtatgatctatccatgtcctcagttttttctttttcctgttttgataaaaaaaaaaaaaagtaatttgataagattagatttgaattcatacattttgcagagcttttacttgaagctacatcacctgagggattc

SEQ ID NO: 32117 - DNA, 663 bp, Medicago truncatula
  Intron number 1 from transcript Medtr5g015050.1 (locus Med tr5g015050) derived from phytozome v7.0 (chr-ID MtChr5; po s 4937816 to 4938478)
tgcgattccgatcacaggtgaattctcaaaccttcaattccgtattcgatttcatcttcgattttgtatttgtttttcatctttgatttcgtatttgatttcatctatgattttttattcgatttcatcttcaatttcatatttgaattcatcttttcatattcaattccatcttccatttcatatttgatttgatctttgattatgtatttgttttcatttttggtttcacatctccattagctatctttgctgaaggtattcccattgttctaatgccttgctttttttttttctttcacttttgtttttcacgttgtaaaaatggttgagatgaagtgtgagttttgtgttgtgttggttattgttttcattttgcttttgttttgattcgtggtagaatgcttgttttgtgttcgataaaatgcttcaactaaactttatgacacagttcttgttttgtgtttgataaaatgcctcaatcaacctttatggtacaatgcttgatttttgtttgataaaatgcttgaaccaaattttatttacttctcaaaaatctgtaatgtgattctccagcatctatgctctttaaatgtgtttcaattctgcaaaacgaacagaattatttgttcggaatgtgttaatatttatctcagagtgggg

SEQ ID NO: 32118 - DNA, 354 bp, Medicago truncatula
  Intron number 1 from transcript Medtr4g125700.1 (locus Med tr4g125700) derived from phytozome v7.0 (chr-ID MtChr4; po s 29697705 to 29698058 reverse strand)
ctgctaaatattggcatcagctaatcaaactttaggtatattaatctttttgagtaaagtcatattcttattcacatgctgttaattgttataataatgagaagcactttactgctttattctttccctggttggttttgagtatgatatgtgttttgcatctgtgttctctgttcatgttattatcttccaaatatagagagaaaaataaggttactgtaaaaataggccatgaaaaaattagtgtttttttttatgtttaagtttctgtgcaatatatgtatcctttctgagatgaatggttaatttctttacttatttgtttagcagggtgattgttaagaaattgcaacc

SEQ ID NO: 32119 - DNA, 663 bp, Medicago truncatula
  Intron number 1 from transcript Medtr5g085670.1 (locus Med tr5g085670) derived from phytozome v7.0 (chr-ID MtChr5; po s 32751468 to 32752130 reverse strand)
ctgacaaggtttatgtcgttttcagttttgaacaattctcttcaatttttttcttttatttaatgaattttatgtcttttcgtgatgaagggtttgttgttaaggctaagcttagttaaaaagtctaatcatttaaagctaagtggcatcttttaattagaattgagtcttcttcaatcatgcatgtacatacttcaacactactactctctacaatttatttaagtcggtaactgttttgattaagatacttgagttgagtttatgaaactccaagttgggtacagtgcttcttccactaataatacaccttaagctaaagctgtgccgtgtatatctcgaattgataaactttcatcattttggtgggccaattgctctcaaaacctacgataattattttaaaaaataacatagcttcatctactcataagctttcttttatcgatacatcttaattgaggtctttattaggtccatacttttattgtgtttatccatttgattttttcagtgttaatttactgaaattaaactcatacataactgtgagattctgagttcaaactcgagttacgatgtccgatcttacaatttcgacatttattagttgtgcttgaatttttagacactcttgatacgaaagaaacctcccggccaagc

SEQ ID NO: 32120 - DNA, 967 bp, Medicago truncatula
  Intron number 1 from transcript Medtr5g080850.1 (locus Med tr5g080850) derived from phytozome v7.0 (chr-ID MtChr5; po s 30296730 to 30297696)
aatacacacattcctagcattgtcaagtatgcaatgaaataattccaaatcatattgttgtttcaaaatgcctagacactgctctggtttagaacttaatgtttgaataaaataaaaaatggtttgtgtgaaggagtggaatataaaagtgataaattttatagccttgcacaatgtaatcttttgttagaaatttgtctatgatgtttgtacctaaatttgttaagaactttgttgttttgggtgcaagaacggtggttaactcgtgttgtttgtaagatgtggatcattgaagtagtaatgttgcagtcttgactgcaatcgttagtgagaattttagtcttataactttatttttgtaaccaaacttgtagtaagatccaaggaaagtaatatatattttttttttctgtgattgcgatcattatggacgctacaacgcgcattgaggtgtgaaataatttaacatatactcatgttaagaacatttcagtttgatctacatagagtgttgagagtggcttgagagacttagctaggatttggagcttctcttaaaattgcttttggaaggctcaattgatttgagcaaatatagccaaacatgttgcaaaatgcagaaatcacgttagaagcctggaaacgtgggtttagaggttccaaacggccaaccaaacaggcagttaaaggtcaaacctttcttcaaatctcaagtagataagctttgggagtctaaaatttaatatttttttctttctcaaaagacttcaacgaacggctaacatggacgaaatttatggaattcaaaggttcatcaaattctatttcgtttcttttaatttttgtagcacactttgtacatagtttatatgtatgttgttgacaaaaccatggttcatgatcttaatctaacattctttgtctgatgtgatttgaactgattattacgaaattagagcaaatttgc

SEQ ID NO: 32121 - DNA, 910 bp, Medicago truncatula
  Intron number 1 from transcript Medtr6g018080.1 (locus Med tr6g018080) derived from phytozome v7.0 (chr-ID MtChr6; po s 4517571 to 4518480)
atttgtttaagcttaacgagaaggagaagaagtgggtgaaattaacgagtttaggggatagggttttgttcttggggttggggttggtatattcgttttctgtttctgcttcagatttgtgtgtttccaaagggaattgtatcatctttgaatctatgtcttccgaacgtgagttatatgttttggacttggatgatggtcagctttcgcttttttatgataatcctgaatattccaacttgttctggctacctcgaacatggatccgagctcgttaccaagtatgttgatcttgcattgaaaggtttctaatgtgtgattgtgatttgttgttattattatatttctaaactagatgtaacaatgttgatgagcttgattatcttcttttattgttacttttgcagactgcatgttcagcaccaaactcctgatcacatattcatgtaaaaagatgtcttgaaaatgaagtgaaactcgggtcgctggataagcgttttcgtggattcatgaagtctcatatctaagcaagttgtgattatatttaactgtttggagggagcaaactgttatatttaaaagaactcattctctgttcgtagattacagtccagattgttataactaaattgttgattctatcacaaaccttctaagacctgaacagcgagtttttcaattctttctcctttacgatctttctatcaaattacttaaaactgtgtggcttactcaatctttctatcaacttgttctgtgtgtttgacttgccaacatgttacatgattatgacaagaaactcattcttttttgatttattggaattgagtcagtgaacattgtgaaaaatgcagttttgaataacttatctatgaccggttccgtcctttttgcgatgagagggttttag

SEQ ID NO: 32122 - DNA, 398 bp, Medicago truncatula
  Intron number 1 from transcript Medtr7g083460.1 (locus Med tr7g083460) derived from phytozome v7.0 (chr-ID MtChr7; po s 17829127 to 17829524 reverse strand)
ttgagtagtttcttttcttcttttgctgctggtaggtaagaatcaaccaatcatttttcttttcctaaataagaaacaaatgaaaataatttcatttgtatttagatccataacttattgtcaaatatatttatttattattgctgctattttgtgttcttgatttcgttttttatcctccatattatagtttaagtattaaataaatgataaatgattttggtttcaaatggttgttgacttttgattcttaattatcttttgatgtttttcatctttgattgggtaaaataaaaatcaattctacactatgtaatgaactagttcatgtttattgattttaaaagcattaattttctaattaatttcatagttttttttccttttcttctgtagtg

SEQ ID NO: 32123 - DNA, 693 bp, Medicago truncatula
  Intron number 3 from transcript Medtr6g074290.1 (locus Med tr6g074290) derived from phytozome v7.0 (chr-ID MtChr6; po s 14434619 to 14435311 reverse strand)
gagagcagacaaaaaagcagcaagacctttgtgaggtttgagaaccttccctttttccttttcaatttcttttgacacttagatttggaattccaacatgatattctaactgaaaatgatactttgtgtgacttttgttgtgtttaattccatcatttttctacgggtgatttttttgtttttagtttaatataggatgtttgacatatcacattaatgaagatggatgacaaagtttgtccataaactgcttgacaaacaaagtaatgaacgctaataatttgttctatatgttccgctaatagcatactgaactttggttgtaatactccgtgtttcatgacaaacaaagtgtgacaacaattaaagtatgggatctcttataatattaatactccgtgtatcatagtctcccatatctaaaaagtatttgatatgtttcatgatttatgaattttgaccaatttaatggtccattatgatcgaaagggatagtctactttatatgatcttacgtagggctgctacttactggcgtgttatatggtttgtgtatttcactgcatgctttaatttagatttgtgtgtacacctgaaagagctgaaccagttggcctccttttccaatctgggctattttattttattaccttttattccatattatataatgatcattctttcaggtttgag
